United States Patent Application Publication US 2025/0320254 A1 - sequence listing, part 5

SEQ ID NO: 13803 - protein, 264 aa, Homo sapiens
MELSDVTLIEGVGNEVMVVAGVVVLILALVLAWLSTYVADSGSNQLLGAIVSAGDTSVLHLGHVDHLVAGQGNPEPTELPHPSEGLPKRQAGAGSSSPEAPLRSEDSTCLPPSPGLITVRLKFLNDTEELAVARPEDTVGALKSKYFPGQESQMKLIYQGRLLQDPARTLRSLNITDNCVIHCHRSPPGSAVPGPSASLAPSATEPPSLGVNVGSLMVPVFVVLLGVVWYFRINYRQFFTAPATVSLVGVTVFFSFLVFGMYGR

SEQ ID NO: 13804 - protein, 216 aa, Homo sapiens
MKVLWAALLVTFLAGCQAKVEQAVETEPEPELRQQTEWQSGQRWELALGRFWDYLRWVQTLSEQVQEELLSSQVTQELRALMDETMKELKAYKSELEEQLTPVAEETRARLSKELQAAQARLGADMEDVCGRLVQYRGEVQAMLGQSTEELRVRLASHLRKLRKRLLRDADDLQKRLAVYQAGAREGAERGLSAIRERLGPLVEQGRVRAATVGSL

SEQ ID NO: 13805 - protein, 623 aa, Homo sapiens
MSAPSLRARAAGLGLLLCAVLGRAGRSDSGGRGELGQPSGVAAERPCPTTCRCLGDLLDCSRKRLARLPEPLPSWVARLDLSHNRLSFIKASSMSHLQSLREVKLNNNELETIPNLGPVSANITLLSLAGNRIVEILPEHLKEFQSLETLDLSSNNISELQTAFPALQLKYLYLNSNRVTSMEPGYFDNLANTLLVLKLNRNRISAIPPKMFKLPQLQHLELNRNKIKNVDGLTFQGLGALKSLKMQRNGVTKLMDGAFWGLSNMEILQLDHNNLTEITKGWLYGLLMLQELHLSQNAINRISPDAWEFCQKLSELDLTFNHLSRLDDSSFLGLSLLNTLHIGNNRVSYIADCAFRGLSSLKTLDLKNNEISWTIEDMNGAFSGLDKLRRLILQGNRIRSITKKAFTGLDALEHLDLSDNAIMSLQGNAFSQMKKLQQLHLNTSSLLCDCQLKWLPQWVAENNFQSFVNASCAHPQLLKGRSIFAVSPDGFVCDDFPKPQITVQPETQSAIKGSNLSFICSAASSSDSPMTFAWKKDNELLHDAEMENYAHLRAQGGEVMEYTTILRLREVEFASEGKYQCVISNHFGSSYSVKAKLTVNIPHLTLPFPTFHSTKLRFLVICI

SEQ ID NO: 13806 - protein, 222 aa, Homo sapiens
MPKTMHFLFRFIVFFYLWGLFTAQRQKKEESTEEVKIEVLHRPENCSKTSKKGDLLNAHYDGYLAKDGSKFYCSRTQNEGHPKWFVLGVGQVIKGLDIAMTDMCPGEKRKVVIPPSFAYGKEGYAEGKIPPDATLIFEIELYAVTKGPRSIETFKQIDMDNDRQLSKAEINLYLQREFEKDEKPRDKSYQDAVLEDIFKKNDHDGDGFISPKEYNVYQHDEL

SEQ ID NO: 13807 - protein, 435 aa, Homo sapiens
MAQAVWSRLGRILWLACLLPWAPAGVAAGLYELNLTTDSPATTGAVVTISASLVAKDNGSLALPADAHLYRFHWIHTPLVLTGKMEKGLSSTIRVVGHVPGEFPVSVWVTAADCWMCQPVARGFVVLPITEFLVGDLVVTQNTSLPWPSSYLTKTVLKVSFLLHDPSNFLKTALFLYSWDFGDGTQMVTEDSVVYYNYSIIGTFTVKLKVVAEWEEVEPDATRAVKQKTGDFSASLKLQETLRGIQVLGPTLIQTFQKMTVTLNFLGSPPLTVCWRLKPECLPLEEGECHPVSVASTAYNLTHTFRDPGDYCFSIRAENIISKTHQYHKIQVWPSRIQPAVFAFPCATLITVMLAFIMYMTLRNATQQKDMVEVADFDFSPMSDKNPEPPSGVRCCCQMCCGPFLLETPSEYLEIVRENHGLLPPLYKSVKTYTV

SEQ ID NO: 13808 - protein, 274 aa, Homo sapiens
MRFTFTSRCLALFLLLNHPTPILPAFSNQTYPTIEPKPFLYVVGRKKMMDAQYKCYDRMQQLPAYQGEGPYCNRTWDGWLCWDDTPAGVLSYQFCPDYFPDFDPSEKVTKYCDEKGVWFKHPENNRTWSNYTMCNAFTPEKLKNAYVLYYLAIVGHSLSIFTLVISLGIFVFFRSLGCQRVTLHKNMFLTYILNSMIIIIHLVEVVPNGELVRRDPVSCKILHFFHQYMMACNYFWMLCEGIYLHTLIVVAVFTEKQRLRWYYLLGWAPAFHRD

SEQ ID NO: 13809 - protein, 969 aa, Homo sapiens
MWAMESGHLLWALLFMQSLWPQLTDGATRVYYLGIRDVQWNYAPKGRNVITNQPLDSDIVASSFLKSDKNRIGGTYKKTIYKEYKDDSYTDEVAQPAWLGFLGPVLQAEVGDVILIHLKNFATRPYTIHPHGVFYEKDSEGSLYPDGSSGPLKADDSVPPGGSHIYNWTIPEGHAPTDADPACLTWIYHSHVDAPRDIATGLIGPLITCKRGALDGNSPPQRQDVDHDFFLLFSVVDENLSWHLNENIATYCSDPASVDKEDETFQESNRMHAINGFVFGNLPELNMCAQKRVAWHLFGMGNEIDVHTAFFHGQMLTTRGHHTDVANIFPATFVTAEMVPWEPGTWLISCQVNSHFRDGMQALYKVKSCSMAPPVDLLTGKVRQYFIEAHEIQWDYGPMGHDGSTGKNLREPGSISDKFFQKSSSRIGGTYWKVRYEAFQDETFQEKMHLEEDRHLGILGPVIRAEVGDTIQVVFYNRASQPFSMQPHGVFYEKDYEGTVYNDGTFEIYCQAGSHREAGMRAIYNVSQCPGHQATPRQRYQAARIYYIMAEEVEWDYCPDRSWEREWHNQSEKDSYGYIFLSNKDGLLGSRYKKAVFREYTDGTFRIPRPRTGPEEHLGILGPLIKGEVGDILTVVFKNNASRPYSVHAHGVLESTTVWPLAAEPGEVVTYQWNIPERSGPGPNDSACVSWIYYSAVDPIKDMYSGLVGPLAICQKGILEPHGGRSDMDREFALLFLIFDENKSWYLEENVATHGSQDPGSINLQDETFLESNKMHAINGKLYANLRGLTMYQGERVAWYMLAMGQDVDLHTIHFHAESFLYRNGENYRADVVDLFPGTFEVVEMVASNPGTWLMHCHVTDHVHAGMETLFTVFSRTEHLSPLTVITKETEKAVPPRDIEEGNVKMLGMQIPIKNVEMLASVLVAISVTLLLVVLALGGVVWYQHRQRKLRRNRRSILDDSFKLLSFKQ

SEQ ID NO: 13810 - protein, 254 aa, Homo sapiens
MGLSTVPDLLLPLVLLELLVGIYPSGVIGLVPHLGDREKRDSVCPQGKYIHPQNNSICCTKCHKGTYLYNDCPGPGQDTDCRECESGSFTASENHLRHCLSCSKCRKEMGQVEISSCTVDRDTVCGCRKNQYRHYWSENLFQCFNCSLCLNGTVHLSCERSSPEAKPSPHPRGWPLPHAVALPFLPPPVFCGSDNQLLSGRPHPVPRHFLCPVGWGCRRFSFSCAALLPTGQEKQNTVCTCHAGFFLRENECVS

SEQ ID NO: 13811 - protein, 135 aa, Homo sapiens
RMSRGVNPSLVSWLTTMMGLRLQVVLEHMPVGPDAILRYVRRVGDPPQPLPEEPMEVQGAERASPEPQEWVPIIQQDIQSQRKVKPQPPLSDAYLSGMPAKRRKLRSDIQKRLQEDPNYSPQRFPNAQRAFADDP

SEQ ID NO: 13812 - protein, 135 aa, Homo sapiens
MKVVGNYRVNTANSSTDTSGEHLTCLRSQLFVAYRNGRVDEAVSLGFLDCWIGGDLTNFKGCYLTNQLPIQIFTAIFDMNTDVIILSQFMYYRLKNQKKKMIFQPQLFKDSITREKVRLSLWGVLCPVYIPYSFR

SEQ ID NO: 13813 - protein, 939 aa, Homo sapiens
MPAVSKGDGMRGLAVFISDIRNCKSKEAEIKRINKELANIRSKFKGDKALDGYSKKKYVCKLLFIFLLGHDIDFGHMEAVNLLSSNRYTEKQIGYLFISVLVNSNSELIRLINNAIKNDLASRNPTFMGLALHCIASVGSREMAEAFAGEIPKVLVAGDTMDSVKQSAALCLLRLYRTSPDLVPMGDWTSRVVHLLNDQHLGVVTAATSLITTLAQKNPEEFKTSVSLAVSRLSRIVTSASTDLQDYTYYFVPAPWLSVKLLRLLQCYPPPDPAVRGRLTECLETILNKAQEPPKSKKVQHSNAKNAVLFEAISLIIHHDSEPNLLVRACNQLGQFLQHRETNLRYLALESMCTLASSEFSHEAVKTHIETVINALKTERDVSVRQRAVDLLYAMCDRSNAPQIVAEMLSYLETADYSIREEIVLKVAILAEKYAVDYTWYVDTILNLIRIAGDYVSEEVWYRVIQIVINRDDVQGYAAKTVFEALQAPACHENLVKVGGYILGEFGNLIAGDPRSSPLIQFHLLHSKFHLCSVPTRALLLSTYIKFVNLFPEVKPTIQDVLRSDSQLRNADVELQQRAVEYLRLSTVASTDILATVLEEMPPFPERESSILAKLKKKKGPSTVTDLEDTKRDRSVDVNGGPEPAPASTSAVSTPSPSADLLGLGAAPPAPAGPPPSSGGSGLLVDVFSDSASVVAPLAPGSEDNFARFVCKNNGVLFENQLLQIGLKSEFRQNLGRMFIFYGNKTSTQFLNFTPTLICSDDLQPNLNLQTKPVDPTVEGGAQVQQVVNIECVSDFTEAPVLNIQFRYGGTFQNVSVQLPITLNKFFQPTEMASQDFFQRWKQLSNPQQEVQNIFKAKHPMDTEVTKAKIIGFGSALLEEVDPNPANFVGAGIIHTKTTQIGCLLRLEPNLQAQMYRLTLRTSKEAVSQRLCELLSAQF

SEQ ID NO: 13814 - protein, 853 aa, Homo sapiens
MPVRKQDTQRALHLLEEYRSKLSQTEDRQLRSSIERVINIFQSNLFQALIDIQEFYEVTLLDNPKCIDRSKPSEPIQPVNTWEISSLPSSTVTSETLPSSLSPSVEKYRYQDEDTPPQEHISPQITNEVIGPELVHVSEKNLSEIENVHGFVSHSHISPIKVNGTDADYEYEEITLERGNSGLGFSIAGGTDNPHIGDDSSIFITKIITGGAAAQDGRLRVNDCILRVNEVDVRDVTHSKAVEALKEAGSIVRLYVKRRKPVSEKIMEIKLIKGPKGLGFSIAGGVGNQHIPGDNSIYVTKIIEGGAAHKDGKLQIGDKLLAVNNVCLEEVTHEEAVTALKNTSDFVYLKVAKPTSMYMNDGYAPPDITNSSSQPVDNHVSPSSFLGQTPASPARYSPVSKAVLGDDEITREPRKVVLHRGSTGLGFNIVGGEDGEGIFISFILAGGPADLSGELRKGDRIISVNSVDLRAASHEQAAAALKNAGQAVTIVAQYRPEEYSRFEAKIHDLREQMMNSSISSGSGSLRTSQKRSLYVRALFDYDKTKDSGLPSQGLNFKFGDILHVINASDDEWWQARQVTPDGESDEVGVIPSKRRVEKKERARLKTVKFNSKTRDKGEIPDDMGSKGLKHVTSNASDSESSYRGQEEYVLSYEPVNQQEVNYTRPVIILGPMKDRINDDLISEFPDKFGSCVPHTTRPKRDYEVDGRDYHFVTSREQMEKDIQEHKFIEAGQYNNHLYGTSVQSVREVAEKGKHCILDVSGNAIKRLQIAQLYPISIFIKPKSMENIMEMNKRLTEEQARKTFERAMKLEQEFTEHFTAIVQGDTLEDIYNQVKQIIEEQSGSYIWVPAKEKL

SEQ ID NO: 13815 - protein, 781 aa, Homo sapiens
MSEFLLALLTLSGLLPIARVLTVGADRDQQLCDPGEFLCHDHVTCVSQSWLCDGDPDCPDDSDESLDTSRTCQVDQFSCGNGRCIPRAWLCDREDDCGDQTDEMASCEFPTCEPLTQFVCKSGRCISSKWHCDSDDDCGDGSDEVGCVHSCFDNQFRCSSGRCIPGHWACDGDNDCGDFSDEAQINCTKEEIHSPAGCNGNEFQCHPDGNCVPDLWRCDGEKDCEDGSDEKGCNGTIRLCDHKTKFSCWSTGRCINKAWVCDGDIDCEDQSDEDDCDSFLCGPPKHPCANDTSVCLQPEKLCNGKKDCPDGSDEGYLCDECSLNNGGCSNHCSVVPGRGIVCSCPEGLQLNKDNKTCEIVDYCSNHLKCSQVCEQHKHTVKCSCYEGWKLDVDGESCTSVDPFEAFIIFSIRHEIRRIDLHKRDYSLLVPGLRNTIALDFHFNQSLLYWTDVVEDRIYRGKLSESGGVSAIEVVVEHGLATPEGLTVDWIAGNIYWIDSNLDQIEVAKLDGSLRTTLIAGAMEHPRAIALDPRYGILFWTDWDANFPRIESASMSGAGRKTIYKDMKTGAWPNGLTVDHFEKRIVWTDARSDAIYSALYDGTNMIEIIRGHEYLSHPFAVSLYGSEVYWTDWRTNTLSKANKWTGQNVSVIQKTSAQPFDLQIYHPSRQPQAPNPCAANDGKGPCSHMCLINHNRSAACACPHLMKLSSDKKTCYEMKKFLLYARRSEIRGVDIDNPYFNFITAFTVPDIDDVTVIDFDASEERLYWTDIKTQTIKRAFIN

SEQ ID NO: 13816 - protein, 110 aa, Homo sapiens
MQISSEKEEDDNEKRQDPGDNWEEGGGGGGGMEKSSGPWNKTAPVQAPPAPVIVTETPEPAMTSGVYRPPGARLTTTRKTPQGPPEIYSDTQFPSLQSTAKHVESRKYLK

SEQ ID NO: 13817 - protein, 245 aa, Homo sapiens
MGKLVALVLLGVGLSLVGEMFLAFRERVNASREVEPVEPENCHLIEELESGSEDIDILPSGLAFISSGLKYPGMPNFAPDEPGKIFLMDLNEQNPRAQALEISGGFDKELFNPHGISIFIDKDNTVYLYVVNHPHMKSTVEIFKFEEQQRSLVYLKTIKHELLKSVNDIVVLGPEQFYATRDHYFTNSLLSFFEMILDLRWTYVLFYSPREVKVVAKGFCSANGITVSADQKYFASRMFCLRSPG

SEQ ID NO: 13818 - protein, 52 aa, Homo sapiens
MVGAMWKVIVSLVLLMPGPCDGLFRSLYRSVSMPPKGDSGQPLFLTPYIEAG

SEQ ID NO: 13819 - protein, 114 aa, Homo sapiens
MSPSQLIGFLLLWVPASRGEIVLTQSPDFQSVTPKEKVTITCRASQSIGSSLHWYQQKPDQSPKLLIKYASQSISGVPSRFSGSGSGTDFTLTINSLEAEDAAAYYCHQSSSLP

SEQ ID NO: 13820 - protein, 262 aa, Homo sapiens
MAPEPAPGRTMVPLVPALVMLGLVAGAHGDSKPVFIKVPEDQTGLSGGVASFVCQATGEPKPRITWMKKGKKVSSQRFEVIEFDDGAGSVLRIQPLRVQRDEAIYECTATNSLGEINTSAKLSVLEEEQLPPGFPSIDMGPQLKVVEKARTATMLCAAGGNPDPEISWFKDFLPVDPATSNGRIKQLRSGALQIESSEESDQGKYECVATNSAGTRYSAPANLYVRGLAAWARSPMGIWSHPIRLLGVCACVCAHTGTLICV

SEQ ID NO: 13821 - protein, 186 aa, Homo sapiens
MRPQILLLLALLTLGLAAQHQDKVPCKMVDKKVSCQVLGLLQVPSVLPPDTETLDLSGNQLRSILASPLGFYTALRHLDLSTNEISFLQPGAFQALTHLEHLSLAHNRLAMATALSAGGLGPLPRVTSLDLSGNSLYSGLLERLLGEAPSLHTLSLAENSLTRLTRHTFRDMPALEQLDLHSNVLM

SEQ ID NO: 13822 - protein, 253 aa, Homo sapiens
MAAVDIRDNLLGISWVDSSWIPILNSGSVLDYFSERSNPFYDRTCNNEVVKMQRLTLEHLNQMVGIEYILLHAQEPILFIIRKQQRQSPAQVIPLADYYIIAGVIYQAPDLGSVINSRVSLFSFYKLTAVHGIQSAFDEAMSYCRYHPSKGYWWHFKDHEEQDKVRPKAKRKEEPSSIFQRQRVDALLLDLRQKFPPKFVQLKPGEKPVPVDQTKKEAEPIPETVKPEEKETTKNVQQTVSAKGPPEKRMRLQ

SEQ ID NO: 13823 - protein, 75 aa, Homo sapiens
MRMCTPIRGLLMALAVMFGTAMAFAPIPRITWEHREVHLVQFHEPDIYNYSALLLSEDKDTLYIGAREAVFAVNA

SEQ ID NO: 13824 - protein, 624 aa, Homo sapiens
MSAEVRLRRLQQLVLDPGFLGLEPLLDLLLGVHQELGASELAQDKYVADFLQWAEPIVVRLKEVRLQRDDFEILKVIGRGAFSEVAVVKMKQTGQVYAMKIMNKWDMLKRGEVSCFREERDVLVNGDRRWITQLHFAFQDENYLYLVMEYYVGGDLLTLLSKFGERIPAEMARFYLAEIVMAIDSVHRLGYVHRDIKPDNILLDRCGHIRLADFGSCLKLRADGTVRSLVAVGTPDYLSPEILQAVGGGPGTGSYGPECDWWALGVFAYEMFYGQTPFYADSTAETYGKIVHYKEHLSLPLVDEGVPEEARDFIQRLLCPPETRLGRGGAGDFRTHPFFFGLDWDGLRDSVPPFTPDFEGATDTCNFDLVEDGLTAMETLSDIREGAPLGVHLPFVGYSYSCMALRDSEVPGPTPMELEAEQLLEPHVQAPSLEPSVSPQDETAEVAVPAAVPAAEAEAEVTLRELQEALEEEVLTRQSLSREMEAIRTDNQNFASQLREAEARNRDLEAHVRQLQERMELLQAEGATAVTGVPSPRATDPPSHLDGPPAVAVGQCPLVGPGPMHRRHLLLPARVPRPGLSEALSLLLFAVVLSRAAALGCIGLVAHAGQLTAVWRRPGAARAP

SEQ ID NO: 13825 - protein, 451 aa, Homo sapiens
MVELFIFLFLLGETPFKVVVKSLSPKELVRIHVPKPLDRNDGTFLMRYRMYETVDEGLKIEVLYGDEHVAQSPYILKGPVYHEYCECPEDPQAWQKTLSCPTKEPQIAKDFASFPSINLQQMLKEVPKRFGDERGAIVHYTILNNHVYRRSLGKYTDFKMFSDEILLSLTRKVLLPDLEFYVNLGDWPLEHRKVNGTPSPIPIISWCGSLDSRDVVLPTYDITHSMLEAMRGVTNDLLSIQGNTGPSWINKTERAFFRGRDSREERLQLVQLSKENPQLLDAGITGYFFFQEKEKELGKAKLMGFFDFFKYKYQVNVDGTVAAYRYPYLMLGDSLVLKQDSPYYEHFYMALEPWKHYVPIKRNLSDLLEKVKWAKENDEEAKKIAKEGQLMARDLLQPHRLYCYYYQVLQKYAERQSSKPEVRDGMELVPQPEDSTAICQCHRKKPSREEL

SEQ ID NO: 13826 - protein, 1070 aa, Homo sapiens
MIKRVQNLLGHYLIHGFRVRPEPNGDLDLEAMVAVFGSKGLRVVKISWGQGHFWELWRSGLWNMSDWIWDARWLEGNIALALGHNSVVLYDPVVGCILQEVPCTDRCTLSSACLIGDAWKELTIVAGAVSNQLLVWYPATALADNKPVAPDRRISGHVGIIFSMSYLESKGLLATASEDRSVRIWKVGDLRVPGGRVQNIGHCFGHSARVWQVKLLENYLISAGEDCVCLVWSHEGEILQAFRGHQGRGIRAIAAHERQAWVITGGDDSGIRLWHLVGRGYRGLGVSALCFKSRSRPGTLKAVTLAGSWRLLAVTDTGALYLYDVEVKCWEQLLEDKHFQSYCLLEAAPGPEGFGLCAMANGEGRVKVVPINTPTAAVDQTLFPGKVHSLSWALRGYEELLLLASGPGGVVACLEISAAPSGKAIFVKERCRYLLPPSKQRWHTCSAFLPPGDFLVCGDRRGSVLLFPSRPGLLKDPGVGGKARAGAGAPVVGSGSSGGGNAFTGLGPVSTLPSLHGKQGVTSVTCHGGYVYTTGRDGAYYQLFVRDGQLQPVLRQKSCRGMNWLAGLRIVPDGSMVILGFHANEFVVWNPRSHEKLHIVNCGGGHRSWAFSDTEAAMAFAYLKDGDVMLYRALGGCTRPHVILREGLHGREITCVKRVGTITLGPEYGVPSFMQPDDLEPGSEGPDLTDIVITCSEDTTVCVLALPTTTGSAHALTAVCNHISSVRAVAVWGIGTPGGPQDPQPGLTAHVVSAGGRAEMHCFSIMVTPDPSTPSRLACHVMHLSSHRLDEYWDRQRNRHRMVKVDPETRYMSLAVCELDQPGLGPLVAAACSDGAVRLFLLQDSGRILQLLAETFHHKRCVLKVHSFTHEAPNQRRRLLLCSAATDGSLAFWDLTTMLDHDSTVLEPPVDPGLPYRLGTPSLTLQAHSCGINSLHTLPTREGHHLVASGSEDGSLHVFVLAVEMLQLEEAVGEAGLVPQLRVLEEYSVPCAHAAHVTGLKILSPSIMVSASIDQRLTFWRLGHGEPTFMNSTVFHVPDVADMDCWPVSPEFGHRCALGGQGLEVYNWYD

SEQ ID NO: 13827 - protein, 682 aa, Homo sapiens
MDFSRLHMYSPPQCVPENTGYTYALSSSYSSDALDFETEHKLDPVFDSPRMSRRSLRLATTACTLGDGEAVGADSGTSSAVSLKNRAARTTKQRRSTNKSAFSINHVSRQVTSSGVSHGGTVSLQDAVTRRPPVLDESWIREQTTVDHFWGKAASGVFWWLGIGWYQFVTLISWLNVFLLTRCLRNICKFLVLLIPLFLLLGLSLRGQGNFFSFLPVLNWASMHRTQRVDDPQDVFKPTTSRLKQPLQGDSEAFPWHWMSGVEQQVASLSGQCHHHGENLRELTTLLQKLQARVDQMEGGAAGPSASVRDAVGQPPRETDFMAFHQEHEVRMSHLEDILGKLREKSEAIQKELEQTKQKTISAVGEQLLPTVEHLQLELDQLKSELSSWRHVKTGCETVDAVQERVDVQVREMVKLLFSEDQQGGSLEQLLQRFSSQFVSKGDLQTMLRDLQLQILRNVTHHVSVTKQLPTSEAVVSAVSEAGASGITEAQARAIVNSALKLYSQDKTGMVDFALESGGGSILSTRCSETYETKTALMSLFGIPLWYFSQSPRVVIQPDIYPGNCWAFKGSQGYLVVRLSMMIHPAAFTLEHIPKTLSPTGNISSAPKDFAVYGLENEYQEEGQLLGQFTYDQDGESLQMFQALKRPDDTAFQIVELRIFSNWGHPEYTCLYRFRVHGEPVK

SEQ ID NO: 13828 - protein, 1029 aa, Homo sapiens
MLFRARGPVRGRGWGRPAEAPRRGRSPPWSPAWICCWALAGCQAAWAGDLPSSSSRPLPPCQEKDYHFEYTECDSSGSRWRVAIPNSAVDCSGLPDPVRGKECTFSCASGEYLEMKNQVCSKCGEGTYSLGSGIKFDEWDELPAGFSNIATFMDTVVGPSDSRPDGCNNSSWIPRGNYIESNRDDCTVSLIYAVHLKKSGYVFFEYQYVDNNIFFEFFIQNDQCQEMDTTTDKWVKLTDNGEWGSHSVMLKSGTNILYWRTTGILMGSKAVKPVLVKNITIEGVAYTSECFPCKPGTFSNKPGSFNCQVCPRNTYSEKGAKECIRCKDDSQFSEEGSSECTERPPCTTKDYFQIHTPCDEEGKTQIMYKWIEPKICREDLTDAIRLPPSGEKKDCPPCNPGFYNNGSSSCHPCPPGTFSDGTKECRPCPAGTEPALGFEYKWWNVLPGNMKTSCFNVGNSKCDGMNGWEVAGDHIQSGAGGSDNDYLILNLHIPGFKPPTSMTGATGSELGRITFVFETLCSADCVLYFMVDINRKSTNVVESWGGTKEKQAYTHIIFKNATFTFTWAFQRTNQGQDNRRFINDMVKIYSITATNAVDGVASSCRACALGSEQSGSSCVPCPPGHYIEKETNQCKECPPDTYLSIHQVYGKEACIPCGPGSKNNQDHSVCYSDCFFYHEKENQSLHYDFSNLSSVGSLMNGPSFTSKGTKYFHFFNISLCGHEGKKMALCTNNITDFTVKEIVAGSDDYTNLVGAFVCQSTIIPSESKGFRAALSSQSIILADTFIGVTVETTLKNINIKEDMFPVPTSQIPDVHFFYKSSTATTSCINGRSTAVKMRCNPTKSGAGVISVPSKCPAGTCDGCTFYFLWESAEACPLCTEHDFHEIEGACKRGFQETLYVWNEPKWCIKGISLPEKKLATCETVDFWLKVGAGVGAFTAVLLVALTCYFWKKNQKLEYKYSKLVMTTNSKECELPAADSCAIMEGEDNEEEVVYSNKQSLLGKLKSLATKEKEDHFESVQLKTSRSPNI

SEQ ID NO: 13829 - protein, 233 aa, Homo sapiens
MVLLTAVLLLLAAYAGPAQSLGSFVHCEPCDEKALSMCPPSPLGCELVKEPGCGCCMTCALAEGQSCGVYTERCAQGLRCLPRQDEEKPLHALLHGRGVCLNEKSYREQVKIGCAPGGQRHICFSLYYSPHPKLPSPGLWPCAPWPTGADPPAPSPAERDSREHEEPTTSEMAEETYSPKIFRPKHTRISELKAEAVKKDRRKKLTQSKFVGGAENTAHPRIISAPEMRQESE

SEQ ID NO: 13830 - protein, 600 aa, Homo sapiens
MPEIRVTPLGAGQDVGRSCILVSIAGKNVMLDCGMHMGFNDDRRFPDFSYITQNGRLTDFLDCVIISHFHLDHCGALPYFSEMVGYDGPIYMTHPTQAICPILLEDYRKIAVDKKGEANFFTSQMIKDCMKKVVAVHLHQTVQVDDELEIKAYYAGHVLGAAMFQIKVGSESVVYTGDYNMTPDRHLGAAWIDKCRPNLLITESTYATTIRDSKRCRERDFLKKVHETVERGGKVLIPVFALGRAQELCILLETFWERMNLKVPIYFSTGLTEKANHYYKLFIPWTNQKIRKTFVQRNMFEFKHIKAFDRAFADNPGPMVVFATPGMLHAGQSLQIFRKWAGNEKNMVIMPGYCVQGTVGHKILSGQRKLEMEGRQVLEVKMQVEYMSFSAHADAKGIMQLVGQAEPESVLLVHGEAKKMEFLKQKIEQELRVNCYMPANGETVTLPTSPSIPVGISLGLLKREMAQGLLPEAKKPRLLHGTLIMKDSNFRLVSSEQALKELGLAEHQLRFTCRVHLHDTRKEQETALRVYSHLKSVLKDHCVQHLPDGSVTVESVLLQAAAPSEDPGTKVLLVSWTYQDEELGSFLTSLLKKGLPQAPS

SEQ ID NO: 13831 - protein, 173 aa, Homo sapiens
MVKLFIGNLPREATEQEIRSLFEQYGKVLECDIIKNYGFVHIEDKTAAEDAIRNLHHYKLHGVNINVEASKNKSKTSTKLHVGNISPTCTNKELRAKFEEYGPVIECDIVKDYAFVHMERAEDAVEAIRGLDNTEFQGKITPVTEGYCCCNKGHTYIFKNCNLILESRKSRRC

SEQ ID NO: 13832 - protein, 401 aa, Homo sapiens
MSVSARSAAAEERSVNSSTMGESGLGKSTLINSLFLTDLYSPEYPGPSHRIKKTVQVEQSKVLIKEGGVQLLLTIVDTPGFGDAVDNSNCWQPVIDYIDSKFEDYLNAESRVNRRQMPDNRVQCCLYFIAPSGHGLKPLDIEFMKRLHEKVNIIPLIAKADTLTPEECQQFKKQIMKEIQEHKIKIYEFPETDDEEENKLVKKIKDRLPLAVVGSNTIIEVNGKRVRGRQYPWGVAEVENGEHCDFTILRNMLIRTHMQDLKDVTNNVHYENYRSRKLAAVTYNGVDNNKNKGQLTKSPLAQMEEERREHVAKMKKMEMEMEQVFEMKVKEKVQKLKDSEAELQRRHEQMKKNLEAQHKELEEKRRQFEDEKANWEAQQRILEQQNSSRTLEKNKKKGKIF

SEQ ID NO: 13833 - protein, 257 aa, Homo sapiens
MSEVPVARVWLVLLLLTVQVGVTAGAPWQCAPCSAEKLALCPPVSASCSEVTRSAGCGCCPMCALPLGAACGVATARCARGLSCRALPGEQQPLHALTRGQGACVQESDASAPHAAEAGSPESPESTEITEEELLDNFHLMAPSEEDHSILWDAISTYDGSKALHVTNIKKWKEPCRIELYRVVESLAKAQETSGEEISKFYLPNCNKNGFYHSRQTSMDGEAGLCWCVYPWNGKRIPGSPEIRGDPNCQIYFNVQN

SEQ ID NO: 13834 - protein, 362 aa, Homo sapiens
MSGGSADYNREHGGPEGMDPDGVIESNWNEIVDNFDDMNLKESLLRGIYAYGFEKPSAIQQRAIIPCIKGYDVIAQAQSGTGKTATFAISILQQLEIEFKETQALVLAPTRELAQQIQKVILALGDYMGATCHACIGGTNVRNEMQKLQAEAPHIVVGTPGRVFDMLNRRYLSPKWIKMFVLDEADEMLSRGFKDQIYEIFQKLNTSIQVVLLSATMPTDVLEVTKKFMRDPIRILVKKEELTLEGIKQFYINVEREEWKLDTLCDLYETLTITQAVIFLNTRRKVDWLTEKMHARDFTVSALHGDMDQKERDVIMREFRSGSSRVLITTDLLARGIDVQQVSLVINYDLPTNRENYIHRSR

SEQ ID NO: 13835 - protein, 153 aa, Homo sapiens
MKLWVSALLMAWFGVLSCVQAEFFTSIGHMTDLIYAEKELVQSLKEYILVEEAKLSKIKSWANKMEALTSKSAADAEGYLAHPVNAYKLVKRLNTDWPALEDLVLQDSAAGFIANLSVQRQFFPTDEDEIGAAKALMRLQDTYRLDPGTISRG

SEQ ID NO: 13836 - protein, 485 aa, Homo sapiens
MAAAVPDEAVARDVQRLLVQFQDEGGQLLGSPFDVPVDITPDRLQLVCNALLAQEDPLPLAFFVHDAEIVSSLGKTLESQAVETEKVLDIIYQPQAIFRVRAVTRCTSSLEGHSEAVISVAFSPTGKYLASGSGDTTVRFWDLSTETPHFTCKGHRHWVLSISWSPDGRKLASGCKNGQILLWDPSTGKQVGRTLAGHSKWITGLSWEPLHANPECRYVASSSKDGSVRIWDTTAGRCERILTGHTQSVTCLRWGGDGLLYSASQDRTIKVWRAHDGVLCRTLQGHGHWVNTMALSTDYALRTGAFEPAEASVNPQDLQGSLQELKERALSRYNLVRGQGPERLVSGSDDFTLFLWSPAEDKKPLTRMTGHQALINQVLFSPDSRIVASASFDKSIKLWDGRTGKYLASLRGHVAAVYQIAWSADSRLLVSGSSDSTLKVWDVKAQKLAMDLPGHADEVYAVDWSPDGQRVASGGKDKCLRIWRR

SEQ ID NO: 13837 - protein, 70 aa, Homo sapiens
MKLLVLAVLLTVAAADSGISPRAVWQFRKMIKCVIPGSDPFLEYNNYGCYCGLGGSGTPVDELDKQKQRV

SEQ ID NO: 13838 - protein, 617 aa, Homo sapiens
MSWGTELWDQFDNLEKHTQWGIDILEKYIKFVKERTEIELSYAKQLRNLSKKYQPKKNSKEEEEYKYTSCKAFISNLNEMNDYAGQHEVISENMASQIIVDLARYVQELKQERKSNFHDGRKAQQHIETCWKQLESSKRRFERDCKEADRAQQYFEKMDADINVTKADVEKARQQAQIRHQMAEDSKADYSSILQKFNHEQHEYYHTHIPNIFQKIQEMEERRIVRMGESMKTYAEVDRQVIPIIGKCLDGIVKAAESIDQKNDSQLVIEAYKSGFEPPGDIEFEDYTQPMKRTVSDNSLSNSRGEGKPDLKFGGKSKGKLWPFIKKNKLMSLLTSPHQPPPPPPASASPSAVPNGPQSPKQQKEPLSHRFNEFMTSKPKIHCFRSLKRGLSLKLGATPEDFSNLPPEQRRKKLQQKVDELNKEIQKEMDQRDAITKMKDVYLKNPQMGDPASLDHKLAEVSQNIEKLRVETQKFEAWLAEVEGRLPARSEQARRQSGLYDSQNPPTVNNCAQDRESPDGSYTEEQSQESEMKVLATDFDDEFDDEEPLPAIGTCKALYTFEGQNEGTISVVEGETLYVIEEDKGDGWTRIRRNEDEEGYVPTSYVEVCLDKNAKDS

SEQ ID NO: 13839 - protein, 96 aa, Homo sapiens
MEPLLLGRGLIVYLMFLLLKFSKAIEIPSSVQQVPTIIKQSKVQVAFPFDEYFQIECEAKGNPEPTFSWTKDGNPFYFTDHRIIPSNNSGTFRIPN

SEQ ID NO: 13840 - protein, 493 aa, Homo sapiens
MDFLLGNPFSSPVGQRIEKATDGSLQSEDWALNMEICDIINETEEGPKDALRAVKKRIVGNKNFHEVMLALTVLETCVKNCGHRFHVLVASQDFVESVLVRTILPKNNPPTIVHDKVLNLIQSWADAFRSSPDLTGVVTIYEDLRRKGLEFPMTDLDMLSPIHTPQRTVFNSETQSGQDSVGTDSSQQEDSGQHAAPLPAPPILSGDTPIAPTPEQIGKLRSELEMVSGNVRVMSEMLTELVPTQAEPADLELLQELNRTCRAMQQRVLELIPQIANEQLTEELLIVNDNLNNVFLRHERFERFRTGQTTKAPSEAEPAADLIDMGPDPAATGNLSSQLAGMNLGSSSVRAGLQSLEASGRLEDEFDMFALTRGSSLADQRKEVKYEAPQATDGLAGALDARQQSTGAIPVTQACLMEDIEQWLSTDVGNDAEEPKGVTSEGKFDKFLEERAKAADRLPNLSSPSAEGPPGPPSGPAPRKKTQEKDDDMLFAL

SEQ ID NO: 13841 - protein, 587 aa, Homo sapiens
MPLDKAMPLKHYLLLLVGCQAWGAGLAYHGCPSECTCSRASQVECTGARIVAVPTPLPWNAMSLQILNTHITELNESPFLNISALIALRIEKNELSRITPGAFRNLGSLRYLSLANNKLQVLPIGLFQGLDSLESLLLSSNQLLQIQPAHFSQCSNLKELQLHGNHLEYIPDGAFDHLVGLTKLNLGKNSLTHISPRVFQHLGNLQVLRLYENRLTDIPMGTFDGLVNLQELALQQNQIGLLSPGLFHNNHNLQRLYLSNNHISQLPPSVFMQLPQLNRLTLFGNSLKELSPGIFGPMPNLRELWLYDNHISSLPDNVFSNLRQLQVLILSRNQISFISPGAFNGLTELRELSLHTNALQDLDGNVFRMLANLQNISLQNNRLRQLPGNIFANVNGLMAIQLQNNQLENLPLGIFDHLGKLCELRLYDNPWRCDSDILPLRNWLLLNQPRLGTDTVPVCFSPANVRGQSLIIINVNVAVPSVHVPEVPSYPETPWYPDTPSYPDTTSVSSTTELTSPVEDYTDLTTIQVTDDRSVWGMTQAQSGLAIAAIVIGIVALACSLAACVGCCCCKKRSQAVLMQMKAPNEC

SEQ ID NO: 13842 - protein, 289 aa, Homo sapiens
MTPIVTVLICLRLSLGPRTHVQAGTLPKPTLWAEPGSVITQGSPVTLWCQGILETQEYRLYREKKTAPWITRIPQEIVKKGQFPIPSITWEHTGRYRCFYGSHTAGWSEPSDPLELVVTGAYIKPTLSALPSPVVTSGGNVTLHCVSQVAFGSFILCKEGEDEHPQCLNSQPRTHGWSRAIFSVGPVSPSRRWSYRCYAYDSNSPHVWSLPSDLLELLVLGAAETLSPPQNKSDSKAGAANTLSPSQNKTASHPQDYTVENLIRMGIAGLVLVVLGILLFEAQHSQRSL

SEQ ID NO: 13843 - protein, 250 aa, Homo sapiens
MKATIILLLLAQVSWAGPFQQRGLFDFMLEDEASGIGPEVPDDRDFEPSLGPVCPFRCQCHLRVVQCSDLELGTNPLKSSGIENGAFQGMKKLSYIRIADTNITSIPQGLPPSLTELHLDGNKISRVDAASLKGLNNLAKLGLSFNSISAVDNGSLANTPHLRELHLDNNKLTRVPGGLAEHKYIQVVYLHNNNISVVGSSDFCPPGHNTKKASYSGVSLFSNPVQYWEIQPSTFRCVYVRSAIQLGNYK

SEQ ID NO: 13844 - protein, 586 aa, Homo sapiens
MEELVVEVRGSNGAFYKAFVKDVHEDSITVAFENNWQPDRQIPFHDVRFPPPVGYNKDINESDEVEVYSRANEKEPCCWWLAKVRMIKGEFYVIEYAACDATYNEIVTIERLRSVNPNKPATKDTFHKIKLDVPEDLRQMCAKEAAHKDFKKAVGAFSVTYDPENYQLVILSINEVTSKRAHMLIDMHFRSLRTKLSLIMRNEEASKQLESSRQLASRFHEQFIVREDLMGLAIGTHGANIQQARKVPGVTAIDLDEDTCTFHIYGEDQDAVKKARSFLEFAEDVIQVPRNLVGKVIGKNGKLIQEIVDKSGVVRVRIEAENEKNVPQEEEIMPPNSLPSNNSRVGPNAPEEKKHLDIKENSTHFSQPNSTKVQRGMVPFVFVGTKDSIANATVLLDYHLNYLKEVDQLRLERLQIDEQLRQIGASSRPPPNRTDKEKSYVTDDGQGMGRGSRPYRNRGHGRRGPGYTSAPTEEERESFLRRGDGRRRGGGGRGQGGRGRGGGFKGNDDHSRTDNRPRNPREAKGRTTDGSLQIRVDCNNERSVHTKTLQNTSSEGSRLRTGKDRNQKKEKPDSVDGQQPLVNGVP

SEQ ID NO: 13845 - protein, 536 aa, Homo sapiens
MFSCPGHYHVDGFLNPGSRKIQIRNIPPHLQWEVLDGLLAQYGTVENVEQVNTDTETAVVNVTYATREEAKIAMEKLSGHQFENYSFKISYIPDEEVSSPSPPQRAQRGDHSSREQGHAPGGTSQARQIDFPLRILVPTQFVGAIIGKEGLTIKNITKQTQSRVDIHRKENSGAAEKPVTIHATPEGTSEACRMILEIMQKEADETKLAEEIPLKILAHNGLVGRLIGKEGRNLKKIEHETGTKITISSLQDLSIYNPERTITVKGTVEACASAEIEIMKKLREAFENDMLAVNQQANLIPGLNLSALGIFSTGLSVLSPPAGPRGAPPAAPYHPFTTHSGYFSSLYPHHQFGPFPHHHSYPEQEIVNLFIPTQAVGAIIGKKGAHIKQLARFAGASIKIAPAEGPDVSERMVIITGPPEAQFKAQGRIFGKLKEENFFNPKEEVKLEAHIRVPSSTAGRVIGKGGKTVNELQNLTSAEVIVPRDQTPDENEEVIVRIIGHFFASQTAQRKIREIVQQVKQQEQKYPQGVASQRSK

SEQ ID NO: 13846 - protein, 538 aa, Homo sapiens
MASESSPLLAYRLLGEEGVALPANGAGGPGGASARKLSTFLGVVVPTVLSMFSIVVFLRIDATGPSGLRVLPQGYGWNLLYGSLLLGLVGGVCTLGAGLYARASFLTFLLVSGSLASVLISFVAVGPRDIRLTPRPGPNGSSLPPRFGHFTGFNSSTLKDNLGAGYAEDYTTGAVMNFASVFAVLFNGCTGIMAGANMSGELKDPSRAIPLGTIVAVAYTFFVYVLLFFLSSFTCDRTLLQEDYGFFRAISLWPPLVLIGIYATALSASMSSLIGASRILHALARDDLFGVILAPAKVVSRGGNPWAAVLYSWGLVQLVLLAGKLNTLAAVVTVFYLVAYAAVDLSCLSLEWASAPNFRPTFSLFSWHTCLLGVASCLLMMFLISPGAAGGSLLLMGLLAALLTARGGPSSWGYVSQALLFHQVRKYLLRLDVRKDHVKFWRPQLLLLVGNPRGALPLLRLANQLKKGGLYVLGHVTLGDLDSLPSDPVQPQYGAWLSLVDRAQVKAFVDLTLSPSVRQGAQHLLRISGLESNSHPLP

SEQ ID NO: 13847 - protein, 874 aa, Homo sapiens
MASAVRGSRPWPRLGLQLQFAALLLGTLSPQVHTLRPENLLLVSTLDGSLHALSKQTGDLKWTLRDDPVIEGPMYVTEMAFLSDPADGSLYILGTQKQQGLMKLPFTIPELVHASPCRSSDGVFYTGRKQDAWFVVDPESGETQMTLTTEGPSTPRLYIGRTQYTVTMHDPRAPALRWNTTYRRYSAPPMDGSPGKYMSHLASCGMGLLLTVDPGSGTVLWTQDLGVPVMGVYTWHQDGLRQLPHLTLARDTLHFLALRWGHIRLPASGPRDTATLFSTLDTQLLMTLYVGKDETGFYVSKALVHTGVALVPRGLTLAPADGPTTDEVTLQVSGEREGSPSTAVRYPSGSVALPSQWLLIGHHELPPVLHTTMLRVHPTLGSGTAETRPPENTQAPAFFLEQQPQVVEKQQETPLAPADFAHISQDAQSLHSGASRRSQKRLQSPSKQAQPLDDPEAEQLTVVGKISFNPKDVLGRGAGGTFVFRGQFEGRAVAVKRLLRECFGLVRREVQLLQESDRHPNVLRYFCTERGPQFHYIALELCRASLQEYVENPDLDRGGLEPEVVLQQLMSGLAHLHSLHIVHRDLKPGNILITGPDSQGLGRVVLSDFGLCKKLPAGRCSFSLHSGIPGTEGWMAPELLQLLPPDSPTSAVDIFSAGCVFYYVLSGGSHPFGDSLYRQANILTGAPCLAHLEEEVHDKVVARDLVGAMLSPLPQPRPSAPQVLAHPFFWSRAKQLQFFQDVSDWLEKESEQEPLVRALEAGGCAVVRDNWHEHISMPLQTDLRKFRSYKGTSVRDLLRAVRNKKHHYRELPVEVRQALGQVPDGFVQYFTNRFPRLLLHTHRAMRSCASESLFLPYYPPDSEARRPCPGATGR

SEQ ID NO: 13848 - protein, 360 aa, Homo sapiens
MWEAQFLGLLFLQPLWVAPVKPLQPGAEVPVVWAQEGAPAQLPCSPTIPLQDLSLLRRAGVTWQHQPDSGPPAAAPGHPLAPGPHPAAPSSWGPRPRRYTVLSVGPGGLRSGRLPLQPRVQLDERGRQRGDFSLWLRPARRADAGEYRAAVHLRDRALSCRLRLRLGQASMTASPPGSLRASDWVILNCSFSRPDRPASVHWFRNRGQGRVPVRESPHHHLAESFLFLPQVSPMDSGPWGCILTYRDGFNVSIMYNLTVLGLEPPTPLTVYAGAGSRVGLPCRLPAGVGTRSFLTAKWTPPGGGPDLLVTGDNGDFTLRLEDVSQAQAGTYTCHIHLQEQQLNATVTLAIITGQPQVGKE

SEQ ID NO: 13849 - protein, 210 aa, Homo sapiens
MWVTKLLPALLLQHVLLHLLLLPIAIPYAEGQRKRRNTIHEFKKSAKTTLIKIDPALKIKTKKVNTADQCANRCTRNKGLPFTCKAFVFDKARKQCLWFPFNSMSSGVKKEFGHEFDLYENKDYIRNCIIGKGRSYKGTVSITKSGIKCQPWSSMIPHEHSFLPSSYRGKDLQENYCRNPRGEEGGPWCFTSNPEVRYEVCDIPQCSEGK

SEQ ID NO: 13850 - protein, 405 aa, Homo sapiens
MRPSGTAGAALLALLAALCPASRALEEKKVCQGTSNKLTQLGTFEDHFLSLQRMFNNCEVVLGNLEITYVQRNYDLSFLKTIQEVAGYVLIALNTVERIPLENLQIIRGNMYYENSYALAVLSNYDANKTGLKELPMRNLQEILHGAVRFSNNPALCNVESIQWRDIVSSDFLSNMSMDFQNHLGSCQKCDPSCPNGSCWGAGEENCQKLTKIICAQQCSGRCRGKSPSDCCHNQCAAGCTGPRESDCLVCRKFRDEATCKDTCPPLMLYNPTTYQMDVNPEGKYSFGATCVKKCPRNYVVTDHGSCVRACGADSYEMEEDGVRKCKKCEGPCRKVCNGIGIGEFKDSLSINATNIKHFKNCTSISGDLHILPVAFRGDSFTHTPPLDPQELDILKTVKEITGLS

SEQ ID NO: 13851 - protein, 479 aa, Homo sapiens
MLLLLLPLLWGRERAEGQTSKLLTMQSSVTVQEGLCVHVPCSFSYPSHGWIYPGPVVHGYWFREGANTDQDAPVATNNPARAVWEETRDRFHLLGDPHTKNCTLSIRDARRSDAGRYFFRMEKGSIKWNYKHHRLSVNVTALTHRPNILIPGTLESGCPQNLTCSVPWACEQGTPPMISWIGTSVSPLDPSTTRSSVLTLIPQPQDHGTSLTCQVTFPGASVTTNKTVHLNVSYPPQNLTMTVFQGDGTVSTVLGNGSSLSLPEGQSLRLVCAVDAVDSNPPARLSLSWRGLTLCPSQPSNPGVLELPWVHLRDAAEFTCRAQNPLGSQQVYLNVSLQSKATSGVTQGVVGGAGATALVFLSFCVIFVVVRSCRKKSARPAAGVGDTGIEDANAVRGSASQILNHFIGFPTFLGLGFEFLLNLRDLCCHPDSEFYVYHFSHFRLIKNIAGEIVWSLEGKILWLLDVSDFFHWFFLICVG

SEQ ID NO: 13852 - protein, 63 aa, Homo sapiens
MSDVEENNFEGRVNVREEIEEFFPRMWKINQDKRRLMKRVSLSVKISNGNSCSCKIGEQVRIS

SEQ ID NO: 13853 - protein, 196 aa, Homo sapiens
MQAAVAVSVPFLLLCVLGTCPPARCGQAGDASLMELEKRKENRFVERQSIVPLRLIYRSGGEDESRHDALDTRVRGDLGGPQIQMFLKSESQKTIYQIQLTHVDQASFQVDAFGTSFILDVVLNHDLLSSEYIERHIEHGGKTVEVKGGEHCYYQGHIRGNPDSFVALSTCHGLHGMFYDGNHTYLIEPEENDTTQ

SEQ ID NO: 13854 - protein, 99 aa, Homo sapiens
MPVPWFLLSLALGRSPVVLSLERLVGPQDATHCSPGLSCRLWDSDILCLPGDIVPAPGPVLAPTHLQTELVLRCQKETDCDLCLRVAVHLAVHGEQVIL

SEQ ID NO: 13855 - protein, 698 aa, Homo sapiens
MAFAWWPCLILALLSSLAASGFPRSPFRLLGKRSLPEGVANGIEVYSTKINSKVTSRFAHNVVTMRAVNRADTAKEVSFDVELPKTAFITNFTLTIDGVTYPGNVKEKEVAKKQYEKAVSQGKTAGLVKASGRKLEKFTVSVNVAAGSKVTFELTYEELLKRHKGKYEMYLKVQPKQLVKHFEIEVDIFEPQGISMLDAEASFITNDLLGSALTKSFSGKKGHVSFKPSLDQQRSCPTCTDSLLNGDFTITYDVNRESPGNVQIVNGYFVHFFAPQGLPVVPKNVAFVIDISGSMAGRKLEQTKEALLRILEDMQEEDYLNFILFSGDVSTWKEHLVQATPENLQEARTFVKSMEDKGMTNINDGLLRGISMLNKAREEHRIPERSTSIVIMLTDGDANVGESRPEKIQENVRNAIGGKFPLYNLGFGNNLNYNFLENMALENHGFARRIYEDSDADLQLQGFYEEVANPLLTGVEMEYPENAILDLTQNTYQHFYDGSEIVVAGRLVDEDMNSFKADVKGHGATNDLTFTEEVTTEKITLWNRAVPSTFSWLDTVTVTQDGLSMMINRKNMVVSFGDGVTFVVVLHQVWKKHPVHRDFLGFYVVDSHRMSAQTHGLLGQFFQPFDFKVSDIRPGSDPTKPDATLVVKNHQLIVTRGSQKDYRKDASIGTKVVCWFVHNNGEGLIDGVHTDYIVPNLF

SEQ ID NO: 13856 - protein, 553 aa, Homo sapiens
MPGMMEKGPELLGKNRSANGSAKSPAGGGGSGASSTNGGLHYSEPESGCSSDDEHDVGMRVGAEYQARIPEFDPGATKYTDKDNGGMLVWSPYHSIPDAKLDEYIAIAKEKHGYNVEQALGMLFWHKHNIEKSLADLPNFTPFPDEWTVEDKVLFEQAFSFHGKSFHRIQQMLPDKTIASLVKYYYSWKKTRSRTSLMDRQARKLANRHNQGDSDDDVEETHPMDGNDSDYDPKKEAKKEGNTEQPVQTSKIGLGRREYQSLQHRHHSQRSKCRPPKGMYLTQEDVVAVSCSPNAANTILRQLDMELISLKRQVQNAKQVNSALKQKMEGGIEEFKPPESNQKINARWTTEEQLLAVQGVRKYGKDFQAIADVIGNKTVGQVKNFFVNYRRRFNLEEVLQEWEAEQGTQASNGDASTLGEETKSASNVPSGKSTDEEEEAQTPQAPRTLGPSPPAPSSTPTPTAPIATLNQPPPLLRPTLPAAPALHRQPPPLQQQARFIQPRPTLNQPPPPLIRPANSMPPRLNPRPVLSTVGGQQPPSLIGIQTDSQSSLH

SEQ ID NO: 13857 - protein, 463 aa, Homo sapiens
MSGGTPYIGSKISLISKAEIRYEGILYTIDTENSTVALAKVRSFGTEDRPTDRPIPPRDEVFEYIIFRGSDIKDLTVCEPPKPQCSLPQDPAIVQSSLGSSTSSFQSMGSYGPFGRMPTYSQFSPSSLVGQQFGAVGVAGSSLTSFGTETSNSGTLPQSSAVGSAFTQDTRSLKTQLSQGRSSPQLDPLRKSPTMEQAVQTASAHLPAPAAVGRRSPVSTRPLPSASQKAGENQEHRRAEVHKVSRPENEQLRNDNKRQVAPGAPSAPRRGRGGHRGGRGRFGIRRDGPMKFEKDFDFESANAQFNKEEIDREFHNKLKLKEDKLEKQEKPVNGEDKGDSGVDTQNSEGNADEEDPLGPNCYYDKTKSFFDNISCDDNRERRPTWAEERRLNAETFGIPLRPNRGRGGYRGRGGLGFRGGRGRGGGRGGTFTAPRGFRGGFRGGRGGREFADFEYRKTTAFGP

SEQ ID NO: 13858 - protein, 114 aa, Homo sapiens
MGPGLLCWALLCLLGAGSVETGVTQSPTHLIKTRGQQVTLRCSSQSGHNTVSWYQQALGQGPQFIFQYYREEENGRGNFPPRFSGLQFPNYSSELNVNALELDDSALYLCASSL

SEQ ID NO: 13859 - protein, 455 aa, Homo sapiens
MLHPETSPGRGHLLAVLLALLGTAWAEVWPPQLQEQAPMAGALNRKESFLLLSLHNRLRSWVQPPAADMRRLDWSDSLAQLAQARAALCGTPTPSLASGLWRTLQVGWNMQLLPAGLVSFVEVVSLWFAEGQRYSHAAGECARNATCTHYTQLVWATSSQLGCGRHLCSAGQAAIEAFVCAYSPRGNWEVNGKTIVPYKKGAWCSLCTASVSGCFKAWDHAGGLCEVPRNPCRMSCQNHGRLNISTCHCHCPPGYTGRYCQVRCSLQCVHGRFREEECSCVCDIGYGGAQCATKVHFPFHTCDLRIDGDCFMVSSEADTYYRARMKCQRKGGVLAQIKSQKVQDILAFYLGRLETTNEVIDSDFETRNFWIGLTYKTAKDSFRWATGEHQAFTSFAFGQPDNHGLVWLSAAMGFGNCVELQASAAFNWNDQRCKTRNRYICQFAQEHISRWGPGS

SEQ ID NO: 13860 - protein, 624 aa, Homo sapiens
MASTVEGGDTALLPEFPRGPLDAYRARASFSWKELALFTEGEGMLRFKKTIFSALENDPLFARSPGADLSLEKYRELNFLRCKRIFEYDFLSVEDMFKSPLKVPALIQCLGMYDSSLAAKYLLHSLVFGSAVYSSGSERHLTYIQKIFRMEIFGCFALTELSHGSNTKAIRTTAHYDPATEEFIIHSPDFEAAKFWVGNMGKTATHAVVFAKLCVPGDQCHGLHPFIVQIRDPKTLLPMPGVMVGDIGKKLGQNGLDNGFAMFHKVRVPRQSLLNRMGDVTPEGTYVSPFKDVRQRFGASLGSLSSGRVSIVSLAILNLKLAVAIALRFSATRRQFGPTEEEEIPVLEYPMQQWRLLPYLAAVYALDHFSKSLFLDLVELQRGLASGDRSARQAELGREIHALASASKPLASWTTQQGIQECREACGGHGYLAMNRLGVLRDDNDPNCTYEGDNNILLQQTSNYLLGLLAHQVHDGACFRSPLKSVDFLDAYPGILDQKFEVSSVADCLDSAVALAAYKWLVCYLLRETYQKLNQEKRSGSSDFEARNKCQVSHGRPLALAFVELTVVQRFHEHVHQPSVPPSLRAVLGRLSALYALWSLSRHAALLYRAERRCSCPGRRDRSS

SEQ ID NO: 13861 - protein, 241 aa, Homo sapiens
MAGPFSRLLSARPGLRLLALAGAGSLAAGFLLRPEPVRAASERRRLYPPSAEYPDLRKHNNCMASHLTPAVYARLCDKTTPTGWTLDQCIQTGVDNPGHPFIKTVGMVAGDEETYEVFADLFDPVIQERHNGYDPRTMKHTTDLDASKIRSGYFDERYVLSSRVRTGRSIRGLSLPPACTRAERREVERVVVDALSGLKGDLAGRYYRLSEMTEAEQQQLIDDHFLFDKPVSPLLTAAGMA

SEQ ID NO: 13862 - protein, 628 aa, Homo sapiens
MPSWALFMVTSCLLLAPQNLAQVSSQDSEPLKCFSRTFEDLTCFWDEEEAAPSGTYQLLYAYPREKPRACPLSSQSMPHFGTRYVCQFPDQEEVRLFFPLHLWVKNVFLNQTRTQRVLFVDSVGLPAPPSIIKAMGGSQPGELQISWEEPAPEISDFLRYELRYGPRDPKNSTGPTVIQLIATETCCPALQRPHSASALDQSPCAQPTMPWQDGPKQTSPSREASALTAEGGSCLISGLQPGNSYWLQLRSEPDGISLGGSWGSWSLPVTVDLPGDAVALGLQCFTLDLKNVTCQWQQQDHASSQGFFYHSRARCCPRDRYPIWENCEEEEKTNPGLQTPQFSRCHFKSRNDSIIHILVEVTTAPGTVHSYLGSPFWIHQAVRLPTPNLHWREISSGHLELEWQHPSSWAAQETCYQLRYTGEGHQDWKVLEPPLGARGGTLELRPRSRYRLQLRARLNGPTYQGPWSSWSDPTRVETATETAWISLVTALHLVLGLSAVLGLLLLRWQFPAHYRRLRHALWPSLPDLHRVLGQYLRDTAALSPPKATVSDTCEEVEPSLLEILPKSSERTPLPLCSSQAQMDYRRLQPSCLGTMPLSVCPPMAESGSCCTTHIANHSYLPLSYWQQP

SEQ ID NO: 13863 - protein, 501 aa, Homo sapiens
MAAPEPAPRRAREREREREDESEDESDILEESPCGRWQKRREQVNQGNMPGLQSTFLAMDTEEGVEVVWNELHFGDRKAFAAHEEKIQTVFEQLVLVDHPNIVKLHKYWLDTSEACARVIFITEYVSSGSLKQFLKKTKKNHKAMNARAWKRWCTQILSALSFLHACSPPIIHGNLTSDTIFIQHNGLIKIGSVWHRIFSNALPDDLRSPIRAEREELRNLHFFPPEYGEVADGTAVDIFSFGMCALEMAVLEIQTNGDTRVTEEAIARARHSLSDPNMREFILCCLARDPARRPSAHSLLFHRVLFEVHSLKLLAAHCFIQHQYLMPENVVEEKTKAMDLHAVLAELPRPRRPPLQWRYSEVSFMELDKFLEDVRNGIYPLMNFAATRPLGLPRVLAPPPEEVQKAKTPTPEPFDSETRKVIQMQCNLERSEDKARWHLTLLLVLEDRLHRQLTYDLLPTDSAQDLASELVHYGFLHEDDRMKLAAFLESTFLKYRGTQA

SEQ ID NO: 13864 - protein, 125 aa, Homo sapiens
MPGRHVSRVRALYKRVLQLHRVLPPDLKSLGDQYVKDEFRRHKTVGSDEAQRFLQEWEVYATALLQQANENRQNSTGKACFGTFLPEEKLNDFRDEQIGQLQELMQEATKPNRQFSISESMKPKF

SEQ ID NO: 13865 - protein, 359 aa, Homo sapiens
MSVGFIGAGQLAYALARGFTAAGILSAHKIIASSPEMNLPTVSALRKMGVNLTRSNKETVKHSDVLFLAVKPHIIPFILDEIGADVQARHIVVSCAAGVTISSVEKAFMALDALADGGVKMGLPRRLAIQLGAQALLGAAKMLLDSEQHPCQLKDNVCSPGGATIHALHFLESGGFRSLLINAVEASCIRTRGGRQVPGVGGQHTPAGVRHGAAAAAQQRAGAGRAAALPGAGPQGRAAQARAAVPAQRPGPGDRRVAARPRRRLQPHLPHRLQAGVRPRERLEGLRRDRGRELLAAAEPAPAAAAATGVGAEGASGPAGVRRPQAGPLCLAGGASRAWGAPAGAAHPGPWGLWSSGRL

SEQ ID NO: 13866 - protein, 340 aa, Homo sapiens
MVTLRKRTLKVLTFLVLFIFLTSFFLNYSHTMVATTWFPKQMVLELSENLKRLIKHRPCTCTHCIGQRKLSAWFDERFNQTMQPLLTAQNALLEDDTYRWWLRLQREKKPNNLNDTIKELFRVVPGNVDPMLEKRSVGCRRCAVVGNSGNLRESSYGPEIDSHDFVLRMNKAPTAGFEADVGTKTTHHLVYPESFRELGDNVSMILVPFKTIDLEWVVSAITTGTISHTYIPVPAKIRVKQDKILIYHPAFIKYVFDNWLQGHGRYPSTGILSVIFSMHVCDEVDLYGFGADSKGNWHHYWENNPSAGAFRKTGVHDADFESNVTATLASINKIRIFKGR

SEQ ID NO: 13867 - protein, 253 aa, Homo sapiens
MDSWFILVLLGSGLICVSANNATTVAPSVGITRLINSSTAEPVKEEAKTSNPTSSLTSLSVAPTFSPNITLGPTYLTTVNSSDSDNGTTRTASTNSIGITISPNGTWLPDNQFTDARTEPWEGNSSTAATTPETFPPSDETPIIAVMVALSSLLVIVFIIIVLYMLRFKKYKQAGSHSNSFRLSNGRTEDVEPQSVPLLARSPSTNRKYPPLPVDKLEEEINRRMADDNKLFREEFNALPACPIQATCEAASK

SEQ ID NO: 13868 - protein, 676 aa, Homo sapiens
MAANVGSMFQYWKRFDLQQLQRELDATATVLANRQDESEQSRKRLIEQSREFKKNTPEDLRKQVAPLLKSFQGEIDALSKRSKEAEAAFLNVYKRLIDVPDPVPALDLGQQLQLKVQRLHDIETENQKLRETLEEYNKEFAEVKNQEVTIKALKEKIREYEQTLKNQAETIALEKEQKLQNDFAEKERKLQETQMSTTSKLEEAEHKVQSLQTALEKTRTELFDLKTKYDEETTAKADEIEMIMTDLERANQRAEVAQREAETLREQLSSANHSLQLASQIQKAPDVAIEVLTRSSLEVELAAKEREIAQLVEDVQRLQASLTKLRENSASQISQLEQQLSAKNSTLKQLEEKLKGQADYEEVKKELNILKSMEFAPSEGAGTQDAAKPLEVLLLEKNRSLQSENAALRISNSDLSGRCAELQVRITEAVATATEQRELIARLEQDLSIIQSIQRPDAEGAAEHRLEKIPEPIKEATALFYGPAAPASGALPEGQVDSLLSIISSQRERFRARNQELEAENRLAQHTLQALQSELDSLRADNIKLFEKIKFLQSYPGRGSGSDDTELRYSSQYEERLDPFSSFSKRERQRKYLSLSPWDKATLSMGRLVLSNKMARTIGFFYTLFLHCLVFLVLYKLAWSESMERDCATFCAKKFADHLHKFHENDNGAAAGDLWQ

SEQ ID NO: 13869 - protein, 165 aa, Homo sapiens
MFKIGRGALDLFSELLSFGGIVLAACQALENSTSPLSDPPVAAAVVSHFNDCPDSHTQFCFHGTCRFLVQEDKPACVCHSGYVGARCEHADLLAVVAASQKKQAITALVVVSIVALAVLIITCVLIHCCQVRKHCEWCRALICRHEKPSALLKGRTACCHSETVV

SEQ ID NO: 13870 - protein, 114 aa, Homo sapiens
MAMGLFRVCLVVVTAIINHPLLFPRENATVPENEEEIIRKMQAHQEKLQLEQLRLEEEVARLAAEKEALEQVAEEGRQQNETRVAWDLWSTLCMILFLMIEVWRQDHQEGPSPE

SEQ ID NO: 13871 - protein, 1952 aa, Homo sapiens
MPALGPALLQALWAGWVLTLQPLPPTAFTPNGTYLQHLARDPTSGTLYLGATNFLFQLSPGLQLEATVSTGPVLDSRDCLPPVMPDECPQAQPTNNPNQLLLVSPGALVVCGSVHQGVCEQRRLGQLEQLLLRPERPGDTQYVAANDPAVSTVGLVAQGLAGEPLLFVGRGYTSRGVGGGIPPITTRALWPPDPQAAFSYEETAKLAVGRLSEYSHHFVSAFARGASAYFLFLRRDLQAQSRAFRAYVSRVCLRDQHYYSYVELPLACEGGRYGLIQAAAVATSREVAHGEVLFAAFSSAAPPTVGRPPSAAAGASGASALCAFPLDEVDRLANRTRDACYTREGRAEDGTEVAYIEYDVNSDCAQLPVDTLDAYPCGSDHTPSPMASRVPLEATPILEWPGIQLTAVAVTMEDGHTIAFLGDSQGQLHRVYLGPGSDGHPYSTQSIQQGSAVSRDLTFDGTFEHLYVMTQSTLLKVPVASCAQHLDCASCLAHRDPYCGWCVLLGRCSRRSECSRGQGPEQWLWSFQPELGCLQVAAMSPANISREETREVFLSVPDLPPLWPGESYSCHFGEHQSPALLTGSGVMCPSPDPSEAPVLPRGADYVSVSVELRFGAVVIAKTSLSFYDCVAVTELRPSAQCQACVSSRWGCNWCVWQHLCTHKASCDAGPMVASHQSPLVSPDPPARGDGDSAELEGPPAPLILPSSLDYQYDTPGLWELEEATLGASSCPCVESVQGSTLMPVHVEREIRLLGRNLHLFQDGPGDNECVMELEGLEVVVEARVECEPPPDTQCHVTCQQHQLSYEALQPELRVGLFLRRAGRLRVDSAEGLHVVLYDCSVGHGDCSRCQTAMPQYGCVWCEGERPRCVTREACGEAEAVATQCPAPLIHSVEPLTGPVDGGTRVTIRGSNLGQHVQDVLGMVTVAGVPCAVDAQEYEVSSSLVCITGASGEEVAGATAVEVPGRGRGVSEHDFAYQDPKVHSIFPARGPRAGGTRLTLNGSKLLTGRLEDIRVVVGDQPCHLLPEQQSEQLRCETSPRPTPATLPVAVWFGATERRLQRGQFKYTLDPNITSAGPTKSFLSGGREICVRGQNLDVVQTPRIRVTVVSRMLQPSQGLGRRRRVVPETACSLGPSCSSQQFEEPCHVNSSQLITCRTPALPGLPEDPWVRVEFILDNLVFDFATLNPTPFSYEADPTLQPLNPEDPTMPFRHKPGSVFSVEGENLDLAMSKEEVVAMIGDGPCVVKTLTRHHLYCEPPVEQPLPRHHALREAPDSLPEFTVQMGNLRFSLGHVQYDGESPGAFPVAAQVGLGVGTSLLALGVIIIVLMYRRKSKQALRDYKKVQIQLENLESSVRDRCKKEFTDLMTEMTDLTSDLLGSGIPFLDYKVYAERIFFPGHRESPLHRDLGVPESRRPTVEQGLGQLSNLLNSKLFLTKFIHTLESQRTFSARDRAYVASLLTVALHGKLEYFTDILRTLLSDLVAQYVAKNPKLMLRRTETVVEKLLTNWMSICLYTFVRDSVGEPLYMLFRGIKHQVDKGPVDSVTGKAKYTLNDNRLLREDVEYRPLTLNALLAVGPGAGEAQGVPVKVLDCDTISQAKEKMLDQLYKGVPLTQRPDPRTLDVEWRSGVAGHLILSDEDVTSEVQGLWRRLNTLQHYKVPDGATVALVPCLTKHVLRENQDYVPGERTPMLEDVDEGGIRPWHLVKPSDEPEPPRPRRGSLRGGERERAKAIPEIYLTRLLSMKGTLQKFVDDLFQVILSTSRPVPLAVKYFFDLLDEQAQQHGISDQDTIHIWKTNSLPLRFWINIIKNPQFVFDVQTSDNMDAVLLVIAQTFMDACTLADHKLGRDSPINKLLYARDIPRYKRMVERYYADIRQTVPASDQEMNSVLAELSWNYSGDLGARVALHELYKYINKYYDQIITALEEDGTAQKMQLGYRLQQIAAAVENKVTDL

SEQ ID NO: 13872 - protein, 881 aa, Homo sapiens
MFWKFDLHTSSHLDTLLEREDLSLPELLDEEDVLQECKVVNRKLLDFLLQPPHLQAMVAWVTQEPPDSGEERLRYKYPSVACEILTSDVPQINDALGADESLLNRLYGFLQSTGSLNPLLASFFSKVMGILINRKTDQLVSFLRKKDDFVDLLLQHIGTSAIMDLLLRLLTCVERPQLRQDVVNWLNEEKIVQRLIEQIHPSKDENQHSNASQSLCDIIRLSREQMIQVQDSPEPDQLLATLEKQETIEQLLSNMFEGEQSQSVIVSGIQVLLTLLEPRRPRSESVTVNSFFSSVDGQLELLAQGALESTVSSVGALHALRPRLSCFHQLLLEPPKLEPLQMTWGMLAPPLGNTRLHVVKLLASALSANDAALTHELLALDVPNTMLDLFFHYVFNNFLHAQVEGCVSTMLSLGPPPDSSPETPIQNPVVKHLLQQCRLVERILTSWEENDRVQCAGGPRKGYMGHLTRVAGALVQNTEKGPNAEQLRQLLKELPSEQQEQWEAFVSGPLAETNKKNMVDLVNTHHLHSSSDDEDDRLKEFNFPEEAVLQQAFMDFQMQRMTSAFIDHFGFNDEEFGEQEESVNAPFDKTANITFSLNADDENPNANLLEICYKDRIQQFDDDEEEEDEEEAQGSGESDGEDGAWQGSQLARGARLGQPPGVRSGGSTDSEDEEEEDEEEEEDEEGIGCAARGGATPLSYPSPGPQPPGPSWTATFDPVPTDAPTSPRVSGEEELHTGPPAPQGPLSVPQGLPTQSLASPPARDALQLRSQDPTPPSAPQEATEGSKVTEPSAPCQALVSIGDLQATFHGIRSAPSSSDSATRDPSTSVPASGAHQPPQTTEGEKSPEPLGLPQSQSAQALTPPPIPNGSAPEGPASPGSQ

SEQ ID NO: 13873 - protein, 144 aa, Homo sapiens
MLLAWVQAFLVSNMLLAEAYGSGGCFWDNGHLYREDQTSPAPGLRCLNWLDAQSGLASAPVSGAGNHSYCRNPDEDPRGPWCYVSGEAGVPEKRPCEDLRCPGQVQLWNSLRAVPDESCFPPHLQRPPPRPCQPSRQKSRKRLK

SEQ ID NO: 13874 - protein, 74 aa, Homo sapiens
MDVRGPEAPGGRALRDAAENLFQELQEHFQALTATLNLRMEEMGNRIEDLQKNVKDLMVQAGIENSIKEQMLKT

SEQ ID NO: 13875 - protein, 887 aa, Homo sapiens
MDHYDSQQTNDYMQPEEDWDRDLLLDPAWEKQQRKTFTAWCNSHLRKAGTQIENIEEDFRDGLKLMLLLEVISGERLAKPERGKMRVHKISNVNKALDFIASKGVKLVSIGAEEIVDGNVKMTLGMIWTIILRFAIQDISVEETSAKEGLLLWCQRKTAPYKNVNIQNFHISWKDGLGFCALIHRHRPELIDYGKLRKDDPLTNLNTAFDVAEKYLDIPKMLDAEDIVGTARPDEKAIMTYVSSFYHAFSGAQKAETAANRICKVLAVNQENEQLMEDYEKLASDLLEWIRRTIPWLENRVPENTMHAMQQKLEDFRDYRRLHKPPKVQEKCQLEINFNTLQTKLRLSNRPAFMPSEGRMVSDINNAWGCLEQVEKGYEEWLLNEIRRLERLDHLAEKFRQKASIHEAWTDGKEAMLRQKDYETATLSEIKALLKKHEAFESDLAAHQDRVEQIAAIAQELNELDYYDSPSVNARCQKICDQWDNLGALTQKRREALERTEKLLETIDQLYLEYAKRAAPFNNWMEGAMEDLQDTFIVHTIEEIQGLTTAHEQFKATLPDADKERLAILGIHNEVSKIVQTYHVNMAGTNPYTTITPQEINGKWDHVRQLVPRRDQALTEEHARQQHNERLRKQFGAQANVIGPWIQTKMEEIGRISIEMHGTLEDQLSHLRQYEKSIVNYKPKIDQLEGDHQLIQEALIFDNKHTNYTMEHIRVGWEQLLTTIARTINEVENQILTRDAKGISQEQMNEFRASFNHFDRKKTGMMDTDDFRACLISMGYNMGEAEFARIMSIVDPNRLGVVTFQAFIDFMSRETADTDTADQVMASFKILAGDKNYITMDELRRELPPDQAEYCIARMAPYTGPDSVPGALDYMSFSTALYGESDL

SEQ ID NO: 13876 - protein, 725 aa, Homo sapiens
MGLWWVTVQPPARRMGWLPLLLLLTQCLGVPGQRSPLNDFQVLRGTELQHLLHAVVPGPWQEDVADAEECAGRCGPLMDCRAFHYNVSSHGCQLLPWTQHSPHTRLRRSGRCDLFQKKDYVRTCIMNNGVGYRGTMATTVGGLPCQAWSHKFPNDHKYTPTLRNGLEENFCRNPDGDPGGPWCYTTDPAVRFQSCGIKSCREAACVWCNGEEYRGAVDRTESGRECQRWDLQHPHQHPFEPGKFLDQGLDDNYCRNPDGSERPWCYTTDPQIEREFCDLPRCGSEAQPRQEATTVSCFRGKGEGYRGTANTTTAGVPCQRWDAQIPHQHRFTPEKYACKDLRENFCRNPDGSEAPWCFTLRPGMRAAFCYQIRRCTDDVRPQDCYHGAGEQYRGTVSKTRKGVQCQRWSAETPHKPQFTFTSEPHAQLEENFCRNPDGDSHGPWCYTMDPRTPFDYCALRRCADDQPPSILDPPDQVQFEKCGKRVDRLDQRRSKLRVVGGHPGNSPWTVSLRNRQGQHFCGGSLVKEQWILTARQCFSSCHMPLTGYEVWLGTLFQNPQHGEPSLQRVPVAKMVCGPSGSQLVLLKLERSVTLNQRVALICLPPEWYVVPPGTKCEIAGWGETKGTGNDTVLNVALLNVISNQECNIKHRGRVRESEMCTEGLLAPVGACEGDYGGPLACFTHNCWVLEGIIIPNRVCARSRWPAVFTRVSVFVDWIHKVMRLG

SEQ ID NO: 13877 - protein, 47 aa, Homo sapiens
MLRFYLFISLLCLSRSDASLDMNEESPLFEEGFLQSEIWEIKLIPPK

SEQ ID NO: 13878 - protein, 554 aa, Homo sapiens
MLLPLLLSSLLGGSQAMDGRFWIRVQESVMVPEGLCISVPCSFSYPRQDWTGSTPAYGYWFKAVTETTKGAPVATNHQSREVEMSTRGRFQLTGDPAKGNCSLVIRDAQMQDESQYFFRVERGSYVRYNFMNDGFFLKVTGTKPTTSHFSVLSFTPRPQDHNTDLTCHVDFSRKGVSAQRTVRLRVAYAPRDLVISISRDNTPALEPQPQGNVPYLEAQKGQFLRLLCAADSQPPATLSWVLQNRVLSSSHPWGPRPLGLELPGVKAGDSGRYTCRAENRLGSQQRALDLSVQYPPENLRVMVSQANRTVLENLGNGTSLPVLEGQSLCLVCVTHSSPPARLSWTQRGQVLSPSQPSDPGVLELPRVQVEHEGEFTCHARHPLGSQHVSLSLSVHYKKGLISTAFSNGAFLGIGITALLFLCLALIIMKILPKRRTQTETPRPRFSRHSTILDYINVVPTAGPLAQKRNQKATPNSPRTPLPPGAPSPESKKNQKKQYQLPSFPEPKSSTQAPESQESQEELHYATLNFPGVRPRPEARMPKGTQADYAEVKFQ

SEQ ID NO: 13879 - protein, 709 aa, Homo sapiens
MGCLWGLALPLFFFCWEVGVSGSSAGPSTRRADTAMTTDDTEVPAMTLAPGHAALETQTLSAETSSRASTPAGPIPEAETRGAKRISPARETRSFTKTSPNFMVLIATSVETSAASGSPEGAGMTTVQTITGSDPREAIFDTLCTDDSSEEAKTLTMDILTLAHTSTEAKGLSSESSASSDSPHPVITPSRASESSASSDGPHPVITPSRASESSASSDGPHPVITPSRASESSASSDGPHPVITPSRASESSASSDGPHPVITPSRASESSASSDGPHPVITPSRASESSASSDGPHPVITPSRASESSASSDGPHPVITPSRASESSASSDGPHPVITPSRASESSASSDGLHPVITPSRASESSASSDGPHPVITPSRASESSASSDGPHPVITPSWSPGSDVTLLAEALVTVTNIEVINCSITEIETTTSSIPGASDTDLIPTEGVKASSTSDPPALPDSTEAKPHITEVTASAETLSTAGTTESAAPDATVGTPLPTNSATEREVTAPGATTLSGALVTVSRNPLEETSALSVETPSYVKVSGAAPVSIEAGSAVGKTTSFAGSSASSYSPSEAALKNFTPSETPTMDIATKGPFPTSRDPLPSVPPTTTNSSRGTNSTLAKITTSAKTTMKPPTATPTTARTRPTTDVSAGENGGFLLLRLSVASPEDLTDPRVAERLMQQLHRELHAHAPHFQVSLLRVRRG

SEQ ID NO: 13880 - protein, 278 aa, Homo sapiens
MPGGPIPPGFFQGPPGSQPSPHAQPPPHNPSSMMGPHSQPFMSPRYAGGPRPPIRMGNQPPGGVPGTQPLLPNSMDPTRQQGHPNMGGSMQRMNPPRGMGPMGPGPQNYGSGMRPPPNSLGPAMPGINMGPGAGRPWPNPNSANSIPYSSSSPGTYVGPPGGGGPPGTPIMPSPADSTNSSDNIYTMINPVPPGGSRSNFPMGPGSDGPMGGMGGMEPHHMNGSLGSGDIDGLPKNSPNNISGISNPPGTPRDDGELGGNFLHSFQNDNYSPSMTMSV

SEQ ID NO: 13881 - protein, 139 aa, Homo sapiens
MAAAAELSLLEKSLGLSKGNKYSAQGERQIPVLQTNNGPSLTGLTTIAAHLVKQANKEYLLGSTAEEKAIVQQWLEYRVTQVDGHSSKNDIHTLLKDLNSYLEDKVYLTGYNFTLADILLYYGLHRFIIRKLRHTEVGN

SEQ ID NO: 13882 - protein, 207 aa, Homo sapiens
MRLLPLLRTVLWAAFLGSPLRGGSSLRHVVYWNSSNPRLLRGDAVVELGLNDYLDIVCPHYEGPGPPEGPETFALYMVDWPGYESCQAEGPRAYKRWVCSLPFGHVQFSEKIQRFTPFSLGFEFLPGETYYYISVPTPESSGQCLRLQVSVCCKERRARVLPRSPGGGGIPAACTGGANSDRQDGALMGEIRGSEVTLAGACPLITG

SEQ ID NO: 13883 - protein, 267 aa, Homo sapiens
MATGELGDLGGYYFRFLPQKTFQSLSSKEITSRLRQWSMLGRIKAQAFGFDQTFQSYRKDDFVMAFFKDPNVIPNLKLLSDSSGQWIILGTEVKKIEAINVPCTQLSMSFFHRLYDEDIVRDSGHIVKCLDSFCDPFLISDELRRVLLVEDSEKYEIFSQPDREEFLFCLFKHLCLGGALCQYEDVISPYLETTKLIYKDLVSVRKNPQTKKIQITSSVFKVSAYDSAGMCYPSAKNHEQTFSYFIVDPIRRHLHVLYHCYGVGDMS

SEQ ID NO: 13884 - protein, 274 aa, Homo sapiens
MARHGLPLLPLLSLLVGAWLKLGNGQATSMVQLQGGRFLMGTNSPDSRDGDGPVREATVKPFAIDIFPVTNKDFRYIRDFVREKKYRTEAEMFGWSFVFEDFVSDELRNKATQPMKSVLWWLPVEKAFWRQPAGPGSGIRERLEHPVLHVSWNDARAYCAWRGKRLPTEEEWEFAARGGLKGQVYPWGNWFQPNRTNLWQGKFPKGDKAEDGFHGVSPVNAFPAQNNYGLYDLLGNVWEWTASPYQAAEQDMRVLRGASWIDTADGSANHRARV

SEQ ID NO: 13885 - protein, 248 aa, Homo sapiens
MAAGTSSYWEDLRKQARQLENELDLKLVSFSKLCTSYSHSSTRDGRRDSSDTTPLLNGSSQDRMFETMAIEIEQLLARLTGVNDKMAEYTNSAGVPSLNAALMHTLQRHRDILQDYTHEFHKTKANFMAIRERENLMGSVRKDIESYKSGSGVNNRRTELFLKEHDHLRNSDRLIEETISIAMATKENMTSQRGMLKSIHSKMNTLANRFPAVNSLIQRINLRKRRDSLILGGVIGICTILLLLYAFH

SEQ ID NO: 13886 - protein, 225 aa, Homo sapiens
MRPLLLLALLGWLLLAEAKGDAKPEAPCCQEGLRAGGSGSLHLGRDFTVLAGARGSPSPSVSSIPRFWIPGSDNLLVLTVATKETEGFRRFKRSAQFFNYKIQALGLGEDWNVEKGTSAGGGQKVRLLKKALEKHADKEDLVILFADSYDVLFASGPRELLKKFRQARSQVVFSAEELIYPDRRLETKYPVVSDGKRFLGSGGFIGYAPNLSKLVAEWEGQDSDS

SEQ ID NO: 13887 - protein, 927 aa, Homo sapiens
MATAAETSASEPEAESKAGPKADGEEDEVKAARTRRKVLSRAVAAATYKTMGPAWDQQEEGVSESDGDEYAMASSAESSPGEYEWEYDEEEEKNQLEIERLEEQLSINVYDYNCHVDLIRLLRLEGELTKVRMARQKMSEIFPLTEELWLEWLHDEISMAQDGLDREHVYDLFEKAVKDYICPNIWLEYGQYSVGGIGQKGGLEKVRSVFERALSSVGLHMTKGLALWEAYREFESAIVEAARLEKVHSLFRRQLAIPLYDMEATFAEYEEWSEDPIPESVIQNYNKALQQLEKYKPYEEALLQAEAPRLAEYQAYIDFEMKIGDPARIQLIFERALVENCLVPDLWIRYSQYLDRQLKVKDLVLSVHNRAIRNCPWTVALWSRYLLAMERHGVDHQVISDSSKELEELRAAFTRALEYLKQEVEERFNESGDPSCVIMQNWARIEARLCNNMQKARELWDSIMTRGNAKYANMWLEYYNLERAHGDTQHCRKALHRAVQCTSDYPEHVCEVLLTMERTEGSLEDWDIAVQKTETRLARVNEQRMKAAEKEAALVQQEEEKAEQRKRARAEKKALKKKKKIRGPEKRGADEDDEKEWGDDEEEQPSKRRRVENSIPAAGETQNVEVAAGPAGKCAAVDVEPPSKQKEKAASLKRDMPKVLHDSSKDSITVFVSNLPYSMQEPDTKLRPLFEACGEVVQIRPIFSNRGDFRGYCYVEFKEEKSALQALEMDRKSVEGRPMFVSPCVDKSKNPDFKVFRYSTSLEKHKLFISGLPFSCTKEELEEICKAHGTVKDLRLVTNRAGKPKGLAYVEYENESQASQAVMKMDGMTIKENIIKVAISNPPQRKVPEKPETRKAPGGPMLLPQTYGARGKGRTQLSLLPRALQRPSAAAPQAENGPAAAPAVAAPAATEAPKMSNADFAKLFLRK

SEQ ID NO: 13888 - protein, 123 aa, Homo sapiens
MAWAPLLLTLLSLLTGSLSQPVLTQPPSASASLGASVTLTCTLSSGYSNYKVDWYQQRPGKGPRFVMRVGTGGIVGSKGDGIPDRFSVLGSGLNRYLTIKNIQEEDESDYHCGADHGSGSNFV

SEQ ID NO: 13889 - protein, 516 aa, Homo sapiens
MIWYILIIGILLPQSLAHPGFFTSIGQMTDLIHTEKDLVTSLKDYIKAEEDKLEQIKKWAEKLDRLTSTATKDPEGFVGHPVNAFKLMKRLNTEWSELENLVLKDMSDGFISNLTIQRQYFPNDEDQVGAAKALLRLQDTYNLDTDTISKGNLPGVKHKSFLTAEDCFELGKVAYTEADYYHTELWMEQALRQLDEGEISTIDKVSVLDYLSYAVYQQGDLDKALLLTKKLLELDPEHQRANGNLKYFEYIMAKEKDVNKSASDDQSDQKTTPKKKGVAVDYLPERQKYEMLCRGEGIKMTPRRQKKLFCRYHDGNRNPKFILAPAKQEDEWDKPRIIRFHDIISDAEIEIVKDLAKPRLSRATVHDPETGKLTTAQYRVSKSAWLSGYENPVVSRINMRIQDLTGLDVSTAEELQKDEPDAFKELGTGNRIATWLFYMSDVSAGGATVFPEVGASVWPKKGTAVFWYNLFASGEGDYSTRHAACPVLVGNKWVSNKWLHERGQEFRRPCTLSELE

SEQ ID NO: 13890 - protein, 151 aa, Homo sapiens
MSHGAGLVRTTCSSGSALGPGAGAAQPSASPLEGLLDLSYPRTHAALLKVAQMVTLLIAFICVRSSLWTNYSAYSYFEVVTICDLIMILAFYLVHLFRFYRVLTCISWPLSELLHYLIGTLLLLIASIVAASKSYNQSGLVAGADNQSPLA

SEQ ID NO: 13891 - protein, 256 aa, Homo sapiens
MEEPEEPADSGQSLVPVYIYSPEYVSMCDSLAKIPKRASMVHSLIEAYALHKQMRIVKPKVASMEEMATFHTDAYLQHLQKVSQEGDDDHPDSIEYGLGYDCPATEGIFDYAAAIGGATITAAQCLIDGMCKVAINWSGGWHHAKKDEASGFCYLNDAVLGILRLRRKFERILYVDLDLHHGDGVEDAFSFTSKVMTVSLHKFSPGFFPGTGDVSDVGLGKGRYYSVNVPIQDGIQDEKYYQICERYEPPAPNPGL

SEQ ID NO: 13892 - protein, 219 aa, Homo sapiens
MGRLVAVGLLGIALALLGERLLALRNRLKASREVESVDLPHCHLIKGIEAGSEDIDILPNGLAFFSVGLKFPGLHSFAPDKPGGILMMDLKEEKPRARELRISRGFDLASFNPHGISTFIDNDDTVYLFVVNHPEFKNTVEIFKFEEAENSLLHLKTVKHELLPSVNDITAVGPAHFYATNDHYFSDPFLKYLETYLNLHWANVVYYSPNEVKVVYLCC

SEQ ID NO: 13893 - protein, 418 aa, Homo sapiens
MSVAFAAPRQRGKGEITPAAIQKMLDDNNHLIQCIMDSQNKGKTSECSQYQQMLHTNLVYLATIADSNQNMQSLLPAPPTQNMPMGPGGMNQSGPPPPPRSHNMPSDGMVGGGPPAPHMQNQMNGQMPGPNHMPMQGPGPNQLNMTNSSMNMPSSSHGSMGGYNHSVPSSQSMPVQNQMTMSQGQPMGNYGPRPNMSMQPNQGPMMHQQPPSQQYNMPQGGGQHYQGQQPPMGMMGQVNQGNHMMGQRQIPPYRPPQQGPPQQYSGQEDYYGDQYSHGGQGPPEGMNQQYYPDGHNDYGYQQPSYPEQGYDRPYEDSSQHYYEGGNSQYGQQQDAYQGPPPQQGYPPQQQQYPGQQGYPGQQQGYGPSQGGPGPQYPNYPQGQGQQYGGYRPTQPGPPQPPQQRPYGYDQGQYGNYQQ

SEQ ID NO: 13894 - protein, 176 aa, Homo sapiens
MGKAAAAVAFGAEVGVRLALFAAFLVTELLPPFQRLIQPEEMWLYRNPYVEAEYFPTKPMFVIAFLSPLSLIFLAKFLKKADTRDSRQACLAASLALALNGVFTNTIKLIVGRPRPDFFYRCFPDGLAHSDLMCTGDKDVVNEGRKSFPSGHSSCMNIIWTLPYACFHIIEFNLES

SEQ ID NO: 13895 - protein, 209 aa, Homo sapiens
MAAAAAAAGDSDSWDADAFSVEDPVRKVGGGGTAGGDRWEGEDEDEDVKLEEPEEPKVLTPEEQLADKLRLKKLQEESDLELAKETFGVNNAVYGIDAMNPSSRDDFTEFGKLLKDKITQYEKSLYYASFLEVLVRDVCISLEIDDLKKITNSLTVLCSEKQKQEKQSKAKKKKKGVVPGGGLKATMKDDLADYGGYDGGYVQDYEDFM

SEQ ID NO: 13896 - protein, 342 aa, Homo sapiens
MADDLEQQSQGWLSSWLPTWRPTSMSQLKNVEARILQCLQNKFLARYVSLPNQNKIWTVTVSPEQNDRTPLVMVHGFGGGVGLWILNMDSLSARRTLHTFDLLGFGRSSRPAFPRDPEGAEDEFVTSIETWRETMGIPSMILLGHSLGGFLATSYSIKYPDRVKHLILVDPWGFPLRPTNPSEIRAPPAWVKAVASVLGRSNPLAVLRVAGPWGPGLVQRFRPDFKRKFADFFEDDTISEYIYHCNAQNPSGETAFKAMMESFGWARRPMLERIHLIRKDVPITMIYGSDTWIDTSTGKKVKMQRPDSYVRDMEIKGASHHVYADQPHIFNAVVEEICDSVD

SEQ ID NO: 13897 - protein, 330 aa, Homo sapiens
MPVPWFLLSLALGRSPVVLSLERLVGPQDATHCSPGLSCRLWDSDILCLPGDIVPAPGPVLAPTHLQTELVLRCQKETDCDLCLRVAVHLAVHASLQAQVVLSFQAYPTARCVLLEVQVPAALVQFGQSVGSVVYDCFEAALGSEVRIWSYTQPRYEKELNHTQQLPALPWLNVSADGDNVHLVLNVSEEQHFGLSLYWNQVQGPPKPRWHKNLTGPQIITLNHTDLVPCLCIQVWPLEPDSVRTNICPFREDPRAHQNLWQAARLQLLTLQSWLLDAPCSLPAEAALCWRAPGGDPCQPLVPPLSWENVTVDKVLEFPLLKGHPNLCVQ

SEQ ID NO: 13898 - protein, 296 aa, Homo sapiens
MLRLYVLVMGVSAFTLQPAAHTGAARSCRFRGRHYKREFRLEGEPVALRCPQVPYWLWASVSPRINLTWHKNDSARTVPGEEETRMWAQDGALWLLPALQEDSGTYVCTTRNASYCDKMSIELRVFENTDAFLPFISYPQILTLSTSGVLVCPDLSEFTRDKTDVKIQWYKDSLLLDKDNEKFLSVRGTTHLLVHDVALEDAGYYRCVLTFAHEGQQYNITRSIELRIKKKKEETIPVIISPLKTISASLGSRLTIPCKVFLGTGTPLTTMLWWTANDTHIESAYPGGRVTEGPRQ

SEQ ID NO: 13899 - protein, 2446 aa, Homo sapiens
MTARGQSPLAPLLETLEDPSASHGGQTDAYLTLTSRMTGEEGKEVITEIEKKLPRLYKVLKTHISSQNSELSSAALQALGFCLYNPKITSELSEANALELLSKLNDTIKNSDKNVRTRALWVISKQTFPSEVVGKMVSSIIDSLEILFNKGETHSAVVDFEALNVIVRLIEQAPIQMGEEAVRWAKLVIPLVVHSAQKVHLRGATALEMGMPLLLQKQQEIASITEQLMTTKLISELQKLFMSKNETYVLKLWPLFVKLLGRTLHRSGSFINSLLQLEELGFRSGAPMIKKIAFIAWKSLIDNFALNPDILCSAKRLKLLMQPLSSIHVRTETLALTKLEVWWYLLMRLGPHLPANFEQVCVPLIQSTISIDSNASPQGNSCHVATSPGLNPMTPVHKGASSPYGAPGTPRMNLSSNLGGMATIPSIQLLGLEMLLHFLLGPEALSFAKQNKLVLSLEPLEHPLISSPSFFSKHANTLITAVHDSFVAVGKDAPDVVVSAIWKELISLVKSVTESGNKKEKPGSEVLTLLLKSLESIVKSEVFPVSKTLVLMEITIKGLPQKVLGSPAYQVANMDILNGTPALFLIQLIFNNFLECGVSDERFFLSLESLVGCVLSGPTSPLAFSDSVLNVINQNAKQLENKEHLWKMWSVIVTPLTELINQTNEVNQGDALEHNFSAIYGALTLPVNHIFSEQRFPVATMKTLLRTWSELYRAFARCAALVATAEENLCCEELSSKIMSSLEDEGFSNLLFVDRIIYIITVMVDCIDFSPYNIKYQPKVKSPQRPSDWSKKKNEPLGKLTSLFKLIVKVIYSFHTLSFKEAHSDTLFTIGNSITGIISSVLGHISLPSMIRKIFATLTRPLALFYENSKLDEVPKVYSCLNNKLEKLLGEIIACLQFSYTGTYDSELLEQLSPLLCIIFLHKNKQIRKQSAQFWNATFAKVMMLVYPEELKPVLTQAKQKFLLLLPGLETVEMMEESSGPYSDGTENSQLNVKISGMERKSNGKRDSFLAQTKNKKENMKPAAKLKLESSSLKVKGEILLEEEKSTDFVFIPPEGKDAKERILTDHQKEVLKTKRCDIPAMYNNLDVSQDTLFTQYSQEEPMEIPTLTRKPKEDSKMMITEEQMDSDIVIPQDVTEDCGMAEHLEKSSLSNNECGSLDKTSPEMSNSNNDERKKALISSRKTSTECASSTENSFVVSSSSVSNTTVAGTPPYPTSRRQTFITLEKFDGSENRPFSPSPLNNISSTVTVKNNQETMIKTDFLPKAKQREGTFSKSDSEKIVNGTKRSSRRAGKAEQTGNKRSKPLMRSEPEKNTEESVEGIVVLENNPPGLLNQTECVSDNQVHLSESTMEHDNTKLKAATVENAVLLETNTVEEKNVEINLESKENTPPVVISADQMVNEDSQVQITPNQKTLRRSSRRRSEVVESTTESQDKENSHQKKERRKEEEKPLQKSPLHIKDDVLPKQKLIAEQTLQENLIEKGSNLHEKTLGETSANAETEQNKKKADPENIKSEGDGTQDIVDKSSEKLVRGRTRYQTRRASQGLLSSIENSESDSSEAKEEGSRKKRSGKWKNKSNESVDIQDQEEKVVKQECIKAENQSHDYKATSEEDVSIKSPICEKQDESNTVICQDSTVTSDLLQVPDDLPNVCEEKNETSKYAEYSFTSLPVPESNLRTRNAIKRLHKRDSFDNCSLGESSKIGISDISSLSEKTFQTLECQHKRSRRVRRSKGCDCCGEKSQPQEKSLIGLKNTENNDVEISETKKADVQAPVSPSETSQANPYSEGQFLDEHHSVNFHLGLKEDNDTINDSLIVSETKSKENTMQESLPSGIVNFREEICDMDSSEAMSLESQESPNENFKTVGPCLGDSKNVSQESLETKEEKPEETPKMELSLENVTVEGNACKVTESNLEKAKTMELNVGNEASFHGQERTKTGISEEAAIEENKRNDDSEADTAKLNAKEVATEEFNSDISLSDNTTPVKLNAQTEISEQTAAGELDGGNDVSDLHSSEETNTKMKNNEEMMIGEAMAETGHDGETENEGITTKTSKPDEAETNMLTAEMDNFVCDTVEMSTEEGIIDANKTETNTEYSKSEEKLDNNQMVMESDILQEDHHTSQKVEEPSQCLASGTAISELIIEDNNASPQKLRELDPSLVSANDSPSGMQTRCVWSPLASPSTSILKRGLKRSQEDEISSPVNKVRRVSFADPIYQAGLADDIDRRCSIVRSHSSNSSPIGKSVKTSPTTQSKISEMAKESIPCPTESVYPPLVNCVAPVDIILPQITSNMWARGLGQLIRAKNIKTIGDLSTLTASEIKTLPIRSPKVSNVKKALRIYHEQQVKTRGLEEIPVFDISEKTVNGIENKSLSPDEERLVSDIIDPVALEIPLSKNLLAQISALALQLDSEDLHNYSGSQLFEMHEKLSCMANSVIKNLQSRWRSPSHENSI

SEQ ID NO: 13900 - protein, 385 aa, Homo sapiens
MPKKLLLLPPPSASSAFRVPRARPVPPPAMNAARTGYRVFSANSTAACTELAKRITERLGAELGKSVVYQETNGETRVEIKESVRGQDIFIIQTIPRDVNTAVMELLIMAYALKTACARNIIGVIPYFPYSKQSKMRKRGSIVCKLLASMLAKAGLTHIITMDLHQKEIQGFFSFPVDNLRASPFLLQYIQEEIPNYRNAVIVAKSPDAAKRAQSYAERLRLGLAVIHGEAQCTELDMDDGRHSPPMVKNATVHPGLELPLMMAKEKPPITVVGDVGGRIAIIVDDIIDDVESFVAAAEILKERGAYKIYVMATHGILSAEAPRLIEESSVDEVVVTNTVPHEVQKLQCPKIKTVDISLILSEAIRRIHNGESMAYLFRNITVDD

SEQ ID NO: 13901 - protein, 862 aa, Homo sapiens
MDTAEEDICRVCRSEGTPEKPLYHPCVCTGSIKFIHQECLVQWLKHSRKEYCELCKHRFAFTPSRIYKCLFTGSVSSLLTLPLDMLSTENLLADCLQGCFVVTCTLCAFISLVWLREQIVHGGAPIWLEHAAPPFNAAGHHQNEAPAGGNGAENVAADQPANPPAENAVVGENPDAQDDQAEEEEEDNEEEDDAGVEDAADANNGAQDDMNWNALEWDRAAEELTWERMLGLDGSLVFLEHVFWVVSLNTLFILVFAFCPYHIGHFSLVGLGFEEHVQASHFEGLITTIVGYILLAITLIICHGLATLVKFHRSRRLLGVCYIVVKVSLLVVVEIGVFPLICGWWLDICSLEMFDATLKDRELSFQSAPGTTMFLHWLVGMVYVFYFASFILLLREVLRPGVLWFLRNLNDPDFNPVQEMIHLPIYRHLRRFILSVIVFGSIVLLMLWLPIRIIKSVLPNFLPYNVMLYSDAPVSELSLELLLLQVVLPALLEQGHTRQWLKGLVRAWTVTAGYLLDLHSYLLGDQEENENSANQQVNNNQHARNNNAIPVVGEGLHAAHQAILQQGGPVGFQPYRRPLNFPLRIFLLIVFMCITLLIASLICLTLPVFAGRWLMSFWTGTAKIHELYTAACGLYVCWLTIRAVTVMVAWMPQGRRVIFQKVKEWSLMIMKTLIVAVLLAGVVPLLLGLLFELVIVAPLRVPLDQTPLFYPWQDWALGVLHAKIIAAITLMGPQWWLKTVIEQVYANGIRNIDLHYIVRKLAAPVISVLLLSLCVPYVIASGVVPLLGVTAEMQNLVHRRIYPFLLMVVVLMAILSFQVRQFKRLYEHIKNDKYLVGQRLVNYERKSGKQGSSPPPPQSSQE

SEQ ID NO: 13902 - protein, 76 aa, Homo sapiens
MRAGPGPTVTLALVLAVSWAMELKPTAPPIFTGRPFVVAWDVPTQDCGPRLKVPLDLNAFDVQASPNEGFVNQNIT

SEQ ID NO: 13903 - protein, 1038 aa, Homo sapiens
MFHLRTCAAKLRPLTASQTVKTFSQNRPAAARTFQQIRCYSAPVAAEPFLSGTSSNYVEEMYCAWLENPKSVHKSWDIFFRNTNAGAPPGTAYQSPLPLSRGSLAAVAHAQSLVEAQPNVDKLVEDHLAVQSLIRAYQIRGHHVAQLDPLGILDADLDSSVPADIISSTDKLDLAVFKERLRMLTVGGFYGLDESDLDKVFHLPTTTFIGGQESALPLREIIRRLEMAYCQHIGVEFMFINDLEQCQWIRQKFETPGIMQFTNEEKRTLLARLVRSTRFEEFLQRKWSSEKRFGLEGCEVLIPALKTIIDKSSENGVDYVIMGMPHRGRLNVLANVIRKELEQIFCQFDSKLEAADEGSGDVKYHLGMYHRRINRVTDRNITLSLVANPSHLEAADPVVMGKTKAEQFYCGDTEGKKVMSILLHGDAAFAGQGIVYETFHLSDLPSYTTHGTVHVVVNNQIGFTTDPRMARSSPYPTDVARVVNAPIFHVNSDDPEAVMYVCKVAAEWRSTFHKDVVVDLVCYRRNGHNEMDEPMFTQPLMYKQIRKQKPVLQKYAELLVSQGVVNQPEYEEEISKYDKICEEAFARSKDEKILHIKHWLDSPWPGFFTLDGQPRSMSCPSTGLTEDILTHIGNVASSVPVENFTIHGGLSRILKTRGEMVKNRTVDWALAEYMAFGSLLKEGIHIRLSGQDVERGTFSHRHHVLHDQNVDKRTCIPMNHLWPNQAPYTVCNSSLSEYGVLGFELGFAMASPNALVLWEAQFGDFHNTAQCIIDQFICPGQAKWVRQNGIVLLLPHGMEGMGPEHSSARPERFLQMCNDDPDVLPDLKEANFDINQLYDCNWVVVNCSTPGNFFHVLRRQILLPFRKPLIIFTPKSLLRHPEARSSFDEMLPGTHFQRVIPEDGPAAQNPENVKRLLFCTGKVYYDLTRERKARDMVGQVAITRIEQLSPFPFDLLLKEVQKYPNAELAWCQEEHKNQGYYDYVKPRLRTTISRAKPVWYAGRDPAAAPATGNKKTHLTELQRLLDTAFDLDVFKNFS

SEQ ID NO: 13904 - protein, 71 aa, Homo sapiens
MAWSLGSWLGGCLLVSALGMVPPPENVRMNSVNFKNILQWESPAFAKGNLTFTAQYLSHYWTPWNASRSTC

SEQ ID NO: 13905 - protein, 1397 aa, Homo sapiens
MAPPPPPVLPVLLLLAAAAALPAMGLRAAAWEPRVPGGTRAFALRPGCTYAVGAACTPRAPRELLDVGRDGRLAGRRRVSGAGRPLPLQVRLVARSAPTALSRRLRARTHLPGCGARARLCGTGARLCGALCFPVPGGCAAAQHSALAAPTTLPACRCPPRPRPRCPGRPICLPPGGSVRLRLLCALRRAAGAVRVGLALEAATAGTPSASPSPSPPLPPNLPEARAGPARRARRGTSGRGSLKFPMPNYQVALFENEPAGTLILQLHAHYTIEGEEERVSYYMEGLFDERSRGYFRIDSATGAVSTDSVLDRETKETHVLRVKAVDYSTPPRSATTYITVLVKDTNDHSPVFEQSEYRERVRENLEVGYEVLTIRASDRDSPINANLRYRVLGGAWDVFQLNESSGVVSTRAVLDREEAAEYQLLVEANDQGRNPGPLSATATVYIEVEDENDNYPQFSEQNYVVQVPEDVGLNTAVLRVQATDRDQGQNAAIHYSILSGNVAGQFYLHSLSGILDVINPLDFEDVQKYSLSIKAQDGGRPPLINSSGVVSVQVLDVNDNEPIFVSSPFQATVLENVPLGYPVVHIQAVDADSGENARLHYRLVDTASTFLGGGSAGPKNPAPTPDFPFQIHNSSGWITVCAELDREEVEHYSFGVEAVDHGSPPMSSSTSVSITVLDVNDNDPVFTQPTYELRLNEDAAVGSSVLTLQARDRDANSVITYQLTGGNTRNRFALSSQRGGGLITLALPLDYKQEQQYVLAVTASDGTRSHTAHVLINVTDANTHRPVFQSSHYTVSVSEDRPVGTSIATLSANDEDTGENARITYVIQDPVPQFRIDPDSGTMYTMMELDYENQVAYTLTIMAQDNGIPQKSDTTTLEILILDANDNAPQFLWDFYQGSIFEDAPPSTSILQVSATDRDSGPNGRLLYTFQGGDDGDGDFYIEPTSGVIRTQRRLDRENVAVYNLWALAVDRGSPTPLSASVEIQVTILDINDNAPMFEKDELELFVEENNPVGSVVAKIRANDPDEGPNAQIMYQIVEGDMRHFFQLDLLNGDLRAMVELDFEVRREYVLVVQATSAPLVSRATVHILLVDQNDNPPVLPDFQILFNNYVTNKSNSFPTGVIGCIPAHDPDVSDSLNYTFVQGNELRLLLLDPATGELQLSRDLDNNRPLEALMEVSVSDGIHSVTAFCTLRVTIITDDMLTNSITVRLENMSQEKFLSPLLALFVEGVAAVLSTTKDDVFVFNVQNDTDVSSNILNVTFSALLPGGVRGQFFPSEDLQEQIYLNRTLLTTISTQRVLPFDDNICLREPCENYMKCVSVLRFDSSAPFLSSTTVLFRPIHPINGLRCRCPPGFTGDYCETEIDLCYSDPCGANGRCRSREGGYTCECFEDFTEIS

SEQ ID NO: 13906 - protein, 386 aa, Homo sapiens
MKFQGPLACLLLALCLGSGEAGPLQSGEESTGTNIGEALGHGLGDALSEGVGKAIGKEAGGAAGSKVSEALGQGTREAVGTGVRQVPGFGVADALGNRVGEAAHALGNTGHEIGRQAEDVIRHGADAVRGSWQGVPGHNGAWETSGGHGIFGSQGGLGGQGQGNPGGLGTPWVHGYPGNSAGSFGMNPQGAPWGQGGNGGPPNFGTNTQGAVAQPGYGSVRASNQNEGCTNPPPSGSGGGSSNSGGGSGSQSGSSGSGSNGDNNNGSSSGGSSSGSSSGGSSGGSSGGSSGNSGGSRGDSGSESSWGSSTGSSSGNHGGSGGGNGHKPGCEKPGNEARGSGESGIQNSETSPGMFNFDTFWKNFKSKLGFINWDAINKDQRSSRIP

SEQ ID NO: 13907 - protein, 662 aa, Homo sapiens
MGPLRESKEHRVQHHDKEISRSRIPRLILRPHMPQQQHKVSPASESPFSEEESREFNPSSSGRSARTVSSNSFCSDDTGCPSSQSVSPVKTPSDAGNSPIGFCPGSDEGFTRKKCTIGMVGEGSIQSSRYKKESKSGLVKPGSEADFSSSSSTGSISAPEVHMSTAGSKRSSSSRNRGPHGRSNGASSHKPGSSPSSPREKDLLSMLCRNQLSPVNIHPSYAPSSPSSSNSGSYKGSDCSPIMRRSGRYMSCGENHGVRPPNPEQYLTPLQQKEVTVRHLKTKLKESERRLHERESEIVELKSQLARMREDWIEEECHRVEAQLALKEARKEIKQLKQVIETMRSSLADKDKGIQKYFVDINIQNKKLESLLQSMEMAHSGSLRDELCLDFPCDSPEKSLTLNPPLDTMADGLSLEEQVTGEGADRELLVGDSIANSTDLFDEIVTATTTESGDLELVHSTPGANVLELLPIVMGQEEGSVVVERAVQTDVVPYSPAISELIQSVLQKLQDPCPSSLASPDESEPDSMESFPESLSALVVDLTPRNPNSAILLSPVETPYANVDAEVHANRLMRELDFAACVEERLDGVIPLARGGVVRQYWSSSFLVDLLAVAAPVVPTVLWAFSTQRGGTDPVYNIGALLRGCCVVALHSLRRTAFRIKT

SEQ ID NO: 13908 - protein, 1297 aa, Homo sapiens
MSSGDPAHLGLCLWLWLGATLGREQVQASGLLRLAVLPEDRLQMKWRESEGSGLGYLVQVKPMAGDSEQEVILTTKTPKATVGGLSPSKGYTLQIFELTGSGRFLLARREFVIEDLKSSSLDRSSQRPLGSGAPEPTPSHTGSPDPEQASEPQVAFTPSQDPRTPGGSEWRETGPQFRCLPPVPADMVFLVDGSWSIGHSHFQQVKDFLASVIAPFEIGPDKVQVGLTQYSGDAQTEWDLNSLSTKEQVLAAVRRLRYKGGNTFTGLALTHVLGQNLQPAAGLRPEAAKVVILVTDGKSQDDVHTAARVLKDLGVNVFAVGVKNADEAELRLLASPPRDITVHSVLDFLQLGALAGLLSRLICQRLQGGSPRQGPAAAPALDTLPAPTSLVLSQVTSSSIRLSWTPAPRHPLKYLIVWRASRGGTPREVVVEGPAASTELHNLASRTEYLVSVFPIYEGGVGEGLRGLVTTAPLPPPRALTLAAVTPRTVHLTWQPSAGATHYLVRCSPASPKGEEEEREVQVGRPEVLLDGLEPGRDYEVSVQSLRGPEGSEARGIRARTPTLAPPRHLGFSDVSHDAARVFWEGAPRPVRLVRVTYVSSEGGHSGQTEAPGNATSATLGPLSSSTTYTVRVTCLYPGGGSSTLTGRVTTKKAPSPSQLSMTELPGDAVQLAWVAAAPSGVLVYQITWTPLGEGKAHEISVPGNLGTAVLPGLGRHTEYDVTILAYYRDGARSDPVSLRYTPSTVSRSPPSNLALASETPDSLQVSWTPPLGRVLHYWLTYAPASGLGPEKSVSVPGARSHVTLPDLQAATKYRVLVSAIYAAGRSEAVSATGQTACPALRPDGSLPGFDLMVAFSLVEKAYASIRGVAMEPSAFGGTPTFTLFKDAQLTRRVSDVYPAPLPPEHTIVFLVRLLPETPREAFALWQMTAEDFQPLLGVLLDAGKKSLTYFHRDPRAALQEATFDPQEVRKIFFGSFHKVHVAVGRSKVRLYVDCRKVAERPLGEMGSPPAAGFVTLGRLAKARGPRSSSAAFQLQMLQIVCSDTWADEDRCCELPASRDGETCPAFVSACSCSSETPGPPGPQGPPGLPGRNGTPGEQGFPGPRGPPGVKGEKGDHGLPGLQGHPGHQGIPGRVGLQGPKGMRGLEGTAGLPGPPGPRGFQGMAGARGTSGERGPPGTVGPTGLPGPKGERGEKGEPQSLATLYQLVSQACESAIQTHVSKFDSFHENTRPPMPILEQKLEPGTEPLGSPGTRSKALVPGEWGRGGRHLEGRGEPGAVGQMGSPGQQGASTQGLWE

SEQ ID NO: 13909 - protein, 648 aa, Homo sapiens
MEKNGNNRKLRVCVATCNRADYSKLAPIMFGIKTEPEFFELDVVVLGSHLIDDYGNTYRMIEQDDFDINTRLHTIVRGEDEAAMVESVGLALVKLPDVLNRLKPDIMIVHGDRFDALALATSAALMNIRILHIEGGEVSGTIDDSIRHAITKLAHYHVCCTRSAEQHLISMCEDHDRILLAGCPSYDKLLSAKNKDYMSIIRMWLGDDVKSKDYIVALQHPVTTDIKHSIKMFELTLDALISFNKRTLVLFPNIDAGSKEMVRVMRKKGIEHHPNFRAVKHVPFDQFIQLVAHAGCMIGNSSCGVREVGAFGTPVINLGTRQIGRETGENVLHVRDADTQDKILQALHLQFGKQYPCSKIYGDGNAVPRILKFLKSIDLQEPLQKKFCFPPVKENISQDIDHILETLSALAVDLGGTNLRVAIVSMKGEIVKKYTQFNPKTYEERINLILQMCVEAAAEAVKLNCRILGVGIGGGIIHQHELIHGSSFCAAELGHLVVSLDGPDCSCGSHGCIEAYASGMALQREAKKLHDEDLLLVEGMSVPKDEAVGALHLIQAAKLGNAKAQSILRTAGTALGLGVVNILHTMNPSLVILSGVLASHYIHIVKDVIRQQALSSVQDVDVVVSDLVDPALLGAASMVLDYTTRRIY

SEQ ID NO: 13910 - protein, 380 aa, Homo sapiens
MRSPGGILLQALPRLLQHAALPGLAELPARWALPRGAGGDGPADRLPRGGGASAAAAAAAASGALLGAYLERHGPPEASELPEPGGALAGGPGSGGGGVVVGVAEVRNWRCCCLGSTCWCRSLVLVCVLAALCFASLALVRRYLHHLLLWVESLDSLLGVLLFVVGFIVVSFPCGWGYIVLNVAAGYLYGFVLGMGLMMVGVLIGTFIAHVVCKRLLTAWVAARIQSSEKLSAVIRVVEGGSGLKVVALARLTPIPFGLQNAVFSITDLSLPNYLMASSVGLLPTQLLNSYLGTTLRTMEDVIAEQSVSGYFVFCLQIIISIGLMFYVVHRAQVELNAAIVACEMELKSSLVKGNQPNTSGSSFYNKRTLTFSGGGINVV

SEQ ID NO: 13911 - protein, 47 aa, Homo sapiens
MRLSVRRVLLAAGCALVLVLAVQLGQQVLECRAVLAGLRSPRGAMRP

SEQ ID NO: 13912 - protein, 413 aa, Homo sapiens
MPRCTYQLEQNPGFLPDGPGVHARAHCQDLSGPYGHEFATSESLGGRVGKTRAPQSGARSRMERAGPAGEEGGAREGRLLPRAPGAWVLRACAERAALEVGAASADTGVRGCGARGPAPLLASAGGGRARDGTWGVRTKGSGAALPSRPASRAAPRPEASSPPLPLEKARGGLSGPQGGRARGAMAHVGSRKRSRSRSRSRGRGSEKRKKKSRKDTSRNCSASTSQGRKASTAPGAEERSKQKARRRTRSSSSSSSSSSSSSSSSSSSSSSSSSDGRKKRGKYKDKRRKKKKKRKKLKKKGKEKAEAQQVEALPGPSLDQWHRSAGEEEDGPVLTDEQKSRIQAMKPMTKEEWDARQSIIRKVVDPETGRTRLIKGDGEVLEEIVTKERHREINKQATRGDCLAFQMRAGLLP

SEQ ID NO: 13913 - protein, 891 aa, Homo sapiens
MVAPVLETSHVFCCPNRVRGVLNWSSGPRGLLAFGTSCSVVLYDPLKRVVVTNLNGHTARVNCIQWICKQDGSPSTELVSGGSDNQVIHWEIEDNQLLKAVHLQGHEGPVYAVHAVYQRRTSDPALCTLIVSAAADSAVRLWSKKGPEVMCLQTLNFGNGFALALCLSFLPNTDVTWKTGQVERGRAWKPPASLALCSRSCDSMVSCYASILCKALWKEKLHTFWHHNRISFLPSAFRPIPILACGNDDCRIHIFAQQNDQFQKVLSLCGHEDWIRGVEWAAFGRDLFLASCSQDCLIRIWKLYIKSTSLETQDDDNIRLKENTFTIENESVKIAFAVTLETVLAGHENWVNAVHWQPVFYKDGVLQQPVRLLSASMDKTMILWAPDEESGVWLEQVRVGEVGGNTLGFYDCQFNEDGSMIIAHAFHGALHLWKQNTVNPREWTPEIVISGHFDGVQDLVWDPEGEFIITVGTDQTTRLFAPWKRKDQSQVTWHEIARPQIHGYDLKCLAMINRFQFVSGADEKVLRVFSAPRNFVENFCAITGQSLNHVLCNQDSDLPEGATVPALGLSNKAVFQGDIASQPSDEEELLTSTGFEYQQVAFQPSILTEPPTEDHLLQNTLWPEVQKLYGHGYEIFCVTCNSSKTLLASACKAAKKEHAAIILWNTTSWKQVQNLVFHSLTVTQMAFSPNEKFLLAVSRDRTWSLWKKQDTISPEFEPVFSLFAFTNKITSVHSRIIWSCDWSPDSKYFFTGSRDKKVVVWGECDSTDDCIEHNIGPCSSVLDVGGAVTAVSVCPVLHPSQRYVVAVGLECGKICLYTWKKTDQVPEINDWTHCVETSQSQSHTLAIRKLCWKNCSGKTEQKEAEGAEWLHFASCGEDHTVKIHRVNKCAL

SEQ ID NO: 13914 - protein, 166 aa, Homo sapiens
MLVLSILLYTCEMFQDSVAFEDVAVTFTQEEWALLDPSQKNLCRDVMQETFRNLASIGKKWKPQNIYVEYENLRRNLRIVGERLFESKEGHQHGEILTQVPDDMLKKTTTGVKSCESSVYGEVGSAHSSLNRHIRDDTGHKAYEYQEYGQKPYKCKYCKKPFNCLS

SEQ ID NO: 13915 - protein, 164 aa, Homo sapiens
MVLLWLTLLLIALPCLLQTKEGGKPWAGAENLTCWIHDVDFLSCSWAVGPGAPADVQYDLYLNVANRRQQYECLHYKTDAQGTRIGCRFDDISRLSSGSQSSHILVRGRSAAFGIPCTDKFVVFSQIEILTPPNMTAKCNKTHSFMHWKMRSHFNRKFRYELQI

SEQ ID NO: 13916 - protein, 128 aa, Homo sapiens
MMGSPVSHLLAGFCVWVVLGWVGGSVPNLGPAEQEQNHYLAQLFGLYGENGTLTAGGLARLLHSLGLGRVQGLRLGQHGPLTGRAASPAADNSTHRPQNPELSVDVWAGMPLGPSGWGDLEESKAPHL

SEQ ID NO: 13917 - protein, 563 aa, Homo sapiens
MARRLLPAHVQESVTFRDVAVFFSQDEWLHLDSAQRALYREVMLENYSILVSLGILFSKPKVISQLEQGEDPWMVESGVPQGAHLGWESLFGTIVSKEENQEVMKKLIIDGTFDFKLEKTYINEDKLEKQQGKKNRLFSKVLVTIKKVYMKERSFKGVEFGKNLGLKSSLIRKPRIVSRGRRPRSQQYSVLFKQLGVNTVRKCYKCNICGKIFLHSSSLSKHQRIHTGEKLYKCKECRKAFSQSSSLTQHLRVHTGEKPYICSECGKAFSFTTSLIGHQRMHTGERPYKCKECGKTFKGSSSLNNHQRIHTGEKPYKCNECGRAFSQCSSLIQHHRIHTGEKPYECTQCGKAFTSISRLSRHHRIHTGEKPFHCNECGKVFSYHSALIIHQRIHTGEKPYACKECGKAFSQSSALIQHQRIHTGEKPYKCNECGKAFSWISRLNIHHRIHTGEKPYNCKECGKAFSSHSGVNTHRKIHTGEKPYKCNDCEKAFNQSSALIQHQRIHTGEKPYNCKVCGKAFRQSSSLMTHMRIHTGEKPYKCKECGKAFSQSSSLTNHQRTHN

SEQ ID NO: 13918 - protein, 139 aa, Homo sapiens
MQPASAKWYDRRDYVFIEFCVEDSKDVNVNFEKSKLTFSCLGGSDNFKHLNEIDLFHCIDPNDSKHKRTDRSILCCLRKGESGQSWPRLTKERAKLNWLSVDFNNWKDWEDDSDEDMSNFDRFSEDSQDSDDEKMPDLE

SEQ ID NO: 13919 - protein, 70 aa, Homo sapiens
MLVLFLLGTVFLLCPYWGELHDPIKGQSMYHYSKLSCMTSCEDINFLGFTKRVELICCDHSNYCNLPEGV

SEQ ID NO: 13920 - protein, 321 aa, Homo sapiens
MDVRALPWLPWLLWLLCRGGGDADSRAPFTPTWPRSREREAAAFRESLNRHRYLNSLFPSENSTAFYGINQFSYLFPEEFKAIYLRSKPSKFPRYSAEVHMSIPNVSLPLRFDWRDKQVVTQVRNQQMCGGCWAFSVVGAVESAYAIKGKPLEDLSVQQVIDCSYNNYGCNGGSTLNALNWLNKMQVKLVKDSEYPFKAQNGLCHYFSGSHSGFSIKGYSAYDFSDQEDEMAKALLTFGPLVVIVDAVSWQDYLGGIIQHHCSSGEANHAVLITGFDKTGSTPYWIVRNSWGSSWGVDGYAHVKMGSNVCGIADSVSSIFV

SEQ ID NO: 13921 - protein, 806 aa, Homo sapiens
MGAPACALALCVAVAIVAGASSESLGTEQRVVGRAAEVPGPEPGQQEQLVFGSGDAVELSCPPPGGGPMGPTVWVKDGTGLVPSERVLVGPQRLQVLNASHEDSGAYSCRQRLTQRVLCHFSVRVTDAPSSGDDEDGEDEAEDTGVDTGAPYWTRPERMDKKLLAVPAANTVRFRCPAAGNPTPSISWLKNGREFRGEHRIGGIKLRHQQWSLVMESVVPSDRGNYTCVVENKFGSIRQTYTLDVLERSPHRPILQAGLPANQTAVLGSDVEFHCKVYSDAQPHIQWLKHVEVNGSKVGPDGTPYVTVLKTAGANTTDKELEVLSLHNVTFEDAGEYTCLAGNSIGFSHHSAWLVVLPAEEELVEADEAGSVYAGILSYGVGFFLFILVVAAVTLCRLRSPPKKGLGSPTVHKISRFPLKRQVSLESNASMSSNTPLVRIARLSSGEGPTLANVSELELPADPKWELSRARLTLGKPLGEGCFGQVVMAEAIGIDKDRAAKPVTVAVKMLKDDATDKDLSDLVSEMEMMKMIGKHKNIINLLGACTQGGPLYVLVEYAAKGNLREFLRARRPPGLDYSFDTCKPPEEQLTFKDLVSCAYQVARGMEYLASQKCIHRDLAARNVLVTEDNVMKIADFGLARDVHNLDYYKKTTNGRLPVKWMAPEALFDRVYTHQSDVWSFGVLLWEIFTLGGSPYPGIPVEELFKLLKEGHRMDKPANCTHDLYMIMRECWHAAPSQRPTFKQLVEDLDRVLTVTSTDEYLDLSAPFEQYSPGGQDTPSSSSSGDDSVFAHDLLPPAPPSSGGSRT

SEQ ID NO: 13922 - protein, 821 aa, Homo sapiens
MGPWSRSLSALLLLLQVSSWLCQEPEPCHPGFDAESYTFTVPRRHLERGRVLGRVNFEDCTGRQRTAYFSLDTRFKVGTDGVITVKRPLRFHNPQIHFLVYAWDSTYRKFSTKVTLNTVGHHHRPPPHQASVSGIQAELLTFPNSSPGLRRQKRDWVIPPISCPENEKGPFPKNLVQIKSNKDKEGKVFYSITGQGADTPPVGVFIIERETGWLKVTEPLDRERIATYTLFSHAVSSNGNAVEDPMEILITVTDQNDNKPEFTQEVFKGSVMEGALPGTSVMEVTATDADDDVNTYNAAIAYTILSQDPELPDKNMFTINRNTGVISVVTTGLDRESFPTYTLVVQAADLQGEGLSTTATAVITVTDTNDNPPIFNPTTGLDFEAKQQYILHVAVTNVVPFEVSLTTSTATVTVDVLDVNEAPIFVPPEKRVEVSEDFGVGQEITSYTAQEPDTFMEQKITYRIWRDTANWLEINPDTGAISTRAELDREDFEHVKNSTYTALIIATDNGSPVATGTGTLLLILSDVNDNAPIPEPRTIFFCERNPKPQVINIIDADLPPNTSPFTAELTHGASANWTIQYNDPTQESIILKPKMALEVGDYKINLKLMDNQNKDQVTTLEVSVCDCEGAAGVCRKAQPVEAGLQIPAILGILGGILALLILILLLLLFLRRRAVVKEPLLPPEDDTRDNVYYYDEEGGGEEDQDFDLSQLHRGLDARPEVTRNDVAPTLMSVPRYLPRPANPDEIGNFIDENLKAADTDPTAPPYDSLLVFDYEGSGSEAASLSSLNSSESDKDQDYDYLNEWGNRFKKLADMYGGGEDD

SEQ ID NO: 13923 - protein, 325 aa, Homo sapiens
MFANLKYVSLGILVFQTTSLVLTMRYSRTLKEEGPRYLSSTAVVVAELLKIMACILLVYKDSKCSLRALNRVLHDEILNKPMETLKLAIPSGIYTLQNNLLYVALSNLDAATYQVTYQLKILTTALFSVSMLSKKLGVYQWLSLVILMTGVAFVQWPSDSQLDSKELSAGSQFVGLMAVLTACFSSGFAGVYFEKILKETKQSVWIRNIQLGFFGSIFGLMGVYIYDGELVSKNGFFQGYNRLTWIVVVLQALGGLVIAAVIKYADNILKGFATSLSIILSTLISYFWLQDFVPTSVFFLGAILVITATFLYGYDPKPAGNPTKA

SEQ ID NO: 13924 - protein, 171 aa, Homo sapiens
MAATGANAEKAESHNDCPVRLLNPNIAKMKEDILYHFNLTTSRHNFPALFGDVKFVCVGGSPSRMKAFIRCVGAELGLDCPGRDYPNICAGTDRYAMYKVGPVLSVSHGMGIPSISIMLHELIKLLYYARCSNVTIIRIGTSGGIGILKHLRRKDTGKSKGGRERRSTKLR

SEQ ID NO: 13925 - protein, 283 aa, Homo sapiens
MAGAVSLLGVVGLLLVSALSGVLGDRANPDLRAHPGNAAHPGSGATEPRRRPPLKDQRERTRAGSLPLGALYTAAVAAFVLYKCLQGKDETAVLHEEASKQQPLQSEQQLAQLTQQLAQTEQHLNNLMAQLDPLFERVTTLAGAQQELLNMKLWTIHELLQDSKPDKDMEASEPGEGSGGESAGGGDKVSETGTFLISPHTEASRPLPEDFCLKEDEEEIGDSQAWEEPTNWSTETWNLATSWEVGRGLRRRCSQAVAKGPSHSLGWEGGTTAEGRLKQSLFS

SEQ ID NO: 13926 - protein, 618 aa, Homo sapiens
MYDNMSTMVYIKEDKLEKLTQDEIISKTKQVIQGLEALKNEHNSILQSLLETLKCLKKDDESNLVEEKSNMIRKSLEMLELGLSEAQVMMALSNHLNAVESEKQKLRAQVRRLCQENQWLRDELANTQQKLQKSEQSVAQLEEEKKHLEFMNQLKKYDDDISPSEDKDTDSTKEPLDDLFPNDEDDPGQGIQQQHSSAAAAAQQGGYEIPARLRTLHNLVIQYASQGRYEVAVPLCKQALEDLEKTSGHDHPDVATMLNILALVYRDQNKYKDAANLLNDALAIREKTLGKDHPAVAATLNNLAVLYGKRGKYKEAEPLCKRALEIREKVLGKDHPDVAKQLNNLALLCQNQGKYEEVEYYYQRALEIYQTKLGPDDPNVAKTKNNLASCYLKQGKFKQAETLYKEILTRAHEREFGSVDDENKPIWMHAEEREECKGKQKDGTSFGEYGGWYKACKVDSPTVTTTLKNLGALYRRQGKFEAAETLEEAAMRSRKQGLDNVHKQRVAEVLNDPENMEKRRSRESLNVDVVKYESGPDGGEEVSMSVEWNGDGTGSLKRSGSFSKLRASIRRSSEKLVRKLKGGSSRESEPKNPGASLAEPLFVENDSSSSGLEDATAN

SEQ ID NO: 13927 - protein, 173 aa, Homo sapiens
MGSTVPRSASVLLLLLLLRRAEQPCGAELTFELPDNAKQCFHEEVEQGVKFSLDYQVITGGHYDVDCYVEDPQGNTIYRETKKQYDSFTYRAEVKGVYQFCFSNEFSTFSHKTVYFDFQVGDEPPILPDMGNRVTALTQRFRGAYWKEVDKMVDYMQPGGTPATEGLGRLAPS

SEQ ID NO: 13928 - protein, 2265 aa, Homo sapiens
MLRGPGPGLLLLAVQCLGTAVPSTGASKSKRQAQQMVQPQSPVAVSQSKPGCYDNGKHYQINQQWERTYLGNALVCTCYGGSRGFNCESKPEAEETCFDKYTGNTYRVGDTYERPKDSMIWDCTCIGAGRGRISCTIANRCHEGGQSYKIGDTWRRPHETGGYMLECVCLGNGKGEWTCKPIAEKCFDHAAGTSYVVGETWEKPYQGWMMVDCTCLGEGSGRITCTSRNRCNDQDTRTSYRIGDTWSKKDNRGNLLQCICTGNGRGEWKCERHTSVQTTSSGSGPFTDVRAAVYQPQPHPQPPPYGHCVTDSGVVYSVGMQWLKTQGNKQMLCTCLGNGVSCQETAVTQTYGGNSNGEPCVLPFTYNGRTFYSCTTEGRQDGHLWCSTTSNYEQDQKYSFCTDHTVLVQTRGGNSNGALCHFPFLYNNHNYTDCTSEGRRDNMKWCGTTQNYDADQKFGFCPMAAHEEICTTNEGVMYRIGDQWDKQHDMGHMMRCTCVGNGRGEWTCIAYSQLRDQCIVDDITYNVNDTFHKRHEEGHMLNCTCFGQGRGRWKCDPVDQCQDSETGTFYQIGDSWEKYVHGVRYQCYCYGRGIGEWHCQPLQTYPSSSGPVEVFITETPSQPNSHPIQWNAPQPSHISKYILRWRPKNSVGRWKEATIPGHLNSYTIKGLKPGVVYEGQLISIQQYGHQEVTRFDFTTTSTSTPVTSNTVTGETTPFSPLVATSESVTEITASSFVVSWVSASDTVSGFRVEYELSEEGDEPQYLDLPSTATSVNIPDLLPGRKYIVNVYQISEDGEQSLILSTSQTTAPDAPPDTTVDQVDDTSIVVRWSRPQAPITGYRIVYSPSVEGSSTELNLPETANSVTLSDLQPGVQYNITIYAVEENQESTPVVIQQETTGTPRSDTVPSPRDLQFVEVTDVKVTIMWTPPESAVTGYRVDVIPVNLPGEHGQRLPISRNTFAEVTGLSPGVTYYFKVFAVSHGRESKPLTAQQTTKLDAPTNLQFVNETDSTVLVRWTPPRAQITGYRLTVGLTRRGQPRQYNVGPSVSKYPLRNLQPASEYTVSLVAIKGNQESPKATGVFTTLQPGSSIPPYNTEVTETTIVITWTPAPRIGFKLGVRPSQGGEAPREVTSDSGSIVVSGLTPGVEYVYTIQVLRDGQERDAPIVNKVVTPLSPPTNLHLEANPDTGVLTVSWERSTTPDITGYRITTTPTNGQQGNSLEEVVHADQSSCTFDNLSPGLEYNVSVYTVKDDKESVPISDTIIPAVPPPTDLRFTNIGPDTMRVTWAPPPSIDLTNFLVRYSPVKNEEDVAELSISPSDNAVVLTNLLPGTEYVVSVSSVYEQHESTPLRGRQKTGLDSPTGIDFSDITANSFTVHWIAPRATITGYRIRHHPEHFSGRPREDRVPHSRNSITLTNLTPGTEYVVSIVALNGREESPLLIGQQSTVSDVPRDLEVVAATPTSLLISWDAPAVTVRYYRITYGETGGNSPVQEFTVPGSKSTATISGLKPGVDYTITVYAVTGRGDSPASSKPISINYRTEIDKPSQMQVTDVQDNSISVKWLPSSSPVTGYRVTTTPKNGPGPTKTKTAGPDQTEMTIEGLQPTVEYVVSVYAQNPSGESQPLVQTAVTTIPAPTDLKFTQVTPTSLSAQWTPPNVQLTGYRVRVTPKEKTGPMKEINLAPDSSSVVVSGLMVATKYEVSVYALKDTLTSRPAQGVVTTLENVSPPRRARVTDATETTITISWRTKTETITGFQVDAVPANGQTPIQRTIKPDVRSYTITGLQPGTDYKIYLYTLNDNARSSPVVIDASTAIDAPSNLRFLATTPNSLLVSWQPPRARITGYIIKYEKPGSPPREVVPRPRPGVTEATITGLEPGTEYTIYVIALKNNQKSEPLIGRKKTDELPQLVTLPHPNLHGPEILDVPSTVQKTPFVTHPGYDTGNGIQLPGTSGQQPSVGQQMIFEEHGFRRTTPPTTATPIRHRPRPYPPNVGQEALSQTTISWAPFQDTSEYIISCHPVGTDEEPLQFRVPGTSTSATLTGLTRGATYNVIVEALKDQQRHKVREEVVTVGNSVNEGLNQPTDDSCFDPYTVSHYAVGDEWERMSESGFKLLCQCLGFGSGHFRCDSSRWCHDNGVNYKIGEKWDRQGENGQMMSCTCLGNGKGEFKCDPHEATCYDDGKTYHVGEQWQKEYLGAICSCTCFGGQRGWRCDNCRRPGGEPSPEGTTGQSYNQYSQRYHQRTNTNVNCPIECFMPLDVQADREDSRE

SEQ ID NO: 13929 - protein, 1152 aa, Homo sapiens
MGITEYNNQCRAIVMRYSAEWKSTVSRLGRWIDFDNDYKTLYPQFMESVWWVFKQLYDKGLVYRGVKVMPFSTACNTPLSNFESHQNYKDVQDPSVFVTFPLEEDETVSLVAWTTTPWTLPSNLAVCVNPEMQYVKIKDVARGRLLILMEARLSALYKLESDYEILERFPGAYLKGKKYRPLFDYFLKCKENGAFTVLVDNYVKEEEGTGVVHQAPYFGAEDYRVCMDFNIIRKDSLPVCPVDASGCFTTEVTDFAGQYVKDADKSIIRTLKEQGRLLVATTFTHSYPFCWRSDTPLIYKAVPSWFVRVENMVDQLLRNNDLCYWVPELVREKRFGNWLKDARDWTISRNRYWGTPIPLWVSDDFEEVVCIGSVAELEELSGAKISDLHRESVDHLTIPSRCGKGSLHRISEVFDCWFESGSMPYAQVHYPFENKREFEDAFPADFIAEGIDQTRGWFYTLLVLATALFGQPPFKNVIVNGLVLASDGQKMSKRKKNYPDPVSIIQKYGADALRLYLINSPVVRAENLRFKEEGVRDVLKDVLLPWYNAYRFLIQNVLRLQKEEEIEFLYNENTVRESPNITDRWILSFMQSLIGFFETEMAAYRLYTVVPRLVKFVDILTNWYVRMNRRRLKGENGMEDCVMALETLFSVLLSLCRLMAPYTPFLTELMYQNLKVLIDPVSVQDKDTLSIHYLMLPRVREELIDKKTESAVSQMQSVIELGRVIRDRKTIPIKYPLKEIVVIHQDPEALKDIKSLEKYIIEELNVRKVTLSTDKNKYGIRLRAEPDHMVLGKRLKGAFKAVMTSIKQLSSEELEQFQKTGTIVVEGHELHDEDIRLMYTFDQATGGTAQFEAHSDAQALVLLDVTPDQSMVDEGMAREVINRIQKLRKKCNLVPTDEITVYYKAKSEGTYLNSVIESHTEFIFTTIKAPLKPYPVSPSDKVLIQEKTQLKGSELEITLTRGSSLPGPACAYVNLNICANGSEQGGVLLLENPKGDNRLDLLKLKSVVTSIFGVKNTELAVFHDETEIQNQTDLLSLSGKTLCVTAGSAPSLINSSSTLLCQYINLQLLNAKPQECLMGTVGTLLLENPLGQNGLTHQGLLYEAAKVFGLRSRKLKLFLNETQTQEITEDIPVKTLNMKTVYVSVLPTTADF

SEQ ID NO: 13930 - protein, 899 aa, Homo sapiens
MARHGCLGLGLFCCVLFAATVGPQPTPSIPGAPATTLTPVPQSEASMLSLNLGLNFKFHLRGPAAVWGSPVTETQPLSLGPGQEPGEEVASGLRTDPLWELLVGSSGNSLTEWGSTEGGSKPRASSLLPESTSRRSGPSDGPTAPYQPRRSTVTWDTALMVTALPSSAPRPHQSELELKFDMALRAGAAPTLGHRTLPLLPSLRASLAEIAGRLGPFGFFGTTLSPLRNFSGLSPPGETTSTSSASGVSGSLGFLGTTLSLPPYSLERKLSSPSPLDPAASLSFASIATTSLDPTVPISGPDDLSPPASLGNPSGQPECGPGSCSVGELPEREGQPPEAPRPLFFLTLEADWAEARARWGLAWEAHVYGVGALFGLVALLALLALALLPWRCPPGAPCLALLDLLLLSAGTTRAFPLFYDAYGHRDRLPALAWLLLQDLPLPCLAAGLGLACLLLARPRPPRCPTGLAALLLLGLGLAAAAALGSAAHRPLRPLRLASRGLHAFLAAFLSGLLLALSCWGGRRRRAGAPLGGSGFKGATPLPQGRSPFAPRESWRRAARTAPVAGTFGLLSGALQGYEVLHALGYGGQSGLEGPWPWWAFQLGLRLGEVGVALPLALLGLYPALCSPRVPPRCWAKLFRLSPGHAAPLLPGGWVTGPPDKEPLGSAIARGDAELLQLCALAGPGPDLLLQGGGCRGFEGAAANPAPSPASSPCSDYTVDFRPPSPINLRRSIEEALCSEALLAPGLFQGPAFEDALPGLGLYRTASLGTGGRASERSGEASGPAAPPELPSPGAWPAGSSVSSGSFCGLSRDSSSMLLCSSPDRPPRCPLVCVLSPPRPSGSSPSLPASGSYQALSPPSRDSPEPASELQAEEALLQEQFLDACRQIDELSVGSDTIDL

SEQ ID NO: 13931 - protein, 2754 aa, Homo sapiens
MAASERLYELWLLYYAQKDLGYLQQWLKAFVGAFKKSISLSSLEPRRPEEAGAEVPLLPLDELHVLAEQLHQADLEQALLLLKLFIILCRNLENIEAGRGQVLVPRVLALLTKLVAELKGCPPPQGRGTQLENVALHALLLCEGLFDPYQTWRRQRSGEVISSKEKSKYKFPPAALPQEFSAFFQESLQNADHLPPILLLRLIHLFCAVLAGGKENGQMAVSDGSVKGLLSVVRGWSRGPAPDPCLVPLALEALVGAVHVLHASRAPPRGPELRALLESYFHVLNADWPAGLSSGPEEALVTLRVSMLDAIPMMLACEDRPVLQATFLSNNCFEHLTRLIQNSKLYLQSRAPPEGDSDLATRLLTEPDVQKVLDQDTDAIAVHVVRVLTCIMSDSPSAKEVFKERIGYPHLQEVLQSHGPPTHRLLQELLNMAVEGDHSMCPPPPIRNEQPVLVLAQWLPSLPTAELRLFLAQRLRWLCDSCPASRATCVQAGLVGCLLETLSTGLALEARCQEQLLALLQALGRVSIRPMELRHLLRPRPGLDSEPGGAEAGKARHAGAVIRTLSGMARHQGPARALRYFDLTPSMAGIMVPPVQRWPGPGFTFHAWLCLHPMDTAPTPAPTRPLQRKQLYSFFTSSGSGFEAFFTAAGTLVVAVCTRKEYLTMSLPEVSFADSAWHCVAIVHVPGRRPFSQNLVHVYKDGHLVKTAPLRCPSLSEPFSSCCIGSAGYRTTTTTTGLPTPPVPATLAYTHPALTRSQSVPASTGLGWGSGLVAPLQEGSIDSTLAGTQDTRWGSPTSLEGELGAVAIFHEALQATALRTLCTLGPNETAPFKPEGELHELSTRLLLHYSPQACKNNICLDLSPSHGLDGRLTGHRVETWDVKDVVNCVGGMGALLPLLERVAAQPKEAEAGPAETHDLVGPELTSGHNTQGLVLPLGKSSEERMERNAVAAFLLMLRNFLQGHMVNQESLVQCQGPAIIGALLRKVPSWAMDMNVLMSAQLLMEQVAAEGSGPLLYLLYQHLLFNFHLWTLSDFAVRLGHIQYMSSIVREHRQKLRKKYGVQFILDALRTHYSPQRERPLAADDLRTVQTSLLGLAREFLVRSLSADDVQVTQTMLSFLAATGDDGQAVGALDLLLALLHGSLVQESLAVFLLEPGNLEVLLALLVRPGSLPLLPDRVCKILRRLQQNERLPERSRQRLRLRECGLQGLVACLPEGTVSPQLCQGLYKLFLGADCLNLSDLLAVVQLSLQADLSVRLDICRQLFHLIYGQPDVVRLLARQAGWQDVLTRLYVLEAATAGSPPPSSPESPTSPKPAPPKPPTESPAEPSDVFLPSEAPCPDPDGFYHALSPFCTPFDLGLERSSVGSGNTAGGGGSSGTLTPASQPGTPSPLDGPRPFPAAPGRHSSSLSNVLEDGSLPEPTISGDDTSNTSNPQQTSEEELCNLLTNVLFSVTWRGVEGSDEAAWRERGQVFSVLTQLGASATLVRPPDCIKRSLLEMMLESALTDIKEAPVGVLASLTQQALWLLRLLQDFLCAEGHGNQELWSEKLFEGVCSLLDRLGAWPHLANGTADLREMAQIGLRLVLGYILLEDPQLHAQAYVRLHMLLQTAVPARREEACYVLSKLEAALGRVLNTSSLESATDEAGSPLAAAAAAAAAERCSWLVPLVRTLLDRAYEPLGLQWGLPSLPPTNGSPTFFEDFQAFCATPEWRHFIDKQVQPTMSQFEMDTYAKSHDLMSGFWNACYDMLMSSGQRRQWERAQSRRAFQELVLEPAQRRARLEGLRYTAVLKQQATQHSMALLHWGALWRQLASPCGAWALRDTPIPRWKLSSAETYSRMRLKLVPNHHFDPHLEASALRDNLGEVPLTPTEEASLPLAVTKEAKVSTPPELLQEDQLGEDELAELETPMEAAELDEQREKLVLSAECQLVTVVAVVPGLLEVTTQNVYFYDGSTERVETEEGIGYDFRRPLAQLREVHLRRFNLRRSALELFFIDQANYFLNFPCKVGTTPVSSPSQTPRPQPGPIPPHTQVRNQVYSWLLRLRPPSQGYLSSRSPQEMLRASGLTQKWVQREISNFEYLMQLNTIAGRTYNDLSQYPVFPWVLQDYVSPTLDLSNPAVFRDLSKPIGVVNPKHAQLVREKYESFEDPAGTIDKFHYGTHYSNAAGVMHYLIRVEPFTSLHVQLQSGRFDCSDRQFHSVAAAWQARLESPADVKELIPEFFYFPDFLENQNGFDLGCLQLTNEKVGDVVLPPWASSPEDFIQQHRQALESEYVSAHLHEWIDLIFGYKQRGPAAEEALNVFYYCTYEGAVDLDHVTDERERKALEGIISNFGQTPCQLLKEPHPTRLSAEEAAHRLARLDTNSPSIFQHLDELKAFFAEVVSDGVPLVLALVPHRQPHSFITQGSPDLLVTVSASGLLGTHSWLPYDRNISNYFSFSKDPTMGSHKTQRLLSGPWVPGSGVSGQALAVAPDGKLLFSGGHWDGSLRVTALPRGKLLSQLSCHLDVVTCLALDTCGIYLISGSRDTTCMVWRLLHQGGLSVGLAPKPVQVLYGHGAAVSCVAISTELDMAVSGSEDGTVIIHTVRRGQFVAALRPLGATFPGPIFHLALGSEGQIVVQSSAWERPGAQVTYSLHLYSVNGKLRASLPLAEQPTALTVTEDFVLLGTAQCALHILQLNTLLPAAPPLPMKVAIRSVAVTKERSHVLVGLEDGKLIVVVAGQPSEVRSSQFARKLWRSSRRISQVSSGETEYNPTEAR

SEQ ID NO: 13932 - protein, 465 aa, Homo sapiens
MLLLGLLLLLPLLAGARLLWNWWKLRSLHLPPLAPGFLHLLQPDLPIYLLGLTQKFGPIYRLHLGLQDKLVSRNYPDLSLGDYSLLWKAHKKLTRSALLLGIRDSMEPVVEQLTQEFCERMRAQPGTPVAIEEEFSLLTCSIICYLTFGDKIKDDNLMPAYYKCIQEVLKTWSHWSIQIVDVIPFLRFFPNPGLRRLKQAIEKRDHIVEMQLRQHKESLVAGQWRDMMDYMLQGVAQPSMEEGSGQLLEGHVHMAAVDLLIGGTETTANTLSWAVVFLLHHPEIQQRLQEELDHELGPGASSSRVPYKDRARLPLLNATIAEVLRLRPVVPLALPHRTTRPSSISGYDIPEGTVIIPNLQGAHLDETVWERPHEFWPDRFLEPGKNSRALAFGCGARVCLGEPLARLELFVVLTRLLQAFTLLPSGDALPSLQPLPHCSVILKMQPFQVRLQPRGMGAHSPGQSQ

SEQ ID NO: 13933 - protein, 44 aa, Homo sapiens
MTAPVPAPRILLPLLLLLLLTPPPGALAQRLRLGCEDLAAYGFT

SEQ ID NO: 13934 - protein, 166 aa, Homo sapiens
MGRPLLLPLLPLLLPPAFLQPSGSTGSGPSYLYGVTQPKHLSASMGGSVEIPFSFYYPWELATAPDVRISWRRGHFHRQSFYSTRPPSIHKDYVNRLFLNWTEGQKSGFLRISNLQKQDQSVYFCRVELDTRSSGRQQWQSIEGTKLSITQGQQRTKATTPAREPF

SEQ ID NO: 13935 - protein, 235 aa, Homo sapiens
MGIGKSKINSCPLSLSWGKRHSVDTSPGYHESDSKKSEDLSLCNVAEHSNTTEGPTGKQEGAQSVEEMFEEEAEEEVFLKFVILHAEDDTDEALRVQNLLQDDFGIKPGIIFAEMPCGRQHLQNLDDAVNGSAWTILLLTENFLRDTWCNFQFYTSLMNSVNRQHKYNSVIPMRPLNNPLPRERTPFALQTINALEEESRGFPTQVERIFQESVYKTQQTIWKETRNMVQRQFIA

SEQ ID NO: 13936 - protein, 187 aa, Homo sapiens
MPRVVPDQRSKFENEEFFRKLSRECEIKYTGFRDRPHEERQARFQNACRDGRSEIAFVATGTNLSLQFFPASWQGEQRQTPSREYVDLEREAGKVYLKAPMILNGVCVIWKGWIDLQRLDGMGCLEFDEERAQQEDALAQQAFEEARRRTREFEDRDRSHREEMEARRQQDPSPGSNLGGGDDLKLR

SEQ ID NO: 13937 - protein, 39 aa, Homo sapiens
MASAGHIITLLLWGYLLELWTGGHTADTTHPRLRLSHKE

SEQ ID NO: 13938 - protein, 807 aa, Homo sapiens
MGVAGRNRPGAAWAVLLLLLLLPPLLLLAGAVPPGRGRAAGPQEDVDECAQGLDDCHADALCQNTPTSYKCSCKPGYQGEGRQCEDIDECGNELNGGCVHDCLNIPGNYRCTCFDGFMLAHDGHNCLDVDECLENNGGCQHTCVNVMGSYECCCKEGFFLSDNQHTCIHRSEEGLSCMNKDHGCSHICKEAPRGSVACECRPGFELAKNQRDCILTCNHGNGGCQHSCDDTADGPECSCHPQYKMHTDGRSCLEREDTVLEVTESNTTSVVDGDKRVKRRLLMETCAVNNGGCDRTCKDTSTGVHCSCPVGFTLQLDGKTCKDIDECQTRNGGCDHFCKNIVGSFDCGCKKGFKLLTDEKSCQDVDECSLDRTCDHSCINHPGTFACACNRGYTLYGFTHCGDTNECSINNGGCQQVCVNTVGSYECQCHPGYKLHWNKKDCVASCDLSCIVKRTEKRLRKAIRTLRKAVHREQFHLQLSGMNLDVAKKPPRTSERQAESCGVGQGHAENQCVSCRAGTYYDGARERCILCPNGTFQNEEGQMTCEPCPRPGNSGALKTPEAWNMSECGGLCQPGEYSADGFAPCQLCALGTFQPEAGRTSCFPCGGGLATKHQGATSFQDCETRVQCSPGHFYNTTTHRCIRCPVGTYQPEFGKNNCVSCPGNTTTDFDGSTNITQCKTSSNSVTTYETCQTYERPIAFTSRSKKLWIQFKSNEGNSARGFQVPYVTYDEDYQELIEDIVRDGRLYASENHQEILKDKKLIKALFDVLAHPQNYFKYTAQESREMFPRSFIRLLRSKVSRFLRPYK

SEQ ID NO: 13939 - protein, 551 aa, Homo sapiens
MLPLLLLPLLWGGSLQEKPVYELQVQKSVTVQEGLCVLVPCSFSYPWRSWYSSPPLYVYWFRDGEIPYYAEVVATNNPDRRVKPETQGRFRLLGDVQKKNCSLSIGDARMEDTGSYFFRVERGRDVKYSYQQNKLNLEVTALIEKPDIHFLEPLESGRPTRLSCSLPGSCEAGPPLTFSWTGNALSPLDPETTRSSELTLTPRPEDHGTNLTCQMKRQGAQVTTERTVQLNVSYAPQTITIFRNGIALEILQNTSYLPVLEGQALRLLCDAPSNPPAHLSWFQGSPALNATPISNTGILELRRVRSAEEGGFTCRAQHPLGFLQIFLNLSVYSLPQLLGPSCSWEAEGLHCRCSFRARPAPSLCWRLEEKPLEGNSSQGSFKVNSSSAGPWANSSLILHGGLSSDLKVSCKAWNIYGSQSGSVLLLQGRSNLGTGVVPAALGGAGVMALLCICLCLIFFLIVKARRKQAAGRPEKMDDEDPIMGTITSGSRKKPWPDSPGDQASPPGDAPPLEEQKELHYASLSFSEMKSREPKDQEAPSTTEYSEIKTSK

SEQ ID NO: 13940 - protein, 983 aa, Homo sapiens
MRLGSGTFATCCVAIEVLGIAVFLRGFFPAPVRSSARAEHGAEPPAPEPSAGASSNWTTLPPPLFSKVVIVLIDALRDDFVFGSKGVKFMPYTTYLVEKGASHSFVAEAKPPTVTMPRIKALMTGSLPGFVDVIRNLNSPALLEDSVIRQAKAAGKRIVFYGDETWVKLFPKHFVEYDGTTSFFVSDYTEVDNNVTRHLDKVLKRGDWDILILHYLGLDHIGHISGPNSPLIGQKLSEMDSVLMKIHTSLQSKERETPLPNLLVLCGDHGMSETGSHGASSTEEVNTPLILISSAFERKPGDIRHPKHVQQTDVAATLAIALGLPIPKDSVGSLLFPVVEGRPMREQLRFLHLNTVQLSKLLQENVPSYEKDPGFEQFKMSERLHGNWIRLYLEEKHSEVLFNLGSKVLRQYLDALKTLSLSLSAQVAQYDIYSMMVGTVVVLEVLTLLLLSVPQALRRKAELEVPLSSPGFSLLFYLVILVLSAVHVIVCTSAESSCYFCGLSWLAAGGVMVLASALLCVIVSVLTNVLVGGNTPRKNPMHPSSRWSELDLLILLGTAGHVLSLGASSFVEEEHQTWYFLVNTLCLALSQETYRNYFLGDDGEPPCGLCVEQGHDGATAAWQDGPGCDVLERDKGHGSPSTSEVLRGREKWMVLASPWLILACCRLLRSLNQTGVQWAHRPDLGHWLTSSDHKAELSVLAALSLLVVFVLVQRGCSPVSKAALALGLLGVYCYRAAIGSVRFPWRPDSKDISKGIIEARFVYVFVLGILFTGTKDLLKSQVIAADFKLKTVGLWEIYSGLVLLAALLFRPHNLPVLAFSLLIQTLMTKFIWKPLRHDAAEITVMHYWFGQAFFYFQGNSNNIATVDISAGFVGLDTYVEIPAVLLTAFGTYAGPVLWASHLVHFLSSETRSGSALSHACFCYALICSIPVFTYIVLVTSLRYHLFIWSVFSPKLLYEGMHLLITAAVCVFFTAMDQTRLTQS

SEQ ID NO: 13941 - protein, 366 aa, Homo sapiens
MRRKEKRLLQAVALVLAALVLLPNVGLWALYRERQPDGTPGGSGAAVAPAAGQGSHSRQKKTFFLGDGQKLKDWHDKEAIRRDAQRVGNGEQGRPYPMTDAERVDQAYRENGFNIYVSDKISLNRSLPDIRHPNCNSKRYLETLPNTSIIIPFHNEGWSSLLRTVHSVLNRSPPELVAEIVLVDDFSDREHLKKPLEDYMALFPSVRILRTKKREGLIRTRMLGASVATGDVITFLDSHCEANVNWLPPLLDRIARNRKTIVCPMIDVIDHDDFRYETQAGDAMRGAFDWEMYYKRIPIPPELQKADPSDPFESPVMAGGLFAVDRKWFWELGGYDPGLEIWGGEQYEISFKVSQLSRRPVLGTAS

SEQ ID NO: 13942 - protein, 217 aa, Homo sapiens
MANLGCWMLVLFVATWSDLGLCKKRPKPGGWNTGGSRYPGQGSPGGNRYPPQGGGGWGQPHGGGWGQPHGGGWGQPHGGGWGQPHGGGWGQGGGTHSQWNKPSKPKTNMKHMAGAAAAGAVVGGLGGYMLGSAMSRPIIHFGSDYEDRYYRENMHRYPNQVYYRPMDEYSNQNNFVHDCVNITIKQHTVTTTTKGENFTETDVKMMERVVEQMCITQ

SEQ ID NO: 13943 - protein, 210 aa, Homo sapiens
MKHMLAASAGEVVACLIRVPSEVVKQRAQVSASTRTFQIFSNILYEEGIQGLYRGYKSTVLREIPFSLVQFPLWESLKALWSWRQDHVVDSWQSAVCGAFAGGFAAAVTTPLDVAKTRITLAKAGSSTADGNVLSVLHGVWRSQGLAGDHIPGIFLQEQSSGLPLQRVGRQLPGLRASQLAVPPPHPDAELDHLCDCSFCVPLAVLISAI

SEQ ID NO: 13944 - protein, 77 aa, Homo sapiens
MRMSVGLSLLLPLSGRTFLLLLSVVMAQSHWPSEPSEAVRDWENQLEASMHSVLSDLHEAVPTVVGIPDGTAVVGRS

SEQ ID NO: 13945 - protein, 51 aa, Homo sapiens
MARHGLPLLPLLSLLVGAWLKLGILSGRKSIGQKLRCLDGALSLRTLSLMS

SEQ ID NO: 13946 - protein, 1298 aa, Homo sapiens
MKVVPEKNAVRILWGRERGARAMGAQRLLQELVEDKTRWMKWEGKRVELPDSPRSTFLLAFSPDRTLLASTHVNHNIYITEVKTGKCVHSLIGHRRTPWCVTFHPTISGLIASGCLDGEVRIWDLHGGSESWFTDSNNAIASLAFHPTAQLLLIATANEIHFWDWSRREPFAVVKTASEMERVRLVRFDPLGHYLLTAIVNPSNQQGDDEPEIPIDGTELSHYRQRALLQSQPVRRTPLLHNFLHMLSSRSSGIQVGEQSTVQDSATPSPPPPPPQPSTERPRTSAYIRLRQRVSYPTAECCQHLGILCLCSRCSGTRVPSLLPHQDSVPPASARATTPSFSFVQTEPFHPPEQASSTQQDQGLLNRPSAFSTVQSSTAGNTLRNLSLGPTRRSLGGPLSSHPSRYHREIAPGLTGSEWTRTVLSLNSRSEAESMPPPRTSASSVSLLSVLRQQEGGSQASVYTSATEGRGFPASGLATESDGGNGSSQNNSGSIRHELQCDLRRFFLEYDRLQELDQSLSGEAPQTQQAQEMLNNNIESERPGPSHQPTPHSSENNSNLSRGHLNRCRACHNLLTFNNDTLRWERTTPNYSSGEASSSWQVPSSFESVPSSGSQLPPLERTEGQTPSSSRLELSSSASPQEERTVGVAFNQETGHWERIYTQSSRSGTVSQEALHQDMPEESSEEDSLRRRLLESSLISLSRYDGAGSREHPIYPDPARLSPAAYYAQRMIQYLSRRDSIRQRSMRYQQNRLRSSTSSSSSDNQGPSVEGTDLEFEDFEDNGDRSRHRAPRNARMSAPSLGRFVPRRFLLPEYLPYAGIFHERGQPGLATHSSVNRVLAGAVIGDGQSAVASNIANTTYRLQWWDFTKFDLPEISNASVNVLVQNCKIYNDASCDISADGQLLAAFIPSSQRGFPDEGILAVYSLAPHNLGEMLYTKRFGPNAISVSLSPMGRYVMVGLASRRILLHPSTEHMVAQVFRLQQAHGGETSMRRVFNVLYPMPADQRRHVSINSARWLPEPGLGLAYGTNKGDLVICRPEALNSGVEYYWDQLNETVFTVHSNSRSSERPGTSRATWRTDRDMGLMNAIGLQPRNPATSVTSQGTQTLALQLQNAETQTEREVPEPGTAASGPGEGEGSEYGASGEDALSRIQRLMAEGGMTAVVQREQSTTMASMGGFGNNIIVSHRIHRSSQTGTEPGAAHTSSPQPSTSRGLLPEAGQLAERGLSPRTASWDQPGTPGREPTQPTLPSSSPVPIPVSLPSAEGPTLHCELTNNNHLLDGGSSRGDAAGPRGEPRNR

SEQ ID NO: 13947 - protein, 696 aa, Homo sapiens
MEASVILPILKKKLAFLSGGKDRRSGLILTIPLCLEQTNMDELSVTLDYLLSIPSEKCKARGFTVIVDGRKSQWNVVKTVVVMLQNVVPAEVSLVCVVKPDEFWDKKVTHFCFWKEKDRLGFEVILVSANKLTRYIEPCQLTEDFGGSLTYDHMDWLNKRLVFEKFTKESTSLLDELALINNGSDKGNQQEKERSVDLNFLPSVDPETVLQTGHELLSELQQRRFNGSDGGVSWSPMDDELLAQPQVMKLLDSLREQYTRYQEVCRQRSKRTQLEEIQQKVMQVVNWLEGPGSEQLRAQWGIGDSIRASQALQQKHEEIESQHSEWFAVYVELNQQIAALLNAGDEEDLVELKSLQQQLSDVCYRQASQLEFRQNLLQAALEFHGVAQDLSQQLDGLLGMLCVDVAPADGASIQQTLKLLEEKLKSVDVGLQGLREKGQGLLDQISNQASWAYGKDVTIENKENVDHIQGVMEDMQLRKQRCEDMVDVRRLKMLQMVQLFKCEEDAAQAVEWLSELLDALLKTHIRLGDDAQETKVLLEKHRKFVDVAQSTYDYGRQLLQATVVLCQSLRCTSRSSGDTLPRLNRVWKQFTIASEERVHRLEMAIAFHSNAEKILQDCPEEPEAINDEEQFDEIEAVGKSLLDRLTVPVVYPDGTEQYFGSPSDMASTAENIRDRMKLVNLKRQQLRHPEMVTTES

SEQ ID NO: 13948 - protein, 579 aa, Homo sapiens
MAEGDEAARGQQPHQGLWRRRRTSDPSAAVNHVSSTTSLGENYEDDDLVNSDEVMKKPCPVQIVLAHEDDHNFELDEEALEQILLQEHIRDLNIVVVSVAGAFRKGKSFLLDFMLRYMYNKDSQSWIGGNNEPLTGFTWRGGCERETTGIQVWNEVFVIDRPNGTKVAVLLMDTQGAFDSQSTIKDCATVFALSTMTSSVQVYNLSQNIQEDDLQHLQLFTEYGRLAMEEIYQKPFQTLMFLIRDWSYPYEHSYGLEGGKQFLEKRLQVKQNQHEELQNVRKHIHNCFSNLGCFLLPHPGLKVATNPSFDGRLKDIDEDFKRELRNLVPLLLAPENLVEKEISGSKVTCRDLVEYFKAYIKIYQGEELPHPKSMLQATAEANNLAAVAGARDTYCKSMEQVCGGDKPYIAPSDLERKHLDLKEVAIKQFRSVKKMGGDEFCRRYQDQLEAEIEETYANFIKHNDGKNIFYAARTPATLFAVMFAMYIISGLTGFIGLNSIAVLCNLVMGLALIFLCTWAYVKYSGEFREIGTVIDQIAETLWEQVFSKLFEVTRRRMVHRALSSAQRQRLSSNNNKKKN

SEQ ID NO: 13949 - protein, 373 aa, Homo sapiens
HLLQWLLLLLPTLCGPGTAAWTTSSLACAQGPEFWCQSLEQALQCRALGHCLQEVWGHVGADDLCQECEDIVHILNKMAKEAIFQDTMRKFLEQECNVLPLKLLMPQCNQVLDDYFPLVIDYFQNQTDSNGICMHLGLCKSRQPEPEQEPGMSDPLPKPLRDPLPDPLLDKLVLPVLPGALQARPGPHTQDLSEQQFPIPLPYCWLCRALIKRIQAMIPKGALAVAVAQVCRVVPLVAGGICQCLAERYSVILLDTLLGRMLPQLVCRLVLRCSMDDSAGPREWLPRDSECHLCMSVTTQAGNSSEQAIPQAMLQACVGSWLDREKCKQFVEQHTPQLLTLVPRGWDAHTTCQALGVCGTMSSPLQCIHSPDL

SEQ ID NO: 13950 - protein, 166 aa, Homo sapiens
MSKLGRAARGLRKPERGVSINQFCKEFNERTKDIKEGIPLPTKILVKPDRTFEIKIGQPTVSYFLKAAAGIEKGARQTGKEVAGLVTLKHVYEIARIKAQDEAFALQDVPLSSVVRSIIGSARSLGIRVVKDLSSEELAAFQKERAIFLAAQKEADLAAQEEAAKK

SEQ ID NO: 13951 - protein, 75 aa, Homo sapiens
MRLSLPLLLLLLGAWAIPGGLGDRAPLTATAPQLDDEEMYSAHMPAHLRCDACRAVAYQRLCSYPPHLPLTEQQS

SEQ ID NO: 13952 - protein, 1247 aa, Homo sapiens
MSLFLRVVFSFTMFGDLFEEEYSTVSNNQYGKGKKLKTKALEPPAPREFTNLSGIRNQGGTCYLNSLLQTLHFTPEFREALFSLGPEELGLFEDKDKPDAKVRIIPLQLQRLFAQLLLLDQEAASTADLTDSFGWTSNEEMRQHDVQELNRILFSALETSLVGTSGHDLIYRLYHGTIVNQIVCKECKNVSERQEDFLDLTVAVKNVSGLEDALWNMYVEEEVFDCDNLYHCGTCDRLVKAAKSAKLRKLPPFLTVSLLRFNFDFVKCERYKETSCYTFPLRINLKPFCEQSELDDLEYIYDLFSVIIHKGGCYGGHYHVYIKDVDHLGNWQFQEEKSKPDVNLKDLQSEEEIDHPLMILKAILLEENNLIPVDQLGQKLLKKIGISWNKKYRKQHGPLRKFLQLHSQIFLLSSDESTVRLLKNSSLQAESDFQRNDQQIFKMLPPESPGLNNSISCPHWFDINDSKVQPIREKDIEQQFQGKESAYMLFYRKSQLQRPPEARANPRYGVPCHLLNEMDAANIELQTKRAECDSANNTFELHLHLGPQYHFFNGALHPVVSQTESVWDLTFDKRKTLGDLRQSIFQLLEFWEGDMVLSVAKLVPAGLHIYQSLGGDELTLCETEIADGEDIFVWNGVEVGGVHIQTGIDCEPLLLNVLHLDTSSDGEKCCQVIESPHVFPANAEVGTVLTALAIPAGVIFINSAGCPGGEGWTAIPKEDMRKTFREQGLRNGSSILIQDSHDDNSLLTKEEKWVTSMNEIDWLHVKNLCQLESEEKQVKISATVNTMVFDIRIKAIKELKLMKELADNSCLRPIDRNGKLLCPVPDSYTLKEAELKMGSSLGLCLGKAPSSSQLFLFFAMGSDVQPGTEMEIVVEETISVRDCLKLMLKKSGLQGDAWHLRKMDWCYEAGEPLCEEDATLKELLICSGDTLLLIEGQLPPLGFLKVPIWWYQLQGPSGHWESHQDQTNCTSSWGRVWRATSSQGASGNEPAQVSLLYLGDIEISEDATLAELKSQAMTLPPFLEFGVPSPAHLRAWTVERKRPGRLLRTDRQPLREYKLGRRIEICLEPLQKGENLGPQDVLLRTQVRIPGERTYAPALDLVWNAAQGGTAGSLRQRVADFYRLPVEKIEIAKYFPEKFEWLPISSWNQQITKRKKKKKQDYLQGAPYYLKDGDTIGVKNLLIDDDDDFSTIRDDTGKEKQKQRALGRRKSQEALHEQSSYILSSAETPARPRAPETSLSIHVGSFR

SEQ ID NO: 13953 - protein, 134 aa, Homo sapiens
MATAGGGSGADPGSRGLLRLLSFCVLLAGLCRGNSVERKIYIPLNKTAPCVRLLNATHQIGCQSSISGDTGVIHVVEKEEDLQWVLTDGPNPPYMVLLESKHFTRQNVRLSDTFLCSFMEFLSYSRDLMEKLKG

SEQ ID NO: 13954 - protein, 504 aa, Homo sapiens
MEAAAQFFVESPDVVYGPEAIEAQYEYRTTRVSREGGVLKEANYYGSLTQAGTVSLGLDAEGQEVFVPFSAVLPMVAPNDLVFDGWDISSLNLAEAMRRAKVLDWGLQEQLWPHMEALRPRPSVYIPEFIAANQSARADNLIPGSRAQQLEQIRRDIRDFRSSAGLDKVIVLWTANTERFCEVIPGLNDTAENLLRTIELGLEVSPSTLFAVASILEGCAFLNGSPQNTLVPGALELAWQHRVFVGGDDFKSGQTKVKSVLVDFLIGSGLKTMSIVSYNHLGNNDGENLSAPLQFRSKEVSKSNVVDDMVQSNPVLYTPGEEPDHCVVIKYVPYVGDSKRALDEYTSELMLGGTNTLVLHNTCEDSLLAAPIMLDLALLTELCQRVSFCTDMDPEPQTFHPVLSLLSFLFKAPLVPPGSPVVNALFRQRSCIENILRACVGLPPQNHMLLEHKMERPGPSLKRVGPVAATYPMLNKKGPVPAATNGCTGDANGHLQEEPPMPTT

SEQ ID NO: 13955 - protein, 865 aa, Homo sapiens
MALVLGSLLLLGLCGNSFSGGQPSSTDAPKAWNYELPATNYETQDSHKAGPIGILFELVHIFLYVVQPRDFPEDTLRKFLQKAYESKIDYDKPETVILGLKIVYYEAGIILCCVLGLLFIILMPLVGYFFCMCRCCNKCGGEMHQRQKENGPFLRKCFAISLLVICIIISIGIFYGFVANHQVRTRIKRSRKLADSNFKDLRTLLNETPEQIKYILAQYNTTKDKAFTDLNSINSVLGGGILDRLRPNIIPVLDEIKSMATAIKETKEALENMNSTLKSLHQQSTQLSSSLTSVKTSLRSSLNDPLCLVHPSSETCNSIRLSLSQLNSNPELRQLPPVDAELDNVNNVLRTDLDGLVQQGYQSLNDIPDRVQRQTTTVVAGIKRVLNSIGSDIDNVTQRLPIQDILSAFSVYVNNTESYIHRNLPTLEEYDSYWWLGGLVICSLLTLIVIFYYLGLLCGVCGYDRHATPTTRGCVSNTGGVFLMVGVGLSFLFCWILMIIVVLTFVFGANVEKLICEPYTSKELFRVLDTPYLLNEDWEYYLSGKLFNKSKMKLTFEQVYSDCKKNRGTYGTLHLQNSFNISEHLNINEHTGSISSELESLKVNLNIFLLGAAGRKNLQDFAACGIDRMNYDSYLAQTGKSPAGVNLLSFAYDLEAKANSLPPGNLRNSLKRDAQTIKTIHQQRVLPIEQSLSTLYQSVKILQRTGNGLLERVTRILASLDFAQNFITNNTSSVIIEETKKYGRTIIGYFEHYLQWIEFSISEKVASCKPVATALDTAVDVFLCSYIIDPLNLFWFGIGKATVFLLPALIFAVKLAKYYRRMDSEDVYDDVETIPMKNMENGNNGYHKDHVYGIHNPVMTSPSQH

SEQ ID NO: 13956 - protein, 221 aa, Homo sapiens
MPKTMHFLFRFIVFFYLWGLFTAQRQKKEESTEEVKIEVLHRPENCSKTSKKGDLLNAHYDGYLAKDGSKFYCSRTQNEGHPKWFVLGVGQVIKGLDIAMTDMCPGEKRKVVIPPSFAYGKEGYEGKIPPDATLIFEIELYAVTKGPRSIETFKQIDMDNDRQLSKAEINLYLQREFEKDEKPRDKSYQDAVLEDIFKKNDHDGDGFISPKEYNVYQHDEL

SEQ ID NO: 13957 - protein, 278 aa, Homo sapiens
MALLLVSLLAFLSLGSGCHHRICHCSNRVFLCQESKVTEIPSDLPRNAIELRFVLTKLRVIQKGAFSGFGDLEKIEISQNDVLEVIEADVFSNLPKLHEIRIEKANNLLYINPEAFQNLPNLQYLLISNTGIKHLPDVHKIHSLQKVLLDIQDNINIHTIERNSFVGLSFESVILWLNKNGIQEIHNCAFNGTQLDELNLSDNNNLEELPNDVFHGASGPVILSELHPICNKSILRQEVDYMTQARGQRSSLAEDNESSYSRGFDMTYTEFDYDLCNE

SEQ ID NO: 13958 - protein, 1091 aa, Homo sapiens
MRPSGTAGAALLALLAALCPASRALEEKKVCQGTSNKLTQLGTFEDHFLSLQRMFNNCEVVLGNLEITYVQRNYDLSFLKTIQEVAGYVLIALNTVERIPLENLQIIRGNMYYENSYALAVLSNYDANKTGLKELPMRNLQGQKCDPSCPNGSCWGAGEENCQKLTKIICAQQCSGRCRGKSPSDCCHNQCAAGCTGPRESDCLVCRKFRDEATCKDTCPPLMLYNPTTYQMDVNPEGKYSFGATCVKKCPRNYVVTDHGSCVRACGADSYEMEEDGVRKCKKCEGPCRKVCNGIGIGEFKDSLSINATNIKHFKNCTSISGDLHILPVAFRGDSFTHTPPLDPQELDILKTVKEITGFLLIQAWPENRTDLHAFENLEIIRGRTKQHGQFSLAVVSLNITSLGLRSLKEISDGDVIISGNKNLCYANTINWKKLFGTSGQKTKIISNRGENSCKATGQVCHALCSPEGCWGPEPRDCVSCRNVSRGRECVDKCNLLEGEPREFVENSECIQCHPECLPQAMNITCTGRGPDNCIQCAHYIDGPHCVKTCPAGVMGENNTLVWKYADAGHVCHLCHPNCTYGCTGPGLEGCPTNGPKIPSIATGMVGALLLLLVVALGIGLFMRRRHIVRKRTLRRLLQERELVEPLTPSGEAPNQALLRILKETEFKKIKVLGSGAFGTVYKGLWIPEGEKVKIPVAIKELREATSPKANKEILDEAYVMASVDNPHVCRLLGICLTSTVQLITQLMPFGCLLDYVREHKDNIGSQYLLNWCVQIAKGMNYLEDRRLVHRDLAARNVLVKTPQHVKITDFGLAKLLGAEEKEYHAEGGKVPIKWMALESILHRIYTHQSDVWSYGVTVWELMTFGSKPYDGIPASEISSILEKGERLPQPPICTIDVYMIMVKCWMIDADSRPKFRELIIEFSKMARDPQRYLVIQGDERMHLPSPTDSNFYRALMDEEDMDDVVDADEYLIPQQGFFSSPSTSRTPLLSSLSATSNNSTVACIDRNGLQSCPIKEDSFLQRYSSDPTGALTEDSIDDTFLPVPGEWLVWKQSCSSTSSTHSAAASLQCPSQVLPPASPEGETVADLQTQ

SEQ ID NO: 13959 - protein, 215 aa, Homo sapiens
MEKLYSENEGMASNQGKMENEEQPQDERKPEVTCTLEDKKLENEGKTENKGKTGDEEMLKDKGKPESEGEAKEGKSEREGESEMEGGSEREGKPEIEGKPESEGEPGSETRAAGKRPAEDDVPRKAKRKTNKGLAHYLKEYKEAIHDMNFSNEDMIREFDNMAKVQDEKRKSKQKLGAFLWMQRNLQDPFYPRGPREFRGGCRAPRRDIEDIPYV

SEQ ID NO: 13960 - protein, 107 aa, Homo sapiens
MALAMLVLVVSPWSAARGVLRNYWERLLRKLPQSRPGFPSPPWGPALAVQGPAMFTEPANDTSGSKENSSLLDSIFWMAAPKNRRTIEVNRCRRRNPQKLIKVKVMH

SEQ ID NO: 13961 - protein, 2591 aa, Homo sapiens
MPVTEKDLAEDAPWKKIQQNTFTRWCNEHLKCVNKRIGNLQTDLSDGLRLIALLEVLSQKRMYRKYHQRPTFRQMQLENVSVALEFLDRESIKLVSIDSKAIVDGNLKLILGLVWTLILHYSISMPVWEDEGDDDAKKQTPKQRLLGWIQNKIPYLPITNFNQNWQDGKALGALVDSCAPGLCPDWESWDPQKPVDNAREAMQQADDWLGVPQVITPEEIIHPDVDEHSVMTYLSQFPKAKLKPGAPLKPKLNPKKARAYGRGIEPTGNMVKQPAKFTVDTISAGQGDVMVFVEDPEGNKEEAQVTPDSDKNKTYSVEYLPKVTGLHKVTVLFAGQHISKSPFEVSVDKAQGDASKVTAKGPGLEAVGNIANKPTYFDIYTAGAGVGDIGVEVEDPQGKNTVELLVEDKGNQVYRCVYKPMQPGPHVVKIFFAGDTIPKSPFVVQVGEACNPNACRASGRGLQPKGVRIRETTDFKVDTKAAGSGELGVTMKGPKGLEELVKQKDFLDGVYAFEYYPSTPGRYSIAITWGGHHIPKSPFEVQVGPEAGMQKVRAWGPGLHGGIVGRSADFVVESIGSEVGSLGFAIEGPSQAKIEYNDQNDGSCDVKYWPKEPGEYAVHIMCDDEDIKDSPYMAFIHPATGGYNPDLVRAYGPGLEKSGCIVNNLAEFTVDPKDAGKAPLKIFAQDGEGQRIDIQMKNRMDGTYACSYTPVKAIKHTIAVVWGGVNIPHSPYRVNIGQGSHPQKVKVFGPGVERSGLKANEPTHFTVDCTEAGEGDVSVGIKCDARVLSEDEEDVDFDIIHNANDTFTVKYVPPAAGRYTIKVLFASQEIPASPFRVKVDPSHDASKVKAEGPGLSKAGVENGKPTHFTVYTKGAGKAPLNVQFNSPLPGDAVKDLDIIDNYDYSHTVKYTPTQQGNMQVLVTYGGDPIPKSPFTVGVAAPLDLSKIKLNGLENRVEVGKDQEFTVDTRGAGGQGKLDVTILSPSRKVVPCLVTPVTGRENSTAKFIPREEGLYAVDVTYDGHPVPGSPYTVEASLPPDPSKVKAHGPGLEGGLVGKPAEFTIDTKGAGTGGLGLTVEGPCEAKIECSDNGDGTCSVSYLPTKPGEYFVNILFEEVHIPGSPFKADIEMPFDPSKVVASGPGLEHGKVGEAGLLSVDCSEAGPGALGLEAVSDSGTKAEVSIQNNKDGTYAVTYVPLTAGMYTLTMKYGGELVPHFPARVKVEPAVDTSRIKVFGPGIEGKDVFREATTDFTVDSRPLTQVGGDHIKAHIANPSGASTECFVTDNADGTYQVEYTPFEKGLHVVEVTYDDVPIPNSPFKVAVTEGCQPSRVQAQGPGLKEAFTNKPNVFTVVTRGAGIGGLGITVEGPSESKINCRDNKDGSCSAEYIPFAPGDYDVNITYGGAHIPGSPFRVPVKDVVDPSKVKIAGPGLGSGVRARVLQSFTVDSSKAGLAPLEVRVLGPRGLVEPVNVVDNGDGTHTVTYTPSQEGPYMVSVKYADEEIPRSPFKVKVLPTYDASKVTASGPGLSSYGVPASLPVDFAIDARDAGEGLLAVQITDQEGKPKRAIVHDNKDGTYAVTYIPDKTGRYMIGVTYGGDDIPLSPYRIRATQTGDASKCLATGPGIASTVKTGEEVGFVVDAKTAGKGKVTCTVLTPDGTEAEADVIENEDGTYDIFYTAAKPGTYVIYVRFGGVDIPNSPFTVMATDGEVTAVEEAPVTEEAYVPVSDMNGLGFKPFDLVIPFAVRKGEITGEVHMPSGKTATPEIVDNKDGTVTVRYAPTEVGLHEMHIKYMGSHIPESPLQFYVNYPNSGSVSAYGPGLVYGVANKTATFTIVTEDAGEGGLDLAIEGPSKAEISCIDNKDGTCTVTYLPTLPGDYSILVKYNDKHIPGSPFTAKITDDSRRCSQVKLGSAADFLLDISETDLSSLTASIKAPSGRDEPCLLKRLPNNHIGISFIPREVGEHLVSIKKNGNHVANSPVSIMVVQSEIGDARRAKVYGRGLSEGRTFEMSDFIVDTRDAGYGGISLAVEGPSKVDIQTEDLEDGTCKVSYFPTVPGVYIVSTKFADEHVPGSPFTVKISGEGRVKESITRTSRAPSVATVGSICDLNLKIPEINSSDMSAHVTSPSGRVTEAEIVPMGKNSHCVRFVPQEMGVHTVSVKYRGQHVTGSPFQFTVGPLGEGGAHKVRAGGPGLERGEAGVPAEFSIWTREAGAGGLSIAVEGPSKAEITFDDHKNGSCGVSYIAQEPGNYEVSIKFNDEHIPESPYLVPVIAPSDDARRLTVMSLQESGLKVNQPASFAIRLNGAKGKIDAKVHSPSGAVEECHVSELEPDKYAVRFIPHENGVHTIDVKFNGSHVVGSPFKVRVGEPGQAGNPALVSAYGTGLEGGTTGIQSEFFINTTRAGPGTLSVTIEGPSKVKMDCQETPEGYKVMYTPMAPGNYLISVKYGGPNHIVGSPFKAKVTGQRLVSPGSANETSSILVESVTRSSTETCYSAIPKASSDASKVTSKGAGLSKAFVGQKSSFLVDCSKAGSNMLLIGVHGPTTPCEEVSMKHVGNQQYNVTYVVKERGDYVLAVKWGEEHIPGSPFHVTVP

SEQ ID NO: 13962 - protein, 173 aa, Homo sapiens
MLLAWVQAFLVSNMLLAEAYGSGGCFWDNGHLYREDQTSPAPGLRCLNWLDAQSGLASAPVSGAGNHSYCRNPDEDPRGPWCYVSGEAGVPEKRPCEDLRCPETTSQALPAFTTEIQEASEGPGADEVQVFAPANALPARSEAAAVQPVIGISQRVRMNSKEKKDLGTLGGRI

SEQ ID NO: 13963 - protein, 77 aa, Homo sapiens
MEKKCTLYFLVLLPFFMILVTAELEESPEDSIQLGVTRNKIMTAQYECYQKIMQDPIQQAEGVYCNRTWDGWLCWND

SEQ ID NO: 13964 - protein, 132 aa, Homo sapiens
MNKILSSTVCFGLLTLLSVLSFLQSVHGRPYLTQGNEIFPDKKYTNREELLLALLNKNFDFQRPFNTDLALPNKLEELNQLEKLKEQLVEEKDSETSYAVDGLFSSHPSKRALSSRTLIQLNCLQHCQNRRG

SEQ ID NO: 13965 - protein, 522 aa, Homo sapiens
MASASSGPSSSVGFSSFDPAVPSCTLSSAASGIKRPMASEVPYASGMPIKKIGHRSVDSSGETTYKKTTSSALKGAIQLGITHTVGSLSTKPERDVLMQDFYVVESIFFPSEGSNLTPAHHYNDFRFKTYAPVAFRYFRELFGIRPDDYLYSLCSEPLIELCSSGASGSLFYVSSDDEFIIKTVQHKEAEFLQKLLPGYYMNLNQNPRTLLPKFYGLYCVQAGGKNIRIVVMNNLLPRSVKMHIKYDLKGSTYKRRASQKEREKPLPTFKDLDFLQDIPDGLFLDADMYNALCKTLQRDCLVLQSFKIMDYSLLMSIHNIDHAQREPLSSETQYSVDTRRPAPQKALYSTAMESIQGEARRGGTMETDDQFVKKLEHSWKALVHDGDTVSVHRPGFYAERFQRFMCNTVFKKIPLKPSPSKKFRSGSSFSRRAGSSGNSCITYQPSVSGEHKAQVTTKAEVEPGVHLGRPDVLPQTPPLEEISEGSPIPDPSFSPLVGETLQMLTTSTTLEKLEVAESEFTH

SEQ ID NO: 13966 - protein, 396 aa, Homo sapiens
MESNLSGLVPAAGLVPALPPAVTLGLTAAYTTLYALLFFSVYAQLWLVLLYGHKRLSYQTVFLALCLLWAALRTTLFSFYFRDTPRANRLGPLPFWLLYCCPVCLQFFTLTLMNLYFAQVVFKAKVKRRPEMSRGLLAVRGAFVGASLLFLLVNVLCAVLSHRRRAQPWALLLVRVLVSDSLFVICALSLAACLCLVARRAPSTSIYLEAKGTSVCQAAAMGGAMVLLYASRACYNLTALALAPQSRLDTFDYDWYNVSDQADLVNDLGNKGYLVFGLILFVWELLPTTLLVGFFRVHRPPQDLSTSHILNGQVFASRSYFFDRAGHCEDEGCSWEHSRGESTSMSGSLGSGSWYGAIGREPGWYGGSQTKTTPLLFSQVPGPGGHHHSLYSTPQT

SEQ ID NO: 13967 - protein, 146 aa, Homo sapiens
MGSSRLAALLLPLLLIVIDLSDSAGIGFRHLPHWNTRCPLASHTVFNGASSTSWCRNPKSLPHSSSIGDTRCQHLLRGSCCLVVTCLRRAITFPSPPQTSPTRDFALKGPNLRIQRHGKVFPDWTHKGMEDPSSPLICCLRPGLFG

SEQ ID NO: 13968 - protein, 183 aa, Homo sapiens
MRANDALQVLGLLFSLARGSEVGNSQAVCPGTLNGLSVTGDAENQYQTLYKLYERCEVVMGNLEIVLTGHNADLSFLQWIREVTGYVLVAMNEFSTLPLPNLRVVRGTQVYDGKFAIFVMLNYNTNSSHALRQLRLTQLTGQFPMVPSGLTPQPAQDWYLLDDDPRLLTLSASSKVPVTLAAV

SEQ ID NO: 13969 - protein, 299 aa, Homo sapiens
MAGLAARLVLLAGAAALASGSQGDREPVYRDCVLQCEEQNCSGGALNHFRSRQPIYMSLAGWTCRDDCKYECMWVTVGLYLQEGHKVPQFHGKWPFSRFLFFQEPASAVASFLNGLASLVMLCRYRTFVPASSPMYHTCVAFAWKMDYFCASTVILHSIYLCCVRTVGLQHPAVVSAFRALLLLMLTVHVSYLSLIRFDYGYNLVANVAIGLVNVVWWLAWCLWNQRRLPHVRKCVVVVLLLQGLSLLELLDFPPLFWVLDAHAIWHISTIPVHVLFFSFLEDDSLYLLKESEDKFKLD

SEQ ID NO: 13970 - protein, 890 aa, Homo sapiens
MAFAWWPCLILALLSSLAASGFPRSPFRLLGKRSLPEGVANGIEVYSTKINSKVTSRFAHNVVTMRAVNRADTAKEVSFDVELPKTAFITNFTLTIDGVTYPGNVKEKEVAKKQYEKAVSQGKTAGLVKASGRKLEKFTVSVNVAAGSKVTFELTYEELLKRHKGKYEMYLKVQPKQLVKHFEIEVDIFEPQGISMLDAEASFITNDLLGSALTKSFSGKKGHVSFKPSLDQQRSCPTCTDSLLNGDFTITYDVNRESPGNVQIVNGYFVHFFAPQGLPVVPKNVAFVIDISGSMAGRKLEQTKEALLRILEDMQEEDYLNFILFSGDVSTWKEHLVQATPENLQEARTFVKSMEDKGMTNINDGLLRGISMLNKAREEHRIPERSTSIVIMLTDGDANVGESRPEKIQENVRNAIGGKFPLYNLGFGNNLNYNFLENMALENHGFARRIYEDSDADLQLQGFYEEVANPLLTGVEMEYPENAILDLTQNTYQHFYDGSEIVVAGRLVDEDMNSFKADVKGHGATNDLTFTEEVDMKEMEKALQERDYIFGNYIERLWAYLTIEQLLEKRKNAHGEEKENLTARALDLSLKYHFVTPLTSMVVTKPEDNEDERAIADKPGEDAEATPVSPAMSYLTSYQPPQNPYYYVDGDPHFIIQIPEKDDALCFNIDEAPGTVLRLIQDAVTGLTVNGQITGDKRGSPDSKTRKTYFGKLGIANAQMDFQVEVTTEKITLWNRAVPSTFSWLDTVTVTQDGLSMMINRKNMVVSFGDGVTFVVVLHQVWKKHPVHRDFLGFYVVDSHRMSAQTHGLLGQFFQPFDFKVSDIRPGSDPTKPDATLVVKNHQLIVTRGSQKDYRKDASIGTKVVCWFVHNNGEGLIDGVHTDYIVPNLF

SEQ ID NO: 13971 - protein, 331 aa, Homo sapiens
MDSEKKRFTEEATKYFRERVSPVHLQILLTNNEAWKRFVTAAELPRDEADALYEALKKLRTYAAIEDEYVQQKDEQFREWFLKEFPQVKRKIQESIEKLRALANGIEEVHRGCTISNVVSSSTGAASGIMSLAGLVLAPFTAGTSLALTAAGVGLGAASAVTGITTSIVEHSYTSSAEAEASRLTATSIDRLKVFKEVMRDITPNLLSLLNNYYEATQTIGSEIRAIRQARARARLPVTTWRISAGSGGQAERTIAGTTRAVSRGARILSATTSGIFLALDVVNLVYESKHLHEGAKSASAEELRRQAQELEENLMELTQIYQRLNPCHTH

SEQ ID NO: 13972 - protein, 409 aa, Homo sapiens
MSDCRSSLVEGTMNWHLPLFLLASVTLPSICSHFNPLSLEELGSNTGIQVFNQIVKSRPHDNIVISPHGIASVLGMLQLGADGRTKKQLAMVMRYGVNGVGKILKKINKAIVSKKNKDIVTVANAVFVKNASEIEVPFVTRNKDVFQCEVRNVNFEDPASACDSINAWVKNETRDMIDNLLSPDLIDGVLTRLVLVNAVYFKGLWKSRFQPENTKKRTFVAADGKSYQVPMLAQLSVFRCGSTSAPNDLWYNFIELPYHGESISMLIALPTESSTPLSAIIPHISTKTIDSWMSIMVPKRVQVILPKFTAVAQTDLKEPLKVLGITDMFDSSKANFAKITRSENLHVSHILQKAKIEVSEDGTKASAATTAILIARSSPPWFIVDRPFLFFIRHNPTGAVLFMGQINKP

SEQ ID NO: 13973 - protein, 59 aa, Homo sapiens
MGTIHLFRKPQRSFFGKLLREFRLVAADRRSWKILLFGVINLICTGFLLMWCSSTNSIV

SEQ ID NO: 13974 - protein, 744 aa, Homo sapiens
MASEGTNIPSPVVRQIDKQFLICSICLERYKNPKVLPCLHTFCERCLQNYIPAHSLTLSCPVCRQTSILPEKGVAALQNNFFITNLMDVLQRTPGSNAEESSILETVTAVAAGKPLSCPNHDGNVMEFYCQSCETAMCRECTEGEHAEHPTVPLKDVVEQHKASLQVQLDAVNKRLPEIDSALQFISEIIHQLTNQKASIVDDIHSTFDELQKTLNVRKSVLLMELEVNYGLKHKVLQSQLDTLLQGQESIKSCSNFTAQALNHGTETEVLLVKKQMSEKLNELADQDFPLHPRENDQLDFIVETEGLKKSIHNLGTILTTNAVASETVATGEGLRQTIIGQPMSVTITTKDKDGELCKTGNAYLTAELSTPDGSVADGEILDNKNGTYEFLYTVQKEGDFTLSLRLYDQHIRGSPFKLKVIRSADVSPTTEGVKRRVKSPGSGHVKQKAVKRPASMYSTGKRKENPIEDDLIFRVGTKGRNKGEFTNLQGVAASTNGKILIADSNNQCVQIFSNDGQFKSRFGIRGRSPGQLQRPTGVAVHPSGDIIIADYDNKWVSIFSSDGKFKTKIGSGKLMGPKGVSVDRNGHIIVVDNKACCVFIFQPNGKIVTRFGSRGNGDRQFAGPHFAAVNSNNEIIITDFHNHSVKVFNQEGEFMLKFGSNGEGNGQFNAPTGVAVDSNGNIIVADWGNSRIQVFDGSGSFLSYINTSADPLYGPQGLALTSDGHVVVADSGNHCFKVYRYLQ

SEQ ID NO: 13975 - protein, 110 aa, Homo sapiens
MAPRGCIVAVFAIFCISRLLCSHGAPVAPMTPYLMLCQPHKRCGDKFYDPLQHCCYDDAVVPLARTQTCGNCTFRVCFEQCCPWTFMVKLINQNCDSARTSDDRLCRSVS

SEQ ID NO: 13976 - protein, 123 aa, Homo sapiens
MQKSEGSGGTQLKNRATGNYDQRTSSSTQLKHRNAVQGSKSSLSTSSPESARKLHPRPSDKLNPKTINPVHSDDEVFERGLNALVQLSVVVGPSLNDHLKHLLTSGSLSIIKSKIPTYCSICC

SEQ ID NO: 13977 - protein, 148 aa, Homo sapiens
MISLPGPLVTNLLRFLFLGLSALVPPAPPSCRLQGVPHVGANVTLSCQSPRSKPAVQYQWDRQLPSFQTFFAPALDVIRGSLSLTNLSSSMAGVYVCKAHNEVGTAQCNVTLEVSTGPGAAVVAGAVVGTLVGLGLLAGLVLLYHRRG

SEQ ID NO: 13978 - protein, 55 aa, Homo sapiens
MRPPQCLLHTPSLASPLLLLLLWLLGGGVGAEGREDAELLVTVLRAPRCGTPTVS

SEQ ID NO: 13979 - protein, 1744 aa, Homo sapiens
MRLLWGLIWASSFFTLSLQKPRLLLFSPSVVHLGVPLSVGVQLQDVPRGQVVKGSVFLRNPSRNNVPCSPKVDFTLSSERDFALLSLQVPLKDAKSCGLHQLLRGPEVQLVAHSPWLKDSLSRTTNIQGINLLFSSRRGHLFLQTDQPIYNPGQRVRYRVFALDQKMRPSTDTITVMVENSHGLRVRKKEVYMPSSIFQDDFVIPDISEPGTWKISARFSDGLESNSSTQFEVKKYVLPNFEVKITPGKPYILTVPGHLDEMQLDIQARYIYGKPVQGVAYVRFGLLDEDGKKTFFRGLESQTKLVNGQSHISLSKAEFQDALEKLNMGITDLQGLRLYVAAAIIESPGGEMEEAELTSWYFVSSPFSLDLSKTKRHLVPGAPFLLQALVREMSGSPASGIPVKVSATVSSPGSVPEVQDIQQNTDGSGQVSIPIIIPQTISELQLSVSAGSPHPAIARLTVAAPPSGGPGFLSIERPDSRPPRVGDTLNLNLRAVGSGATFSHYYYMILSRGQIVFMNREPKRTLTSVSVFVDHHLAPSFYFVAFYYHGDHPVANSLRVDVQAGACEGKLELSVDGAKQYRNGESVKLHLETDSLALVALGALDTALYAAGSKSHKPLNMGKVFEAMNSYDLGCGPGGGDSALQVFQAAGLAFSDGDQWTLSRKRLSCPKEKTTRKKRNVNFQKAINEKLGQYASPTAKRCCQDGVTRLPMMRSCEQRAARVQQPDCREPFLSCCQFAESLRKKSRDKGQAGLQRALEILQEEDLIDEDDIPVRSFFPENWLWRVETVDRFQILTLWLPDSLTTWEIHGLSLSKTKGLCVATPVQLRVFREFHLHLRLPMSVRRFEQLELRPVLYNYLDKNLTVSVHVSPVEGLCLAGGGGLAQQVLVPAGSARPVAFSVVPTAATAVSLKVVARGSFEFPVGDAVSKVLQIEKEGAIHREELVYELNPLDHRGRTLEIPGNSDPNMIPDGDFNSYVRVTASDPLDTLGSEGALSPGGVASLLRLPRGCGEQTMIYLAPTLAASRYLDKTEQWSTLPPETKDHAVDLIQKGYMRIQQFRKADGSYAAWLSRGSSTWLTAFVLKVLSLAQEQVGGSPEKLQETSNWLLSQQQADGSFQDLSPVIHRSMQGGLVGNDETVALTAFVTIALHHGLAVFQDEGAEPLKQRVEASISKASSFLGEKASAGLLGAHAAAITAYALTLTKAPADLRGVAHNNLMAMAQETGDNLYWGSVTGSQSNAVSPTPAPRNPSDPMPQAPALWIETTAYALLHLLLHEGKAEMADQAAAWLTRQGSFQGGFRSTQDTVIALDALSAYWIASHTTEERGLNVTLSSTGRNGFKSHALQLNNRQIRGLEEELQFSLGSKINVKVGGNSKGTLKVLRTYNVLDMKNTTCQDLQIEVTVKGHVEYTMEANEDYEDYEYDELPAKDDPDAPLQPVTPLQLFEGRRNRRRREAPKVVEEQESRVHYTVCIWRNGKVGLSGMAIADVTLLSGFHALRADLEKLTSLSDRYVSHFETEGPHVLLYFDSVPTSRECVGFEAVQEVPVGLVQPASATLYDYYNPERRCSVFYGAPSKSRLLATLCSAEVCQCAEGKCPRQRRALERGLQDEDGYRMKFACYYPRVEYGFQVKVLREDSRAAFRLFETKITQVLHFTKDVKAAANQMRNFLVRASCRLRLEPGKEYLIMGLDGATYDLEGHPQYLLDSNSWIEEMPSERLCRSTRQRAACAQLNDFLQEYGTQGCQV

SEQ ID NO: 13980 - protein, 168 aa, Homo sapiens
MKSGLWYFFLFCLRIKVLTGEINGSANYEMFIFHNGGVQILCKYPDIVQQFKMQLLKGGQILCDLTKTKGSGNTVSIKSLKFCHSQLSNNSVSFFLYNLDHSHANYYFCNLSIFDPPPFKVTLTGGYLHIYESQLCCQLKFWLPIGCAAFVVVCILGCILICWLTKKM

SEQ ID NO: 13981 - protein, 142 aa, Homo sapiens
METFPLLLLSLGLVLAEASESTMKIIKEEFTDEEMQYDMAKSGQEKQTIEILMNPILLVKNTSLSMSKDDMSSTLLTFRSLHYNDPKGNSSGNDKECCNDMTVWRKVSEANGSCKWSNNFIRSSTEVMRRVHRAPSCKFVQN

SEQ ID NO: 13982 - protein, 232 aa, Homo sapiens
MARHGLPLLPLLSLLVGAWLKLGNGQATSMVQLQGGRFLMGTNSPDSRDGDGPVREATVKPFAIDIFPVTNKDFRDFVREKKYRTEAEMFGWSFVFEDFVSDELRNKATQPMKSVLWWLPVEKAFWRQGKFPKGDKAEDGFHGVSPVNAFPAQNNYGLYDLLGNVWEWTASPYQAAEQDMRVLRGASWIDTADGSANHRARVTTRMGNTPDSASDNLGFRCAADAGRPPGEL

SEQ ID NO: 13983 - protein, 217 aa, Homo sapiens
LQIPGGFWAAAVTVMLVMLSTPVAEARDFPKDFLVQFKGMCYFTNGTERVRGVARYIYNREEYGRFDSDVGEFQAVTELGRSIEDWNNYKDFLEQERAAVDKVCRHNYEAELRTTLQRQVEPTVTISPSRTEALNHHNLLVCSVTDFYPAQIKVRWFRNDQEETAGVVSTSLIRNGDWTFQILVMLEITPQRGDIYTCQVEHPSLQSPITVEWRLLH

SEQ ID NO: 13984 - protein, 1015 aa, Homo sapiens
MLTALAPPALPGIPRQLPTAPARRQDSSGSSGSYYTAPGSPEPPDVGPDAKGPANWPWVAPGRGAGAQPRLSVSAQNSRQRHGPGSGFPRGPGSGPRPPQPQLRTLPSGEMEVIFGVGPLFGCSGADDREAQQQFTEPAFISPLPPGPASPAAVPRQSQVPDGGSRWATYLELRPRGPSPAAPAQFECVEVALEEGAAPARPRTVPKRQIELRPRPQSPPRAAGAPRPRLLLRTGSLDESLGPLQAAAGFVQTALARKLSPEAPAPSSATFGSTGRSEPETRETARSTHVVLEKAKSRPLRVRDNSAPAKAPRPWPSLRERAIRRDKPAPGTEPLGPVSSSIFLQSEEKIQEARKTRFPREAPDRTVQRARSPPFECRIPSEVPSRAVRPRSPSPPRQTPNGAVRGPRCPSPQNLSPWDRTTRRVSSPLFPEASSEWENQNPAVEETVSRRSPSPPILSQWNQCVAGERSPSLEAPSLWEIPHSAVADAVEPRSSPSPPAFFPWEAPDRPIGTWGPSPQETWDPMGPGSSIAFTQEAQNGLTQEELAPPTPSAPGTPEPTEMQSPSTREISDLAFGGSQQSPEVAAPEPPGSHPVGTLDADKCPEVLGPGEAASGRPRMAIPRPRDVRKLVKTTYAPGFPAGAQGSGLPAPPADPCGEEGGESKTQEPPALGPPAPAHYTSVFIKDFLPVVPHPYEPPEPSFDTVARDASQPNGVLRRRAENSTAKPFKRTEIRLPGALALGRRPEVTSRVRARGPGGENRDVEAQRLVPDGDGRTSPLGGARSSSQRSPVGPAGVRSPRPGSPQMQASPSPGIAPKPKTPPTAPEPAAAVQAPLPREPLALAGRTAPAQPRAASAPPTDRSPQSPSQGARRQPGAAPLGKVLVDPESGRYYFVEAPRQPRLRVLFDPESGQYVEVLLPPSSPGPPHRVYTPLALGLGLYPPAYGPIPSLSLPPSPGPQALGSPQLPWVSEAGPLDGTYYLPVSGTPNPAPPLLLCAPPSSSGPTQPGKGSLFPL

SEQ ID NO: 13985 - protein, 362 aa, Homo sapiens
MRTLFNLLWLALACSPVHTTLSKSDAKKAASKTLLEKSQFSDKPVQDRGLVVTDLKAESVVLEHRSYCSAKARDRHFAGDVLGYVTPWNSHGYDVTKVFGSKFTQISPVWLQLKRRGREMFEVTGLHDVDQGWMRAVRKHAKGLHIVPRLLFEDWTYDDFRNVLDSEDEIEELSKTVVQVAKNQHFDGFVVEVWNQLLSQKRVTDQLGMFTHKEFEQLAPVLDGFSLMTYDYSTAHQPGPNAPLSWVRACVQVLDPKSKWRSKILLGLNFYGMDYATSKDAREPVVGARYIQTLKDHRPRMVWDSQASEHFFEYKKSRSGRHVVFYPTLKSLQVRLELARELGVGVSIWELGQGLDYFYDLL

SEQ ID NO: 13986 - protein, 147 aa, Homo sapiens
MRPQGPAASPQRLRGLLLLLLLQLPAPSSASEIPKGKQKAQLRQREVVDLYNGMCLQGPAGVPGRDGSPGANGIPGTPGIPGRDGFKGEKGECLRESFEESWTPNYKQCSWSSLNYGIDLGKIAVSLNYFKIEARFKGFHILVLIFR

SEQ ID NO: 13987 - protein, 214 aa, Homo sapiens
MVLGGCPVSYLLLCGQAALLLGNLLLLHCVSRSHSQNATAEPELTSAGAAQPEGPGGAASWEYGDPHSPVILCSYLPDEFIECEDPVDHVGNATASQELGYGCLKFGGQAYSDVEHTSVQCHALDGIECASPRTFLRENKPCIKYTGHYFITTLLYSFFLGCFGVDRFCLGHTGTAVGKLLTLGGLGIWWFVDLILLITGGLMPSDGSNWCTVY

SEQ ID NO: 13988 - protein, 108 aa, Homo sapiens
MQSPWKILTVAPLFLLLSLQSSASPANDDQSRPSLSNGHTCVEKLFLKTTCYLVIDKFGSDIIKLLSADMNADVVCHTLEFCKQNTGQPLCHLYPLPKETWKFTLQKA

SEQ ID NO: 13989 - protein, 75 aa, Homo sapiens
MTSSGPGPRFLLLLPLLLPPAASASDRPRGRDPVNPEKLLVITVATAETEGYLRFLRSAEFFNYTVRTLGLGEEW

SEQ ID NO: 13990 - protein, 306 aa, Homo sapiens
MALPPGPAALRHTLLLLPALLSSGWGELEPQIDGQTWAERALRENERHAFTCRVAGGPGTPRLAWYLDGQLQEASTSRLLSVGGEAFSGGTSTFTVTAHRAQHELNCSLQDPRSGRSANASVILNVQFKPEIAQVGAKYQEAQGPGLLVVLFALVRANPPANVTWIDQDGPVTVNTSDFLVLDAQNYPWLTNHTVQLQLRSLAHNLSVVATNDVGVTSASLPAPGPSRHPSLISSDSNNLKLNNVRLPRENMSLPSNLQLNDLTPDSRVKPADRQMAQNNSRPELLDPEPGGLLTSQGRRNQDKDA

SEQ ID NO: 13991 - protein, 410 aa, Homo sapiens
MLAAALLKAKSQELVTFEDVAVYFIRKEWKRLEPAQRDLYRDVMLENYGNVFSLDRETRTENDQEISEDTRSHGVLLGRFQKDISQGLKFKEAYEREVSLKRPLGNSPGERLNRKMPDFGQVTVEEKLTPRGERSEKYNDFGNSFTVNSNLISHQRLPVGDRPHKCDECSKSFNRTSDLIQHQRIHTGEKPYECNECGKAFSQSSHLIQHQRIHTGEKPYECSDCGKTFSCSSALILHRRIHTGEKPYECNECGKTFSWSSTLTHHQRIHTGEKPYACNECGKAFSRSSTLIHHQRIHTGEKPYECNECGKAFSQSSHLYQHQRIHTGEKPYECMECGGKFTYSSGLIQHQRIHTGENPYECSECGKAFRYSSALVRHQRIHTGEKPLNGIGMSKSSLRVTTELNIREST

SEQ ID NO: 13992 - protein, 990 aa, Homo sapiens
MSEETRQSKLAAAKKKLREYQQRNSPGVPTGAKKKKKIKNGSNPETTTSGGCHSPEDTPKDNAATLQPSDDTVLPGGVPSPGASLTSMAASQNHDADNVPNLMDETKTFSSTESLRQLSQQLNGLVCESATCVNGEGPASSANLKDLESRYQQLAVALDSSYVTNKQLNITIEKLKQQNQEITDQLEEEKKECHQKQGALREQLQVHIQTIGILVSEKAELQTALAHTQHAARQKEGESEDLASRLQYSRRRVGELERALSAVSTQQKKADRYNKELTKERDALRLELYKNTQSNEDLKQEKSELEEKLRVLVTEKAGMQLNLEELQKKLEMTELLLQQFSSRCEAPDANQQLQQAMEERAQLEAHLGQVMESVRQLQMERDKYAENLKGESAMWRQRMQQMSEQVHTLREEKECSMSRVQELETSLAELRNQMAEPPPPEPPAGPSEVEQQLQAEAEHLRKELEGLAGQLQAQVQDNEGLSRLNREQEERLLELERAAELWGEQAEARRQILETMQNDRTTISRALSQNRELKEQLAELQSGFVKLTNENMEITSALQSEQHVKRELGKKLGELQEKLSELKETVELKSQEAQSLQQQRDQYLGHLQQYVAAYQQLTSEKEVLHNQLLLQTQLVDQLQQQEAQGKAVAEMARQELQETQERLEAATQQNQQLRAQLSLMAHPGEGDGLDREEEEDEEEEEEEAVAVPQPMPSIPEDLESREAMVAFFNSAVASAEEEQARLRGQLKEQRVRCRRLAHLLASAQKEPEAAAPAPGTGGDSVCGETHRALQGAMEKLQSRFMELMQEKADLKERVEELEHRCIQLSGETDTIGEYIALYQSQRAVLKERHREKEEYISRLAQDKEEMKVKLLELQELVLRLVGDRNEWHGRFLAAAQNPADEPTSGAPAPQELGAANQQGDLCEVSLAGSVEPAQGEAREGSPRDNPTAQQIMQLLREMQNPRERPGLGSNPCIPFFYRADENDEVKITVI

SEQ ID NO: 13993 - protein, 151 aa, Homo sapiens
MRRLLLVTSLVVVLLWEAGAVPAPKVPIKMQVKHWPSEQDPEKAWGARVVEPPEKDDQLVVLFPVQKPKLLTTEEKPRGQGRGPILPGTKAWMETEDTLGHVLSPEPDHDSLYHPPPEEDQGEERPRLWVMPNHQVLLGPEEDQDHIYHPQ

SEQ ID NO: 13994 - protein, 119 aa, Homo sapiens
MEFGLSWVFLVVILQGVQCEVQLVESGGGLVQPGGSLRLSCAASGFTFSDHYMDWVRQAPGKGLEWVGRTRNKANSYTTEYAASVKGRFTISRDDSKNSLYLQMNSLKTEDTAVYYCAR

SEQ ID NO: 13995 - protein, 244 aa, Homo sapiens
MENFTALFGAQADPPPPPTALGFGPGKPPPPPPPPAGGGPGTAPPPTAATAPPGADKSGAGCGPFYLMRELPGSTELTGSTNLITHYNLEQAYNKFCGKKVKEKLSNFLPDLPGMIDLPGSHDNSSLRSLIEKPPILSSSFNPITGTMLAGFRLHTGPLPEQCRLMHIQPPKKKNKHKHKQSRTQDPVPPETPSDSDHKKKKKKKEEDPERKRKKKEKKKKKNRHSPDHPGMGSSQASSSSSLR

SEQ ID NO: 13996 - protein, 199 aa, Homo sapiens
MLLLFLLFEGLCCPGENTAVKPEAWLSCGPSPGPGRLQLVCHVSGFYPKPVWVMWMRGEQEQRGTQRGDVLPNADETWYLRATLDVAAGEAAGLSCRVKHSSLGGHDLIIHWGGYSIFLILICLTVIVTLVILVVVDSRLKKQSSNKNILSPHTPSPVFLMGANTQDTKNSRHQFCLAQVSWIKNRVLKKWKTRLNQLW

SEQ ID NO: 13997 - protein, 49 aa, Homo sapiens
MQHRGFLLLTLLALLALTSAVAKKKDKVKKGGPGSECAEWAWGPCTPSS

SEQ ID NO: 13998 - protein, 305 aa, Homo sapiens
MDDKELIEYFKSQMKEDPDMASAVAAIRTLLEFLKRDKGETIQGLRANLTSAIETLCGVDSSVAVSSGGELFLRFISLASLEYSDYSKCKKIMIERGELFLRRISLSRNKIADLCHTFIKDGATILTHAYSRVVLRVLEAAVAAKKRFSVYVTESQPDLSGKKMAKALCHLNVPVTVVLDAAVGYIMEKADLVIVGAEGVVENGGIINKIGTNQMAVCAKAQNKPFYVVAESFKFVRLFPLNQQDVPDKFKYKADTLKVAQTGQDLKEEHPWVDYTAPSLITLLFTDLGVLTPSAVSDELIKLYL

SEQ ID NO: 13999 - protein, 166 aa, Homo sapiens
MEATTAGVGRLEEEALRRKERLKALREKTGRKDKEDGEPKTKHLREEEEEGEKHRELRLRNYVPEDEDLKKRRVPQAKPVAVEEKVKEQLEAAKPEPVIEEVDLANLAPRKPDWDLKRDVAKKLEKLKKRTQRAIAELIRERLKGQEDSLASAVDAATEQKTCDSD

SEQ ID NO: 14000 - protein, 69 aa, Homo sapiens
MRRGGWRKRAENDGWETWGGYMAAKVQKLEEQFRSDAAMQKDGTSSTIFSGVAIYVNGYTDWFSCFTSH

SEQ ID NO: 14001 - protein, 567 aa, Homo sapiens
MVISLNSCLSFICLLLCHWIGTASPLNLEDPNVCSHWESYSVTVQESYPHPFDQIYYTSCTDILNWFKCTRHRVSYRTAYRHGEKTMYRRKSQCCPGFYESGEMCVPHCADKCVHGRCIAPNTCQCEPGWGGTNCSSACDGDHWGPHCTSRCQCKNGALCNPITGACHCAAGFRGWRCEDRCEQGTYGNDCHQRCQCQNGATCDHVTGECRCPPGYTGAFCEDLCPPGKHGPQCEQRCPCQNGGVCHHVTGECSCPSGWMGTVCGQPCPEGRFGKNCSQECQCHNGGTCDAATGQCHCSPGYTGERCQDECPVGTYGVLCAETCQCVNGGKCYHVSGACLCEAGFAGERCEARLCPEGLYGIKCDKRCPCHLENTHSCHPMSGECACKPGWSGLYCNETCSPGFYGEACQQICSCQNGADCDSVTGKCTCAPGFKGIDCSTPCPLGTYGINCSSRCGCKNDAVCSPVDGSCTCKAGWHGVDCSIRCPSGTWGFGCNLTCQCLNGGACNTLDGTCTCAPGWRGEKCELPCQDGTYGLNCAERCDCSHADGCHPTTGHCRCLPGWSGLF

SEQ ID NO: 14002 - protein, 492 aa, Homo sapiens
MEPSSKKLTGRLMLAVGGAVLGSLQFGYNTGVINAPQKVIEEFYNQTWVHRYGESILPTTLTTLWSLSVAIFSVGGMIGSFSVGLFVNRFGRRNSMLMMNLLAFVSAVLMGFSKLGKSFEMLILGRFIIGVYCGLTTGFVPMYVGEVSPTALRGALGTLHQLGIVVGILIAQVFGLDSIMGNKDLWPLLLSIIFIPALLQCIVLPFCPESPRFLLINRNEENRAKSVLKKLRGTADVTHDLQEMKEESRQMMREKKVTILELFRSPAYRQPILIAVVLQLSQQLSGINAVFYYSTSIFEKAGVQQPVYATIGSGIVNTAFTVVSLFVVERAGRRTLHLIGLAGMAGCAILMTIALALLEQLPWMSYLSIVAIFGFVAFFEVGPGPIPWFIVAELFSQGPRPAAIAVAGFSNWTSNFIVGMCFQYVEQLCGPYVFIIFTVLLVLFFIFTYFKVPETKGRTFDEIASGFRQGGASQSDKTPEELFHPLGADSQV

SEQ ID NO: 14003 - protein, 683 aa, Homo sapiens
MALFVRLLALALALALGPAATLAGPAKSPYQLVLQHSRLRGRQHGPNVCAVQKVIGTNRKYFTNCKQWYQRKICGKSTVISYECCPGYEKVPGEKGCPAALPLSNLYETLGVVGSTTTQLYTDRTEKLRPEMEGPGSFTIFAPSNEAWASLPAEVLDSLVSNVNIELLNALRYHMVGRRVLTDELKHGMTLTSMYQNSNIQIHHYPNGIVTVNCARLLKADHHATNGVVHLIDKVISTITNNIQQIIEIEDTFETLRAAVAASGLNTMLEGNGQYTLLAPTNEAFEKIPSETLNRILGDPEALRDLLNNHILKSAMCAEAIVAGLSVETLEGTTLEVGCSGDMLTINGKAIISNKDILATNGVIHYIDELLIPDSAKTLFELAAESDVSTAIDLFRQAGLGNHLSGSERLTLLAPLNSVFKDGTPPIDAHTRNLLRNHIIKDQLASKYLYHGQTLETLGGKKLRVFVYRNSLCIENSCIAAHDKRGRYGTLFTMDRVLTPPMGTVMDVLKGDNRFSMLVAAIQSAGLTETLNREGVYTVFAPTNEAFRALPPRERSRLLGDAKELANILKYHIGDEILVSGGIGALVRLKSLQGDKLEVSLKNNVVSVNKEPVAEPDIMATNGVVHVITNVLQPPANRPQERGDELADSALEIFKQASAFSRASQRSVRLAPVYQKLLERMKH

SEQ ID NO: 14004 - protein, 60 aa, Homo sapiens
MGRPLLLPLLLLLQPPAFLQPGLCEPALSELDRGSGERLPQDLKPAEGGPVCVFLPSRAG

SEQ ID NO: 14005 - protein, 231 aa, Homo sapiens
MRRAPSLVLFFLVALCGRGNCRVANAEEKLMDDLLNKTRYNNLIRPATSSSQLISIKLQLSLAQLISVNEREQIMTTNVWLKQEWTDYRLTWNSSRYEGVNILRIPAKRIWLPDIVLYNKSLRTGSTWLWWWTGCSCGCSCLCASWALWGSSYRPSSRPMQLLRGPTLPSVTEGPLGCGVRGCEWPGGHFAASFWVVADEALSKYVSIGHQPHQTSHSRGTGKDGGLGCPL

SEQ ID NO: 14006 - protein, 415 aa, Homo sapiens
MLLSVPLTASRAPSSNPLPKADDLAQEMEDVDFEEEEEEEGNEEGWVLEPQEGVVGSMEGPDDSEVTFALHSASVFCVSLDPKTNTLAVTGGEDDKAFVWRLSDGELLFECAGHKDSVTCAGFSHDSTLVATGDMSGLLKVWQVDTKEEVWSFEAGDLEWMEWHPRAPVLLAGTADGNTWMWKVPNGDCKTFQGPNCPATCGRVLPDGKRAVVGYEDGTIRIWDLKQGSPIHVLKGTEGHQGPLTCVAANQDGSLILTGSVDCQAKLVSATTGKVVGVFRPETVASQPSLGEGEESESNSVESLGFCSVMPLAAVGYLDGTLAIYDLATQTLRHQCQHQSGIVQLLWEAGTAVVYTCSLDGIVRLWDARTGRLLTDYRGHTAEILDFALSKDASLVVTTSGDHKAKVFCVQRPDR

SEQ ID NO: 14007 - protein, 248 aa, Homo sapiens
MVELMFPLLLLLLPFLLYMAAPQIRKMLSSGVCTSTVQLPGKVVVVTGANTGIGKETAKELAQRGARVYLACRDVEKGELVAKEIQTTTGNQQVLVRKLDLSDTKSIRAFAKGFLAEEKHLHVLINNAGVMMCPYSKTADGFEMHIGVNHLGSGVTTYSVHPGTVQSELVRHSSFMRWMWWLFSFFIKTPQQGAQTSLHCALTEGLEILSGNHFSDCHVAWVSAQARNETIARRLWDVSCDLLGLPID

SEQ ID NO: 14008 - protein, 572 aa, Homo sapiens
MERPEEGKQSPPPQPWGRLLRLGAEEGEPHVLLRKREWTIGRRRGCDLSFPSNKLVSGDHCRIVVDEKSGQVTLEDTSTSGTVINKLKVVKKQTCPLQTGDVIYLVYRKNEPEHRSGGGGISPKGSGPSVASDEVSSFASALPDRKTASFSSLEPQDQEDLEPVKKKMRGDGDLDLNGQLLVAQPRRNAQTVHEDVRAAAGKPDKMEETLTCIICQDLLHDCVSLQPCMHTFCAACYSGWMERSSLCPTCRCPVERICKNHILNNLVEAYLIQHPDKSRSEEDVQSMDARNKITQDMLQPKVRRSFSDEEGSSEDLLELSDVDSESSDISQPYVVCRQCPEYRRQAAQPPHCPAPEGEPGAPQALGDAPSTSVSLTTAVQDYVCPLQGSHALCTCCFQPMPDRRAEREQDPRVAPQQCAVCLQPFCHLYWGCTRTGCYGCLAPFCELNLGDKCLDGVLNNNSYESDILKNYLATRGLTWKNMLTESLVALQRGVFLLSDYRVTGDTVLCYCCGLRSFRELTYQYRQNIPASELPVAVTSRPDCYWGRNCRTQVKAHHAMKFNHICEQTRFKN

SEQ ID NO: 14009 - protein, 1447 aa, Homo sapiens
MGLRPGIFLLELLLLLGQGTPQIHTSPRKSTLEGQLWPETLKNSPFPCNPNKLGVNMPSKSVHSLKPSDIKFVAAIGNLEIPPDPGTGDLEKQDWTERPQQVCMGVMTVLSDIIRYFSPSVPMPVCHTGKRVIPHDGAEDLWIQAQELVRNMKENLQLDFQFDWKLINVFFSNASQCYLCPSAQQAPSLSTVLLSQNGLAAGGVDELMGVLDYLQQEVPRAFVNLVDLSEVAEVSRQYHGTWLSPAPEPCNCSEETTRLAKVVMQWSYQEAWNSLLASSRYSEQESFTVVFQPFFYETTPSLHSEDPRLQDSTTLAWHLWNRMMEPAGEKDEPLSVKHGRPMKCPSQESPYLFSYRNSNYLTRLQKPQDKLEVREGAEIRCPDKDPSDTVPTSVHRLKPADINVIGALGDSLTAGNGAGSTPGNVLDVLTQYRGLSWSVGGDENIGTVTTLANILREFNPSLKGFSVGTGKETSPNAFLNQAVAGGRAEDLPVQARRLVDLMKNDTRIHFQEDWKIITLFIGGNDLCDFCNDLVPRAFVNLVTVLEIVNLRELYQEKKVYCPRMILRSLCPCVLKFDDNSTELATLIEFNKKFQEKTHQLIESGRYDTREDFTVVVQPFFENVDMPKTSEGLPDNSFFAPDCFHFSSKSHSRAASALWNNMLEPVGQKTTRHKFENKINITCPNQVQPFLRTYKNSMQGHGTWLPCRDRAPSALHPTSVHALRPADIQVVAALGDSLTAGNGIGSKPDDLPDVTTQYRGLSYSAGGDGSLENVTTLPNILREFNRNLTGYAVGTGDANDTNAFLNQAVPGAKAEDLMSQVQTLMQKMKDDHRVNFHEDWKVITVLIGGSDLCDYCTDSNLYSAANFVHHLRNALDVLHREVPRVLVNLVDFLNPTIMRQVFLGNPDKCPVQQASVLCNCVLTLRENSQELARLEAFSRAYRSSMRELVGSGRYDTQEDFSVVLQPFFQNIQLPVLADGLPDTSFFAPDCIHPNQKFHSQLARALWTNMLEPLGSKTETLDLRAEMPITCPTQNEPFLRTPRNSNYTYPIKPAIENWGSDFLCTEWKASNSVPTSVHQLRPADIKVVAALGDSLTTAVGARPNNSSDLPTSWRGLSWSIGGDGNLETHTTLPNILKKFNPYLLGFSTSTWEGTAGLNVAAEGARARDMPAQAWDLVERMKNSPDINLEKDWKLVTLFIGVNDLCHYCENPEAHLATEYVQHIQQALDILSEELPRAFVNVVEVMELASLYQGQGGKCAMLAAQNNCTCLRHSQSSLEKQELKKVNWNLQHGISSFSYWHQYTQREDFAVVVQPFFQNTLTPLNERGDTDLTFFSEDCFHFSDRGHAEMAIALWNNMLEPVGRKTTSNNFTHSRAKLKCPSPESPYLYTLRNSRLLPDQAEEAPEVLYWAVPVAAGVGLVVGIIGTVVWRCRRGGRREDPPMSLRTVAL

SEQ ID NO: 14010 - protein, 96 aa, Homo sapiens
MAGPFSRLLSARPGLRLLALAGAGSLAAGFLLRPEPVRAASERRRLYPPSQTWPTGQLPGNCTRSRRLCPPSMVTGYPLPSAEYPDLRKHNNCMAS

SEQ ID NO: 14011 - protein, 52 aa, Homo sapiens
MQSPWKILTVAPLFLLLSLQSSASPANDDQSRPSLSNGHTCVASSAEKPQLS

SEQ ID NO: 14012 - protein, 343 aa, Homo sapiens
MSSESSKKRKPKVIRSDGAPAEGKRNRSDTEQEGKYYSEEAEVDLRDPGRDYELYKYTCQELQRLMAEIQDLKSRGGKDVAIEIEERRIQSCVHFMTLKKLNRLAHIRLKKGRDQTHEAKQKVDAYHLQLQNLLYEVMHLQKEITKCLEFKSKHEEIDLVSLEEFYKEAPPDISKAEVTMGDPHQQTLARLDWELEQRKRLAEKYRECLSNKEKILKEIEVKKEYLSSLQPRLNSIMQASLPVQEYLFMPFDQAHKQYETARHLPPPLYVLFVQATAYGQACAHMKSSQPPRQDKTLSVAIEGSVDEAKALFKPPEDSQDDESDSDAEEEQTTVPSSLEAEEV

SEQ ID NO: 14013 - protein, 439 aa, Homo sapiens
MAEAVFHAPKRKRRVYETYESPLPIPFGQDHGPLKEFKIFRAEMINNNVIVRNAEDIEQLYGKGYFGKGILSRSRPSFTISDPKLVAKWKDMKTNMPIITSKRYQHSVEWAAELMRRQGQDESTVRRILKDYTKPLEHPPVKRNEEAQVHDKLNSGMVSNMEGTAGGERPSVVNGDSGKSGGVGDPREPLGCLQEGSGCHPTTESFEKSVREDASPLPHVCCCKQDALILQRGLHHEDGSQHIGLLHPGDRGPDHEYVLVEEAECAMSEREAAPNEEAFFLVYALGCLSIYYEKEPLTIVKLWKAFTVVQPTFRTTYMAYHYFRSKGWVPKVGLKYGTDLLLYRKGPPFYHASYSVIIELVDDHFEGSLRRPLSWKSLAALSRVSVNVSKELMLCYLIKPSTMTDKEMESPECMKRIKVQEVILSRWVSSRERSDQDDL

SEQ ID NO: 14014 - protein, 1032 aa, Homo sapiens
MGRESRHYRKRSASRGRSGSRSRSRSPSDKRSKRGDDRRSRSRDRDRRRERSRSRDKRRSRSRDRKRLRRSRSRERDRSRERRRSRSRDRRRSRSRSRGRRSRSSSPGNKSKKTENRSRSKEKTDGGESSKEKKKDKDDKEDEKEKDAGNFDQNKLEEEMRKRKERVEKWREEQRKKAMENIGELKKEIEEMKQGKKWSLEDDDDDEDDPAEAEKEGNEMEGEELDPLDAYMEEVKEEVKKFNMRSVKGGGGNEKKSGPTVTKVVTVVTTKKAVVDSDKKKGELMENDQDAMEYSSEEEEVDLQTALTGYQTKQRKLLEPVDHGKIEYEPFRKNFYVEVPELAKMSQEEVNVFRLEMEGITVKGKGCPKPIKSWVQCGISMKILNSLKKHGYEKPTPIQTQAIPAIMSGRDLIGIAKTGSGKTIAFLLPMFRHIMDQRSLEEGEGPIAVIMTPTRELALQITKECKKFSKTLGLRVVCVYGGTGISEQIAELKRGAEIIVCTPGRMIDMLAANSGRVTNLRRVTYVVLDEADRMFDMGFEPQVMRIVDNVRPDRQTVMFSATFPRAMEALARRILSKPIEVQVGGRSVVCSDVEQQVIVIEEEKKFLKLLELLGHYQESGSVIIFVDKQEHADGLLKDLMRASYPCMSLHGGIDQYDRDSIINDFKNGTCKLLVATSVAARGLDVKHLILVVNYSCPNHYEDYVHRAGRTGRAGNKGYAYTFITEDQARYAGDIIKALELSGTAVPPDLEKLWSDFKDQQKAEGKIIKKSSGFSGKGFKFDETEQALANERKKLQKAALGLQDSDDEDAAVDIDEQIESMFNSKKRVKDMAAPGTSSVPAPTAGNAEKLEIAKRLALRINAQKNLGIESQVDVMQQATNAILRGGTILAPTVSAKTIAEQLAEKINAKLNYVPLEKQEEERQDGGQNESFKRYEEELEINDFPQTARWKVTSKEALQRISEYSEAAITIRGTYFPPGKEPKEGERKIYLAIESANELAVQKAKAEITRLIKEELIRLQNSYQPTNKGRYKVL

SEQ ID NO: 14015 - protein, 764 aa, Homo sapiens
MGSNLSPQLCLMPFILGLLSGGVTTTPWSLARPQGSCSLEGVEIKGGSFRLLQEGQALEYVCPSGFYPYPVQTRTCRSTGSWSTLKTQDQKTVRKAECRAIHCPRPHDFENGEYWPRSPYYNVSDEISFHCYDGYTLRGSANRTCQVNGRWSGQTAICDNGAGYCSNPGIPIGTRKVGSQYRLEDSVTYHCSRGLTLRGSQRRTCQEGGSWSGTEPSCQDSFMYDTPQEVAEAFLSSLTETIEGVDAEDGHGPGEQQKRKIVLDPSGSMNIYLVLDGSDSIGASNFTGAKKCLVNLIEKVASYGVKPRYGLVTYATYPKIWVKVSEADSSNADWVTKQLNEINYEDHKLKSGTNTKKALQAVYSMMSWPDDVPPEGWNRTRHVIILMTDGLHNMGGDPITVIDEIRDLLYIGKDRKNPREDYLDVYVFGVGPLVNQVNINALASKKDNEQHVFKVKDMENLEDVFYQMIDESQSLSLCGMVWEHRKGTDYHKQPWQAKISVIRPSKGHESCMGAVVSEYFVLTAAHCFTVDDKEHSIKVSVGGEKRDLEIEVVLFHPNYNINGKKEAGIPEFYDYDVALIKLKNKLKYGQTIRPICLPCTEGTTRALRLPPTTTCQQQKEELLPAQDIKALFVSEEEKKLTRKEVYIKNGDKKGSCERDAQYAPGYDKVKDISEVVTPRFLCTGGVSPYADPNTCRGDSGGPLIVHKRSRFIQVGVISWGVVDVCKNQKRQKQVPAHARDFHINLFQVLPWLKEKLQDEDLGFL

SEQ ID NO: 14016 - protein, 618 aa, Homo sapiens
MAASPGSGSANPRKFSEKIALHTQRQAEETRAFEQLMTDLTLSRVQFQKLQQLRLTQYHGGSLPNVSQLRSSASEFQPSFHQADNVRGTRHHGLVERPSRNRFHPLHRRSGDKPGRQFDGSAFGANYSSQPLDESWPRQQPPWKDEKHPGFRLTSALNRTNSDSALHTSALSTKPQDPYGGGGQSAWPAPYMGFCDGENNGHGEVASFPGPLKEENLLNVPKPLPKQLWETKEIQSLSGRPRSCDVGGGNAFPHNGQNLGLSPFLGTLNTGGSLPDLTNLHYSTPLPASLDTTDHHFGSMSVGNSVNNIPAAMTHLGIRSSSGLQSSRSNPSIQATLNKTVLSSSLNNHPQTSVPNASALHPSLRLFSLSNPSLSTTNLSGPSRRRQPPVSPLTLSPGPEAHQGFSRQLSSTSPLAPYPTSQMVSSDRSQLSFLPTEAQAQVSPPPPYPAPQELTQPLLQQPRAPEAPAQQPQAASSLPQSDFQLLPAQGSSLTNFFPDVGFDQQSMRPGPAFPQQVPLVQQGSRELQDSFHLRPSPYSNCGSLPNTILPDSSTSLFKDLNSALAGLPEVSLNVDTPFPLEEELQIEPLSLDGLNMLSDSSMGLLDPSVEETFRADRL

SEQ ID NO: 14017 - protein, 111 aa, Homo sapiens
MLDWRLASAHFILAVTLTLWSSGKVLSVDVTTTEAFDSGVIDVQSTPTVREEKSATDLTAKLLLLDELVSLENDVIETKKKRSFSGFGSPLDRLSAGSVDHKGKQRCNFLG

SEQ ID NO: 14018 - protein, 1272 aa, Homo sapiens
MVAAAAATEARLRRRTAATAALAGRSGGPHWDWDVTRAGRPGLGAGLRLPRLLSPPLRPRLLLLLLLLSPPLLLLLLPCEAEAAAAAAAVSGSAAAEAKECDRPCVNGGRCNPGTGQCVCPAGWVGEQCQHCGGRFRLTGSSGFVTDGPGNYKYKTKCTWLIEGQPNRIMRLRFNHFATECSWDHLYVYDGDSIYAPLVAAFSGLIVPERDGNETVPEVVATSGYALLHFFSDAAYNLTGFNITYSFDMCPNNCSGRGECKISNSSDTVECECSENWKGEACDIPHCTDNCGFPHRGICNSSDVRGCSCFSDWQGPGCSVPVPANQSFWTREEYSNLKLPRASHKAVVNGNIMWVVGGYMFNHSDYNMVLAYDLASREWLPLNRSVNNVVVRYGHSLALYKDKIYMYGGKIDSTGNVTNELRVFHIHNESWVLLTPKAKEQYAVVGHSAHIVTLKNGRVVMLVIFGHCPLYGYISNVQEYDLDKNTWSILHTQGALVQGGYGHSSVYDHRTRALYVHGGYKAFSANKYRLADDLYRYDVDTQMWTILKDSRFFRYLHTAVIVSGTMLVFGGNTHNDTSMSHGAKCFSSDFMAYDIACDRWSVLPRPDLHHDVNRFGHSAVLHNSTMYVFGGFNSLLLSDILVFTSEQCDAHRSEAACLAAGPGIRCVWNTGSSQCISWALATDEQEEKLKSECFSKRTLDHDRCDQHTDCYSCTANTNDCHWCNDHCVPRNHSCSEGQISIFRYENCPKDNPMYYCNKKTSCRSCALDQNCQWEPRNQECIALPENICGIGWHLVGNSCLKITTAKENYDNAKLFCRNHNALLASLTTQKKVEFVLKQLRIMQSSQSMSKLTLTPWVGLRKINVSYWCWEDMSPFTNSLLQWMPSEPSDAGFCGILSEPSTRGLKAATCINPLNGSVCERPANHSAKQCRTPCALRTACGDCTSGSSECMWCSNMKQCVDSNAYVASFPFGQCMEWYTMSTCPPENCSGYCTCSHCLEQPGCGWCTDPSNTGKGKCIEGSYKGPVKMPSQAPTGNFYPQPLLNSSMCLEDSRYNWSFIHCPACQCNGHSKCINQSICEKCENLTTGKHCETCISGFYGDPTNGGKCQPCKCNGHASLCNTNTGKCFCTTKGVKGDECQLCEVENRYQGNPLRGTCYYTLLIDYQFTFSLSQEDDRYYTAINFVATPDEQNRDLDMFINASKNFNLNITWAASFSAGTQAGEEMPVVSKTNIKEYKDSFSNEKFDFRNHPNITFFVYVSNFTWPIKIQVQTEQ

SEQ ID NO: 14019 - protein, 165 aa, Homo sapiens
MAGSPTCLTLIYILWQLTGSAASGPVKELVGSVGGAVTFPLKSKVKQVDSIVWTFNTTPLVTIQPEGGTIIVTQNRNRERVDFPDGGYSLKLSKLKKNDSGIYYVGIYSSSLQQPSTQEYVLHVYENNPKGRSSKYGLLHCGNTEKDGKSPLTAHDARHTKAICL

SEQ ID NO: 14020 - protein, 244 aa, Homo sapiens
MTEPGASPEDPWVKVEYAYSDNSLDPGLFVESTRKGSVVSRANSIGSTSASSVPNTDDEDSDYHQEAYKESYKDRRRRAHTQAEQKRRDAIKRGYDDLQTIVPTCQQQDFSIGSQKLSKAIVLQKTIDYIQFLHKEKKKQEEEVSTLRKDVTALKIMKVNYEQIVKAHQDNPHEGEDQVSDQVKFNVFQGIMDSLFQSFNASISVASFQELSACVFSWIEEHCKPQTLREIVIGVLHQLKNQLY

SEQ ID NO: 14021 - protein, 643 aa, Homo sapiens
MALRKAGDLEPQFTPERRFRLCWYQAHSGRALLGPPPQASPPAGGLALALLLLSWVALGPRSLEGADPGTPGEAEGPACPAACVCSYDDDADELSVFCSSRNLTRLPDGVPGGTQALWLDGNNLSSVPPAAFQNLSSLGFLNLQGGQLGSLEPQALLGLENLCHLHLERNQLRSLALGTFAHTPALASLGLSNNRLSRLEDGLFEGLGSLWDLNLGWNSLAVLPDAAFRGLGSLRELVLAGNRLAYLQPALFSGLAELRELDLSRNALRAIKANVFVQLPRLQKLYLDRNLIAAVAPGAFLGLKALRWLDLSHNRVAGLLEDTFPGLLGLRVLRLSHNAIASLRPRTFKDLHFLEELQLGHNRIRQLAERSFEGLGQLEVLTLDHNQLQEVKAGAFLGLTNVAVMNLSGNCLRNLPEQVFRGLGKLHSLHLEGSCLGRIRPHTFTGLSGLRRLFLKDNGLVGIEEQSLWGLAELLELDLTSNQLTHLPHRLFQGLGKLEYLLLSRNRLAELPADALGPLQRAFWLDVSHNRLEALPNSLLAPLGRLRYLSLRNNSLRTFTPQPPGLERLWLEGNPWDCGCPLKALRDFALQNPSAVPRFVQAICEGDDCQPPAYTYNNITCASPPEVVGLDLRDLSEAHFAPC

SEQ ID NO: 14022 - protein, 1423 aa, Homo sapiens
MYFLSGWPKRLLCPLGSPAEAPFHVQSDPQRAFFAVLAAARLSIWYSRPSVLIVTYKEPAKSSTQFGSYKQAEWRPDSTMIAVSTANGYILFFHITSTRGDKYLYEPVYPKGSPQMKGTPHFKEEQCAPALNLEMRKILDLQAPIMSLQSVLEDLLVATSDGLLHLIHWEGMTNGRKAINLCTVPFSVDLQSSRVGSFLGFTDVHIRDMEYCATLDGFAVVFNDGKVGFITPVSSRFTAEQLHGVWPQDVVDGTCVAVNNKYRLMAFGCVSGSVQVYTIDNSTGAMLLSHKLELTAKQYPDIWNKTGAVKLMRWSPDNSVVIVTWEYGGLSLWSVFGAQLICTLGGDFAYRSDGTKKDPLKINSMSWGAEGYHLWVISGFGSQNTEIESDLRSVVKQPSILLFQFIKSVLTVNPCMSNQEQVLLQGEDRLYLNCGEASQTQNPRSSSTHSEHKPSREKSPFADGGLESQGLSTLLGHRHWHVVQISSTYLESNWPIRFSAIDKLGQNIAVVGKFGFAHYSLLTKKWKLFGNITQEQNMIVTGGLAWWNDFMVLACYNINDRQEELRVYLRTSNLDNAFAHVTKAQAETLLLSVFQDMVIVFRADCSICLYSIERKSDGPNTTAGIQVLQEVSMSRYIPHPFLVVSVTLTSVSTENGITLKMPQQARGAESIMLNLAGQLIMMQRDRSGPQIREKDSNPNNQRKLLPFCPPVVLAQSVENVWTTCRANKQKRHLLEALWLSCGGAGMKVWLPLFPRDHRKPHSFLSQRIMLPFHINIYPLAVLFEDALVLGAVNDTLLYDSLYTRNNAREQLEVLFPFCVVERTSQIYLHHILRQLLVRNLGEQALLLAQSCATLPYFPHVLELMLHEVLEEEATSREPIPDPLLPTVAKFITEFPLFLQTVVHCARKTEYALWNYLFAAVGNPKDLFEECLMAQDLDTAASYLIILQNMEVPAVSRQHATLLFNTALEQGKWDLCRHMIRFLKAIGSGESETPPSTPTAQEPSSSGGFEFFRNRSISLSQSAENVPASKFSLQKTLSMPSGPSGKRWSKDSDCAENMYIDMMLWRHARRLLEDVRLKDLGCFAAQLGFELISWLCKERTRAARVDNFVIALKRLHKDFLWPLPIIPASSISSPFKNGKYRTVGEQLLKSQSADPFLNLEMDAGISNIQRSQSWLSNIGPTHHEIDTASSHGPQMQDAFLSPLSNKGDECSIGSATDLTESSSMVDGDWTMVDENFSTLSLTQSELEHISMELASKGPHKSQVQLRYLLHIFMEAGCLDWCIVIGLILRESSIINQILVITQSSEVDGEMLQNIKTGLHAVDRWASTDCPGYKPFLNIIKPQLQKLSEITEEQVQPDAFQPITMGKTPEQTSPRAEESRGSSSHGSIPQGEVGSSNMVSRKEEDTAQAEEEEPFQDGTYDCSVS

SEQ ID NO: 14023 - protein, 83 aa, Homo sapiens
MKLLTGLVFCSLVLSVSSRSFFSFLGEAFDGARDMWRAYSDMREANYIGSDKYFHARGNYDAAKRGPGGAWAAEVISLFSAEL

SEQ ID NO: 14024 - protein, 298 aa, Homo sapiens
MAGPFSRLLSARPGLRLLALAGAGSLAAGFLLRPEPVRAASERRRLYPPSAEYPDLRKHNNCMASHLTPAVYARLCDKTTPTGWTLDQCIQTGVDNPGHPFIKTVGMVAGDEETYEVFADLFDPVIQERHNGYDPRTMKHTTDLDASKIRSGYFDERYVLSSRVRTGRSIRGLSLPPACTRAERREVERVVVDALSGLKGDLAGRYYRLSEMTEAEQQQLIDDHFLFDKPVSPLLTAAGMARDWPDARGIWHNNEKSFLIWVNEEDHTRVISMEKGGNMKRVFERFCRGLKEVVVGIK

SEQ ID NO: 14025 - protein, 57 aa, Homo sapiens
MALRHLALLAGLLVGVASKSMENTAQLPECCVDVVGVNASCPGASLCGPGCYRRWNA

SEQ ID NO: 14026 - protein, 59 aa, Homo sapiens
MRMCTPIRGLLMALAVMFGTAMAFAPIPRITWEHREVHLVQFHEPDIYNYSALLLSEDK

SEQ ID NO: 14027 - protein, 64 aa, Homo sapiens
MRLSVRRVLLAAGCALVLVLAVQLGQQVLECRAVLAGLRSPRGAMRPEQEELVMVGTNHVEYRY

SEQ ID NO: 14028 - protein, 137 aa, Homo sapiens
MITPTVKMHTMSSSHLFYLALCLLTFTSSATAGPETLCGAELVDALQFVCGDRGFYFNKPTGYGSSSRRAPQTGIVDECCFRSCDLRRLEMYCAPLKPAKSARSVRAQRHTDMPKTQKEVHLKNASRGSAGNKNYRM

SEQ ID NO: 14029 - protein, 152 aa, Homo sapiens
MASSLNEDPEGSRITYVKGDLFACPKTDSLAHCISEDCRMGAGIAVLFKKKFGGVQELLNQQKKSGEVAVLKRDGRYIYYLITKKRASHKPTYENLQKSLEAMKSHCLKNGVTDLSMPRIGCGLDRLQWENVSAMIEEVFEATDIKITVYTL

SEQ ID NO: 14030 - protein, 220 aa, Homo sapiens
MEGPRGWLVLCVLAISLASMVTEDLCRAPDGKKGEAGRPGRRGRPGLKGEQGEPGAPGIRTGIQGLKGDQGEPGPSGNPGKVGYPGPSGPLGARGIPGIKGTKGSPGNIKDQPRPAFSAIRRNPPMGGNVVIFDTVITNQEEPYQNHSGRFVCTVPGYYYFTFQVLSQWEICLSIVSSSRGQVRRSLGFCDTTNKGLFQVVSGGMVLQLQQGDQVWVEKD

SEQ ID NO: 14031 - protein, 62 aa, Homo sapiens
MHYPTALLFLILANGAQAFRICAFNAQRLTLAKVAREQVMDTLVRDVILLGDFNADCASLTK

SEQ ID NO: 14032 - protein, 191 aa, Homo sapiens
MTPALTALLCLGLSLGPRTRMQAGPFPKPTLWAEPGSVISWGSPVTIWCQGSLEAQEYQLDKEGSPEPWDRNNPLEPKNKARFSIPSMTQHHAGRYRCHYYSSAGWSEPSDPLELVMTGFYNKPTLSALPSPVVASGGNMTLRCGSQKGYHHFVLMKEGEHQLPRTLDSQQLHSGGFQALFPVGPVTPSHS

SEQ ID NO: 14033 - protein, 231 aa, Homo sapiens
MTRDDLFNTNATIVATLTAACAQHCPEAMICVIANPVNSTIPITAEVFKKHGVYNPNKIFGVTTLDIVRANTFVAELKGLDPARVNVPVIGGHAGKTIIPLISQCTPKVDFPQDQLTALTGRIQEAGTEVVKAKAGAGSATLSMAYAGARFVFSLVDAMNGKEGVVECSFVKSQETECTYFSTPLLLGKKGIEKNLGIGKVSSFEEKMISDAIPELKASIKKGEDFVKTLK

SEQ ID NO: 14034 - protein, 243 aa, Homo sapiens
MACWWPLLLELWTVMPTWAGDELLNICMNAKHHKRVPSPEDKLYEECIPWKDNACCTLTTSWEAHLDVSPLYNFSLFHCGLLMPGCRKHFIQAICFYECSPNLGPWIQPVAPSGQGERVVNVPLCQEDCEEWWEDCRMSYTCKSNWRGGWDWSQGKNRCPKGAQCLPFSHYFPTPADLCEKTWSNSFKASPERRNSGRCLQKWFEPAQGNPNVAVARLFASSAPSWELSYTIMVCSLFLPFLS

SEQ ID NO: 14035 - protein, 334 aa, Homo sapiens
MESAAALHFSRPASLLLLLLSLCALVSAQFIVVGPTDPILATVGENTTLRCHLSPEKNAEDMEVRWFRSQFSPAVFVYKGGRERTEEQMEEYRGRTTFVSKDISRGSVALVIHNITAQENGTYRCYFQEGRSYDEAILHLVVAGLGSKPLISMRGHEDGGIRLECISRGWYPKPLTVWRDPYGGVAPALKEVSMPDADGLFMVTTAVIIRDKSVRNMSCSINNTLLGQKKESVIFIPESFMPSVSPCAVALPIIVVILMIPIAVCIYWINKLQKEKKILSGEKEFERETREIALKELEKERVQKEEELQVKEKLQEELRWRRTFLHAELQFFSN

SEQ ID NO: 14036 - protein, 977 aa, Homo sapiens
MDVAESPERDPHSPEDEEQPQGLSDDDILRDSGSDQDLDGAGVRASDLEDEESAARGPSQEEEDNHSDEEDRASEPKSQDQDSEVNELSRGPTSSPCEEEGDEGEEDRTSDLRDEASSVTRELDEHELDYDEEVPEEPAPAVQEDEAEKAGAEDDEEKGEGTPREEGKAGVQSVGEKESLEAAKEKKKEDDDGEIDDGEIDDDDLEEGEVKDPSDRKVRPRPTCRFFMKDVVTPLSTLLPPISNSIPFRGQVKGNCTWGMNCRFIHPGVNDKGNYSLITKADPFPPNGAPPLGPHPLMPANPWGGPVVDEILPPPPPEPPTESAWERGLRHAKEVLKKATIRKEQEPDFEEKRFTVTIGEDEREFDKENEVFRDWNSRIPRDVRDTVLEPYADPYYDYEIERFWRGGQYENFRVQYTETEPYHNYRERERERERENRQRERERERERDRERERRQRERERERERERDKERQRRKEEWERERAKRDEKDRQHRDRDREKEREKEKGKPKPRSPQPPSRQAEPPKKEAATTGPQVKRADEWKDPWRRSKSPKKKLGVSVSPSRARRRRKTSASSASASNSSRSSSRSSSYSGSGSSRSRSRSSSYSSYSSRSSRHSSFSGSRSRSRSFSSSPSPSPTPSPHRPSIRTKGEPAPPPGKAGEKSVKKPAPPPAPPQATKTTAPVPEPTKPGDPREARRKERPARTPPRRRTLSGSGSGSGSSYSGSSSRSRSLSVSSVSSVSSATSSSSSAHSVDSEDMYADLASPVSSASSRSPAPAQTRKEKGKSKKEDGVKEEKRKRDSSTQPPKSAKPPAGGKSSQQPSTPQQAPPGQPQQGTFVAHKEIKLTLLNKAADKGSRKRYEPSDKDRQSPPPAKRPNTSPDRGSRDRKSGGRLGSPKPERQRGQNSKAPAAPADRKRQLSPQSKSSSKVTSVPGKASDPGAASTKSGKASTLSRREELLKQLKAVEDAIARKRAKIPGKA

SEQ ID NO: 14037 - protein, 288 aa, Homo sapiens
MSDSGEQNYGERESRSASRSGSAHGSGKSARHTPARSRSKEDSRRSRSKSRSRSESRSRSRRSSRRHYTRSRSRSRSHRRSRSRSYSRDYRRRHSHSHSPMSTRRRHVGNRANPDPNCCLGVFGLSLYTTERDLREVFSKYGPIADVSIVYDQQSRRSRGFAFVYFENVDDAKEAKERANGMELDGRRIRVDFSITKRPHTPTPGIYMGRPTYGSSRRRDYYDRGYDRGYDDRDYYSRSYRGGGGGGGGWRAAQDRDQIYRRRSPSPYYSRGGYRSRSRSRSYSPRRY

SEQ ID NO: 14038 - protein, 460 aa, Homo sapiens
MASLLQSDRVLYLVQGEKKVRAPLSQLYFCRYCSELRSLECVSHEVDSHYCPSCLENMPSAEAKLKKNRCANCFDCPGCMHTLSTRATSISTQLPDDPAKTTMKKAYYLACGFCRWTSRDVGMADKSVASGGWQEPENPHTQRMNKLIEYYQQLAQKEKVERDRKKLARRRNYMPLAFSDKYGLGTRLQRPRAGASISTLAGLSLKEGEDQKEIKIEPAQAVDEVEPLPEDYYTRPVNLTEVTTLQQRLLQPDFQPVCASQLYPRHKHLLIKRSLRCRKCEHNLSKPEFNPTSIKFKIQLVAVNYIPEVRIMSIPNLRYMKESQVLLTLTNPVENLTHVTLFECEEGDPDDINSTAKVVVPPKELVLAGKDAAAEYDELAEPQDFQDDPDIIAFRKANKVGIFIKVTPQREEGEVTVCFKMKHDFKNLAAPIRPIEESDQGTEVIWLTQHVELSLGPLLP

SEQ ID NO: 14039 - protein, 141 aa, Homo sapiens
MKTGLFFLCLLGTAAAIPTNARLLSDHSKPTAETVAPDNTAIPSLRAEAEENEKETAVSTEDDSHHKAEKSSVLKSKEESHEQSAEQGKSSSQELGLKDQEDSDGHLSVNLEYAPTEGTLDIKEDMSEPQEKKLSENTDFL

SEQ ID NO: 14040 - protein, 69 aa, Homo sapiens
IIPTLPSDKLSKIQTLKLAARYIDFLYQVLQSDELDSKMASCSYVAHERLSYAFSVWRMEGAWSMSASH

SEQ ID NO: 14041 - protein, 103 aa, Homo sapiens
MRQRLLPSVTSLLLVALLFPGSSQARHVNHSATEALGELRERAPGQGTNGFQLLRHAVKRDLLPPRTPPYQVHISHQEARGPSFKICVGFLGPRWARGCSTGN

SEQ ID NO: 14042 - protein, 761 aa, Homo sapiens
MEALEVDDISPALEVTEEFFSTLDSNLEKAVQQAEVYGIQEVPELVGHEVLSNITDNGAMRNVTSLGKGGMIWDHCKSRLLETKAQNVFPAKEQFMVQRGTTPDNLSWMEQKEASTFNFFNICQRRRDRPRSVNDLLDETSTFKPGHARSRSDITQVDWRVVLKTTPLQQQQQQQPLLQGPHVTRPSFLLPSPNKIEDAQGNTEHKQTFPNILKKGYLEIRKDHDSYWQSCYAELSPYNLYFYSLDSSGNQNLYATYQLSHFQSISVLGNLEARMVDTVLYDNTQLQLKAESPWEALDWGQKLWEVVHAAVPGYMGRQNELTISPGLGHHDDYTQNHSFQKKTSGLLPPSPVLDSSKQYQNILKSGTLYRLTVQNNWKAFTFVLSRAYLMAFQPGKLDEDPLLSYNVDVCLAVQMDNLDGCDSCFQVIFPQDVLRLRAETRQRAQEWMEALKIAANVARSSEQNLQVTLRNKPKDQMGGHELRKNKRQSVTTSFLSILTTLSLERGLTAQSFKCAGCQRSIGLSNGKAKVCNYSGWYYCSSCHVDDSFLIPARIVHNWDTSKYKVSKQAKEFLEYVYEEPLIDIQQENAMLYHHAEPLAAVLRLRQRLKSLRAYLFSCRAAVAEDLRRRIFPREYLLQQIHLYSLADLQQVIEGKLAPFLGKVIKFATSHVYSCSLCSQKGFICEICNNGEILYPFEDISTSRCESCGAVFHSECKEKSVPCPRCVRRELQKKQKSFWQRLNMDESLEEACTMFELSYQNT

SEQ ID NO: 14043 - protein, 290 aa, Homo sapiens
MRLNSTGEVPVLIHGENIICEATQIIDYLEQTFLDERTPRLMPDKESMYYPRVQHYRELLDSLPMDAYTHGCILHPELTVDSMIPAYATTRIRSQIGNTESELKKLAEENPDLQEAYIAKQKRLKSKLLDHDNVKYLKKILDELEKVLDQVETELQRRNEETPEEGQQPWLCGESFTLADVSLAVTLHRLKFLGFARRNWGNGKRPNLETYYERVLKRKTFNKVLGHVNNILISAVLPTAFRVAKKRAPKVLGTTLVVGLLAGVGYFAFMLFRKRLGSMILAFRPRPNYF

SEQ ID NO: 14044 - protein, 484 aa, Homo sapiens
MARLLRSATWELFPWRGYCSQKAKGELCRDFVEALKAVVGGSHVSTAAVVREQHGRDESVHRCEPPDAVVWPQNVEQVSRLAALCYRQGVPIIPFGTGTGLEGGVCAVQGGVCVNLTHMDRILELNQEDFSVVVEPGVTRKALNAHLRDSGLWFPVDPGADASLCGMAATGASGTNAVRYGTMRDNVLNLEVVLPDGRLLHTAGRGRHFRKSAAGYNLTGLFVGSEGTLGLITATTLRLHPAPEATVAATCAFPSVQAAVDSTVHILQAAVPVARIEFLDEVMMDACNRYSKLNCLVAPTLFLEFHGSQQALEEQLQRTEEIVQQNGASDFSWAKEAEERSRLWTARHNAWYAALATRPGCKGYSTDVCVPISRLPEIVVQTKEDLNASGLTGSIVGHVGDGNFHCILLVNPDDAEELGRVKAFAEQLGRRALALHGTCTGEHGIGMGKRQLLQEEVGAVGVETMRQLKAVLDPQGLMNPGKVL

SEQ ID NO: 14045 - protein, 36 aa, Homo sapiens
MFYGIFLYLGEVTKAVQPLLLGRIIASYDPDNKEER

SEQ ID NO: 14046 - protein, 645 aa, Homo sapiens
MGQTSVSTLSPQPGSVDGLDKASIANSDGPTAGSQTPPFKRKGKLSTIGKIFKPWKWRKKKTSDKFRETSAVLERKISTRQSREELIRRGVLKELPDQDGDVTVNFENSNGHMIPIGEESTREENVVKSEEGNGSVSEKTPPLEEQAEDKKENTENHSETPAAPALPPSAPPKPRPKPKPKKSPVPPKGATAGASHKGDEVPPIKKNTKAPGKQAPVPPPKPASRNTTREAAGSSHSKKTTGSKASASPSTSSTSSRPKASKETVSSKAGTVGTTKGKRKTDKQPITSHLSSDTTTSGTSDLKGEPAETRVESFKLEQTVPGAEEQNTGKFKSMVPPPPVAPAPSPLAPPLPLEDQCITASDTPVVLVSVGADLPVSALDPSQLLWAEEPTNRTTLYSGTGLSVNRENAKCFTTKEELGKTVPQLLTPGLMGESSESFSASEDEGHREYQANDSDSDGPILYTDDEDEDEDEDGSGESALASKIRRRDTLAIKLGNRPSKKELEDKNILQRTSEEERQEIRQQIGTKLVRRLSQRPTTEELEQRNILKQKNEEEEQEAKMELKRRLSRKLSLRPTVAELQARRILRFNEYVEVTDSPDYDRRADKPWARLTPADKAAIRKELNEFKSTEMEVHEESRQFTRFHRP

SEQ ID NO: 14047 - protein, 288 aa, Homo sapiens
MSRELAPLLLLLLSIHSALAMRICSFNVRSFGESKQEDKNAMDVIVKVIKRCDIILVMEIKDSNNRICPILMEKLNRNSRRGITYNYVISSRLGRNTYKEQYAFLYKEKLVSVKRSYHYHDYQDGDADVFSREPFVVWFQSPHTAVKDFVIIPLHTTPETSVKEIDELVEVYTDVKHRWKAENFIFMGDFNAGCSYVPKKAWKNIRLRTDPRFVWLIGDQEDTTVKKSTNCAYDRIVLRGQEIVSSVVPKSNSVFDFQKAYKLTEEEVRLPSCLSMPLSWKDELAWAT

SEQ ID NO: 14048 - protein, 230 aa, Homo sapiens [sequence omitted]

SEQ ID NO: 14049 - protein, 128 aa, Homo sapiens
MGSGARFPSGTLRVRWLLLLGLVGPVLGAARPGFQQTSHLSSYEIITPWRLTRERREAPRPYSKQVSYVIQAEGKEHIIHLERNKDLLPEDFVVYTYNKEGTLITDHPNIQVMYFSLDPIANFKTIII

SEQ ID NO: 14050 - protein, 216 aa, Homo sapiens
MSEVPVARVWLVLLLLTVQVGVTAGAPWQCAPCSAEKLALCPPVSASCSEVTRSAGCGCCPMCALPLGAACGVATARCARGLSCRALPGEQQPLHALTRGQGACVQESDASAPHAAEAGSPESPESTEITEEELLDNFHLMAPSEEDHSILWDAISTYDGSKALHVTNIKKWKCETSMDGEAGLCWCVYPWNGKRIPGSPEIRGDPNCQIYFNVQN

SEQ ID NO: 14051 - protein, 1008 aa, Homo sapiens
MSYDYHQNWGRDGGPRSSGGGYGGGPAGGHGGNRGSGGGGGGGGGGRGGRGRHPGHLKGREIGMWYAKKQGQKNKEAERQERAVVHMDERREEQIVQLLNSVQAKNDKESEAQISWFAPEDHGYGTEVSTKNTPCSENKLDIQEKKLINQEKKMFRIRNRSYIDRDSEYLLQENEPDGTLDQKLLEDLQKKKNDLRYIEMQHFREKLPSYGMQKELVNLIDNHQVTVISGETGCGKTTQVTQFILDNYIERGKGSACRIVCTQPRRISAISVAERVAAERAESCGSGNSTGYQIRLQSRLPRKQGSILYCTTGIILQWLQSDPYLSSVSHIVLDEIHERNLQSDVLMTVVKDLLNFRSDLKVILMSATLNAEKFSEYFGNCPMIHIPGFTFPVVEYLLEDVIEKIRYVPEQKEHRSQFKRGFMQGHVNRQEKEEKEAIYKERWPDYVRELRRRYSASTVDVIEMMEDDKVDLNLIVALIRYIVLEEEDGAILVFLPGWDNISTLHDLLMSQVMFKSDKFLIIPLHSLMPTVNQTQVFKRTPPGVRKIVIATNIAETSITIDDVVYVIDGGKIKETHFDTQNNISTMSAEWVSKANAKQRKGRAGRVQPGHCYHLYNGLRASLLDDYQLPEILRTPLEELCLQIKILRLGGIAYFLSRLMDPPSNEAVLLSIRHLMELNALDKQEELTPLGVHLARLPVEPHIGKMILFGALFCCLDPVLTIAASLSFKDPFVIPLGKEKIADARRKELAKDTRSDHLTVVNAFEGWEEARRRGFRYEKDYCWEYFLSSNTLQMLHNMKGQFAEHLLGAGFVSSRNPKDPESNINSDNEKIIKAVICAGLYPKVAKIRLNLGKKRKMVKVYTKTDGLVAVHPKSVNVEQTDFHYNWLIYHLKMRTSSIYLYDCTEVSPYCLLFFGGDISIQKDNDQETIAVDEWIVFQSPARIAHLVKELRKELDILLQEKIESPHPVDWNDTKSRDCAVLSAIIDLIKTQEKATPRNFPPRFQDGYYS

SEQ ID NO: 14052 - protein, 1505 aa, Homo sapiens
MVHVARLLLLLLTFFLRTDAETPPRFTRTPVDQTGVSGGVASFICQATGDPRPKIVWNKKGKKVSNQRFEVIEFDDGSGSVLRIQPLRTPRDEAIYECVASNNVGEISVSTRLTVLREDQIPRGFPTIDMGPQLKVVERTRTATMLCAASGNPDPEITWFKDFLPVDTSNNNGRIKQLRSESIGGTPIRGALQIEQSEESDQGKYECVATNSAGTRYSAPANLYVRELREVRRVPPRFSIPPTNHEIMPGGSVNITCVAVGSPMPYVKWMLGAEDLTPEDDMPIGRNVLELNDVRQSANYTCVAMSTLGVIEAIAQITVKALPKPPGTPVVTESTATSITLTWDSGNPEPVSYYIIQHKPKNSEELYKEIDGVATTRYSVAGLSPYSDYEFRVVAVNNIGRGPPSEPVLTQTSEQAPSSAPRDVQARMLSSTTILVQWKEPEEPNGQIQGYRVYYTMDPTQHVNNWMKHNVADSQITTIGNLVPQKTYSVKVLAFTSIGDGPLSSDIQVITQTGVPGQPLNFKAEPESETSILLSWTPPRSDTIANYELVYKDGEHGEEQRITIEPGTSYRLQGLKPNSLYYFRLAARSPQGLGASTAEISARTMQSMFAKNFHVKAVMKTSVLLSWEIPENYNSAMPFKILYDDGKMVEEVDGRATQKLIVNLKPEKSYSFVLTNRGNSAGGLQHRVTAKTAPDVLRTKPAFIGKTNLDGMITVQLPEVPANENIKGYYIIIVPLKKSRGKFIKPWESPDEMELDELLKEISRKRRSIRYGREVELKPYIAAHFDVLPTEFTLGDDKHYGGFTNKQLQSGQEYVFFVLAVMEHAESKMYATSPYSDPVVSMDLDPQPITDEEEGLIWVVGPVLAVVFIICIVIAILLYKSKPDRKRAESDSRKSSIPNNKEIPSHHPTDPVELRRLNFQTPGMASHPPIPILELADHIERLKANDNLKFSQEYESIDPGQQFTWEHSNLEVNKPKNRYANVIAYDHSRVLLSAIEGIPGSDYVNANYIDGYRKQNAYIATQGSLPETFGDFWRMIWEQRSATVVMMTKLEERSRVKCDQYWPSRGTETHGLVQVTLLDTVELATYCVRTFALYKNGSSEKREVRQFQFTAWPDHGVPEHPTPFLAFLRRVKTCNPPDAGPMVVHCSAGVGRTGCFIVIDAMLERIKHEKTVDIYGHVTLMRAQRNYMVQTEDQYIFIHDALLEAVTCGNTEVPARNLYAYIQKLTQIETGENVTGMELEFKRLASSKAHTSRFISANLPCNKFKNRLVNIMPYESTRVCLQPIRGVEGSDYINASFIDGYRQQKAYIATQGPLAETTEDFWRMLWEHNSTIVVMLTKLREMGREKCHQYWPAERSARYQYFVVDPMAEYNMPQYILREFKVTDARDGQSRTVRQFQFTDWPEQGVPKSGEGFIDFIGQVHKTKEQFGQDGPISVHCSAGVGRTGVFITLSIVLERMRYEGVVDIFQTVKMLRTQRPAMVQTEDQYQFSYRAALEYLGSFDHYAT

SEQ ID NO: 14053 - protein, 99 aa, Homo sapiens
MLALLVLVTVALASAHHGGEHFEGEKVFRVNVEDENHINIIRELASTTQIDFWKPDSVTQIKPHSTVDFRVKAEDTVTVENVLKQNELQYKVLISNLRN

SEQ ID NO: 14054 - protein, 814 aa, Homo sapiens
MFKNEYQGGAFVEIFSAQGKNPGAKWKILGSPSVIWKEFDKEVKSFVFVLEGSSQTNKIQLPKENKQSLGLIQRFLVLQIYVPLGQDFSTELLITDLGNIKRRLYLSTVHKELSSTPLHAKIPLFMIKRKIWCNLCIDLVAFTSEIFKGAVFQSLDGIVVSANCKLRKIFTLKSKPQDTADKDAVYGVPFSTDEPTDIIPRSCQLMTDVPHVTQLLNMTKLRQTEIKFGGHPLRSAESDQFINRGTSITRNSKNQDVCHIAFGSKVLGPPPLSGRRNNMKISSETVRSVGSKNNRSCQPSTVEKCVNGTEMSALLIPESEEQGNKENIHQIKQTVPIHAANLHIMHPHPPQEPSADKNNNRRRLRLKSTSRERTETPSGSSSGNNRIEDKASTILTTVSQQGAELLNSGTLGPQSPDQSDEWIFPENADHISYLASSRQSLLLGDDSCNPSHLWLEASKESEHDQQAEESQSVPKDIFTFSSRPRSAPHGKTQTMSPEELSFILDLKEDNSVTSRDTQSEDDFYGGDSSEEGNHSIQGSRGPTTGPSELTQLTLESLLGKAAKRTSKEYLRSAYTEAGATESQDSSMEQIDRNNFEMSLLPTTCLSPTGRRCGSCQKTPEPVIKAKDLSAQQVPASLNKTSLKEISGERLSSIPEASEYDWRNYQPSQMSESELQMLASLRWQQNEELEDAGTSHGLSASQVDNCNVSISTSSDDTTTWNSCLPPPVNQGRHYQKEMNPPSPSNPRDWLNMLSPPIVPPSQQPAEQRPDSCESLSVQGEEDLSVEEDEEVLTLLYDPCLNCYFDPQTGKYYELV

SEQ ID NO: 14055 - protein, 76 aa, Homo sapiens
MKLLLLLLTVTLLLAQVTPVMKCWGKSGRCRTTCKESEVYYILCKTEAKCCVDPKYVPVKPKLTDTNTSLESTSAV

SEQ ID NO: 14056 - protein, 56 aa, Homo sapiens
FIIFMAVSICCIKKLQREKKILSGEKKVEQEEKEIAQQLQEELRWRRTFLHAGECL

SEQ ID NO: 14057 - protein, 120 aa, Homo sapiens
MRLLAQLLGLLMLWVPGSSGDIVMTQTPLSSPVTLGQPASISFRSSQSLVHSDGNTYLSWLQQRPGQPPRLLIYKVSNRFSGVPDRFSGSGAGTDFTLKISRVEAEDVGVYYCTQATQFP

SEQ ID NO: 14058 - protein, 75 aa, Homo sapiens
MIGDILLFGTLLMNAGAVLNFKLKKKDTQGFGEESREPSTGDNIREFLLSLRYFRIFIALWNIFMMFCMIVLFGS

SEQ ID NO: 14059 - protein, 434 aa, Homo sapiens
MASLGLLLLLLLTALPPLWSSSLPGLDTAESKATIADLILSALERATVFLEQRLPEINLDGMVGVRVLEEQLKSVREKWAQEPLLQPLSLRVGMLGEKLEAAIQRSLHYLKLSDPKYLREFQLTLQPGFWKLPHAWIHTDASLVYPTFGPQDSFSEERSDVCLVQLLGTGTDSSEPCGLSDLCRSLMTKPGCSGYCLSHQLLFFLWARMRGCTQGPLQQSQDYINLFCANMMDLNRRAEAIGYAYPTRDIFMENNVTGHPVFYLPLCDSFLPPKAAPVTELYTDGPVMFCGMGGFSDFYKLRWLEAILSWQKQQEGCFGEPDAEDEELSKAIQYQQHFSRRVKRREKQFPDSRSVAQAGVQWRNLGSLQPLPPGFKQFSCLILPSSWDYRSVPPYLANFYIFLVETGFHHVAHAGLELLISRDPPTSGSQSVGL

SEQ ID NO: 14060 - protein, 1378 aa, Homo sapiens
MSLLMFTQLLLCGFLYVRVDGSRLRQEDFPPRIVEHPSDVIVSKGEPTTLNCKAEGRPTPTIEWYKDGERVETDKDDPRSHRMLLPSGSLFFLRIVHGRRSKPDEGSYVCVARNYLGEAVSRNASLEVALLRDDFRQNPTDVVVAAGEPAILECQPPRGHPEPTIYWKKDKVRIDDKEERISIRGGKLMISNTRKSDAGMYTCVGTNMVGERDSDPAELTVFERPTFLRRPINQVVLEEEAVEFRCQVQGDPQPTVRWKKDDADLPRGRYDIKDDYTLRIKKTMSTDEGTYMCIAENRVGKMEASATLTVRAPPQFVVRPRDQIVAQGRTVTFPCETKGNPQPAVFWQKEGSQNLLFPNQPQQPNSRCSVSPTGDLTITNIQRSDAGYYICQALTVAGSILAKAQLEVTDVLTDRPPPIILQGPANQTLAVDGTALLKCKATGDPLPVISWLKEGFTFPGRDPRATIQEQGTLQIKNLRISDTGTYTCVATSSSGETSWSAVLDVTESGATISKNYDLSDLPGPPSKPQVTDVTKNSVTLSWQPGTPGTLPASAYIIEAFSQSVSNSWQTVANHVKTTLYTVRGLRPNTIYLFMVRAINPQGLSDPSPMSDPVRTQDISPPAQGVDHRQVQKELGDVLVRLHNPVVLTPTTVQVTWTVDRQPQFIQGYRVMYRQTSGLQATSSWQNLDAKVPTERSAVLVNLKKGVTYEIKVRPYFNEFQGMDSESKTVRTTEEAPSAPPQSVTVLTVGSYNSTSISVSWDPPPPDHQNGIIQEYKIWCLGNETRFHINKTVDAAIRSVIIGGLFPGIQYRVEVAASTSAGVGVKSEPQPIIIGRRNEVVITENNNSITEQITDVVKQPAFIAGIGGACWVILMGFSIWLYWRRKKRKGLSNYAVTFQRGDGGLMSNGSRPGLLNAGDPSYPWLADSWPATSLPVNNSNSGPNEIGNFGRGDVLPPVPGQGDKTATMLSDGAIYSSIDFTTKTSYNSSSQITQATPYATTQILHSNSIHELAVDLPDPQWKSSIQQKTDLMGFGYSLPDQNKGNNGGKGGKKKKNKNSSKPQKNNGSTWANVPLPPPPVQPLPGTELEHYAVEQQENGYDSDSWCPPLPVQTYLHQGLEDELEEDDDRVPTPPVRGVASSPAISFGQQSTATLTPSPREEMQPMLQAHLDELTRAYQFDIAKQTWHIQSNNQPPQPPVPPLGYVSGALISDLETDVADDDADDEEEALEIPRPLRALDQTPGSSMDNLDSSVTGKAFTSSQRPRPTSPFSTDSNTSAALSQSQRPRPTKKHKGGRMDQQPALPHRREGMTDEEALVPYSKPSFPSPGGHSSSGTASSKGSTGPRKTEVLRAGHQRNASDLLDIGYMGSNSQGQFTGEL

SEQ ID NO: 14061 - protein, 243 aa, Homo sapiens
MAKVEQVLSLEPQHELKFRGPFTDVVTTNLKLGNPTDRNVCFKVKTTAPRRYCVRPNSGIIDAGASINVSVMLQPFDYDPNEKSKHKFMVQSMFAPTDTSDMEAVWKEAKPEDLMDSKLRCVFELPAENDKPHDVEINKIISTTASKTETPIVSKSLSSSLDDTEVKKVMEECKRLQGEVQRLREENKQFKEEDGLRMRKTVQSNSPISALAPTGKEEGLSTRLLALVVLFFIVGVIIGKIAL

SEQ ID NO: 14062 - protein, 419 aa, Homo sapiens
MKNQLRGPPARAHMSTSGAAAAGGTRAGSEPGAGSGSGAGTGAGAATGAGAMPCKSAEWLQEELEARGGASLLLLDCRPHELFESSHIETAINLAIPGLMLRRLRKGNLPIRSIIPNHADKERFATRCKAATVLLYDEATAEWQPEPGAPASVLGLLLQKLRDDGCQAYYLQGGFNKFQTEYSEHCETNVDSSSSPSSSPPTSVLGLGGLRISSDCSDGESDRELPSSATESDGSPVPSSQPAFPVQILPYLYLGCAKDSTNLDVLGKYGIKYILNVTPNLPNAFEHGGEFTYKQIPISDHWSQNLSQFFPEAISFIDEARSKKCGVLVHCLAGISRSVTVTVAYLMQKMNLSLNDAYDFVKRKKSNISPNFNFMGQLLDFERTLGLSSPCDNHASSEQLYFSTPTNHNLFPLNTLEST

SEQ ID NO: 14063 - protein, 445 aa, Homo sapiens
MLPWTALGLALSLRLALARSGAERGPPASAPRGDLMFLLDSSASVSHYEFSRVREFVGQLVAPLPLGTGALRASLVHVGSRPYTEFPFGQHSSGEAAQDAVRASAQRMGDTHTGLALVYAKEQLFAEASGARPGVPKVLVWVTDGGSSDPVGPPMQELKDLGVTVFIVSTGRGNFLELSAAASAPAEKHLHFVDVDDLHIIVQELRGSILDAMRPQQLHATEITSSGFRLAWPPLLTADSGYYVLELVPSAQPGAARRQQLPGNATDWIWAGLDPDTDYDVALVPESNVRLLRPQILRVRTRPGEAGPGASGPESGAGPAPTQLAALPAPEEAGPERIVISHARPRSLRVSWAPALGSAAALGYHVQFGPLRGGEAQRVEVPAGRNCTTLQGLAPGTAYLVTVTAAFRSGRESALSAKACTPDGPRPRPRPVPRAPTPGTASREP

SEQ ID NO: 14064 - protein, 289 aa, Homo sapiens
MWRSCLRLRDGGRRLLNRPAGGPSASMSPGPTIPSPARAYAPPTERKRFYQNVSITQGEGGFEINLDHRKLKTPQAKLFTVPSEALAIAVATEWDSQQDTIKYYTMHLTTLCNTSLDNPTQRNKDQLIRAAVKFLDTDTICYRVEEPETLVELQRNEWDPIIEWAEKRYGVEISSSTSIMGPSIPAKTREVLVSHLASYNTWALQGIEFVAAQLKSMVLTLGLIDLRLTVEQAVLLSRLEEEYQIQKWGNIEWAHDYELQELRARTAAGTLFIHLCSESTTVKHKLLKE

SEQ ID NO: 14065 - protein, 276 aa, Homo sapiens
TMGLSNILFVMAFLLSGAAPLKIQAYFNETADLPCQFANSQNQSLSELVVFWQDQENLVLNEVYLGKEKFDSVHSKYMGRTSFDSDSWTLRLHNLQIKDKGLYQCIIHHKKPTGMIRIHQMNSELSVLANFSQPEIVPISNITENVYINLTCSSIHGYPEPKKMSVLLRTKNSTIEYDGVMQKSQDNVTELYDVSISLSVSFPDVTSNMTIFCILETDKTRLLSSPFSIGTNTMEREESEQTKKREKIHIPERSDEAQRVFKSSKTSSCDKSDTCF

SEQ ID NO: 14066 - protein, 149 aa, Homo sapiens
MQEAIILLALLGAMSGGEALHLILLPATGNVAENSPPGTSVHKFSVKLSASLSPVIPGFPQIVNSNPLTEAFRVNWLSGTYFEVVTTGMEQLDFETGPNIFDLQIYVKDEVGVTDLQVLTVQVTDVNEPPQFQGNLAEARHECTQSWRN

SEQ ID NO: 14067 - protein, 585 aa, Homo sapiens
MAPSTPLLTVRGSEGLYMVNGPPHFTESTVFPRESGKNCKVCIFSKDGTLFAWGNGEKVNIISVTNKGLLHSFDLLKAVCLEFSPKNTVLATWQPYTTSKDGTAGIPNLQLYDVKTGTCLKSFIQKKMQNWCPSWSEDETLCARNVNNEVHFFENNNFNTIANKLHLQKINDFVLSPGPQPYKVAVYVPGSKGAPSFVRLYQYPNFAGPHAALANKSFFKADKVTMLWNKKATAVLVIASTDVDKTGASYYGEQTLHYIATNGESAVVQLPKNGPIYDVVWNSSSTEFCAVYGFMPAKATIFNLKCDPVFDFGTGPRNAAYYSPHGHILVLAGFGNLRGQMEVWDVKNYKLISKPVASDSTYFAWCPDGEHILTATCAPRLRVNNGYKIWHYTGSILHKYDVPSNAELWQVSWQPFLDGIFPAKTITYQAVPSEVPNEEPKVATAYRPPALRNKPITNSKLHEEEPPQNMKPQSGNDKPLSKTALKNQRKHEAKKAAKQEARSDKSPDLAPTPAPQSTPRNTVSQSISGDPEIDKKIKNLKKKLKAIEQLKEQAATGKQLEKNQLEKIQKETALLQELEDLELGI

SEQ ID NO: 14068 - protein, 137 aa, Homo sapiens
MKMASSLAFLLLNFHVSLFLVQLLTPCSAQFSVLGPSGPILAMVGEDADLPCHLFPTMSAETMELRWVSSSLRQVVNVYADGKEVEDRQSAPYRGRTSILRDGITAGKAALRIHNVTASDSGKYLCYFQDGDFYEKA

SEQ ID NO: 14069 - protein, 232 aa, Homo sapiens
MASGPHSTATAAAAASSAAPSAGGSSSGTTTTTTTTTGGILIGDRLYSEVSLTIDHSLIPEERLSPTPSMQDGLDLPSETDLRILGCELIQAAGILLRLPQVAMATGQVLFHRFFYSKSFVKHSFEIVAMACINLASKIEEAPRRIRDVINVFHHLRQLRGKRTPSPLILDQNYINTKNQVIKAERRVLKELGFCVHVKHPHKIIVMYLQVLECERNQTLVQTAWVVHDGKS

SEQ ID NO: 14070 - protein, 124 aa, Homo sapiens
MNLQPIFWIGLISSVCCVFAQTDENRCLKANAKSCGECIQAGPNCGWCTNSTFLQEGMPTSARCDDLEALKKKGCPPDDIENPRGSKDIKKNKNVTNRSKGTAEKLKPEDITQIQPQQLVLRLR

SEQ ID NO: 14071 - protein, 171 aa, Homo sapiens
MRWILFIGALIGSSICGQEKFFGDQVLRINVRNGDEISKLSQLVNSNNLKLNFWKSPSSFNRPVDVLVPSVSLQAFKSFLRSQGLEYAVTIEDLQALLDNEDDEMQHNEGQERSSNNFNYGAYHSLEAIYHEMDNIAADFPDLARRVKIGHSFENRPMYVLKIVSDYQRDP

SEQ ID NO: 14072 - protein, 1198 aa, Homo sapiens
MAEHPPLLDTTQILSSDISLLSAPIVSADGTQQVILVQVNPGEAFTIRREDGQFQCITGPAQVPMMSPNGSVPPIYVPPGYAPQVIEDNGVRRVVVVPQAPEFHPGSHTVLHRSPHPPLPGFIPVPTMMPPPPRHMYSPVTGAGDMTTQYMPQYQSSQVYGDVDAHSTHGRSNFRDERSSKTYERLQKKLKDRQGTQKDKMSSPPSSPQKCPSPINEHNGLIKGQIAGGINTGSAKIKSGKGKGGTQVDTEIEEKDEETKAFEALLSNIVKPVASDIQARTVVLTWSPPSSLINGETDESSVPELYGYEVLISSTGKDGKYKSVYVGEETNITLNDLKPAMDYHAKVQAEYNSIKGTPSEAEIFTTLSCEPDIPNPPRIANRTKNSLTLQWKAPSDNGSKIQNFVLEWDEGKGNGEFCQCYMGSQKQFKITKLSPAMGCKFRLSARNDYGTSGFSEEVLYYTSGCAPSMPASPVLTKAGITWLSLQWSKPSGTPSDEGISYILEMEEETSGYGFKPKYDGEDLAYTVKNLRRSTKYKFKVIAYNSEGKSNPSEVVEFTTCPDKPGIPVKPSVKGKIHSHSFKITWDPPKDNGGATINKYVVEMAEGSNGNKWEMIYSGATREHLCDRLNPGCFYRLRVYCISDGGQSAVSESLLVQTPAVPPGPCLPPRLQGRPKAKEIQLRWGPPLVDGGSPISCYSVEMSPIEKDEPREVYQGSEVECTVSSLLPGKTYSFRLRAANKMGFGPFSEKCDITTAPGPPDQCKPPQVTCRSATCAQVNWEVPLSNGTDVTEYRLEWGGVEGSMQICYCGPGLSYEIKGLSPATTYYCRVQALSVVGAGPFSEVVACVTPPSVPGIVTCLQEISDDEIENPHYSPSTCLAISWEKPCDHGSEILAYSIDFGDKQSLTVGKVTSYIINNLQPDTTYRIRIQALNSLGAGPFSHMIKLKTKPLPPDPPRLECVAFSHQNLKLKWGEGTPKTLSTDSIQYHLQMEDKNGRFVSLYRGPCHTYKVQRLNESTSYKFCIQACNEAGEGPLSQEYIFTTPKSVPAALKAPKIEKVNDHICEITWECLQPMKGDPVIYSLQVMLGKDSEFKQIYKGPDSSFRYSSLQLNCEYRFRVCAIRQCQDSLGHQDLVGPYSTTVLFISQRTEPPASTNRDTVESTRTRRALSDEQCAAVILVLFAFFSILIAFIIQYFVIK

SEQ ID NO: 14073 - protein, 519 aa, Homo sapiens
MMQGEAHPSASLIDRTIKMRKETEARKVVLAWGLLNVSMAGMIYTEMTGKLISSYYNVTYWPLWYIELALASLFSLNALFDFWRYFKYTVAPTSLVVSPGQQTLLGLKTAVVQTTPPHDLAATQIPPAPPSPSIQGQSVLSYSPSRSPSTSPKFTTSCMTGYSPQLQGLSSGGSGSYSPGVTYSPVSGYNKLASFSPSPPSPYPTTVGPVESSGLRSRYRSSPTVYNSPTDKEDYMTDLRTLDTFLRSEEEKQHRVKLGSPDSTSPSSSPTFWNYSRSMGDYAQTLKKFQYQLACRSQAPCANKDEADLSSKQAAEEVWARVAMNRQLLDHMDSWTAKFRNWINETILVPLVQEIESVSTQMRRMGCPELQIGELSQGGCMSSFRWNRGGDFKGRKWDTDLPTDSAIIMHVFCTYLDSRLPPHPKYPDGKTFTSQHFVQTPNKPDVTNENVFCIYQSAINPPHYELIYQRHVYNLPKGRNNMFHTLLMFLYIIKTKESGMLGRVNLGLSGVNILWIFGE

SEQ ID NO: 14074 - protein, 265 aa, Homo sapiens
MRLLPRLLLLLLLVFPATVLFRGGPRGLLAVAQDLTEDEETVEDSIIEDEDDEAEVEEDEPTDLVEDKEEEDVSGEPEASPSADTTILFVKGEDFPANNIVKFLVGFTNKGTEDFIVESLDASFRYPQDYQFYIQNFTALPLNTVVPPQRQATFEYSFIPAEPMGGRPFGLVINLNYKDLNGNVFQDAVFNQTVTVIEREDGLDGETIFMYMFLAGLGLLVIVGLHQLLESRKSGSFIQDGVQWHNLAYCNLRLRGSSHPPTSAS

SEQ ID NO: 14075 - protein, 224 aa, Homo sapiens
NVIKLSLEISLFLNKLLVLGVSESSIHIIGVSLGAHVGGMVGQLFGGQLGQITGLDPAGPEYTRASVEERLDAGDALFVEAIHTDTDNLGIRIPVGHVDYFVNGGQDQPGCPTFFYAGYSYLICDHMRAVHLYISALENSCPLMAFPCASYKAFLAGRCLDCFNPFLLSCPRIGLVEQGGVKIEPLPKEVKVYLLTTSSAPYCNAFQLLTVAPNHGISLKLGCW

SEQ ID NO: 14076 - protein, 108 aa, Homo sapiens
MLLLGLLLLLPLLAGARLLWNWWKLRSLHLPPLAPGFLHLLQPDLPIYLLGLTQKFGPIYRLHLGLQDVVVLNSKRTIEEAMVKKWADFAGRPEPLTSPTSSCRQAGV

SEQ ID NO: 14077 - protein, 440 aa, Homo sapiens
MPPGPWESCFWVGGLILWLSVGSSGDAPPTPQPKCADFQSANLFEGTDLKVQFLLFVPSNPSCGQLVEGSSDLQNSGFNATLGTKLIIHGFRVLGTKPSWIDTFIRTLLRATNANVIAVDWIYGSTGVYFSAVKNVLGVSESSIHIIGVSLGAHVGGMVGQLFGGQLGQITGLDPAGPEYTRASVEERLDAGDALFVEAIHTDTDNLGIRIPVGHVDYFVNGGQDQPGCPTFFYAGYSYLICDHMRAVHLYISALENSCPLMAFPCASYKAFLAGRCLDCFNPFLLSCPRIGLVEQGGVKIEPLPKEVKVYLLTTSSAPYCMHHSLVEFHLKELRNKDTNIEVTFLSSNITSSSKITIPKQQRYGKGIIAHATPQCQINQVKFKFQSSNRVWKKDRTTIIGKFCTALLPVNDREKMVCLPEPVNLQASVTVSCDLKIACV

SEQ ID NO: 14078 - protein, 133 aa, Homo sapiens
MPGAWMLLLLLLAPLFLRPPGAGGAQTPNATSEGCQIIHPPWEGGIRYRGLTRDQVKAINFLPVDYEIEYVCRGEREVVGPKVRKCLANGSWTDMDTPSRCVRICSKSYLTLENGKVFLTGGDLPALDGARVD

SEQ ID NO: 14079 - protein, 1394 aa, Homo sapiens
MARRHERVTRRMWTWAPGLLMMTVVFWGHQGNGQGQGSRLRQEDFPPRIVEHPSDVIVSKGEPTTLNCKAEGRPTPTIEWYKDGERVETDKDDPRSHRMLLPSGSLFFLRIVHGRRSKPDEGSYVCVARNYLGEAVSRNASLEVALLRDDFRQNPTDVVVAAGEPAILECQPPRGHPEPTIYWKKDKVRIDDKEERISIRGGKLMISNTRKSDAGMYTCVGTNMVGERDSDPAELTVFERPTFLRRPINQVVLEEEAVEFRCQVQGDPQPTVRWKKDDADLPRGRYDIKDDYTLRIKKTMSTDEGTYMCIAENRVGKMEASATLTVRAPPQFVVRPRDQIVAQGRTVTFPCETKGNPQPAVFWQKEGSQNLLFPNQPQQPNSRCSVSPTGDLTITNIQRSDAGYYICQALTVAGSILAKAQLEVTDVLTDRPPPIILQGPANQTLAVDGTALLKCKATGDPLPVISWLKEGFTFPGRDPRATIQEQGTLQIKNLRISDTGTYTCVATSSSGETSWSAVLDVTESGATISKNYDLSDLPGPPSKPQVTDVTKNSVTLSWQPGTPGTLPASAYIIEAFSQSVSNSWQTVANHVKTTLYTVRGLRPNTIYLFMVRAINPQGLSDPSPMSDPVRTQDISPPAQGVDHRQVQKELGDVLVRLHNPVVLTPTTVQVTWTVDRQPQFIQGYRVMYRQTSGLQATSSWQNLDAKVPTERSAVLVNLKKGVTYEIKVRPYFNEFQGMDSESKTVRTTEEAPSAPPQSVTVLTVGSYNSTSISVSWDPPPPDHQNGIIQEYKIWCLGNETRFHINKTVDAAIRSVIIGGLFPGIQYRVEVAASTSAGVGVKSEPQPIIIGRRNEVVITENNNSITEQITDVVKQPAFIAGIGGACWVILMGFSIWLYWRRKKRKGLSNYAVTFQRGDGGLMSNGSRPGLLNAGDPSYPWLADSWPATSLPVNNSNSGPNEIGNFGRGDVLPPVPGQGDKTATMLSDGAIYSSIDFTTKTSYNSSSQITQATPYATTQILHSNSIHELAVDLPDPQWKSSIQQKTDLMGFGYSLPDQNKGNNGGKGGKKKKNKNSSKPQKNNGSTWANVPLPPPPVQPLPGTELEHYAVEQQENGYDSDSWCPPLPVQTYLHQGLEDELEEDDDRVPTPPVRGVASSPAISFGQQSTATLTPSPREEMQPMLQAHLDELTRAYQFDIAKQTWHIQSNNQPPQPPVPPLGYVSGALISDLETDVADDDADDEEEALEIPRPLRALDQTPGSSMDNLDSSVTGKAFTSSQRPRPTSPFSTDSNTSAALSQSQRPRPTKKHKGGRMDQQPALPHRREGMTDEEALVPYSKPSFPSPGGHSSSGTASSKGSTGPRKTEVLRAGHQRNASDLLDIGYMGSNSQGQFTGEL

SEQ ID NO: 14080 - protein, 157 aa, Homo sapiens
MLRGTMTAWRGMRPEVTLACLLLATAGCFADLNEVPQVTVQPASTVQKPGGTVILGCVVEPPRMNVTWRLNGKELNGSDDALGVLITHGTLVITALNNHTVGRYQCVARMPAGAVASVPATVTLASESAPLPPCHGAVPPHLSHPEAPTIHAASCYS

SEQ ID NO: 14081 - protein, 213 aa, Homo sapiens
MDGAMGPRGLLLCMYLVSLLILQAMPALGSATGRSKSSEKRQAVDTAVDGVFIRSLKVNCKVTSRFAHYVVTSQVVNTANEAREVAFDLEIPKTAFISDFAVTADGNAFIGDIKDKVTAWKQYRKAAISGENAGLVRASGRTMEQFTIHLTVNPQSKVTFQLTYEEVLKRNHMQYEIVIKVKPKQLVHHFEVDHRSRGRGPAPLSVTMAPNTG

SEQ ID NO: 14082 - protein, 117 aa, Homo sapiens
MDMRVLAQLLGLLLLCFPGARCDIQMTQSPSSLSASVGDRVTITCRASQGISNYLAWFQQKPGKAPKSLIYAASSLQSGVPSKFSGSGSGTDFTLTISSLQPEDFATYYCQQYNSYP

SEQ ID NO: 14083 - protein, 696 aa, Homo sapiens
MGNGMCSRKQKRIFQTLLLLTVVFGFLYGAMLYYELQTQLRKAEAVALKYQQHQESLSAQLQVVYEHRSRLEKSLQKERLEHKKAKEDFLVYKLEAQETLNKGRQDSNSRYSALNVQHQMLKSQHEELKKQHSDLEEEHRKQGEDFSRTFNDHKQKYLQLQQEKEQELSKLKETVYNLREENRQLRKAHQDIHTQLQDVKQQHKNLLSEHEQLVVTLEDHKSALAAAQTQVAEYKQLKDTLNRIPSLRKPDPAEQQNVTQVAHSPQGYNTAREKPTREVQEVSRNNDVWQNHEAVPGRAEDTKLYAPTHKEAEFQAPPEPIQQEVERREPEEHQVEEEHRKALEEEEMEQVGQAEHLEEEHDPSPEEQDREWKEQHEQREAANLLEGHARAEVYPSAKPMIKFQSPYEEQLEQQRLAVQQVEEAQQLREHQEALHQQRLQGHLLRQQEQQQQQVAREMALQRQAELEEGRPQHQEQLRQQAHYDAMDNDIVQGAEDQGIQGEEGAYERDNQHQDEAEGDPGNRHEPREQGPREADPESEADRAAVEDINPADDPNNQGEDEFEEAEQVREENLPDENEEQKQSNQKQENTEVEEHLVMAGNPDQQEDNVDEQYQEEAEEEVQEDLTEEKKRELEHNAEETYGENDENTDDKNNDGEEQEVRDDNRPKGREEHYEEEEEEEEDGAAVAEKSHRRAEM

SEQ ID NO: 14084 - protein, 52 aa, Homo sapiens
MSQDGASQFQEVIRQELELSVKKELEKILTTASSHEFETPGFAILPRLVSNS

SEQ ID NO: 14085 - protein, 84 aa, Homo sapiens
MLRGTMTAWRGMRPEVTLACLLLATAGCFADLNEVPQVTVQPASTVQKPGGTVILGCVVEPPRMNVTWRLNGKELNGSDDALGV

SEQ ID NO: 14086 - protein, 181 aa, Homo sapiens
MFQQFQASCLVLFFLVGFAQQTLKPQNRKVDCNKGVTGTIYEYGALTLNGEEYIQFKQFAGKHVLFVNVAAYUGLAAQYPELNALQEELKNFGVIVLAFPCNQFGKQEPGTNSEILLGLKTPALRPLIFWAHQANSSGSPURSMISAGTLRNFWWGPMESLSCIGSTRLQSAQSSQTSWST

SEQ ID NO: 14087 - protein, 215 aa, Homo sapiens
MSSEESYRAILRYLTNEREPYAPGTEGNVKRKIRKAAACYVVRGGTLYYQRRQRHRKTFAELEVVLQPERRRDLIEAAHLGPGGTHHTRHQTWHYLSKTYWWRGILKQVKDYIKQCSKCQEKLDRSRPISDVSEMLEELGLDLESGEESNESEDDLSNFTSSPTTASKPAKKKPVSKHELVFVSGTLQSALRFVTSVLVFAALVTYFSQTTKTAY

SEQ ID NO: 14088 - protein, 147 aa, Homo sapiens
MAGRGKLIAVIGDEDTVTGFLLGGIGELNKNRHPNFLVVEKDTTINEIEDTFRSLGSLPGSVVEANPNQRDPPLWDEIDSRQFLNRDDIGIILINQYIAEMVRHALDAHQQSIPAVLEIPSKEHPYDAAKDSILRRARGMFTAEDLR

SEQ ID NO: 14089 - protein, 337 aa, Homo sapiens
MPALGWAVAAILMLQTAMAEPSPGTLPRKAGVFSDLSNQELKAVHSFLWSKKELRLQPSSTTTMAKNTVFLIEMLLPKKYHVLRFLDKGERHPVREARAVIFFGDQEHPNVTEFAVGPLPGPCYMRALSPRPGYQSSWASRPISTAEYALLYHTLQEATKPLHQFFLNTTGFSFQDCHDRCLAFTDVAPRGVASGQRRSWLIIQRYVEGYFLHPTGLELLVDHGSTDAGHWAVEQVWYNGKFYGSPEELARKYADGEVDVVVLEDPLPGGKGHDSTEEPPLFSSHKPRGDFPSPIHVSGPRLVQPHGPRFRLEGNAVLYGGWSFAFRLRSSSGLQVL

SEQ ID NO: 14090 - protein, 4442 aa, Homo sapiens
MKGARWRRVPWVSLSCLCLCLLPHVVPGTTEDTLITGSKTAAPVTSTGSTTATLEGQSTAASSRTSNQDISASSQNHQTKSTETTSKAQTDTLTQMMTSTLFSSPSVHNVMETAPPDEMTTSFPSSVTNTLMMTSKTITMTTSTDSTLGNTEETSTAGTESSTPVTSAVSITAGQEGQSRTTSWRTSIQDTSASSQNHWTRSTQTTRESQTSTLTHRTTSTPSFSPSVHNVTGTVSQKTSPSGETATSSLCSVTNTSMMTSEKITVTTSTGSTLGNPGETSSVPVTGSLMPVTSAALVTFDPEGQSPATFSRTSTQDTTAFSKNHQTQSVETTRVSQINTLNTLTPVTTSTVLSSPSGFNPSGTVSQETFPSGETTTSSPSSVSNTFLVTSKVFRMPTSRDSTLGNTEETSLSVSGTISAITSKVSTIWWSDTLSTALSPSSLPPKISTAFHTQQSEGAETTGRPHERSSFSPGVSQEIFTLHETTTWPSSFSSKGHTTWSQTELPSTSTGAATRLVTGNPSTGTAGTIPRVPSKVSAIGEPGEPTTYSSHSTTLPKTTGAGAQTQWTQETGTTGEALLSSPSYSVTQMIKTATSPSSSPMLDRHTSQQITTAPSTNHSTIHSTSTSPQESPAVSQRGHTQAPQTTQESQTTRSVSPMTDTKTVTTPGSSFTASGHSPSEIVPQDAPTISAATTFAPAPTGDGHTTQAPTTALQAAPSSHDATLGPSGGTSLSKTGALTLANSVVSTPGGPEGQWTSASASTSPDTAAAMTHTHQAESTEASGQTQTSEPASSGSRTTSAGTATPSSSGASGTTPSGSEGISTSGETTRFSSNPSRDSHTTQSTTELLSASASHGAIPVSTGMASSIVPGTFHPTLSEASTAGRPTGQSSPTSPSASPQETAAISRMAQTQRTRTSRGSDTISLASQATDTFSTVPPTPPSITSTGLTSPQTETHTLSPSGSGKTFTTALISNATPLPVTYASSASTGHTTPLHVTDASSVSTGHATPLPVTSPSSVSTGHTTPLPVTDTSSESTGHVTPLPVTSFSSASTGDSTPLPVTDTSSASTGHVTPLPVTSLSSASTGDTTPLPVTDTSSASTGHATSLPVTDTSSVSTGHTTPLPVTDTSSASTGHATSLPVTDTSSVSTGHTTPLHVTDASSASTGQATPLPVTSLSSVSTGDTTPLPVTSPSSASTGHATPLLVTDTSSASTGHATPLPVTDASSVSTDHATSLPVTIPSAASTGHTTPLPVTDTSSASTGQATSLLVTDTSSVSTGDTTPLPVTSTSSASTGHVTPLHVTSPSSASTGHATPLPVTSLSSASTGDTMPLPVTSPSSASTGDTTPLPVTDASSVSTGHTTPLHVTDASSASTGQATPLPVTSLSSVSTGDTTPLPVTSPSSASTGHATPLLVTDTSSASTGHATPLPVTDASSVSTDHATSLPVTIPSAASTGHTTPLPVTDTSSASTGQATSLLVTDTSSVSTGDTTPLPVTSTSSASTGHVTPLHVTSPSSASTGHATPLPVTSLSSASTGDTMPLPVTSPSSASTGDTTPLPVTDASSVSTGHTTPLPVTSPSSASTGHTTPLPVTDTSSASKGDTTPLPVTSPSSASTGHTTPLPVTDTSSASTGDTTPLPVTNASSLSTGHATPLHVTSPSSASTGHATPLPVTSTSSASTGHATPLPVTGLSSATTDDTTRLPVTDVSSASTGQATPLPVTSLSSVSTGDTTPLPVTSPSSASTGHASPLLVTDASSASTGQATPLPVTDTSSVSTAHATPLPVTGLSSASTDDTTRLPVTDVSSASTGQAIPLPVTSPSSASTGDTTPLPVTDASSASTGDTTSLPVTIPSSASSGHTTSLPVTDASSVSTGHATSLLVTDASSVSTGDTTPLPVTDTNSASTGDTTPLHVTDASSVSTGHATSLPVTSLSSASTGDTTPLPVTSPSSASSGHTTPLPVTDASSVPTGHATSLPVTDASSVSTGHATPLPVTDASSVSTGHATPLPVTDTSSVSTGQATPLPVTSLSSASTGDTTPLPVTDTSSASTGQDTPLPVTSLSSVSTGDTTPLPVTNPSSASTGHATPLLVTDASSISTGHATSLLVTDASSVSTGHATALHDTDASSLSTGDTTPLPVTSPSSTSTGDTTPLPVTETSSVSTGHATSLPVTDTSSASTGHATSLPVTDTSSASTGHATPLPVTDTSSASTGQATPLPVTSPSSASTGHAIPLLVTDTSSASTGQATPLPVTSLSSASTGDTTPLPVTDASSVSTGHATSLPVTSLSSVSTGDTTPLPVTSPSSASTGHATPLHVTDASSASTGHATPLPVTSLSSASTGDTTPLPVTSPSSASTGHATPLHVTDASSVSTGDTTPLPVTSSSSASSGHTTPLPVTDASSASTGDTTPLPVTDTSSASTGHATHLPVTGLSSASTGDTTRLPVTNVSSASTGHATPLPVTSTSSASTGDTTPLPGTDTSSVSTGHTTPLLVTDASSVSTGDTTRLPVTSPSSASTGHTTPLPVTDTPSASTGDTTPLPVTNASSLSTRHATSLHVTSPSSASTGHATSLPVTDTSAASTGHATPLPVTSTSSASTGDTTPLPVTDTYSASTGQATPLPVTSLSSVSTGDTTPLPVTSPSSASTGHATPLLVTDASSASTGQATPLPVTSLSSVSTGDTTPLPVTSPSSASTGHATSLPVTDTSSASTGDTTSLPVTDTSSAYTGDTTSLPVTDTSSSSTGDTTPLLVTETSSVSTGDTTPLPVTDTSSASTGHATPLPVTNTSSVSTGHATPLHVTSPSSASTGHTTPLPVTDASSVSTGHATSLPVTDASSVFTGHATSLPVTIPSSASSGHTTPLPVTDASSVSTGHATSLPVTDASSVSTGHATPLPVTDASSVSTGHATPLPLTSLSSVSTGDTTPLPVTDTSSASTGQATPLPVTSLSSVSTGDTTPLPVTDTSSASTGHATSLPVTDTSSASTGHATPLPDTDTSSASTGHATLLPVTDTSSASIGHATSLPVTDTSSISTGHATPLHVTSPSSASTGHATPLPVTDTSSASTGHANPLHVTSPSSASTGHATPLPVTDTSSASTGHATPLPVTSLSSVSTGDTTPLPVTSPSSASTGHTTPLPVTDTSSASTGQATALPVTSTSSASTGDTTPLPVTDTSSASTGQATPLPVTSLSSVSTGDTTPLPVTSPSSASTGHATPLLVTDASSASTGQATPLPVTSLSSVSTGDTTPLPVTSPSSASTGHATSLPVTDTSSASTGDTTSLPVTDTSSAYTGDTTSLPVTDTSSSSTGDTTPLLVTETSSVSTGHATPLLVTDASSASTGHATPLHVTSPSSASTGDTTPVPVTDTSSVSTGHATPLPVTGLSSASTGDTTRLPVTDISSASTGQATPLPVTNTSSVSTGDTMPLPVTSPSSASTGHATPLPVTSTSSASTGHATPVPVTSTSSASTGHTTPLPVTDTSSASTGDTTPLPVTSPSSASTGHTTPLHVTIPSSASTGDTSTLPVTGASSASTGHATPLPVTDTSSVSTGHATPLPVTSLSSVSTGDTTPLPVTDASSASTGQATPLPVTSLSSVSTGDTTPLLVTDASSVSTGHATPLPVTDTSSASTGDTTRLPVTDTSSASTGQATPLPVTSLSSVSTGDTTPLLVTDASSVSTGHATPLPVTDTSSASTGDTTRLPVTDTSSASTGQATPLPVTIPSSSSSGHTTPLPVTSTSSVSTGHVTPLHVTSPSSASTGHVTPLPVTSTSSASTGHATPLLVTDASSVSTGHATPLPVTDASSASTGDTTPLPVTDTSSASTGQATPLPVTSLSSVSTGDTTPLPVTDASSASTGHATPLPVTIPSSVSTGDTMPLPVTSPSSASTGHATPLPVTGLSSASTGDTTPLPVTDTSSASTRHATPLPVTDTSSASTDDTTRLPVTDVSSASTGHATPLPVTSTSSASTGDTTPLPVTDTSSVSTGHATSLPVTSRSSASTGHATPLPVTDTSSVSTGHATPLPVTSTSSVSTGHATPLPVTSPSSASTGHATPVPVTSTSSASTGDTTPLPVTNASSLSTGHATPLHVTSPSSASRGDTSTLPVTDASSASTGHATPLPLTSLSSVSTGDTTPLPVTDTSSASTGQATPLPVTSLSSVSTGDTTPLPVTIPSSASSGHTTSLPVTDASSVSTGHGTPLPVTSTSSASTGDTTPLPVTDTSSASTGHATPLPVTDTSSASTGHATPLPVTSLSSVSTGHATPLAVSSATSASTVSSDSPLKMETPGMTTPSLKTDGGRRTATSPPPTTSQTIISTIPSTAMHTRSTAAPIPILPERGVSLFPYGAGAGDLEFVRRTVDFTSPLFKPATGFPLGSSLRDSLYASQAGTLWPWWLRSGTMLTSPLVGGPHFIRATPTKPSSPRTGAGPMPCFSTRAVGCSGTWPSAQATRCSWASLVEMAISKTAH

SEQ ID NO: 14091 - protein, 2649 aa, Homo sapiens
MAVWEAEQLGGLQRGDLLTPPAPDGDGRTAPLGQPPGAQLYCPACLVTCHSQEAFENHCASSEHAQMVAFDQALPWEHRSPPPGLSKFELCPKPDLCEYGDACTKAHSAQELQEWVRRTQAVELRGQAAWQDGLVPYQERLLAEYQRSSSEVLVLAETLDGVRVTCNQPLMYQAQERKTQYSWTFAVHSEEPLLHVALLKQEPGADFSLVAPGLPPGRLYARGERFRVPSSTADFQVGVRVQAASFGTFEQWVVFDFGRRPVLLQKLGLQLGQGRRPGPCRNLALGHPEEMERWHTGNRHVVPGVERTAEQTALMAKYKGPALALEFNRSSVASGPISPTNYRQRMHQFLYEEEAAQQQLVAKLTLRGQVFLKTALQTPALNMLFAPPGALYAEVPVPSSLMPDTDQGFLLGRAVSTALVAPVPAPDNTVFEVRLERRASSEQALWLLLPARCCLALGLQPEARLVLEVQFQIDPMTFRLWHQAVDTLPEEQLVVPDLPTCALPRPWSVPPLRRGNRKQELAVALIAGWGPGDGRRVPPLLIYGPFGTGKTYTLAMASLEVIRRPETKVLICTHTNSAADIYIREYFHSHVSGGHPEATPLRVMYTDRPLSQTDPVTLQYCCLTDDRQAFRPPTRAELARHRVVVTTTSQARELRVPVGFFSHILIDEAAQMLECEALTPLAYASHGTRLVLAGDHMQVTPRLFSVARARAAEHTLLHRLFLCYQQETHEVARQSRLVFHENYRCTDAIVSFISRHFYVAKGNPIHARGKVPPHPRHYPLMFCHVAGSPDRDMSMASWLNLAEIAQVVEKVQEAYNTWPSCWGGREQRCICVVSHGAQVSALRQELRRRDLGQVSVGSFEILPGRQFRVVVLSTVHTCQSLLSPGALAPEFFTDARVLNTVLTRAQSQLVVVGDAVALCSFGACGKLWESFIRECVERHSVCPEGLSMEQVEQGVAQRRRWPPRGTQAGAAGNWEAAPEPVGDLAEEQAAVVTAMVKAEPGDEALSPASRDITATTAQTEAAAAPAGDAVKEDVVPGACAAGAAAAAGVESTEAEDAEADFWPWDGELNADDAILRELLDESQKVMVTVGEDGLLDTVARPESLQQARLYENLPPAALRKLLHAEPERYRHCSFVPETFERASAIPLDDASSGPIQVRGRLDCGMAFAGDEVLVQLLSGDKAPEGRLRGRVLGVLKRKRHELAFVCRMDTWDPRIMVPINGSVTKIFVAELKDPSQVPIYSLRKGRLQRVGLERLTAEARHSRLFWVQIVLWRQGFYYPLGIVREVLPEASTWEQGLRILGLEYSLRVPPSDQATITKVLQKYHTELGRVAGRREDCRAFLTFTVDPQGACNLDDALSVRDLGPRCEVAVHITDVASFVPRDGVLDVEARRQGAAFYAPGREPVPMLPASLCQDVLSLLPGRDRLAISLFLTMEKASGQLKSLRFAPSVVQSDRQLSYEEAEEVIRQHPGAGRELPARLDSVDACVVAACYFSRLLRRHRLRSDCFYEQPDEDGTLGFRAAHIMVKEYMIQFNRLVAEFLVGSECTRTVTPLRWQPAPRSQQLKALCEKHGDRVPLSLHLGHHLHGGGGSPPDTRLHLLASLWKQVQFAARTQDYEQMVDLVTTDDMHPFLAPAGRDLRKALERSAFGRCARGHQQQGGHYSLQVDWYTWATSPIRRYLDVVLQRQILLALGHGGSAYSARDIDGLCQAFSLQHALAQSYQRRARSLHLAVQLKAQPLDKLGFVVDVEAGSRCFRLLFPSNRETLPDPCPVPYGSLQLAEHPHALAGRPGLRLLWRRRVYSAQGSSPPLPLPGTVPDPHTLAVETALWKQLLELVELQRWPEAAALIQEKGEASQRRELVQVQRSHCGHFLEVARELGSGDTLQVQLGTSLQHGFLVPSPQLWTVAPGFSLCLEHVERPGDCFSGRVYRAPRDRYRDVDEYACVWEPFCALESATGAVAENDSVTLQHLSVSWEASRTPQGQLQGAFRLEAAFLEENCADINFSCCYLCIRLEGLPAPTASPRPGPSSLGPGLNVDPGTYTWVAHGQTQDWDQERRADRQEAPRRVHLFVHHMGMEKVPEEVLRPGTLFTVELLPKQLPDLRKEEAVRGLEEASPLVTSIALGRPVPQPLCRVIPSRFLERQTYNIPGGRHKLNPSQNVAVREALEKPFTVIQGPPGTGKTIVGLHIVFWFHKSNQEQVQPGGPPRGEKRLGGPCILYCGPSNKSVDVLAGLLLRRMELKPLRVYSEQAEASEFPVPRVGSRKLLRKSPREGRPNQSLRSITLHHRIRQAPNPYSSEIKAFDTRLQRGELFSREDLVWYKKVLWEARKFELDRHEVILCTCSCAASASLKILDVRQILVDEAGMATEPETLIPLVQFPQAEKVVLLGDHKQLRPVVKNERLQNLGLDRSLFERYHEDAHMLDTQYRMHEGICAFPSVAFYKSKLKTWQGLRRPPSVLGHAGKESCPVIFGHVQGHERSLLVSTDEGNENSKANLEEVAEVVRITKQLTLGRTVEPQDIAVLTPYNAQASEISKALRREGIAGVAVSSITKSQGSEWRYVLVSTVRTCAKSDLDQRPTKSWLKKFLGFVVDPNQVNVAVTRAQEGLCLIGDHLLLRCCPLWRSLLDFCEAQQTLVPAGQVRVCRRPTMPS

SEQ ID NO: 14092 - protein, 348 aa, Homo sapiens
MGPRARPALLLLMLLQTAVLQGRLLRSHSLHYLFMGASEQDLGLSLFEALGYVDDQLFVFYDHESRRVEPRTPWVSSRISSQMWLQLSQSLKGWDHMFTVDFWTIMENHNHSKESHTLQVILGCEMQEDNSTEGYWKYGYDGQDHLEFCPDTLDWRAAEPRAWPTKLEWERHKIRARQNRAYLERDCPAQLQQLLELGRGVLDQQVPPLVKVTHHVTSSVTTLRCRALNYYPQNITMKWLKDKQPMDAKEFEPKDVLPNGDGTYQGWITLAVPPGEEQRYTCQVEHPGLDQPLIVIWEPSPSGTLVIGVISGIAVFVVILFIGILFIILRKRQGSRGAMGHYVLAERE

SEQ ID NO: 14093 - protein, 229 aa, Homo sapiens
MASLSRPSLPSCLCSFLLLLLLQVSSSYAGQFRVIGPRHPIRALVGDEVELPCRISPGKNATGMEVGWYRPPFSRVVHLYRNGKDQDGDQAPEYRGRTELLKDAIGEGKVTLRIRNVRFSDEGGFTCFFRDHSYQEEAAMELKVEDPFYWVSPGVLVLLAVLPVLLLQITVGLIFLCLQYRLRGKLRAEIENLHRTFESFGVLGPQVKEPKKTGQFLEELLFHLEALSG

SEQ ID NO: 14094 - protein, 403 aa, Homo sapiens
MTSQRSPLAPLLLLSLHGVAASLEVSESPGSIQVARGQPAVLPCTFTTSAALINLNVIWMVTPLSNANQPEQVILYQGGQMFDGAPRFHGRVGFTGTMPATNVSIFINNTQLSDTGTYQCLVNNLPDIGGRNIGVTGLTVLVPPSAPHCQIQGSQDIGSDVILLCSSEEGIPRPTYLWEKLDNTLKLPPTATQDQVQGTVTIRNISALSSGLYQCVASNAIGTSTCLLDLQVISRAFFYWRSKNKEEEEEEIPNEIREDDLPPKCSSAKAFHTEISSSDNNTLTSSNAYNSRYWSNNPKVHRNTESVSHFSDLGQSFSFHSGNANIPSIYANGTHLVPGQHKTLVVTANRGSSPQVMSRSNGSVSRKPRPPHTHSYTISHATLERIGAVPVMVPAQSRAGSLV

SEQ ID NO: 14095 - protein, 535 aa, Homo sapiens
MLCDEKAQKRRKRKAKESGMALPQGHLTFRDVAIEFSQAEWKCLDPAQRALYKDVMLENYRNLVSLGISLPDLNINSMLEQRREPWSGESEVKIAKNSDGRECIKGVNTGSSYALGSNAEDKPIKKQLGVSFHLHLSELELFPDERVINGCNQVENFINHSSSVSCLQEMSSSVKTPIFNRNDFDDSSFLPQEQKVHLREKPYECNEHSKVFRVSSSLTKHQVIHTVEKPYKCNSCGKVFSRNSHLAEHCRIHTGEKPYKCNVCGKVFSYNSNFARHQRIHTREKPYECNECGKVFSNNSYLARHQRIHAEEKPYKCNECGKGFSHKSSLANHWRIYTGEKPYKCDECGKAFYRIALLVRHQKIHTGEKPYKCNECGKVFIQNSHLAQHWRIHTGEKPYKCNECGKVFNQLSNLARHRRIHTGEKPYKCNECGKAFSEYSGLSAHLVIHTGEKPYKCSECGKAFRHKLSLTNHQRIHTGERPYKCNECGKVFNRIAHLARHRKIHTGEKPYKCNECGKAFSRISYLAQHWTIHMG

SEQ ID NO: 14096 - protein, 117 aa, Homo sapiens
MDMRVPAQLLGLLLLWVPGARCDIQLTQSPSSLSASVGDRVTITCRVSQGISSYLNWYRQKPGKVPKLLIYSASNLQSGVPSRFSGSGSGTDFTLTISSLQPEDVATYYGQRTYNAP

SEQ ID NO: 14097 - protein, 186 aa, Homo sapiens
MAGVGAGPLRAMGRQALLLLALCATGAQGLYFHIGETEKRCFIEEIPDETMVIGNYRTQMWDKQKEVFLPSTPGLGMHVEVKDPDGKVVLSRQYGSEGRFTFTSHTPGDHQICLHSNSTRMALFAGGKLRVHLDIQVGEHANNYPEIAAKDKLTELQLRARQLLDQVEQIQKEQDYQRASAYLLVI

SEQ ID NO: 14098 - protein, 461 aa, Homo sapiens
MVSRVQLPPEIQLAQRLAGNEQVTRDRAVRKLRKYIVARTQRAAGGFTHDELLKVWKGLFYCMWMQDKPLLQEELGRTISQLVHAFQTTEAQHLFLQAFWQTMNREWTGIDRLRLDKFYMLMRMVLNESLKVLKMQGWEERQIEELLELLMTEILHPSSQAPNGVKSHFIEIFLEELTKVGAEELTADQNLKFIDPFCRIAARTKDSLVLNNITRGIFETIVEQAPLAIEDLLNELDTQDEEVASDSDESSEGGERGDALSQKRSEKPPAGSICRAEPEAGEEQAGDDRDSGGPVLQFDYEAVANRLFEMASRQSTPSQNRKRLYKVIRKLQDLAGGIFPEDEIPEKACRRLLEGRRQKKTKKQKRLLRLQQERGKGEKEPPSPGMERKRSRRRGVGADPEARAEAGEQPGTAERALLRDQPRGRGQRGARQRRRTPRPLTSARAKAANVQEPEKKKKRRE

SEQ ID NO: 14099 - protein, 137 aa, Homo sapiens
MLLLLLLAPLFLRPPGAGGAQTPNATSEGCQIIHPPWEGGIRYRGLTRDQVKAINFLPVDYEIEYVCRGEREVVGPKVRKCLANGSWTDMDTPSRCVRICSKSYLTLENGKVFLTGGDLPALDGARVDFRCDPDFHL

SEQ ID NO: 14100 - protein, 95 aa, Homo sapiens
MTLGCLAPYRRLGIGTKMLNHVLNICEKDGTFDNIYLHVQISNESAIDFYRKFGFEIIETKKNYYKRIEPADAHVLQKNLKVPSGQNADVQKTDN

SEQ ID NO: 14101 - protein, 133 aa, Homo sapiens [sequence omitted]

SEQ ID NO: 14102 - protein, 5412 aa, Homo sapiens
MKGARWRRVPWVSLSCLCLCLLPHVVPGTTEDTLITGSKTAAPVTSTGSTTATLEGQSTAASSRTSNQDISASSQNHQTKSTETTSKAQTDTLTQMMTSTLFSSPSVHNVMETAPPDEMTTSFPSSVTNTLMMTSKTITMTTSTDSTLGNTEETSTAGTESSTPVTSAVSITAGQEGQSRTTSWRTSIQDTSASSQNHWTRSTQTTRESQTSTLTHRTTSTPSFSPSVHNVTGTVSQKTSPSGETATSSLCSVTNTSMMTSEKITVTTSTGSTLGNPGETSSVPVTGSLMPVTSAALVTFDPEGQSPATFSRTSTQDTTAFSKNHQTQSVETTRVSQINTLNTLTPVTTSTVLSSPSGFNPSGTVSQETFPSGETTTSSPSSVSNTFLVTSKVFRMPTSRDSTLGNTEETSLSVSGTISAITSKVSTIWWSDTLSTALSPSSLPPKISTAFHTQQSEGAETTGRPHERSSFSPGVSQEIFTLHETTTWPSSFSSKGHTTWSQTELPSTSTGAATRLVTGNPSTGTAGTIPRVPSKVSAIGEPGEPTTYSSHSTTLPKTTGAGAQTQWTQETGTTGEALLSSPSYSVTQMIKTATSPSSSPMLDRHTSQQITTAPSTNHSTIHSTSTSPQESPAVSQRGHTQAPQTTQESQTTRSVSPMTDTKTVTTPGSSFTASGHSPSEIVPQDAPTISAATTFAPAPTGDGHTTQAPTTALQAAPSSHDATLGPSGGTSLSKTGALTLANSVVSTPGGPEGQWTSASASTSPDTAAAMTHTHQAESTEASGQTQTSEPASSGSRTTSAGTATPSSSGASGTTPSGSEGISTSGETTRFSSNPSRDSHTTQSTTELLSASASHGAIPVSTGMASSIVPGTFHPTLSEASTAGRPTGQSSPTSPSASPQETAAISRMAQTQRTRTSRGSDTISLASQATDTFSTVPPTPPSITSTGLTSPQTETHTLSPSGSGKTFTTALISNATPLPVTYASSASTGHTTPLHVTDASSVSTGHATPLPVTSPSSVSTGHTTPLPVTDTSSESTGHVTPLPVTSFSSASTGDSTPLPVTDTSSASTGHVTPLPVTSLSSASTGDTTPLPVTDTSSASTGHATSLPVTDTSSVSTGHTTPLPVTDTSSASTGHATSLPVTDTSSVSTGHTTPLHVTDASSASTGQATPLPVTSLSSVSTGDTTPLPVTSPSSASTGHATPLLVTDTSSASTGHATPLPVTDASSVSTDHATSLPVTIPSAASTGHTTPLPVTDTSSASTGQATSLLVTDTSSVSTGDTTPLPVTSTSSASTGHVTPLHVTSPSSASTGHATPLPVTSLSSASTGDTMPLPVTSPSSASTGDTTPLPVTDASSVSTGHTTPLHVTDASSASTGQATPLPVTSLSSVSTGDTTPLPVTSPSSASTGHATPLLVTDTSSASTGHATPLPVTDASSVSTDHATSLPVTIPSAASTGHTTPLPVTDTSSASTGQATSLLVTDTSSVSTGDTTPLPVTSTSSASTGHVTPLHVTSPSSASTGHATPLPVTSLSSASTGDTMPLPVTSPSSASTGDTTPLPVTDASSVSTGHTTPLPVTSPSSASTGHTTPLPVTDTSSASKGDTTPLPVTSPSSASTGHTTPLPVTDTSSASTGDTTPLPVTNASSLSTGHATPLHVTSPSSASTGHATPLPVTSTSSASTGHATPLPVTGLSSATTDDTTRLPVTDVSSASTGQATPLPVTSLSSVSTGDTTPLPVTSPSSASTGHASPLLVTDASSASTGQATPLPVTDTSSVSTAHATPLPVTGLSSASTDDTTRLPVTDVSSASTGQAIPLPVTSPSSASTGDTTPLPVTDASSASTGDTTSLPVTIPSSASSGHTTSLPVTDASSVSTGHATSLLVTDASSVSTGDTTPLPVTDTNSASTGDTTPLHVTDASSVSTGHATSLPVTSLSSASTGDTTPLPVTSPSSASSGHTTPLPVTDASSVPTGHATSLPVTDASSVSTGHATPLPVTDASSVSTGHATPLPVTDTSSVSTGQATPLPVTSLSSASTGDTTPLPVTDTSSASTGQDTPLPVTSLSSVSTGDTTPLPVTNPSSASTGHATPLLVTDASSISTGHATSLLVTDASSVSTGHATALHDTDASSLSTGDTTPLPVTSPSSTSTGDTTPLPVTETSSVSTGHATSLPVTDTSSASTGHATSLPVTDTSSASTGHATPLPVTDTSSASTGQATPLPVTSPSSASTGHAIPLLVTDTSSASTGQATPLPVTSLSSASTGDTTPLPVTDASSVSTGHATSLPVTSLSSVSTGDTTPLPVTSPSSASTGHATPLHVTDASSASTGHATPLPVTSLSSASTGDTTPLPVTSPSSASTGHATPLHVTDASSVSTGDTTPLPVTSSSSASSGHTTPLPVTDASSASTGDTTPLPVTDTSSASTGHATHLPVTGLSSASTGDTTRLPVTNVSSASTGHATPLPVTSTSSASTGDTTPLPGTDTSSVSTGHTTPLLVTDASSVSTGDTTRLPVTSPSSASTGHTTPLPVTDTPSASTGDTTPLPVTNASSLSTRHATSLHVTSPSSASTGHATSLPVTDTSAASTGHATPLPVTSTSSASTGDTTPLPVTDTYSASTGQATPLPVTSLSSVSTGDTTPLPVTSPSSASTGHATPLLVTDASSASTGQATPLPVTSLSSVSTGDTTPLPVTSPSSASTGHATSLPVTDTSSASTGDTTSLPVTDTSSAYTGDTTSLPVTDTSSSSTGDTTPLLVTETSSVSTGDTTPLPVTDTSSASTGHATPLPVTNTSSVSTGHATPLHVTSPSSASTGHTTPLPVTDASSVSTGHATSLPVTDASSVFTGHATSLPVTIPSSASSGHTTPLPVTDASSVSTGHATSLPVTDASSVSTGHATPLPVTDASSVSTGHATPLPLTSLSSVSTGDTTPLPVTDTSSASTGQATPLPVTSLSSVSTGDTTPLPVTDTSSASTGHATSLPVTDTSSASTGHATPLPDTDTSSASTGHATLLPVTDTSSASIGHATSLPVTDTSSISTGHATPLHVTSPSSASTGHATPLPVTDTSSASTGHANPLHVTSPSSASTGHATPLPVTDTSSASTGHATPLPVTSLSSVSTGDTTPLPVTSPSSASTGHTTPLPVTDTSSASTGQATALPVTSTSSASTGDTTPLPVTDTSSASTGQATPLPVTSLSSVSTGDTTPLPVTSPSSASTGHATPLLVTDASSASTGQATPLPVTSLSSVSTGDTTPLPVTSPSSASTGHATSLPVTDTSSASTGDTTSLPVTDTSSAYTGDTTSLPVTDTSSSSTGDTTPLLVTETSSVSTGHATPLLVTDASSASTGHATPLHVTSPSSASTGDTTPVPVTDTSSVSTGHATPLPVTGLSSASTGDTTRLPVTDISSASTGQATPLPVTNTSSVSTGDTMPLPVTSPSSASTGHATPLPVTSTSSASTGHATPVPVTSTSSASTGHTTPLPVTDTSSASTGDTTPLPVTSPSSASTGHTTPLHVTIPSSASTGDTSTLPVTGASSASTGHATPLPVTDTSSVSTGHATPLPVTSLSSVSTGDTTPLPVTDASSASTGQATPLPVTSLSSVSTGDTTPLLVTDASSVSTGHATPLPVTDTSSASTGDTTRLPVTDTSSASTGQATPLPVTSLSSVSTGDTTPLLVTDASSVSTGHATPLPVTDTSSASTGDTTRLPVTDTSSASTGQATPLPVTIPSSSSSGHTTPLPVTSTSSVSTGHVTPLHVTSPSSASTGHVTPLPVTSTSSASTGHATPLLVTDASSVSTGHATPLPVTDASSASTGDTTPLPVTDTSSASTGQATPLPVTSLSSVSTGDTTPLPVTDASSASTGHATPLPVTIPSSVSTGDTMPLPVTSPSSASTGHATPLPVTGLSSASTGDTTPLPVTDTSSASTRHATPLPVTDTSSASTDDTTRLPVTDVSSASTGHATPLPVTSTSSASTGDTTPLPVTDTSSVSTGHATSLPVTSRSSASTGHATPLPVTDTSSVSTGHATPLPVTSTSSVSTGHATPLPVTSPSSASTGHATPVPVTSTSSASTGDTTPLPVTNASSLSTGHATPLHVTSPSSASRGDTSTLPVTDASSASTGHATPLPLTSLSSVSTGDTTPLPVTDTSSASTGQATPLPVTSLSSVSTGDTTPLPVTIPSSASSGHTTSLPVTDASSVSTGHGTPLPVTSTSSASTGDTTPLPVTDTSSASTGHATPLPVTDTSSASTGHATPLPVTSLSSVSTGHATPLAVSSATSASTVSSDSPLKMETPGMTTPSLKTDGGRRTATSPPPTTSQTIISTIPSTAMHTRSTAAPIPILPERGVSLFPYGAGAGDLEFVRRTVDFTSPLFKPATGFPLGSSLRDSLYFTDNGQIIFPESDYQIFSYPNPLPTGFTGRDPVALVAPFWDDADFSTGRGTTFYQEYETFYGEHSLLVQQAESWIRKMTNNGGYKARWALKVTWVNAHAYPAQWTLGSNTYQAILSTDGSRSYALFLYQSGGMQWDVAQRSGNPVLMGFSSGDGYFENSPLMSQPVWERYRPDRFLNSNSGLQGLQFYRLHREERPNYRLECLQWLKSQPRWPSWGWNQVSCPCSWQQGRRDLRFQPVSIGRWGLGSRQLCSFTSWRGGVCCSYGPWGEFREGWHVQRPWQLAQELEPQSWCCRWNDKPYLCALYQQRRPHVGCATYRPPQPAWMFGDPHITTLDGVSYTFNGLGDFLLVGAQDGNSSFLLQGRTAQTGSAQATNFIAFAAQYRSSSLGPVTVQWLLEPHDAIRVLLDNQTVTFQPDHEDGGGQETFNATGVLLSRNGSEVSASFDGWATVSVIALSNILHASASLPPEYQNRTEGLLGVWNNNPEDDFRMPNGSTIPPGSPEEMLFHFGMTWQINGTGLLGKRNDQLPSNFTPVFYSQLQKNSSWAEHLISNCDGDSSCIYDTLALRNASIGLHTREVSKNYEQANATLNQYPPSINGGRVIEAYKGQTTLIQYTSNAEDANFTLRDSCTDLELFENGTLLWTPKSLEPFTLEILARSAKIGLASALQPRTVVCHCNAESQCLYNQTSRVGNSSLEVAGCKCDGGTFGRYCEGSEDACEEPCFPSVHCVPGKGCEACPPNLTGDGRHCAALGSSFLCQNQSCPVNYCYNQGHCYISQTLGCQPMCTCPPAFTDSRCFLAGNNFSPTVNLELPLRVIQLLLSEEENASMAEVNASVAYRLGTLDMRAFLRNSQVERIDSAAPASGSPIQHWMVISEFQYRPRGPVIDFLNNQLLAAVVEAFLYHVPRRSEEPRNDVVFQPISGEDVRDVTALNVSTLKAYFRCDGYKGYDLVYSPQSGFTCVSPCSRGYCDHGGQCQHLPSGPRCSCVSFSIYTAWGEHCEHLSMKLDAFFGIFFGALGGLLLLGVGTFVVLRFWGCSGARFSYFLNSAEALP

SEQ ID NO: 14103 - protein, 221 aa, Homo sapiens
MAAAASPAFLLRLPLLLLLSSWCRTGLADPHSLCYDITVIPKFRPGPRWCAVQGQVDEKTFLHYDCGSKTVTPVSPLGKKLNVTTAWKAQNPVLREVVDILTEQLLDIQLENYIPKEPLTLQARMSCEQKAEGHGSGSWQLSFDGQIFLLFDSENRMWTTVHPGARKMKEKWENDKDMTMSFHYISMGDCTGWLEDFLMGMDSTLEPSAGGNRRKRNGDLQ

SEQ ID NO: 14104 - protein, 1512 aa, Homo sapiens
MATAVETEACQPTDASWESGGGGDDEMKQALPELESSQQNGGGGGLNIAEPSGGAGREENAGAEAAQSLSHEQPQDSSEAGAAALPRGPEEPERPVRRSFQIPRKSREKKALFQPLTPGSREFEDVVNILHSSYLEPTSVTNFNYRRACLVHNELLEKEFTEKRRELKFDGRLDKELSESYAFLMVDRYQVQTICEKGLHVGQSKITILGSPSMGVYLSRYADLLQANPLDTGAMGDVVIFKIMKGKIKSIYDPMGVKSLESMLNKSALDPTPKHECHVSKNANRITSLLAYRAYELTQYYFYEYGFDELRRRPRHVCPYAVVSFTYKDDIQTPKFVPSSRSNSFNTDRNIDKYNYTLWKGQLLNKGKLLCYISLRSATRAFLPIKLPEKLDVETVMSIDHLKQKIPPALFYKETYLGPNEVLKNGMYCSLYEVVEKTRIGSNMESLLQKLDREKLVLVKPLGDRGYLFLLSPYQMVPPYEYQTAKSRVLHALFLFQEPRSIVTSQKGSTNAAPQERHESMPDVLKIAQFLQFSLIQCRKEFKNISAINFHSVVEKYVSEFFKRGFGSGKREFIMFPYDSRLDDKKFLYSAPRNKSHIDTCLHAYIFRPEVYQLPICKLKELFEENRKLQQFSPLSDYEGQEEEMNGTKMKFGKRNNSRGEAIISGKQRSSHSLDYDKDRVKELINLIQCRKKSVGGDSDTEDMRSKTVLKRKLEDLPENMRKLAKTSNLSENCHLYEESPQPIGSLGHDADLRRQQQDTCNSGIADIHRLFNWLSETLANARHSDASLTDTVNKALGLSTDDAYEELRQKHEYELNSTPDKKDYEQPTCAKVENAQFKGTQSLLLEVDATSKYSVAISTSEVGTDHKLHLKEDPNLISVNNFEDCSLCPSVPIEHGFRRQQSKSNNVEETEIHWKLIPITGGNARSPEDQLGKHGEKQTPGMKSPEEQLVCVPPQEAFPNDPRVINRQRSSDYQFPSSPFTDTLKGTTEDDVLTGQVEEQCVPAAEAEPPAVSETTERTVLGEYNLFSRKIEEILKQKNVSYVSTVSTPIFSTQEKMKRLSEFIYSKTSKAGVQEFVDGLHEKLNTIIIKASAKGGNLPPVSPNDSGAKIASNPLERHVIPVSSSDFNNKHLLEPLCSDPLKDTNSDEQHSTSALTEVEMNQPQHATELMVTSDHIVPGDMAREPVEETTKSPSDVNISAQPALSNFISQLEPEVFNSLVKIMKDVQKNTVKFYIHEEEESVLCKEIKEYLIKLGNTECHPEQFLERRSKLDKLLIIIQNEDIAGFIHKIPGLVTLKKLPCVSFAGVDSLDDVKNHTYNELFVSGGFIVSDESILNPEVVTVENLKNFLTFLEELSTPEGKWQWKVHCKFQKKLKELGRLNAKALSLLTLLNVYQKKHLVEILSYHNCDSQTRNAPELDCLIRLQAQNIQQRHIVFLTEKNIKMLSSYTDNGIVVATAEDFMQNFKNLVGYHNSITEENLPQLGANENLESQSDAVLTLTPLELGVGISQH

SEQ ID NO: 14105 - protein, 811 aa, Homo sapiens
MQQALELALDRAEYVIESARQRPPKRKYLSSGRKSVFQKLYDLYIEECEKEPEVKKLRRNVNLLEKLVMQETLSCLVVNLYPGNEGYSLMLRGKNGSDSETIRLPYEEGELLEYLDAEELPPILVDLLEKSQVNIFHCGCVIAEIRDYRQSSNMKSPGYQSRHILLRPTMQTLICDVHSITSDNHKWTQEDKLLLESQLILATAEPLCLDPSIAVTCTANRLLYNKQKMNTRPMKRCFKRYSRSSLNRQQDLSHCPPPPQLRLLDFLQKRKERKAGQHYDLKISKAGNCVDMWKRSPCNLAIPSEVDVEKYAKVEKSIKSDDSQPTVWPAHDVKDDYVFECEAGTQYQKTKLTILQSLGDPLYYGKIQPCKADEESDSQMSPSHSSTDDHSNWFIIGSKTDAERVVNQYQELVQNEAKCPVKMSHSSSGSASLSQVSPGKETDQTETVSVQSSVLGKGVKHRPPPIKLPSSSGNSSSGNYFTPQQTSSFLKSPTPPPSSKPSSIPRKSSVDLNQVSMLSPAALSPASSSQRSGTPKPSTPTPTPSSTPHPPDAQSSTPSTPSATPTPQDSGFTPQPTLLTQFAQQQRSLSQAMPVTTIPLSTMVTSITPGTTATQVMANSAGLNFINVVGSVCGAQALMSGSNPMLGCNTGAITPAGINLSGLLPSGGLLPNALPSAMQAASQAGVPFGLKNTSSLRPLNLLQLPGGSLIFNTLQQQQQQLSQFTPQQPQQPTTCSPQQPGEQGSEQGSTSQEQALSAQQAAVINLTGVGSFMQSQAAAVAILAASNGYGSSSSTNSSATSSSAYRQPVKK

SEQ ID NO: 14106 - protein, 262 aa, Homo sapiens
MARAGPAWLLLAIWVVLPSWLSSAKVSSLIERISDPKDLKKLLRTRNNVLVLYSKSEVAAENHLRLLSTVAQAVKGQGTICWVDCGDAESRKLCKKMKVDLSPKDKKVELFHYQDGAFHTEYNRAVTFKSIVAFLKDPKGPPLWEEDPGAKDVVHLDSEKDFRRLLKKEEKPLLIMFYAPWCSMCKRMMPHFQKAATQLRGHAVLAGMNVYSSEFENIKEEYSVRGFPTICYFEKGRFLFQYDNYGSTAEDIVEWLKKVWPL

SEQ ID NO: 14107 - protein, 174 aa, Homo sapiens
MAPKGSSKQQSEEDLLLQDFSRNLSAKSSALFFGNAFIVSAIPIWLYWRIWHMDLIQSAVLYSVMTLVSTYLVAFAYKNVKFVLKHKVAQKREDAVSKEVTRKLSEADNRKMSRKEKDERILWKKNEVADYEATTFSIFYNNTLFLVVVIVASFFILKNFNPTVYPFQGTTYCP

SEQ ID NO: 14108 - protein, 922 aa, Homo sapiens
MVQLRKLLRVLTLMKFPCCVLEVLLCALAAAARGQEMYAPHSIRIEGDVTLGGLFPVHAKGPSGVPCGDIKRENGIHRLEAMLYALDQINSDPNLLPNVTLGARILDTCSRDTYALEQSLTFVQALIQKDTSDVRCTNGEPPVFVKPEKVVGVIGASGSSVSIMVANILRLFQIPQISYASTAPELSDDRRYDFFSRVVPPDSFQAQAMVDIVKALGWNYVSTLASEGSYGEKGVESFTQISKEAGGLCIAQSVRIPQERKDRTIDFDRIIKQLLDTPNSRAVVIFANDEDIKQILAAAKRADQVGHFLWVGSDSWGSKINPLHQHEDIAEGAITIQPKRATVEGFDAYFTSRTLENNRRNVWFAEYWEENFNCKLTISGSKKEDTDRKCTGQERIGKDSNYEQEGKVQFVIDAVYAMAHALHHMNKDLCADYRGVCPEMEQAGGKKLLKYIRNVNFNGSAGTPVMFNKNGDAPGRYDIFQYQTTNTSNPGYRLIGQWTDELQLNIEDMQWGKGVREIPASVCTLPCKPGQRKKTQKGTPCCWTCEPCDGYQYQFDEMTCQHCPYDQRPNENRTGCQDIPIIKLEWHSPWAVIPVFLAMLGIIATIFVMATFIRYNDTPIVRASGRELSYVLLTGIFLCYIITFLMIAKPDVAVCSFRRVFLGLGMCISYAALLTKTNRIYRIFEQGKKSVTAPRLISPTSQLAITSSLISVQLLGVFIWFGVDPPNIIIDYDEHKTMNPEQARGVLKCDITDLQIICSLGYSILLMVTCTVYAIKTRGVPENFNEAKPIGFTMYTTCIVWLAFIPIFFGTAQSAEKLYIQTTTLTISMNLSASVALGMLYMPKVYIIIFHPELNVQKRKRSFKAVVTAATMSSRLSHKPSDRPNGEAKTELCENVDPNNCIPPVRKSVQKSVTWYTIPPTV

SEQ ID NO: 14109 - protein, 163 aa, Homo sapiens
MNLQPIFWIGLISSVCCVFAQTDENRCLKANAKSCGECIQAGPNCGWCTNSTFLQEGMPTSARCDDLEALKKKGCPPDDIENPRGSKDIKKNKNVTNRSKGTAEKLKPEDITQIQPQQLVLRLRSGEPQTFTLKFKRAEDYPIDLYYLMDLSYSMKDDLENVK

SEQ ID NO: 14110 - protein, 179 aa, Homo sapiens
MSGGRAPAVLLGGVASLLLSFVWMPALLPVASRLLLLPRVLLTMASGSPPTQPSPASDSGSGYVPGSVSAAFVTCPNEKVAKEIARAVVEKRLAACVNLIPQITSIYEWKGKIEEDSEVLMMIKTQSSLVPALTDFVRSVHPYEVAEVIALPVEQGNFPYLQWVRQVTESVSDSITVLP

SEQ ID NO: 14111 - protein, 70 aa, Homo sapiens
MKNHLLFWGVLAVFIKAVHVKAQEDERIVLVDNKCKCARITSRIIRSSEDPNEDIVERNIRIIVPLNNRE

SEQ ID NO: 14112 - protein, 188 aa, Homo sapiens
MAASVEQREGTIQVQGQALFFREALPGSGQARFSVLLLHGIRFSSETWQNLGTLHRLAQAGYRAVAIDLPGLGHSKEAAAPAPIGELAPGSFLAAVVDALELGPPVVISPSLSGMYSLPFLTAPGSQLPGFVPVAPICTDKINAANYASVKVPLCGKLRCPCQEQGRVHPWAFLIWGLDNQGVSSGRS

SEQ ID NO: 14113 - protein, 754 aa, Homo sapiens
LLVLGLLVAGAADGCELVPRHLRGRRATGSAATAASSPAAAAGDSPALMTDPCMSLSPPCFTEEDRFSLEALQTIHKQMDDDKDGGIEVEESDEFIREDMKYKDATNKHSHLHREDKHITIEDLWKRWKTSEVHNWTLEDTLQWLIEFVELPQYEKNFRDNNVKGTTLPRIAVHEPSFMISQLKISDRSHRQKLQLKALDVVLFGPLTRPPHNWMKDFILTVSIVIGVGGCWFAYTQNKTSKEHVAKMMKDLESLQTAEQSLMDLQERLEKAQEENRNVAVEKQNLERKMMDEINYAKEEACRLRELREGAECELSRRQYAEQELEQVRMALKKAEKEFELRSSWSVPDALQKWLQLTHEVEVQYYNIKRQNAEMQLAIAKDEVAASYLIQAEKIKKKRSTVFGTLHVAHSSSLDEVDHKILEAKKALSELTTCLRERLFRWQQIEKICGFQIAHNSGLPSLTSSLYSDHSWVVMPRVSIPPYPIAGGVDDLDEDTPPIVSQFPGTMAKPPGSLARSSSLCRSRRSIVPSSPQPQRAQLAPHAPHPSHPRHPHHPQHTPHSLPSPDPDILSVSSCPALYRNEEEEEAIYFSAEKQWEVPDTASECDSLNSSIGRKQSPPLSLEIYQTLSPRKISRDEVSLEDSSRGDSPVTVDVSWGSPDCVGLTETKSMIFSPASKVYNGILEKSCSMNQLSSGIPVPKPRHTSCSSAGNDSKPVQEAPSVARISSIPHDLCHNGEKSKKPSKIKSLFKKKSK

SEQ ID NO: 14114 - protein, 236 aa, Homo sapiens
MAEAEESPGDPGTASPRPLFAGLSDISISQDIPVEGEITIPMRSRIREFDSSTLNESVRNTIMRDLKAVGKKFMHVLYPRKSNTLLRDWDLWGPLILCVTLALMLQRDSADSEKDGGPQFAEVFVIVWFGAVTITLNSKLLGGNISFFQSLCVLGYCILPLTVAMLICRLVLLADPGPVNFMVRLFVVIVMFAWSIVASTAFLADSQPPNRRALAVYPVFLFYFVISWMILTFTPQ

SEQ ID NO: 14115 - protein, 248 aa, Homo sapiens
MALCEAAGCGSALLWPRLLLFGDSITQFSFQQGGWGASLADRLVRKCDVLNRGFSGYNTRWAKIILPRLIRKGNSLDIPVAVTIFFGANDSALKDENPKQHIPLEEYAANLKSMVQYLKSVDIPENRVILITPTPLCETAWEEQCIIQGCKLNRLNSVVGEYANACLQVAQDCGTDVLDLWTLMQDSQDFSSYLSDGLHLSPKGNEFLFSHLWPLIEKKVSSLPLLLPYWRDVAEAKPELSLLGDGDH

SEQ ID NO: 14116 - protein, 388 aa, Homo sapiens
MSDEASAITSYEKFLTPEEPFPLLGPPRGVGTCPSEEPGCLDISDFGCQLSSCHRTDPLHRFHTNRWNLTSCGTSVASSEGSEELFSSVSVGDQDDCYSLLDDQDFTSFDLFPEGSVCSDVSSSISTYWDWSDSEFEWQLPGSDIASGSDVLSDVIPSIPSSPCLLPKKKNKHRNLDELPWSAMTNDEQVEYIEYLSRKVSTEMGLREQLDIIKIIDPSAQISPTDSEFIIELNCLTDEKLKQVRNYIKEHSPRQRPAREAWKRSNFSCASTSGVSGASASASSSSASMVSSASSSGSSVGNSASNSSANMSRAHSDSNLSASAAERIRDSKKRSKQRKLQQKAFRKRQLKEQRQARKERLSGLFLNEEVLSLKVTEEDHEADVDVLM

SEQ ID NO: 14117 - protein, 385 aa, Homo sapiens
MIISTPQRLTSSGSVLIGSPYTPAPAMVTQTHIAEATGWVPGDRKRARKFIDSDFSESKRSKKGDKNGKGLRHFSMKVCEKVQRKGTTSYNEVADELVSEFTNSNNHLAADSAYDQKNIRRRVYDALNVLMAMNIISKEKKEIKWIGLPTNSAQECQNLEIEKQRRIERIKQKRAQLQELLLQQIAFKNLVQRNRQNEQQNQGPPALNSTIQLPFIIINTSRKTVIDCSISSDKFEYLFNFDNTFEIHDDIEVLKRMGMSFGLESGKCSLEDLKLAKSLVPKALEGYITDISTGPSWLNQGLLLNSTQSVSNLDLTTGATLPQSSVNQGLCLDAEVALATGQFLAPNSHQSSSAASHCSESRGETPCSFNDEDEEDDEEDSSSPE

SEQ ID NO: 14118 - protein, 325 aa, Homo sapiens
MTERRRDELSEEINNLREKVMKQSEENNNLQSQVQKLTEENTTLREQVEPTPEDEDDDIELRGAAAAAAPPPPIEEECPEDLPEKFDGNPDMLAPFMAQCQIFMEKSTRDFSVDRVRVCFVTSMMTGRAARWASAKLERSHYLMHNYPAFMMEMKHVFEDPQRREVAKRKIRRLRQGMGSVIDYSNAFQMIAQDLDWNEPALIDQYHEGLSDHIQEELSHLEVAKSLSALIGQCIHIERRLARAAAARKPRSPPRALVLPHIASHHQVDPTEPVGGARMRLTQEEKERRRKLNLCLYCGTGGHYADNCPAKASKSSPAGNSPAPL

SEQ ID NO: 14119 - protein, 250 aa, Homo sapiens
MAAAGLALLCRRVSSALKSSRSLITPQVPACTGFFLSLLPKSTPNVTSFHQYRLLHTTLSRKGLEEFFDDPKNWGQEKVKSGAAWTCQQLRNKSNEDLHKLWYVLLKERNMLLTLEQEAKRQRLPMPSPERLDKVVDSMDALDKVVQEREDALRLLQTGQERARPGAWRRDIFGRIIWHKFKQWVIPWHLNKRYNRKRFFALPYVDHFLRLEREKRARIKARKENLERKKAKILLKKFPHLAEAQKSSLV

SEQ ID NO: 14120 - protein, 154 aa, Homo sapiens
MKQYQGSGGVAMDVERSRFPYCVVWTPIPVLTWFFPIIGHMGICTSTGVIRDFAGPYFVSEDNMAFGKPAKYWKLDPAQVYASGPNAWDTAVHDASEEYKHRMHNLCCDNCHSHVALALNLMRYNNSTNWNMVTLCFFCLLYGKYVRSLPRQRD

SEQ ID NO: 14121 - protein, 139 aa, Homo sapiens
MGAARGSPARPRRLPLLSVLLLPLLGGTQTAIVFIKQPSSQDALQGRRALLRCEVEAPGPVHVYWLLDGAPVQDTERRFAQGSSLSFAAVDRLQDSGTFQCVARDDVTGEEARSANASFNIKCESQGGCAQSPCQTLND

SEQ ID NO: 14122 - protein, 279 aa, Homo sapiens
MPAFIQMGRDKNFSSLHTVFCATGGGAYKFEQDFLTIGDLQLCKLDELDCLIKGILYIDSVGFNGRSQCYYFENPADSEKCQKLPFDLKNPYPLLLVNIGSGVSILAVYSKDNYKRVTGTSLGGGTFFGLCCLLTGCTTFEEALEMASRGDSTKVDKLVRDIYGGDYERFGLPGWAVASSFGNMMSKEKREAVSKEDLARATLITITNNIGSIARMCALNENINQVVFVGNFLRINTIAMRLLAYALDYWSKGQLKALFSEHEGYFGAVGALLELLKIP

SEQ ID NO: 14123 - protein, 1311 aa, Homo sapiens
MLLFYLLVVLSIDSTKASALTNPNVALFLLADDCDDPLVSALPQASFSSSSELSSSHGPGFARLNRRDGAGGWSPLVSNKYQWLQIDLGERMEVTAVATQGGYGSSNWVTSYLLMFSDSGWNWKQYRQEDSIWGFSGNANADSVVYYRLQPSIKARFLRFIPLEWNPKGRIGMRIEVFGCAYRSEVVDLDGKSSLLYRFDQKSLSPIKDIISLKFKTMQSDGILLHREGPNGDHITLQLRRARLFLLINSGEAKLPSTSTLVNLTLGSLLDDQHWHSVLIQRLGKQVNFTVDEHRHHFHARGEFNLMNLDYEISFGGIPAPGKSVSFPHRNFHGCLENLYYNGVDIIDLAKQQKPQIIAMGNVSFSCSQPQSMPVTFLSSRSYLALPDFSGEEEVSATFQFRTWNKAGLLLFSELQLISGGILLFLSDGKLKSNLYQPGKLPSDITAGVELNDGQWHSVSLSAKKNHLSVAVDGQMASAAPLLGPEQIYSGGTYYFGGCPDKSFGSKCKSPLGGFQGCMRLISISGKVVDLISVQQGSLGNFSDLQIDSCGISDRCLPNYCEHGGECSQSWSTFHCNCTNTGYRGATCHNSIYEQSCEAYKHRGNTSGFYYIDSDGSGPLEPFLLYCNMTETAWTIIQHNGSDLTRVRNTNPENPYAGFFEYVASMEQLQATINRAEHCEQEFTYYCKKSRLVNKQDGTPLSWWVGRTNETQTYWGGSSPDLQKCTCGLEGNCIDSQYYCNCDADRNEWTNDTGLLAYKEHLPVTKIVITDTGRLHSEAAYKLGPLLCQGDRSFWNSASFDTEASYLHFPTFHGELSADVSFFFKTTASSGVFLENLGIADFIRIELRSPTVVTFSFDVGNGPFEISVQSPTHFNDNQWHHVRVERNMKEASLQVDQLTPKTQPAPADGHVLLQLNSQLFVGGTATRQRGFLGCIRSLQLNGMTLDLEERAQVTPEVQPGCRGHCSSYGKLCRNGGKCRERPIGFFCDCTFSAYTGPFCSNEISAYFGSGSSVIYNFQENYLLSKNSSSHAASFHGDMKLSREMIKFSFRTTRTPSLLLFVSSFYKEYLSVIIAKNGSLQIRYKLNKYQEPDVVNFDFKNMADGQLHHIMINREEGVVFIEIDDNRRRQVHLSSGTEFSAVKSLVLGRILEHSDVDQDTALAGAQGFTGCLSAVQLSHVAPLKAALHPSHPDPVTVTGHVTESSCMAQPGTDATSRERTHSFADHSGTIDDREPLANAIKSDSAVIGGLIAVVIFILLCITAIAVRIYQQKRLYKRSEAKRSENVDSAEAVLKSELNIQNAVNENQKEYFF

SEQ ID NO: 14124 - protein, 49 aa, Homo sapiens
MMRVCWLVRQDSRHQRIRLPHLEAVVIGRGPETKITDKKCSRQQVESRV

SEQ ID NO: 14125 - protein, 120 aa, Homo sapiens
MRLPAQLLGLLMLWIPGSSADIVMTQTPLSLSVTPGQPASISCKSSQSLLHSDGKTYLYWYLQKPGQPPQLLIYEVSNRFSGVPDRFSGSGSGTDFTLKISRVEAEDVGVYYCMQSIQLP

SEQ ID NO: 14126 - protein, 34 aa, Homo sapiens
GGLLLLAVVLLSACLCWLHRREAGEELEAASAQQ

SEQ ID NO: 14127 - protein, 439 aa, Homo sapiens
MAANLSRNGPALQEAYVRVVTEKSPTDWALFTYEGNSNDIRVAGTGEGGLEEMVEELNSGKVMYAFCRVKDPNSGLPKFVLINWTGEGVNDVRKGACASHVSTMASFLKGAHVTINARAEEDVEPECIMEKVAKASGANYSFHKESGRFQDVGPQAPVGSVYQKTNAVSEIKRVGKDSFWAKAEKEEENRRLEEKRRAEEAQRQLEQERRERELREAARREQRYQEQGGEASPQSRTWEQQQEVVSRNRNEQGSTCASLQESAVHPREIFKQKERAMSTTSISSPQPGKLRSPFLQKQLTQPETHFGREPAAAISRPRADLPAEEPAPSTPPCLVQAEEEAVYEEPPEQETFYEQPPLVQQQGAGSEHIDHHIQGQGLSGQGLCARALYDYQAADDTEISFDPENLITGIEVIDEGWWRGYGPDGHFGMFPANYVELIE

SEQ ID NO: 14128 - protein, 4458 aa, Homo sapiens
MKGARWRRVPWVSLSCLCLCLLPHVVPGTTEDTLITGSKTAAPVTSTGSTTATLEGQSTAASSRTSNQDISASSQNHQTKSTETTSKAQTDTLTQMMTSTLFSSPSVHNVMETAPPDEMTTSFPSSVTNTLMMTSKTITMTTSTDSTLGNTEETSTAGTESSTPVTSAVSITAGQEGQSRTTSWRTSIQDTSASSQNHWTRSTQTTRESQTSTLTHRTTSTPSFSPSVHNVTGTVSQKTSPSGETATSSLCSVTNTSMMTSEKITVTTSTGSTLGNPGETSSVPVTGSLMPVTSAALVTFDPEGQSPATFSRTSTQDTTAFSKNHQTQSVETTRVSQINTLNTLTPVTTSTVLSSPSGFNPSGTVSQETFPSGETTTSSPSSVSNTFLVTSKVFRMPTSRDSTLGNTEETSLSVSGTISAITSKVSTIWWSDTLSTALSPSSLPPKISTAFHTQQSEGAETTGRPHERSSFSPGVSQEIFTLHETTTWPSSFSSKGHTTWSQTELPSTSTGAATRLVTGNPSTGTAGTIPRVPSKVSAIGEPGEPTTYSSHSTTLPKTTGAGAQTQWTQETGTTGEALLSSPSYSVTQMIKTATSPSSSPMLDRHTSQQITTAPSTNHSTIHSTSTSPQESPAVSQRGHTQAPQTTQESQTTRSVSPMTDTKTVTTPGSSFTASGHSPSEIVPQDAPTISAATTFAPAPTGDGHTTQAPTTALQAAPSSHDATLGPSGGTSLSKTGALTLANSVVSTPGGPEGQWTSASASTSPDTAAAMTHTHQAESTEASGQTQTSEPASSGSRTTSAGTATPSSSGASGTTPSGSEGISTSGETTRFSSNPSRDSHTTQSTTELLSASASHGAIPVSTGMASSIVPGTFHPTLSEASTAGRPTGQSSPTSPSASPQETAAISRMAQTQRTRTSRGSDTISLASQATDTFSTVPPTPPSITSTGLTSPQTETHTLSPSGSGKTFTTALISNATPLPVTYASSASTGHTTPLHVTDASSVSTGHATPLPVTSPSSVSTGHTTPLPVTDTSSESTGHVTPLPVTSFSSASTGDSTPLPVTDTSSASTGHVTPLPVTSLSSASTGDTTPLPVTDTSSASTGHATSLPVTDTSSVSTGHTTPLPVTDTSSASTGHATSLPVTDTSSVSTGHTTPLHVTDASSASTGQATPLPVTSLSSVSTGDTTPLPVTSPSSASTGHATPLLVTDTSSASTGHATPLPVTDASSVSTDHATSLPVTIPSAASTGHTTPLPVTDTSSASTGQATSLLVTDTSSVSTGDTTPLPVTSTSSASTGHVTPLHVTSPSSASTGHATPLPVTSLSSASTGDTMPLPVTSPSSASTGDTTPLPVTDASSVSTGHTTPLHVTDASSASTGQATPLPVTSLSSVSTGDTTPLPVTSPSSASTGHATPLLVTDTSSASTGHATPLPVTDASSVSTDHATSLPVTIPSAASTGHTTPLPVTDTSSASTGQATSLLVTDTSSVSTGDTTPLPVTSTSSASTGHVTPLHVTSPSSASTGHATPLPVTSLSSASTGDTMPLPVTSPSSASTGDTTPLPVTDASSVSTGHTTPLPVTSPSSASTGHTTPLPVTDTSSASKGDTTPLPVTSPSSASTGHTTPLPVTDTSSASTGDTTPLPVTNASSLSTGHATPLHVTSPSSASTGHATPLPVTSTSSASTGHATPLPVTGLSSATTDDTTRLPVTDVSSASTGQATPLPVTSLSSVSTGDTTPLPVTSPSSASTGHASPLLVTDASSASTGQATPLPVTDTSSVSTAHATPLPVTGLSSASTDDTTRLPVTDVSSASTGQAIPLPVTSPSSASTGDTTPLPVTDASSASTGDTTSLPVTIPSSASSGHTTSLPVTDASSVSTGHATSLLVTDASSVSTGDTTPLPVTDTNSASTGDTTPLHVTDASSVSTGHATSLPVTSLSSASTGDTTPLPVTSPSSASSGHTTPLPVTDASSVPTGHATSLPVTDASSVSTGHATPLPVTDASSVSTGHATPLPVTDTSSVSTGQATPLPVTSLSSASTGDTTPLPVTDTSSASTGQDTPLPVTSLSSVSTGDTTPLPVTNPSSASTGHATPLLVTDASSISTGHATSLLVTDASSVSTGHATALHDTDASSLSTGDTTPLPVTSPSSTSTGDTTPLPVTETSSVSTGHATSLPVTDTSSASTGHATSLPVTDTSSASTGHATPLPVTDTSSASTGQATPLPVTSPSSASTGHAIPLLVTDTSSASTGQATPLPVTSLSSASTGDTTPLPVTDASSVSTGHATSLPVTSLSSVSTGDTTPLPVTSPSSASTGHATPLHVTDASSASTGHATPLPVTSLSSASTGDTTPLPVTSPSSASTGHATPLHVTDASSVSTGDTTPLPVTSSSSASSGHTTPLPVTDASSASTGDTTPLPVTDTSSASTGHATHLPVTGLSSASTGDTTRLPVTNVSSASTGHATPLPVTSTSSASTGDTTPLPGTDTSSVSTGHTTPLLVTDASSVSTGDTTRLPVTSPSSASTGHTTPLPVTDTPSASTGDTTPLPVTNASSLSTRHATSLHVTSPSSASTGHATSLPVTDTSAASTGHATPLPVTSTSSASTGDTTPLPVTDTYSASTGQATPLPVTSLSSVSTGDTTPLPVTSPSSASTGHATPLLVTDASSASTGQATPLPVTSLSSVSTGDTTPLPVTSPSSASTGHATSLPVTDTSSASTGDTTSLPVTDTSSAYTGDTTSLPVTDTSSSSTGDTTPLLVTETSSVSTGDTTPLPVTDTSSASTGHATPLPVTNTSSVSTGHATPLHVTSPSSASTGHTTPLPVTDASSVSTGHATSLPVTDASSVFTGHATSLPVTIPSSASSGHTTPLPVTDASSVSTGHATSLPVTDASSVSTGHATPLPVTDASSVSTGHATPLPLTSLSSVSTGDTTPLPVTDTSSASTGQATPLPVTSLSSVSTGDTTPLPVTDTSSASTGHATSLPVTDTSSASTGHATPLPDTDTSSASTGHATLLPVTDTSSASIGHATSLPVTDTSSISTGHATPLHVTSPSSASTGHATPLPVTDTSSASTGHANPLHVTSPSSASTGHATPLPVTDTSSASTGHATPLPVTSLSSVSTGDTTPLPVTSPSSASTGHTTPLPVTDTSSASTGQATALPVTSTSSASTGDTTPLPVTDTSSASTGQATPLPVTSLSSVSTGDTTPLPVTSPSSASTGHATPLLVTDASSASTGQATPLPVTSLSSVSTGDTTPLPVTSPSSASTGHATSLPVTDTSSASTGDTTSLPVTDTSSAYTGDTTSLPVTDTSSSSTGDTTPLLVTETSSVSTGHATPLLVTDASSASTGHATPLHVTSPSSASTGDTTPVPVTDTSSVSTGHATPLPVTGLSSASTGDTTRLPVTDISSASTGQATPLPVTNTSSVSTGDTMPLPVTSPSSASTGHATPLPVTSTSSASTGHATPVPVTSTSSASTGHTTPLPVTDTSSASTGDTTPLPVTSPSSASTGHTTPLHVTIPSSASTGDTSTLPVTGASSASTGHATPLPVTDTSSVSTGHATPLPVTSLSSVSTGDTTPLPVTDASSASTGQATPLPVTSLSSVSTGDTTPLLVTDASSVSTGHATPLPVTDTSSASTGDTTRLPVTDTSSASTGQATPLPVTSLSSVSTGDTTPLLVTDASSVSTGHATPLPVTDTSSASTGDTTRLPVTDTSSASTGQATPLPVTIPSSSSSGHTTPLPVTSTSSVSTGHVTPLHVTSPSSASTGHVTPLPVTSTSSASTGHATPLLVTDASSVSTGHATPLPVTDASSASTGDTTPLPVTDTSSASTGQATPLPVTSLSSVSTGDTTPLPVTDASSASTGHATPLPVTIPSSVSTGDTMPLPVTSPSSASTGHATPLPVTGLSSASTGDTTPLPVTDTSSASTRHATPLPVTDTSSASTDDTTRLPVTDVSSASTGHATPLPVTSTSSASTGDTTPLPVTDTSSVSTGHATSLPVTSRSSASTGHATPLPVTDTSSVSTGHATPLPVTSTSSVSTGHATPLPVTSPSSASTGHATPVPVTSTSSASTGDTTPLPVTNASSLSTGHATPLHVTSPSSASRGDTSTLPVTDASSASTGHATPLPLTSLSSVSTGDTTPLPVTDTSSASTGQATPLPVTSLSSVSTGDTTPLPVTIPSSASSGHTTSLPVTDASSVSTGHGTPLPVTSTSSASTGDTTPLPVTDTSSASTGHATPLPVTDTSSASTGHATPLPVTSLSSVSTGHATPLAVSSATSASTVSSDSPLKMETPGMTTPSLKTDGGRRTATSPPPTTSQTIISTIPSTAMHTRSTAAPIPILPERGVSLFPYGAGAGDLEFVRRTVDFTSPLFKPATGFPLGSSLRDSLYFTDNGQIIFPESDYQIFSYPNPLPTGFTGRDPVALVAPFWDDADFSTGRGTTFYQSNTYQAILSTDGSRSYALFLYQSGGMQWDVAQRSVEMAISKTAH

SEQ ID NO: 14129 - protein, 202 aa, Homo sapiens
MVHVARLLLLLLTFFLRTDAETPPRFTRTPVDQTGVSGGVASFICQATGDPRPKIVWNKKGKKVSNQRFEVIEFDDGSGSVLRIQPLRTPRDEAIYECVASNNVGEISVSTRLTVLREDQIPRGFPTIDMGPQLKVVERTRTATMLCAASGNPDPEITWFKDFLPVDTSNNNGRIKQLRSGTDFSPSSLSLLLNGWSMFVMS

SEQ ID NO: 14130 - protein, 97 aa, Homo sapiens
MLLLLLLAPLFLRPPGAGGAQTPNATSEGCQIIHPPWEGGIRYRGLTRDQVKAINFLPVDYEIEYVCRGEREVVGPKVRKCLANGSWTDMDTPSRCV

SEQ ID NO: 14131 - protein, 159 aa, Homo sapiens
MRRLLIPLALWLGAVGVGVAELTEAQRRGLQVALEEFHKHPPVQWAFQETSVESAVDTPFPAGIFVRLEFKLQQTSCRKRDWKKPECKVRPNGRKRKCLACIKLGSEDKVLGRLVHCPIETQVLRRCVVPPGPLRVVTSGRPQPPGRGTRSIPSHDNKA

SEQ ID NO: 14132 - protein, 270 aa, Homo sapiens
MACRPRSPPRHQSRCDGDASPPSPARWSLGRKRRADGRRWRPEDAEEAEHRGAERRPESFTTPEGPKPRSRCSDWASAVEEDEMRTRVNKEMARYKRKLLINDFGRERKSSSGSSDSKESMSTVPADFETDESVLMRRQKQINYGKNTIAYDRYIKEVPRHLRQPGIHPKTPNKFKKYSRRSWDQQIKLWKVALHFWDPPAEEGCDLQEIHPVDLESAESSSEPQTSSQDDFDVYSGTPTKVRHMDSQVEDEFDLEACLTEPLRDFSAMS

SEQ ID NO: 14133 - protein, 213 aa, Homo sapiens
MVAWRSAFLVCLAFSLATLVQRGSGDFDDFNLEDAVKETSSVKQRWNHVTTTTKRPVTTRAPANTLGNDFDLADALDDRNDRDDGRRKPIAGGGGFSDKDLEDIVGGGEYKPDKGKGDGRYGSNDDPGSGMVAEPGTIAGVASALAMALIGAVSSYISYQQKKFCFSIQQGLNADYVKGENLEAVVCEEPQVKYSTLHTQSAEPPPPPEPARI

SEQ ID NO: 14134 - protein, 45 aa, Homo sapiens
MRLLLLLLVAASAMVRSEASANLGGVPSKRLKMQYATGPLLKFQI

SEQ ID NO: 14135 - protein, 259 aa, Homo sapiens
MHKLKSSQKDKVRQFMACTQAGERTAIYCLTQNEWRLDEATDSFFQNPDSLHRESMRNAVDKKKLERLYGRYKDPQDENKIGVDGIQQFCDDLSLDPASISVLVIAWKFRAATQCEFSRKEFLDGMTELGCDSMEKLKALLPRLEQELKDTAKFKDFYQFTFTFAKNPGQKGLDLEMAVAYWKLVLSGRFKFLDLWNTFLMEHHKRSIPRDTWNLLLDFGNMIADDMSNYDEEGAWPVLIDDFVEYARPVVTGGKRSLF

SEQ ID NO: 14136 - protein, 69 aa, Homo sapiens
MSFPKYKPSSLRTLPETLDPAEYNISPETRRAQAERLAIRAQLKREYLLQYNDPNRRGLIVSVGPPRRE

SEQ ID NO: 14137 - protein, 4430 aa, Homo sapiens
MKGARWRRVPWVSLSCLCLCLLPHVVPGTTEDTLITGSKTAAPVTSTGSTTATLEGQSTAASSRTSNQDISASSQNHQTKSTETTSKAQTDTLTQMMTSTLFSSPSVHNVMETAPPDEMTTSFPSSVTNTLMMTSKTITMTTSTDSTLGNTEETSTAGTESSTPVTSAVSITAGQEGQSRTTSWRTSIQDTSASSQNHWTRSTQTTRESQTSTLTHRTTSTPSFSPSVHNVTGTVSQKTSPSGETATSSLCSVTNTSMMTSEKITVTTSTGSTLGNPGETSSVPVTGSLMPVTSAALVTFDPEGQSPATFSRTSTQDTTAFSKNHQTQSVETTRVSQINTLNTLTPVTTSTVLSSPSGFNPSGTVSQETFPSGETTTSSPSSVSNTFLVTSKVFRMPTSRDSTLGNTEETSLSVSGTISAITSKVSTIWWSDTLSTALSPSSLPPKISTAFHTQQSEGAETTGRPHERSSFSPGVSQEIFTLHETTTWPSSFSSKGHTTWSQTELPSTSTGAATRLVTGNPSTGTAGTIPRVPSKVSAIGEPGEPTTYSSHSTTLPKTTGAGAQTQWTQETGTTGEALLSSPSYSVTQMIKTATSPSSSPMLDRHTSQQITTAPSTNHSTIHSTSTSPQESPAVSQRGHTQAPQTTQESQTTRSVSPMTDTKTVTTPGSSFTASGHSPSEIVPQDAPTISAATTFAPAPTGDGHTTQAPTTALQAAPSSHDATLGPSGGTSLSKTGALTLANSVVSTPGGPEGQWTSASASTSPDTAAAMTHTHQAESTEASGQTQTSEPASSGSRTTSAGTATPSSSGASGTTPSGSEGISTSGETTRFSSNPSRDSHTTQSTTELLSASASHGAIPVSTGMASSIVPGTFHPTLSEASTAGRPTGQSSPTSPSASPQETAAISRMAQTQRTRTSRGSDTISLASQATDTFSTVPPTPPSITSTGLTSPQTETHTLSPSGSGKTFTTALISNATPLPVTYASSASTGHTTPLHVTDASSVSTGHATPLPVTSPSSVSTGHTTPLPVTDTSSESTGHVTPLPVTSFSSASTGDSTPLPVTDTSSASTGHVTPLPVTSLSSASTGDTTPLPVTDTSSASTGHATSLPVTDTSSVSTGHTTPLPVTDTSSASTGHATSLPVTDTSSVSTGHTTPLHVTDASSASTGQATPLPVTSLSSVSTGDTTPLPVTSPSSASTGHATPLLVTDTSSASTGHATPLPVTDASSVSTDHATSLPVTIPSAASTGHTTPLPVTDTSSASTGQATSLLVTDTSSVSTGDTTPLPVTSTSSASTGHVTPLHVTSPSSASTGHATPLPVTSLSSASTGDTMPLPVTSPSSASTGDTTPLPVTDASSVSTGHTTPLHVTDASSASTGQATPLPVTSLSSVSTGDTTPLPVTSPSSASTGHATPLLVTDTSSASTGHATPLPVTDASSVSTDHATSLPVTIPSAASTGHTTPLPVTDTSSASTGQATSLLVTDTSSVSTGDTTPLPVTSTSSASTGHVTPLHVTSPSSASTGHATPLPVTSLSSASTGDTMPLPVTSPSSASTGDTTPLPVTDASSVSTGHTTPLPVTSPSSASTGHTTPLPVTDTSSASKGDTTPLPVTSPSSASTGHTTPLPVTDTSSASTGDTTPLPVTNASSLSTGHATPLHVTSPSSASTGHATPLPVTSTSSASTGHATPLPVTGLSSATTDDTTRLPVTDVSSASTGQATPLPVTSLSSVSTGDTTPLPVTSPSSASTGHASPLLVTDASSASTGQATPLPVTDTSSVSTAHATPLPVTGLSSASTDDTTRLPVTDVSSASTGQAIPLPVTSPSSASTGDTTPLPVTDASSASTGDTTSLPVTIPSSASSGHTTSLPVTDASSVSTGHATSLLVTDASSVSTGDTTPLPVTDTNSASTGDTTPLHVTDASSVSTGHATSLPVTSLSSASTGDTTPLPVTSPSSASSGHTTPLPVTDASSVPTGHATSLPVTDASSVSTGHATPLPVTDASSVSTGHATPLPVTDTSSVSTGQATPLPVTSLSSASTGDTTPLPVTDTSSASTGQDTPLPVTSLSSVSTGDTTPLPVTNPSSASTGHATPLLVTDASSISTGHATSLLVTDASSVSTGHATALHDTDASSLSTGDTTPLPVTSPSSTSTGDTTPLPVTETSSVSTGHATSLPVTDTSSASTGHATSLPVTDTSSASTGHATPLPVTDTSSASTGQATPLPVTSPSSASTGHAIPLLVTDTSSASTGQATPLPVTSLSSASTGDTTPLPVTDASSVSTGHATSLPVTSLSSVSTGDTTPLPVTSPSSASTGHATPLHVTDASSASTGHATPLPVTSLSSASTGDTTPLPVTSPSSASTGHATPLHVTDASSVSTGDTTPLPVTSSSSASSGHTTPLPVTDASSASTGDTTPLPVTDTSSASTGHATHLPVTGLSSASTGDTTRLPVTNVSSASTGHATPLPVTSTSSASTGDTTPLPGTDTSSVSTGHTTPLLVTDASSVSTGDTTRLPVTSPSSASTGHTTPLPVTDTPSASTGDTTPLPVTNASSLSTRHATSLHVTSPSSASTGHATSLPVTDTSAASTGHATPLPVTSTSSASTGDTTPLPVTDTYSASTGQATPLPVTSLSSVSTGDTTPLPVTSPSSASTGHATPLLVTDASSASTGQATPLPVTSLSSVSTGDTTPLPVTSPSSASTGHATSLPVTDTSSASTGDTTSLPVTDTSSAYTGDTTSLPVTDTSSSSTGDTTPLLVTETSSVSTGDTTPLPVTDTSSASTGHATPLPVTNTSSVSTGHATPLHVTSPSSASTGHTTPLPVTDASSVSTGHATSLPVTDASSVFTGHATSLPVTIPSSASSGHTTPLPVTDASSVSTGHATSLPVTDASSVSTGHATPLPVTDASSVSTGHATPLPLTSLSSVSTGDTTPLPVTDTSSASTGQATPLPVTSLSSVSTGDTTPLPVTDTSSASTGHATSLPVTDTSSASTGHATPLPDTDTSSASTGHATLLPVTDTSSASIGHATSLPVTDTSSISTGHATPLHVTSPSSASTGHATPLPVTDTSSASTGHANPLHVTSPSSASTGHATPLPVTDTSSASTGHATPLPVTSLSSVSTGDTTPLPVTSPSSASTGHTTPLPVTDTSSASTGQATALPVTSTSSASTGDTTPLPVTDTSSASTGQATPLPVTSLSSVSTGDTTPLPVTSPSSASTGHATPLLVTDASSASTGQATPLPVTSLSSVSTGDTTPLPVTSPSSASTGHATSLPVTDTSSASTGDTTSLPVTDTSSAYTGDTTSLPVTDTSSSSTGDTTPLLVTETSSVSTGHATPLLVTDASSASTGHATPLHVTSPSSASTGDTTPVPVTDTSSVSTGHATPLPVTGLSSASTGDTTRLPVTDISSASTGQATPLPVTNTSSVSTGDTMPLPVTSPSSASTGHATPLPVTSTSSASTGHATPVPVTSTSSASTGHTTPLPVTDTSSASTGDTTPLPVTSPSSASTGHTTPLHVTIPSSASTGDTSTLPVTGASSASTGHATPLPVTDTSSVSTGHATPLPVTSLSSVSTGDTTPLPVTDASSASTGQATPLPVTSLSSVSTGDTTPLLVTDASSVSTGHATPLPVTDTSSASTGDTTRLPVTDTSSASTGQATPLPVTSLSSVSTGDTTPLLVTDASSVSTGHATPLPVTDTSSASTGDTTRLPVTDTSSASTGQATPLPVTIPSSSSSGHTTPLPVTSTSSVSTGHVTPLHVTSPSSASTGHVTPLPVTSTSSASTGHATPLLVTDASSVSTGHATPLPVTDASSASTGDTTPLPVTDTSSASTGQATPLPVTSLSSVSTGDTTPLPVTDASSASTGHATPLPVTIPSSVSTGDTMPLPVTSPSSASTGHATPLPVTGLSSASTGDTTPLPVTDTSSASTRHATPLPVTDTSSASTDDTTRLPVTDVSSASTGHATPLPVTSTSSASTGDTTPLPVTDTSSVSTGHATSLPVTSRSSASTGHATPLPVTDTSSVSTGHATPLPVTSTSSVSTGHATPLPVTSPSSASTGHATPVPVTSTSSASTGDTTPLPVTNASSLSTGHATPLHVTSPSSASRGDTSTLPVTDASSASTGHATPLPLTSLSSVSTGDTTPLPVTDTSSASTGQATPLPVTSLSSVSTGDTTPLPVTIPSSASSGHTTSLPVTDASSVSTGHGTPLPVTSTSSASTGDTTPLPVTDTSSASTGHATPLPVTDTSSASTGHATPLPVTSLSSVSTGHATPLAVSSATSASTVSSDSPLKMETPGMTTPSLKTDGGRRTATSPPPTTSQTIISTIPSTAMHTRSTAAPIPILPERGEAIQEFPSSPMGQAPGTWSSSGGPWTSPPHSSSRRLASPLAPLSVIPSTSQTMARSSSQSQTTRFSPTPTHSQQASQAGTLWPWWLRSGTMLTSPLVGGPHFIRNTRRSMVNTAC

SEQ ID NO: 14138 - protein, 60 aa, Homo sapiens
MLQSYISEIGRSAKSYCEHTARTQPTLSDIVVTLVEMGFNVDTLPAYAKRSQRMVITARK

SEQ ID NO: 14139 - protein, 399 aa, Homo sapiens
MLLTVYCVRRDLSEVTFSLQVDADFELHNFRALCELESGIPAAESQIVYAERPLTDNHRSLASYGLKDGDVVILRQKENADPRPPVQFPNLPRIDFSSIAVPGTSSPRQRQPPGTQQSHSSPGEITSSPQGLDNPALLRDMLLANPHELSLLKERNPPLAEALLSGDLEKFSRVLVEQQQDRARREQERIRLFSADPFDLEAQAKIEEDIRQQNIEENMTIAMEEAPESFGQVVMLYINCKVNGHPVKAFVDSGAQMTIMSQACAERCNIMRLVDRRWAGIAKGVGTQKIIGRVHLAQVQIEGDFLPCSFSILEEQPMDMLLGLDMLKRHQCSIDLKKNVLVIGTTGSQTTFLPEGELPECARLAYGAGREDVRPEEIADQELAEALQKSAEDAERQKP

SEQ ID NO: 14140 - protein, 206 aa, Homo sapiens
MDTIFLWSLLLLFFGSQASRCSAQKNTEFAVDLYQEVSLSHKDNIIFSPLGITLVLEMVQLGAKGKAQQQIRQTLKQQETSAGEEFFVLKSFFSAISEKKQEFTFNLANALYLQEGFTVKEQYLHGNKEFFQSAIKLVDFQDAKACAEMISTWVERKTDGKIKDMFSGEEFGPLTRLVLVNAIYFKGDWKQKFRKEDTQLINFTKK

SEQ ID NO: 14141 - protein, 123 aa, Homo sapiens
MADAAATAGAGGSGTRSGSKQSTNPADNYHLARRRTLQVVVSSLLTEAGFESAEKASVETLTEMLQSYISEIGRSAKSYCEHTARTQPTLSDIVVTLVEMGFNVDTLPAYAKRSQRMVITARK

SEQ ID NO: 14142 - protein, 416 aa, Homo sapiens
MAEEQGRERDSVPKPSVLFLHPDLGVGGAERLVLDAALALQARGCSVKIWTAHYDPGHCFAESRELPVRCAGDWLPRGLGWGGRGAAVCAYVRMVFLALYVLFLADEEFDVVVCDQVSACIPVFRLARRRKKILFYCHFPDLLLTKRDSFLKRLYRAPIDWIEEYTTGMADCILVNSQFTAAVFKETFKSLSHIDPDVLYPSLNVTSFDSVVPEKLDDLVPKGKKFLLLSINRYERKKNLTLALEALVQLRGRLTSQDWERVHLIVAGGYDERVLENVEHYQELKKMVQQSDLGQYVTFLRSFSDKQKISLLHSCTCVLYTPSNEHFGIVPLEAMYMQCPVIAVNSGGPLESIDHSVTGFLCEPDPVHFSEAIEKFIREPSLKATMGLAGRARVKEKFSPEAFTEQLYRYVTKLLV

SEQ ID NO: 14143 - protein, 86 aa, Homo sapiens
MGSNLSPQLCLMPFILGLLSGVRVSFWLLPVPCADTYLQIYGVLEHPEDSRPKDCQEGRVQSNPLSKTTRLRERGILAPVSLLQCE

SEQ ID NO: 14144 - protein, 48 aa, Homo sapiens
MSQDGASQFQEVIRQELELSVKKELEKILTTASSHEFERVTSDRTMLL

SEQ ID NO: 14145 - protein, 70 aa, Homo sapiens
MFTRAQVRRILQRVPGKQRFGIYRFLPFFFVLGGTMEWIMIKVRVGQETFYDVYRRKASERQYQRRLEDE

SEQ ID NO: 14146 - protein, 583 aa, Homo sapiens
MATARTFGPEREAEPAKEARVVGSELVDTYTVYIIQVTDGSHEWTVKHRYSDFHDLHEKLVAERKIDKNLLPPKKIIGKNSRSLVEKREKDLEVYLQKLLAAFPGVTPRVLAHFLHFHFYEINGITAALAEELFEKGEQLLGAGEVFAIGPLQLYAVTEQLQQGKPTCASGDAKTDLGHILDFTCRLKYLKVSGTEGPFGTSNIQEQLLPFDLSIFKSLHQVEISHCDAKHIRGLVASKPTLATLSVRFSATSMKEVLVPEASEFDEWEPEGTTLEGPVTAVIPTWQALTTLDLSHNSVSEIDESVKLIPKIEFLDLSHNGLLVVDNLQHLYNLVHLDLSYNKLSSLEGLHTKLGNIKTLNLAGNLLESLSGLHKLYSLVNLDLRDNRIEQMEEVRSIGSLPCLEHVSLLNNPLSIIPDYRTKVLAQFGERASEVCLDDTVTTEKELDTVEVLKAIQKAKEVKSKLSNPEKKGGEDSRLSAAPCIRPSSSPPTVAPASASLPQPILSNQGNRVCILLLVEPHSPAWAPWLGWGWGRGASTCFQQGQTQGGQCLLQAGPRGGTHGRGAWPDASCCLLGEDSQLL

SEQ ID NO: 14147 - protein, 935 aa, Homo sapiens
MKPPRPVRTCSKVLVLLSLLAIHQTTTAEKNGIDIYSLTVDSRVSSRFAHTVVTSRVVNRANTVQEATFQMELPKKAFITNFSMIIDGMTYPGIIKEKAEAQAQYSAAVAKGKSAGLVKATGRNMEQFQVSVSVAPNAKITFELVYEELLKRRLGVYELLLKVRPQQLVKHLQMDIHIFEPQGISFLETESTFMTNQLVDALTTWQNKTKAHIRFKPTLSQQQKSPEQQETVLDGNLIIRYDVDRAISGGSIQIENGYFVHYFAPEGLTTMPKNVVFVIDKSGSMSGRKIQQTREALIKILDDLSPRDQFNLIVFSTEATQWRPSLVPASAENVNKARSFAAGIQALGGTNINDAMLMAVQLLDSSNQEERLPEGSVSLIILLTDGDPTVGETNPRSIQNNVREAVSGRYSLFCLGFGFDVSYAFLEKLALDNGGLARRIHEDSDSALQLQDFYQEVANPLLTAVTFEYPSNAVEEVTQNNFRLLFKGSEMVVAGKLQDRGPDVLTATVSGKLPTQNITFQTESSVAEQEAEFQSPKYIFHNFMERLWAYLTIQQLLEQTVSASDADQQALRNQALNLSLAYSFVTPLTSMVVTKPDDQEQSQVAEKPMEGESRNRNVHSGSTFFKYYLQGAKIPKPGLDHTEASFSPRRGWNRQAGAAGSRMNFRPGVLSSRQLGLPGPPDVPDHAAYHPFRRLAILPASAPPATSNPDPAVSRVMNMKIEETTMTTQTPAPIQAPSAILPLPGQSVERLCVDPRHRQGPVNLLSDPEQGVEVTGQYEREKAGFSWIEVTFKNPLVWVHASPEHVVVTRNRRSSAYKWKETLFSVMPGLKMTMDKTGLLLLSDPDKVTIGLLFWDGRGEGLRLLLRDTDRFSSHVGGTLGQFYQEVLWGSPAASDDGRRTLRVQGNDHSATRERRLDYQEGPPGVEISCWSVEL

SEQ ID NO: 14148 - protein, 634 aa, Homo sapiens
MLSSRDQRVVTSEDQVQEGTKVLKLKTKMADKENMKRPAESKNNTVVGKHCIPLKPSNELTNSTVVIDTHKPKDSNQTPHLLLTEDDPQSQHMTLSQAFHLKNNSKKKQMTTEKQKQDANMPKKPVLGSYRGQIVQSKINSFRKPLQVKDESSAATKKLSATIPKATKPQPVNTSSVTVKSNRSSNMTATTKFVSTTSQNTQLVRPPIRSHHSNTRDTVKQGISRTSANVTIRKGPHEKELLQSKTALSSVKTSSSQGIIRNKTLSRSIASEVIARPASLSNDKLMEKSEPVDQRRHTAGKAIVDSRSAQPKETSEERKARLSEWKAGKGRVLKRPPNSVVTQHEPAGQNEKPVGSFWTTMAEEDEQRLFTEKVNNTFSECLNLINEGCPKEDILVTLNDLIKNIPDAKKLVKYWICLALIEPITSPIENIIAIYEKAILAGAQPIEEMRHTIVDILTMKSQEKANLGENMEKSCASKEEVKEVSIEDTGVDVDPEKLEMESKLHRNLLFQDCEKEQDNKTKDPTHDVKTPNTETRTSCLIKYNVSTTPYLQSVKKKVQFDGTNSAFKELKFLTPVRRSRRLQEKTSKLPDMLKDHYPCVSSLEQLTELGRETDAFVCRPNAALCRVYYEADTT

SEQ ID NO: 14149 - protein, 168 aa, Homo sapiens
MKGRIELGDVTPHNIKQLKRLNQVIFPVSYNDKFYKDVLEVGELAKLAYFNDIAVGAVCCRVDHSQNQKRLYIMTLGCLAPYRRLGIGTKMLNHVLNICEKDGTFDNIYLHVQISNESAIDFYRKFGFEIIETKKNYYKRIEPADAHVLQKNLKVPSGQNADVQKTDN

SEQ ID NO: 14150 - protein, 253 aa, Homo sapiens
MSVGTLYEKQNGKESSGAELPGQVISMAASTLANLAISITGYESSSEDQPSTQPAEAVDRGESAPTLSTSPSPSSPSPTSPSPTLGRRRPEIGTFLRKKKTSDIYFVSLVWAIVVMQIWLNLWIVQLLPVPIAVWILKKLVIHFGVVDFLEKRYHVWWGIIESFLKERQGALAPWPIVGLGKFLLKVDSKMIIWLEKMLDKIISIFIIFLLVIGTLLLALLLTAKVHQESVHMIEVTSNLINETLANHPEWAK

SEQ ID NO: 14151 - protein, 261 aa, Homo sapiens
MNPLLILTFVAAALAAPFDDDDKIVGGYNCEENSVPYQVSLNSGYHFCGGSLINEQWVVSAGHCYKSAIKSKFSGRGCEYHRIQVRLGEHNIEVLEGNEQFINAAKIIRHPQYDRKTLNNDIMLIKLSSRAVINARVSTISLPTAPPATGTKCLISGWGNTASSGADYPDELQCLDAPVLSQAKCEASYPGKITSNMFCVGFLEGGKDSCQGDSGGPVVCNGQLQGVVSWGDGCAQKNKPGVYTKVYNYVKWIKNTIAANS

SEQ ID NO: 14152 - protein, 418 aa, Homo sapiens
MHGVCKEGDNCRYSHDLSDSPYSVVCKYFQRGYCIYGDRCRYEHSKPLKQEEATATELTTKSSLAASSSLSSIVGPLVEMNTGEAESRNSNFATVGAGSEDWVNAIEFVPGQPYCGRTAPSCTEAPLQGSVTKEESEKEQTAVETKKQLCPYAAVGECRYGENCVYLHGDSCDMCGLQVLHPMDAAQRSQHIKSCIEAHEKDMELSFAVQRSKDMVCGICMEVVYEKANPSERRFGILSNCNHTYCLKCIRKWRSAKQFESKIIKSCPECRITSNFVIPSEYWVEEKEEKQKLILKYKEAMSNKACRYFDEGRGSCPFGGNCFYKHAYPDGRREEPQRQKVGTSSRYRAQRRNHFWELIEERENSNPFDNDEEEVVTFELGEMLLMLLAAGGDDELTDSEDEWDLFHDELEDFYDLDL

SEQ ID NO: 14153 - protein, 249 aa, Homo sapiens
MEMGRRIHLELRNRTPSDVKELVLDNSRSNEGKLEGLTDEFEELEFLSTINVGLTSIANLPKLNKLKKLELSDNRVSGGLEVLAEKCPNLTHLNLSGNKIKDLSTIEPLKKLENLKSLDLFNCEVTNLNDYRENVFKLLPQLTYLDGYDRDDKEAPDSDAEGYVEGLDDEEEDEDEEEYDEDAQVVEDEEDEDEEEEGEEEDVSGEEEEDEEGYNDGEVDDEEDEEELGEEERGQKRKREPEDEGEDDD

SEQ ID NO: 14154 - protein, 93 aa, Homo sapiens
MVHVARLLLLLLTFFLRTDAETPPRFTRTPVDQTGVSGGVASFICQATGDPRPKIVWNKKGKKVSNQRFEVIEFDDGSGSVLRIQPLRTPRDE

SEQ ID NO: 14155 - protein, 769 aa, Homo sapiens
MATEGMILTNHDHQIRVGVLTVSDSCFRNLAEDRSGINLKDLVQDPSLLGGTISAYKIVPDEIEEIKETLIDWCDEKELNLILTTGGTGFAPRDVTPEATKEVIEREAPGMALAMLMGSLNVTPLGMLSRPVCGIRGKTLIINLPGSKKGSQECFQFILPALPHAIDLLRDAIVKVKEVHDELEDLPSPPPPLSPPPTTSPHKQTEDKGVQCEEEEEEKKDSGVASTEDSSSSHITAAAIAAKKHPFYTSPAVVMAHGEQPIPGLINYSHHSTDERIPDSIISRGVQVLPRDTASLSTTPSESPRAQATSRLSTASCPTPKVQSRCSSKENILRASHSAVDITKVARRHRMSPFPLTSMDKAFITVLEMTPVLGTEIINYRDGMGRVLAQDVYAKDNLPPFPASVKDGYAVRAADGPGDRFIIGESQAGEQPTQTVMPGQVMRVTTGAPIPCGADAVVQVEDTELIRESDDGTEELEVRILVQARPGQDIRPIGHDIKRGECVLAKGTHMGPSEIGLLATVGVTEVEVNKFPVVAVMSTGNELLNPEDDLLPGKIRDSNRSTLLATIQEHGYPTINLGIVGDNPDDLLNALNEGISRADVIITSGGVSMGEKDYLKQVLDIDLHAQIHFGRVFMKPGLPTTFATLDIDGVRKIIFALPGNPVSAVVTCNLFVVPALRKMQGILDPRPTIIKARLSCDVKLDPRPEYHRCILTWHHQEPLPWAQSTGNQMSSRLMSMRSANGLLMLPPKTEQYVELHKGEVVDVMVIGRL

SEQ ID NO: 14156 - protein, 266 aa, Homo sapiens
MRLLPRLLLLLLLVFPATVLFRGGPRGLLAVAQDLTEDEETVEDSIIEDEDDEAEVEEDEPTDLVEDKEEEDVSGEPEASPSADTTILFVKGEDFPANNIVKFLVGFTNKGTEDFIVESLDASFRYPQDYQFYIQNFTALPLNTVVPPQRQATFEYSFIPAEPMGGRPFGLVINLNYKDLNGNVFQDAVFNQTVTVIEREDGLDGETIFMYMFLAGLGLLVIVGLHQLLESRKRKRPIQKVEMGTSSQNDVDMSWIPQETLNQISK

SEQ ID NO: 14157 - protein, 405 aa, Homo sapiens
MAAALRVAAVGARLSVLASGLRAAVRSLCSQATSVNERIENKRRTALLGGGQRRIDAQHKRGKLTARERISLLLDPGSFVESDMFVEHRCADFGMAADKNKFPGDSVVTGRGRINGRLVYVFSQDFTVFGGSLSGAHAQKICKIMDQAITVGAPVIGLNDSGGARIQEGVESLAGYADIFLRNVTASGVIPQISLIMGPCAGGAVYSPALTDFTFMVKDTSYLFITGPDVVKSVTNEDVTQEELGGAKTHTTMSGVAHRAFENDVDALCNLRDFFNYLPLSSQDPAPVRECHDPSDRLVPELDTIVPLESTKAYNMVDIIHSVVDEREFFEIMPNYAKNIIVGFARMNGRTVGIVGNQPKVASGCLDINSSVKGARFVRFCDAFNIPLITFVDVPGFLPGLWRCL

SEQ ID NO: 14158 - protein, 147 aa, Homo sapiens
MAFELATGDYLFEPHSGEDYSRDEDHIAHIIELLGSIPRHFALSGKYSREFFNRRDHIALIIELLGKVPRKYAMLGKYSKEFFTRKGELRHITKLKPWSLFDVLVEKYGWPHEDAAQFTDFLIPMLEMVPEKRASAGECLRHPWLNS

SEQ ID NO: 14159 - protein, 466 aa, Homo sapiens
MKSLSLLLAVALGLATAVSAGPAVIECWFVEDASGKGLAKRPGALLLRQGPGEPPPRPDLDPELYLSVHDPAGALQAAFRRYPRGAPAPHCEMSRFVPLPASAKWASGLTPAQNCPRALDGAWLMVSISSPVLSLSSLLRPQPEPQQEPVLITMATVEMGFHHVGQAALELLTSVVLTVLTHTPAPRVRLGQDALLDLSFAYMPPTSEAASSLAPGPPPFGLEWRRQHLGKGHLLLAATPGLNGQMPAAQEGAVAFAAWDDDEPWGPWTGNGTFWLPTVQPFQEGTYLATIHLPYLQGQVTLELAVYKPPKVSLMPATLARAAPGEAPPELLCLVSHFYPSGGLEVEWELRGGPGGRSQKAEGQRWLSALRHHSDGSVSLSGHLQPPPVTTEQHGARYACRIHHPSLPASGRSAEVTLEVAGLSGPSLEDSVGLFLSAFLLLGLFKALGWAAVYLSTCKDSKKKAE

SEQ ID NO: 14160 - protein, 117 aa, Homo sapiens
MDMRVPAQRLGLLLLWFPGARCAIRMTQSPFSLSASVGDRVTITCWASQGISSYLAWYQQKPAKAPKLFIYYASSLQSGVPSRFSGSGSGTDYTLTISSLQPEDFATYYCQQYYSTP

SEQ ID NO: 14161 - protein, 602 aa, Homo sapiens
MPYKLKKEKEPPKVAKCTAKPSSSGKDGGGENTEEAQPQPQPQPQPQAQSQPPSSNKRPSNSTPPPTQLSKIKYSGGPQIVKKERRQSSSRFNLSKNRELQKLPALKDSPTQEREELFIQKLRQCCVLFDFVSDPLSDLKFKEVKRAGLNEMVEYITHSRDVVTEAIYPEAVTMFSVNLFRTLPPSSNPTGAEFDPEEDEPTLEAAWPHLQLVYEFFLRFLESPDFQPNIAKKYIDQKFVLALLDLFDSEDPRERDFLKTILHRIYGKFLGLRAYIRRQINHIFYRFIYETEHHNGIAELLEILGSIINGFALPLKEEHKMFLIRVLLPLHKVKSLSVYHPQLAYCVVQFLEKESSLTEPVIVGLLKFWPKTHSPKEVMFLNELEEILDVIEPSEFSKVMEPLFRQLAKCVSSPHFQVAERALYYWNNEYIMSLISDNAARVLPIMFPALYRNSKSHWNKTIHGLIYNALKLFMEMNQKLFDDCTQQYKAEKQKGRFRMKEREEMWQKIEELARLNPQYPMFRAPPPLPPVYSMETETPTAEDIQLLKRTVETEAVQMLKDIKKEKVLLRRKSELPQDVYTIKALEAHKRAEEFLTASQEAL

SEQ ID NO: 14162 - protein, 910 aa, Homo sapiens
MGVRGLQGFVGSTCPHICTVVNFKELAEHHRSKYPGCTPTIVVDAMCCLRYWYTPESWICGGQWREYFSALRDFVKTFTAAGIKLIFFFDGMVEQDKRDEWVKRRLKNNREISRIFHYIKSHKEQPGRNMFFIPSGLAVFTRFALKTLGQETLCSLQEADYEVASYGLQHNCLGILGEDTDYLIYDTCPYFSISELCLESLDTVMLCREKLCESLGLCVADLPLLACLLGNDIIPEGMFESFRYKCLSSYTSVKENFDKKGNIILAVSDHISKVLYLYQGEKKLEEILPLGPNKALFYKGMASYLLPGQKSPWFFQKPKGVITLDKQVISTSSDAESREEVPMCSDAESRQEVPMCTGPESRREVPVYTDSEPRQEVPMCSDPEPRQEVPTCTGPESRREVPMCSDPEPRQEVPMCTGPEARQEVPMYTDSEPRQEVPMYTDSEPRQEVPMYTGSEPRQEVPMYTGPESRQEVPMYTGPESRQEVLIRTDPESRQEIMCTGHESKQEVPICTDPISKQEDSMCTHAEINQKLPVATDFEFKLEALMCTNPEIKQEDPTNVGPEVKQQVTMVSDTEILKVARTHHVQAESYLVYNIMSSGEIECSNTLEDELDQALPSQAFIYRPIRQRVYSLLLEDCQDVTSTCLAVKEWFVYPGNPLRHPDLVRPLQMTIPGGTPSLKILWLNQEPEIQVRRLDTLLACFNLSSSREELQAVESPFQALCCLLIYLFVQVDTLCLEDLHAFIAQALCLQGKSTSQLVNLQPDYINPRAVQLGSLLVRGLTTLVLVNSACGFPWKTSDFMPWNVFDGKLFHQKYLQSEKGYAVEVLLEQNRSRLTKFHNLKAVVCKACMKENRRITGRAHWGSHHAGRWGRQGSSYHRTGSGYSRSSQGQPWRDQGPGSRQYEHDQWRRY

SEQ ID NO: 14163 - protein, 393 aa, Homo sapiens
MATATRLLGWRVASWRLRPPLAGFVSQRAHSLLPVDDAINGLSEEQRQEFWKQLGNLGVLGITAPVQYGGSGLGYLEHVLVMEEISRASGAVGLSYGAHSNLCINQLVRNGNEAQKEKYLPKLISGEYIGALAMSEPNAGSDVVSMKLKAEKKGNHYILNGNKFWITNGPDADVLIVYAKTDLAAVPASRGITAFIVEKGMPGFSTSKKLDKLGMRGSNTCELIFEDCKIPAANILGHENKGVYVLMSGLDLERLVLAGGPLGLMQAVLDHTIPYLHVREAFGQKIGHFQLMQGKMADMYTRLMACRQYVYNVAKACDEGHCTAKDCAGVILYSAECATQVALDGIQCFGGNGYINDFPMGRFLRDAKLYEIGAGTSEVRRLVIGRAFNADFH

SEQ ID NO: 14164 - protein, 1551 aa, Homo sapiens
MIAEPAHFYLFGLICLCSGSRLRQEDFPPRIVEHPSDLIVSKGEPATLNCKAEGRPTPTIEWYKGGERVETDKDDPRSHRMLLPSGSLFFLRIVHGRKSRPDEGVYVCVARNYLGEAVSHNASLEVAILRDDFRQNPSDVMVAVGEPAVMECQPPRGHPEPTISWKKDGSPLDDKDERITIRGGKLMITYTRKSDAGKYVCVGTNMVGERESEVAELTVLERPSFVKRPSNLAVTVDDSAEFKCEARGDPVPTVRWRKDDGELPKSRYEIRDDHTLKIRKVTAGDMGSYTCVAENMVGKAEASATLTVQVGSEPPHFVVKPRDQVVALGRTVTFQCEATGNPQPAIFWRREGSQNLLFSYQPPQSSSRFSVSQTGDLTITNVQRSDVGYYICQTLNVAGSIITKAYLEVTDVIADRPPPVIRQGPVNQTVAVDGTFVLSCVATGSPVPTILWRKDGVLVSTQDSRIKQLENGVLQIRYAKLGDTGRYTCIASTPSGEATWSAYIEVQEFGVPVQPPRPTDPNLIPSAPSKPEVTDVSRNTVTLSWQPNLNSGATPTSYIIEAFSHASGSSWQTVAENVKTETSAIKGLKPNAIYLFLVRAANAYGISDPSQISDPVKTQDVLPTSQGVDHKQVQRELGNAVLHLHNPTVLSSSSIEVHWTVDQQSQYIQGYKILYRPSGANHGESDWLVFEVRTPAKNSVVIPDLRKGVNYEIKARPFFNEFQGADSEIKFAKTLEEAPSAPPQGVTVSKNDGNGTAILVSWQPPPEDTQNGMVQEYKVWCLGNETRYHINKTVDGSTFSVVIPFLVPGIRYSVEVAASTGAGSGVKSEPQFIQLDAHGNPVSPEDQVSLAQQISDVVKQPAFIAGIGAACWIILMVFSIWLYRHRKKRNGLTSTYAGIRKVTYQRGGEAVSSGGRPGLLNISEPAAQPWLADTWPNTGNNHNDCSISCCTAGNGNSDSNLTTYSRPGQPTPYATTQLIQSNLSNNMNNGSGDSGEKHWKPLGQQKQEVAPVQYNIVEQNKLNKDYRANDTVPPTIPYNQSYDQNTGGSYNSSDRGSSTSGSQGHKKGARTPKVPKQGGMNWADLLPPPPAHPPPHSNSEEYNISVDESYDQEMPCPVPPARMYLQQDELEEEEDERGPTPPVRGAASSPAAVSYSHQSTATLTPSPQEELQPMLQDCPEETGHMQHQPDRRRQPVSPPPPPRPISPPHTYGYISGPLVSDMDTDAPEEEEDEADMEVAKMQTRRLLLRGLEQTPASSVGDLESSVTGSMINGWGSASEEDNISSGRSSVSSSDGSFFTDADFAQAVAAAAEYAGLKVARRQMQDAAGRRHFHASQCPRPTSPVSTDSNMSAAVMQKTRPAKKLKHQPGHLRRETYTDDLPPPPVPPPAIKSPTAQSKTQLEVRPVVVPKLPSMDARTDRSSDRKGSSYKGREVLDGRQVVDMRTNPGDPREAQEQQNDGKGRGNKAAKRDLPPAKTHLIQEDILPYCRPTFPTSNNPRDPSSSSSMSSRGSGSRQREQANVGRRNIAEMQVLGGYERGEDNNEELEETES

SEQ ID NO: 14165 - protein, 51 aa, Homo sapiens
MFESFNVPGLYIAVQAVLALAASWTSRQVGERTLTGIVIDSGDGVTHVIPV

SEQ ID NO: 14166 - protein, 529 aa, Homo sapiens
MSGLLTDPEQRAQEPRYPGFVLGLDVGSSVIRCHVYDRAARVCGSSVQKVENLYPQIGWVEIDPDVLWIQFVAVIKEAVKAAGIQMNQIVGLGISTQRATFITWNKKTGNHFHNFISWQDLRAVELVKSWNNSLLMKIFHSSCRVLHFFTRSKRLFTASLFTFTTQQTSLRLVWILQNLTEVQKAVEEENCCFGTIDTWLLYKLTKGSVYATDFSNASTTGLFDPYKMCWSGMITSLISIPLSLLPPVRDTSHNFGSVDEEIFGVPIPIVALVADQQSAMFGECCFQTGDVKLTMGTGTFLDINTGNSLQQTTGGFYPLIGWKIGQEVVCLAESNAGDTGTAIKWAQQLDLFTDAAETEKMAKSLEDSEGVCFVPSFSGLQAPLNDPWACASFMGLKPSTSKYHLVRAILESIAFRNKQLYEMMKKEIHIPVRKIRADGGVCKNGFVMQMTSDLINENIDRPADIDMSCLGAASLAGLAVGFWTDKEELKKLRQSEVVFKPQKKCQEYEMSLENWAKAVKRSMNWYNKT

SEQ ID NO: 14167 - protein, 580 aa, Homo sapiens
MVLVGTQDAISAANPRVIDDSRARKLSTDLKRCTYYETCATYGLNVERVFQDVAQKVVALRKKQQLAIGPCKSLPNSPSHSAVSAASIPAVHINQATNGGGSAFSDYSSSVPSTPSISQRELRIETIAASSTPTPIRKQSKRRSNIFTSRKGADLDREKKAAECKVDSIGSGRAIPIKQGILLKRSGKSLNKEWKKKYVTLCDNGLLTYHPSLHDYMQNIHGKEIDLLRTTVKVPGKRLPRATPATAPGTSPRANGLSVERSNTQLGGGTEAEESFEFVVVSLTGQTWHFEASTAEERELWVQSVQAQILASLQGCRSAKDKTRLGNQNAALAVQAVRTVRGNSFCIDCDAPNPDWASLNLGALMCIECSGIHRHLGAHLSRVRSLDLDDWPPELLAVMTAMGNALANSVWEGALGGYSKPGPDACREEKERWIRAKYEQKLFLAPLPSSDVPLGQQLLRAVVEDDLRLLVMLLAHGSKEEVNETYGDGDGRTALHLSSAMANVVFTQLLIWYGVDVRSRDARGLTPLAYARRAGSQECADILIQHGCPGEGCGLAPTPNREPANGTNPSAELHRSPSLL

SEQ ID NO: 14168 - protein, 92 aa, Homo sapiens
MAVWLAQWLGPLLLVSLWGLLAPASLLRRLGEHIQQFQESSAQGLGLSLGPGAAALPKVGWLEQLLDPFNVSDRRSFLQAIPQPWPQPGAPW

SEQ ID NO: 14169 - protein, 292 aa, Homo sapiens
MTVSKFMAIQKALQPDWFQCLSDGEVSCKEATSIKRVRKSVDRSLLFLDNCLRLQEESEVLQKSVIIGVIEGGDVMEERLRSARETAKRPVGGFLLDGFQGNPTTLEARLRLLSSVTAELPEDKPRLISGVSRPDEVLECIERGVDLFESFFPYQVTERGCALTFSFDYQPNPEETLLQQNGTQEEIKCMDQIKKIETTGCNQEITSFEINLKEKKYQEDFNPLVRGCSCYCCKNHTRAYIHHLLVTNELLAGVLLMMHNFEHYFGFFHYIREALKSDKLAQLKELIHRQAS

SEQ ID NO: 14170 - protein, 92 aa, Homo sapiens [sequence omitted]

SEQ ID NO: 14171 - protein, 78 aa, Homo sapiens
MLLLGLLLLLPLLAGARLLWNWWKLRSLHLPPLAPGFLHLLQPDLPIYLLGLTQKFGPIYRLHLGLQAPTSSCRQAGV

SEQ ID NO: 14172 - protein, 1445 aa, Homo sapiens
MRRLLEPCWWILFLKITSSVLHYVVCFPALTEGYVGALHENRHGSAVQIRRRKASGDPYWAYSGAYGPEHWVTSSVSCGGRHQSPIDILDQYARVGEEYQELQLDGFDNESSNKTWMKNTGKTVAILLKDDYFVSGAGLPGRFKAEKVEFHWGHSNGSAGSEHSINGRRFPVEMQIFFYNPDDFDSFQTAISENRIIGAMAIFFQVSPRDNSALDPIIHGLKGVVHHEKETFLDPFVLRDLLPASLGSYYRYTGSLTTPPCSEIVEWIVFRRPVPISYHQLEAFYSIFTTEQQDHVKSVEYLRNNFRPQQRLHDRVVSKSAVRDSWNHDMTDFLENPLGTEASKVCSSPPIHMKVQPLNQTALQVSWSQPETIYHPPIMNYMISYSWTKNEDEKEKTFTKDSDKDLKATISHVSPDSLYLFRVQAVCRNDMRSDFSQTMLFQANTTRIFQGTRIVKTGVPTASPASSADMAPISSGSSTWTSSGIPFSFVSMATGMGPSSSGSQATVASVVTSTLLAGLGFGGGGISSFPSTVWPTRLPTAASASKQAARPVLATTEALASPGPDGDSSPTKDGEGTEEGEKDEKSESEDGEREHEEDGEKDSEKKEKSGVTHAAEERNQTEPSPTPSSPNRTAEGGHQTIPGHEQDHTAVPTDQTGGRRDAGPGLDPDMVTSTQVPPTATEEQYAGSDPKRPEMPSKKPMSRGDRFSEDSRFITVNPAEKNTSGMISRPAPGRMEWIIPLIVVSALTFVCLILLIAVLVYWRGCNKIKSKGFPRRFREVPSSGERGEKGSRKCFQTAHFYVEDSSSPRVVPNESIPIIPIPDDMEAIPVKQFVKHIGELYSNNQHGFSEDFEEVQRCTADMNITAEHSNHPENKHKNRYINILAYDHSRVKLRPLPGKDSKHSDYINANYVDGYNKAKAYIATQGPLKSTFEDFWRMIWEQNTGIIVMITNLVEKGRRKCDQYWPTENSEEYGNIIVTLKSTKIHACYTVRRFSIRNTKVKKGQKGNPKGRQNERVVIQYHYTQWPDMGVPEYALPVLTFVRRSSAARMPETGPVLVHCSAGVGRTGTYIVIDSMLQQIKDKSTVNVLGFLKHIRTQRNYLVQTEEQYIFIHDALLEAILGKETEVSSNQLHSYVNSILIPGVGGKTRLEKQFKLVTQCNAKYVECFSAQKECNKEKNRNSSVVPSERARVGLAPLPGMKGTDYINASYIMGYYRSNEFIITQHPLPHTTKDFWRMIWDHNAQIIVMLPDNQSLAEDEFVYWPSREESMNCEAFTVTLISKDRLCLSNEEQIIIHDFILEATQDDYVLEVRHFQCPKWPNPDAPISSTFELINVIKEEALTRDGPTIVHDEYGAVSAGMLCALTTLSQQLENENAVDVFQVAKMINLMRPGVFTDIEQYQFIYKAMLSLVSTKENGNGPMTVDKNGAVLIADESDPAESMESLV

SEQ ID NO: 14173 - protein, 157 aa, Homo sapiens
MSRELAPLLLLLLSIHSALAMRICSFNVRSFGESKQEDKNAMDVIVKVIKRCDIILVMEIKDSNNRICPILMEKLNRNSRRGITYNYVISSRLGRNTYKEQYAFLYKEKLVSVKRSYHYHDYQDGDADVFSREPFVVWFQSPHTAVKDFVIIPLHTT

SEQ ID NO: 14174 - protein, 564 aa, Homo sapiens
MSLLMFTQLLLCGFLYVRVDGSRLRQEDFPPRIVEHPSDVIVSKGEPTTLNCKAEGRPTPTIEWYKDGERVETDKDDPRSHRMLLPSGSLFFLRIVHGRRSKPDEGSYVCVARNYLGEAVSRNASLEVALLRDDFRQNPTDVVVAAGEPAILECQPPRGHPEPTIYWKKDKVRIDDKEERISIRGGKLMISNTRKSDAGMYTCVGTNMVGERDSDPAELTVFERPTFLRRPINQVVLEEEAVEFRCQVQGDPQPTVRWKKDDADLPRGRYDIKDDYTLRIKKTMSTDEGTYMCIAENRVGKMEASATLTVRAPPQFVVRPRDQIVAQGRTVTFPCETKGNPQPAVFWQKEGSQNLLFPNQPQQPNSRCSVSPTGDLTITNIQRSDAGYYICQALTVAGSILAKAQLEVTDVLTDRPPPIILQGPANQTLAVDGTALLKCKATGDPLPVISWLKEGFTFPGRDPRATIQEQGTLQIKNLRISDTGTYTCVATSSSGETSWSAVLDVTESGATISKNYDLSDLPGPPSKPQVTDVTKNSVTLSWQPGTPGTLPASAYIIEAFRYVV

SEQ ID NO: 14175 - protein, 428 aa, Homo sapiens
MLPRLLLLICAPLCEPAELFLIASPSHPTEGSPVTLTCKMPFLQSSDAQFQFCFFRDTRALGPGWSSSPKLQIAAMWKEDTGSYWCEAQTMASKVLRSRRSQINVHRVPVADVSLETQPPGGQVMEGDRLVLICSVAMGTGDITFLWYKGAVGLNLQSKTQRSLTAEYEIPSVRESDAEQYYCVAENGYGPSPSGLVSITVRIPVSRPILMLRAPRAQAAVEDVLELHCEALRGSPPILYWFYHEDITLGSRSAPSGGGASFNLSLTEEHSGNYSCEANNGLGAQRSEAVTLNFTVPTGARSNHLTSGVIEGLLSTLGPATVALLFCYGLKRKIGRRSARDPLRSLPSPLPQEFTYLNSPTPGQLQPIYENVNVVSGDEVYSLAYYNQPEQESVAETLGTHMEDKVSLDIYSRLRKANITDVDYEDAM

SEQ ID NO: 14176 - protein, 120 aa, Homo sapiens
MRLPAQLLGLLMLWVPGSSGDVVMTQSPLSLPVTLGQPASISCRSSQSLVYSDGNTYLNWFQQRPGQSPRRLIYKVSNRDSGVPDRFSGSGSGTDFTLKISRVEAEDVGVYYCMQGTHWP

SEQ ID NO: 14177 - protein, 806 aa, Homo sapiens
MAVARVDAALPPGEGSVVNWSGQGLQKLGPNLPCEADIHTLILDKNQIIKLENLEKCKRLIQLSVANNRLVRMMGVAKLTLLRVLNLPHNSIGCVEGLKELVHLEWLNLAGNNLKAMEQINSCTALQHLDLSDNNISQIGDLSKLVSLKTLLLHGNIITSLRMAPAYLPRSLAILSLAENEIRDLNEISFLASLTELEQLSIMNNPCVMATPSIPGFDYRPYIVSWCLNLRVLDGYVISQKESLKAEWLYSQGKGRAYRPGQHIQLVQYLATVCPLTSTLGLQTAEDAKLEKILSKQRFHQRQLMNQSQNEELSPLVPVETRASLIPEHSSPVQDCQISQESESTFMPVASGLSPLSPTVELRLQGINLGLEDDGVADESVKGLESQVLDKEEEQPLWAANENSVQMMRSEINTEVNEKAGLLPCPEPTIISAILKDDNHSLTFFPESTEQKQSDIKKPENTQPENKETISQATSEKLPMILTQRSVALGQDKVALQKLNDAATKLQACWRGFYARNYNPQAKDVRYEIRLRRMQEHIVCLTDEIRRLRKERDEERIKKFVQEEAFRFLWNQVRSLQVWQQTVDQRLSSWHTDVPPISSTLVPSKHPLFTQSQESSCDQNADWFIASDVAPQEKSLPEFPDSGFHSSLTEQVHSLQHSLDFEKSSTEGSESSIMGNSIDTVRYGKESDLGDVSEEHGEWNKESSNNEQDNSLLEQYLTSVQQLEDADERTNFDTETRDSKLHIACFPVQLDTLSDGASVDESHGISPPLQGEISQTQENSKLNAEVQGQQPECDSTFQLLHVGVTV

SEQ ID NO: 14178 - protein, 1801 aa, Homo sapiens
MAVPGSFPLLVEGSWGPDPPKNLNTKLQMYFQSPKRSGGGECEVRQDPRSPSRFLVFFYPEDVRQKVLERKNHELVWQGKGTFKLTVQLPATPDEIDHVFEEELLTKESKTKEDVKEPDVSEELDTKLPLDGGLDKMEDIPEECENISSLVAFENLKANVTDIMLILLVENISGLSNDDFQVEIIRDFDVAVVTFQKHIDTIRFVDDCTKHHSIKQLQLSPRLLEVTNTIRVENLPPGADDYSLKLFFENPYNGGGRVANVEYFPEESSALIEFFDRKVLDTIMATKLDFNKMPLSVFPYYASLGTALYGKEKPLIKLPAPFEESLDLPLWKFLQKKNHLIEEINDEMRRCHCELTWSQLSGKVTIRPAATLVNEGRPRIKTWQADTSTTLSSIRSKYKVNPIKVDPTMWDTIKNDVKDDRILIEFDTLKEMVILAGKSEDVQSIEVQVRELIESTTQKIKREEQSLKEKMIISPGRYFLLCHSSLLDHLLTECPEIEICYDRVTQHLCLKGPSADVYKAKCEIQEKVYTMAQKNIQVSPEIFQFLQQVNWKEFSKCLFIAQKILALYELEGTTVLLTSCSSEALLEAEKQMLSALNYKRIEVENKEVLHGKKWKGLTHNLLKKQNSSPNTVIINELTSETTAEVIITGCVKEVNETYKLLFNFVEQNMKIERLVEVKPSLVIDYLKTEKKLFWPKIKKVNVQVSFNPENKQKGILLTGSKTEVLKAVDIVKQVWDSVCVKSVHTDKPGAKQFFQDKARFYQSEIKRLFGCYIELQENEVMKEGGSPAGQKCFSRTVLAPGVVLIVQQGDLARLPVDVVVNASNEDLKHYGGLAAALSKAAGPELQADCDQIVKREGRLLPGNATISKAGKLPYHHVIHAVGPRWSGYEAPRCVYLLRRAVQLSLCLAEKYKYRSIAIPAISSGVFGFPLGRCVETIVSAIKENFQFKKDGHCLKEIYLVDVSEKTVEAFAEAVKTVFKATLPDTAAPPGLPPAAAGPGKTSWEKGSLVSPGGLQMLLVKEGVQNAKTDVVVNSVPLDLVLSRGPLSKSLLEKAGPELQEELDTVGQGVAVSMGTVLKTSSWNLDCRYVLHVVAPEWRNGSTSSLKIMEDIIRECMEITESLSLKSIAFPAIGTGNLGFPKNIFAELIISEVFKFSSKNQLKTLQEVHFLLHPSDHENIQAFSDEFARRANGNLVSDKIPKAKDTQGFYGTVSSPDSGVYEMKIGSIIFQVASGDITKEEADVIVNSTSNSFNLKAGVSKAILECAGQNVERECSQQAQQRKNDYIITGGGFLRCKNIIHVIGGNDVKSSVSSVLQECEKKNYSSICLPAIGTGNAKQHPDKVAEAIIDAIEDFVQKGSAQSVKKVKVVIFLPQVLDVFYANMKKREGTQLSSQQSVMSKLASFLGFSKQSPQKKNHLVLEKKTESATFRVCGENVTCVEYAISWLQDLIEKEQCPYTSEDECIKDFDEKEYQELNELQKKLNINISLDHKRPLIKVLGISRDVMQARDEIEAMIKRVRLAKEQESRADCISEFIEWQYNDNNTSHCFNKMTNLKLEDARREKKKTVDVKINHRHYTVNLNTYTATDTKGHSLSVQRLTKSKVDIPAHWSDMKQQNFCVVELLPSDPEYNTVASKFNQTCSHFRIEKIERIQNPDLWNSYQAKKKTMDAKNGQTMNEKQLFHGTDAGSVPHVNRNGFNRSYAGKNAVAYGKGTYFAVNANYSANDTYSRPDANGRKHVYYVRVLTGIYTHGNHSLIVPPSKNPQNPTDLYDTVTDNVHHPSLFVAFYDYQAYPEYLITFRK

SEQ ID NO: 14179 - protein, 640 aa, Homo sapiens
MLRSTLAQQGTPVYSVAWGPDSEKVLYTAGKQLIIKPLQPNAKVLQWKAHDGIILKVDWNSVNDLILSAGEDCKYKVWDSYGRPLYNSQPHEHPITSVAWAPDGELFAVGSFHTLRLCDKTGWSYALEKPNTGSIFNIAWSIDGTQIAGACGNGHVVFAHVVEQHWEWKNFQVTLTKRRAMQVRNVLNDAVDLLEFRDRVIKASLNYAHLVVSTSLQCYVFSTKNWNTPIIFDLKEGTVSLILQAERHFLLVDGSSIYLYSYEGRFISSPKFPGMRTDILNAQTVSLSNDTIAIRDKADEKIIFLFEASTGKPLGDGKFLSHKNEILEIALDQKGLTNDRKIAFIDKNRDLCITSVKRFGKEEQIIKLGTMVHTLAWNDTCNILCGLQDTRFIVWYYPNTVYVDRDILPKTLYERDASEFSKNPHIVSFVGNQVTIRRADGSLVHISITPYPAILHEYVSSSKWEDAVRLCRFVKEQTMWACLAAMAVANRDMTTAEIAYAAIGEIDKVQYINSIKNLPSKESKMAHILLFSGNIQEAEIVLLQAGLVYQAIQININLYNWERALELAVKYKTHVDTVLAYRQKFLETFGKQETNKRYLHYAEGLQIDWEKIKAKIEMEITKEREQSSSSQSSKSIGLKP

SEQ ID NO: 14180 - protein, 117 aa, Homo sapiens
MDMRVLAQLLGLLLLCFPGARCDIQMTQSPSSLSASVGDRVTITCRASQGISSWLAWYQQKPEKAPKSLIYAASSLQSGVPSRFSGSGSGTDFTLTISSLQPEDFATYYCQQYNSYP

SEQ ID NO: 14181 - protein, 1188 aa, Homo sapiens
MHPQSLAEEEIKTEQEVVEGMDISTRSKDPGSAERTAQKRKFPSPPHSSNGHSPQDTSTSPIKKKKKPGLLNSNNKEQSELRHGPFYYMKQPLTTDPVDVVPQDGRNDFYCWVCHREGQVLCCELCPRVYHAKCLRLTSEPEGDWFCPECEKITVAECIETQSKAMTMLTIEQLSYLLKFAIQKMKQPGTDAFQKPVPLEQHPDYAEYIFHPMDLCTLEKNAKKKMYGCTEAFLADAKWILHNCIIYNGGNHKLTQIAKVVIKICEHEMNEIEVCPECYLAACQKRDNWFCEPCSNPHPLVWAKLKGFPFWPAKALRDKDGQVDARFFGQHDRAWVPINNCYLMSKEIPFSVKKTKSIFNSAMQEMEVYVENIRRKFGVFNYSPFRTPYTPNSQYQMLLDPTNPSAGTAKIDKQEKVKLNFDMTASPKILMSKPVLSGGTGRRISLSDMPRSPMSTNSSVHTGSDVEQDAEKKATSSHFSASEESMDFLDKSTASPASTKTGQAGSLSGSPKPFSPQLSAPITTKTDKTSTTGSILNLNLDRSKAEMDLKELSESVQQQSTPVPLISPKRQIRSRFQLNLDKTIESCKAQLGINEISEDVYTAVEHSDSEDSEKSDSSDSEYISDDEQKSKNEPEDTEDKEGCQMDKEPSAVKKKPKPTNPVEIKEELKSTSPASEKADPGAVKDKASPEPEKDFSEKAKPSPHPIKDKLKGKDETDSPTVHLGLDSDSESELVIDLGEDHSGREGRKNKKEPKEPSPKQDVVGKTPPSTTVGSHSPPETPVLTRSSAQTSAAGATATTSTSSTVTVTAPAPAATGSPVKKQRPLLPKETAPAVQRVVWNSSTVQQKEITQSPSTSTITLVTSTQSSPLVTSSGSMSTLVSSVNADLPIATASADVAADIAKYTSKMMDAIKGTMTEIYNDLSKNTTGSTIAEIRRLRIEIEKLQWLHQQELSEMKHNLELTMAEMRQSLEQERDRLIAEVKKQLELEKQQAVDETKKKQWCANCKKEAIFYCCWNTSYCDYPCQQAHWPEHMKSCTQSATAPQQEADAEVNTETLNKSSQGSSSSTQSAPSETASASKEKETSAEKSKESGSTLDLSGSRETPSSILLGSNQGSVSKRCDKQPAYAPTTTDHQPHPNYPAQKYHSRSNKSSWSSSDEKRGSTRSDHNTSTSTKSLLPKESRLDTFWD

SEQ ID NO: 14182 - protein, 532 aa, Homo sapiens
MFGKWKYEKPDGSPVFIAFRSSTKKSVQYDDVPEYKDRLNLSENYTLSISNARISDEKRFVCMLVTEDNVFEAPTIVKVFKQPSKPEIVSKALFLETEQLKKLGDCISEDSYPDGNITWYRNGKVLHPLEGAVVIIFKKEMDPVTQLYTMTSTLEYKTTKADIQMPFTCSVTYYGPSGQKTIHSEQAVFDIYYPTEQVTIQVLPPKNAIKEGDNITLKCLGNGNPPPEEFLFYLPGQPEGIRSSNTYTLTDVRRNATGDYKCSLIDKKSMIASTAITVHYLDLSLNPSGEVTRQIGDALPVSCTISASRNATVVWMKDNIRLRSSPSFSSLHYQDAGNYVCETALQEVEGLKKRESLTLIVEGKPQIKMTKKTDPSGLSKTIICHVEGFPKPAIQWTITGSGSVINQTEESPYINGRYYSKIIISPEENVTLTCTAENQLERTVNSLNVSAISIPEHDEADEISDENREKVNDQAKLIVGIVVGLLLAALVAGVVYWLYMKKSKTASKHVNKDLGNMEENKKLEENNHKTEA

SEQ ID NO: 14183 - protein, 359 aa, Homo sapiens
MAPLGTTVLLWSLLRSSPGVERVCFRARIQPWHGGLLQPLPCSFEMGLPRRRFSSEAESGSPETKKPTFMDEEVQSILTKMTGLNLQKTFKPAIQELKPPTYKLMTQAQLEEATRQAVEAAKVRLKMPPVLEERVPINDVLAEDKILEGTETTKYVFTDISYSIPHRERFIVVREPSGTLRKASWEERDRMIQVYFPKEGRKILTPIIFKEENLRTMYSQDRHVDVLNLCFAQFEPDSTEYIKVHHKTYEDIDKRGKYDLLRSTRYFGGMVWYFVNNKKIDGLLIDQIQRDLIDDATNLVQLYHVLHPDGQSAQGAKDQAAEGINLIKVFAKTEAQKGAYIELTLQTYQEALSRHSAAS

SEQ ID NO: 14184 - protein, 282 aa, Homo sapiens
MLLLAPQMLNLLLLALPVLASRAYAAPAPGQALQRVGIVGGQEAPRSKWPWQVSLRVHGPYWMHFCGGSLIHPQWVLTAAHCVGPDVKDLAALRVQLREQHLYYQDQLLPVSRIIVHPQFYTAQIGADIALLELEEPVNVSSHVHTVTLPPASETFPPGMPCWVTGWGDVDNDERLPPPFPLKQVKVPIMENHICDAKYHLGAYTGDDVRIVRDDMLCAGNTRRDSCQGDSGGPLVCKVNGTWLQAGVVSWGEGCAQPNRPGIYTRVTYYLDWIHHYVPKKP

SEQ ID NO: 14185 - protein, 842 aa, Homo sapiens
MMPAQYALTSSLVLLVLLSTARAGPFSSRSNVTLPAPRPPPQPGGHTVGAGVGSPSSQLYEHTVEGGEKQVVFTHRINLPPSTGCGCPPGTEPPVLASEVQALRVRLEILEELVKGLKEQCTGGCCPASAQAGTGQTDVRTLCSLHGVFDLSRCTCSCEPGWGGPTCSDPTDAEIPPSSPPSASGSCPDDCNDQGRCVRGRCVCFPGYTGPSCGWPSCPGDCQGRGRCVQGVCVCRAGFSGPDCSQRSCPRGCSQRGRCEGGRCVCDPGYTGDDCGMRSCPRGCSQRGRCENGRCVCNPGYTGEDCGVRSCPRGCSQRGRCKDGRCVCDPGYTGEDCGTRSCPWDCGEGGRCVDGRCVCWPGYTGEDCSTRTCPRDCRGRGRCEDGECICDTGYSGDDCGVRSCPGDCNQRGRCEDGRCVCWPGYTGTDCGSRACPRDCRGRGRCENGVCVCNAGYSGEDCGVRSCPGDCRGRGRCESGRCMCWPGYTGRDCGTRACPGDCRGRGRCVDGRCVCNPGFTGEDCGSRRCPGDCRGHGLCEDGVCVCDAGYSGEDCSTRSCPGGCRGRGQCLDGRCVCEDGYSGEDCGVRQCPNDCSQHGVCQDGVCICWEGYVSEDCSIRTCPSNCHGRGRCEEGRCLCDPGYTGPTCATRMCPADCRGRGRCVQGVCLCHVGYGGEDCGQEEPPASACPGGCGPRELCRAGQCVCVEGFRGPDCAIQTCPGDCRGRGECHDGSCVCKDGYAGEDCGEEVPTIEGMRMHLLEETTVRTEWTPAPGPVDAYEIQFIPTASPLLCSASPHSPAKAEAEISTSWRNQDSLNFFFCLNIFFCCCYKNTLITRQEFGN

SEQ ID NO: 14186 - protein, 415 aa, Homo sapiens
MEQIWLLLLLTIRVLPGSAQFNGYNCDANLHSRFPAERDISVYCGVQAITMKINFCTVLFSGYSETDLALNGRHGDSHCRGFINNNTFPAVVIFIINLSTLEGCGNNLVVSTIPGVSAYGNATSVQVGNISGYIDTPDPPTIISYLPGLLYKFSCSYPLEYLVNNTQLASSSAAISVRENNGTFVSTLNLLLYNDSTYNQQLIIPSIGLPLKTKVFAAVQATNLDGRWNVLMDYCYTTPSGNPNDDIRYDLFLSCDKDPQTTVIENGRSQRGRFSFEVFRFVKHKNQKMSTVFLHCVTKLCRADDCPFLMPICSHRERRDAGRRTTWSPQSSSGSAVLSAGPIITRSDETPTNNSQLGSPSMPPFQLNAITSALISGMVILGVTSFSLLLCSLALLHRKGPTSLVLNGIRNPVFD

SEQ ID NO: 14187 - protein, 32 aa, Homo sapiens
MLRGTMTAWRGMRPEVTLACLLLATAGCFADL

SEQ ID NO: 14188 - protein, 139 aa, Homo sapiens
MPAVLERLSRYNSTSQAFAEVLRLPKQQLRKLLYPLQEVERFLAPYGRQDLHLRIFDPSPEDIARADNIFTATERNRIDYVSSAVRIDHAPDLPRPEVCFIGRSNVGKSSLIKALFSLAPEVEVRVSKKPLEENIFISG

SEQ ID NO: 14189 - protein, 312 aa, Homo sapiens
MPPPRTGRGLLWLGLVLSSVCVALGSETQANSTTDALNVLLIIVDDLRPSLGCYGDKLVRSPNIDQLASHSLLFQNAFAQQAVCAPSRVSFLTGRRPDTTRLYDFNSYWRVHAGNFSTIPQYFKENGYVTMSVGKVFHPGISSNHTDDSPYSWSFPPYHPSSEKYENTKTCRGPDGELHANLLCPVDVLDVPEGTLPDKQSTEQAIQLLEKMKTSASPFFLAVGYHKPHIPFRYPKEFQKLYPLENITLAPDPEVPDGLPPVAYNPWMDIRQREDVQALNISVPYGPIPVDFQEDQSSTGFRLKTSSTRKYK

SEQ ID NO: 14190 - protein, 2570 aa, Homo sapiens
MRKHRHLPLVAVFCLFLSGFPTTHAQQQQAVIEVNKRDIVFLVDGSSALGLANFNAIRDFIAKVIQRLEIGQDLIQVAVAQYADTVRPEFYFNTHPTKREVITAVRKMKPLDGSALYTGSALDFVRNNLFTSSAGYRAAEGIPKLLVLITGGKSLDEISQPAQELKRSSIMAFAIGNKGADQAELEEIAFDSSLVFIPAEFRAAPLQGMLPGLLAPLRTLSGTPEESKRDILFLFDGSANLVGQFPVVRDFLYKIIDELNVKPEGTRIAVAQYSDDVKVESRFDEHQSKPEILNLVKRMKIKTGKALNLGYALDYAQRYIFVKSAGSRIEDGVLQFLVLLVAGRSSDRVDGPASNLKQSGVVPFIFQAKNADPAELEQIVLSPAFILAAESLPKIGDLHPQIVNLLKSVHNGAPAPVSGEKDVVFLLDGSEGVRSGFPLLKEFVQRVVESLDVGQDRVRVAVVQYSDRTRPEFYLNSYMNKQDVVNAVRQLTLLGGPTPNTGAALEFVLRNILVSSAGSRITEGVPQLLIVLTADRSGDDVRNPSVVVKRGGAVPIGIGIGNADITEMQTISFIPDFAVAIPTFRQLGTVQQVISERVTQLTREELSRLQPVLQPLPSPGVGGKRDVVFLIDGSQSAGPEFQYVRTLIERLVDYLDVGFDTTRVAVIQFSDDPKVEFLLNAHSSKDEVQNAVQRLRPKGGRQINVGNALEYVSRNIFKRPLGSRIEEGVPQFLVLISSGKSDDEVDDPAVELKQFGVAPFTIARNADQEELVKISLSPEYVFSVSTFRELPSLEQKLLTPITTLTSEQIQKLLASTRYPPPAVESDAADIVFLIDSSEGVRPDGFAHIRDFVSRIVRRLNIGPSKVRVGVVQFSNDVFPEFYLKTYRSQAPVLDAIRRLRLRGGSPLNTGKALEFVARNLFVKSAGSRIEDGVPQHLVLVLGGKSQDDVSRFAQVIRSSGIVSLGVGDRNIDRTELQTITNDPRLVFTVREFRELPNIEERIMNSFGPSAATPAPPGVDTPPPSRPEKKKADIVFLLDGSINFRRDSFQEVLRFVSEIVDTVYEDGDSIQVGLVQYNSDPTDEFFLKDFSTKRQIIDAINKVVYKGGRHANTKVGLEHLRVNHFVPEAGSRLDQRVPQIAFVITGGKSVEDAQDVSLALTQRGVKVFAVGVRNIDSEEVGKIASNSATAFRVGNVQELSELSEQVLETLHDAMHETLCPGVTDAAKACNLDVILGFDGSRDQNVFVAQKGFESKVDAILNRISQMHRVSCSGGRSPTVRVSVVANTPSGPVEAFDFDEYQPEMLEKFRNMRSQHPYVLTEDTLKVYLNKFRQSSPDSVKVVIHFTDGADGDLADLHRASENLRQEGVRALILVGLERVVNLERLMHLEFGRGFMYDRPLRLNLLDLDYELAEQLDNIAEKACCGVPCKCSGQRGDRGPIGSIGPKGIPGEDGYRGYPGDEGGPGERGPPGVNGTQGFQGCPGQRGVKGSRGFPGEKGEVGEIGLDGLDGEDGDKGLPGSSGEKGNPGRRGDKGPRGEKGERGDVGIRGDPGNPGQDSQERGPKGETGDLGPMGVPGRDGVPGGPGETGKNGGFGRRGPPGAKGNKGGPGQPGFEGEQGTRGAQGPAGPAGPPGLIGEQGISGPRGSGGAAGAPGERGRTGPLGRKGEPGEPGPKGGIGNRGPRGETGDDGRDGVGSEGRRGKKGERGFPGYPGPKGNPGEPGLNGTTGPKGIRGRRGNSGPPGIVGQKGDPGYPGPAGPKGNRGDSIDQCALIQSIKDKCPCCYGPLECPVFPTELAFALDTSEGVNQDTFGRMRDVVLSIVNDLTIAESNCPRGARVAVVTYNNEVTTEIRFADSKRKSVLLDKIKNLQVALTSKQQSLETAMSFVARNTFKRVRNGFLMRKVAVFFSNTPTRASPQLREAVLKLSDAGITPLFLTRQEDRQLINALQINNTAVGHALVLPAGRDLTDFLENVLTCHVCLDICNIDPSCGFGSWRPSFRDRRAAGSDVDIDMAFILDSAETTTLFQFNEMKKYIAYLVRQLDMSPDPKASQHFARVAVVQHAPSESVDNASMPPVKVEFSLTDYGSKEKLVDFLSRGMTQLQGTRALGSAIEYTIENVFESAPNPRDLKIVVLMLTGEVPEQQLEEAQRVILQAKCKGYFFVVLGIGRKVNIKEVYTFASEPNDVFFKLVDKSTELNEEPLMRFGRLLPSFVSSENAFYLSPDIRKQCDWFQGDQPTKNLVKFGHKQVNVPNNVTSSPTSNPVTTTKPVTTTKPVTTTTKPVTTTTKPVTIINQPSVKPAAAKPAPAKPVAAKPVATKMATVRPPVAVKPATAAKPVAAKPAAVRPPAAAAAKPVATKPEVPRPQAAKPAATKPATTKPMVKMSREVQVFEITENSAKLHWERAEPPGPYFYDLTVTSAHDQSLVLKQNLTVTDRVIGGLLAGQTYHVAVVCYLRSQVRATYHGSFSTKKSQPPPPQPARSASSSTINLMVSTEPLALTETDICKLPKDEGTCRDFILKWYYDPNTKSCARFWYGGCGGNENKFGSQKECEKVCAPVLAKPGVISVMGT

SEQ ID NO: 14191 - protein, 339 aa, Homo sapiens
MKDSLVLLGRVPAHPDSRCWFLAWNPAGTLLASCGGDRRIRIWGTEGDSWICKSVLSEGHQRTVRKVAWSPCGNYLASASFDATTCIWKKNQDDFECVTTLEGHENEVKSVAWAPSGNLLATCSRDKSVWVWEVDEEDEYECVSVLNSHTQDVKHVVWHPSQELLASASYDDTVKLYREEEDDWVCCATLEGHESTVWSLAFDPSGQRLASCSDDRTVRIWRQYLPGNEQGVACSGSDPSWKCICTLSGFHSRTIYDIAWCQLTGALATACGDDAIRVFQEDPNSDPQQPTFSLTAHLHQAHSQDVNCVAWNPKEPGLLASCSDDGEVAFWKYQRPEGL

SEQ ID NO: 14192 - protein, 117 aa, Homo sapiens
MDMRVPAQLLGLLLLWFPGARCNIQMTQSPSAMSASVGDRVTITCRARQGISNYLAWFQQKPGKVPKHLIYAASSLQSGVPSRFSGSGSGTEFTLTISSLQPEDFATYYCLQHNSYP

SEQ ID NO: 14193 - protein, 4510 aa, Homo sapiens
MKGARWRRVPWVSLSCLCLCLLPHVVPGTTEDTLITGSKTAAPVTSTGSTTATLEGQSTAASSRTSNQDISASSQNHQTKSTETTSKAQTDTLTQMMTSTLFSSPSVHNVMETAPPDEMTTSFPSSVTNTLMMTSKTITMTTSTDSTLGNTEETSTAGTESSTPVTSAVSITAGQEGQSRTTSWRTSIQDTSASSQNHWTRSTQTTRESQTSTLTHRTTSTPSFSPSVHNVTGTVSQKTSPSGETATSSLCSVTNTSMMTSEKITVTTSTGSTLGNPGETSSVPVTGSLMPVTSAALVTFDPEGQSPATFSRTSTQDTTAFSKNHQTQSVETTRVSQINTLNTLTPVTTSTVLSSPSGFNPSGTVSQETFPSGETTTSSPSSVSNTFLVTSKVFRMPTSRDSTLGNTEETSLSVSGTISAITSKVSTIWWSDTLSTALSPSSLPPKISTAFHTQQSEGAETTGRPHERSSFSPGVSQEIFTLHETTTWPSSFSSKGHTTWSQTELPSTSTGAATRLVTGNPSTGTAGTIPRVPSKVSAIGEPGEPTTYSSHSTTLPKTTGAGAQTQWTQETGTTGEALLSSPSYSVTQMIKTATSPSSSPMLDRHTSQQITTAPSTNHSTIHSTSTSPQESPAVSQRGHTQAPQTTQESQTTRSVSPMTDTKTVTTPGSSFTASGHSPSEIVPQDAPTISAATTFAPAPTGDGHTTQAPTTALQAAPSSHDATLGPSGGTSLSKTGALTLANSVVSTPGGPEGQWTSASASTSPDTAAAMTHTHQAESTEASGQTQTSEPASSGSRTTSAGTATPSSSGASGTTPSGSEGISTSGETTRFSSNPSRDSHTTQSTTELLSASASHGAIPVSTGMASSIVPGTFHPTLSEASTAGRPTGQSSPTSPSASPQETAAISRMAQTQRTRTSRGSDTISLASQATDTFSTVPPTPPSITSTGLTSPQTETHTLSPSGSGKTFTTALISNATPLPVTYASSASTGHTTPLHVTDASSVSTGHATPLPVTSPSSVSTGHTTPLPVTDTSSESTGHVTPLPVTSFSSASTGDSTPLPVTDTSSASTGHVTPLPVTSLSSASTGDTTPLPVTDTSSASTGHATSLPVTDTSSVSTGHTTPLPVTDTSSASTGHATSLPVTDTSSVSTGHTTPLHVTDASSASTGQATPLPVTSLSSVSTGDTTPLPVTSPSSASTGHATPLLVTDTSSASTGHATPLPVTDASSVSTDHATSLPVTIPSAASTGHTTPLPVTDTSSASTGQATSLLVTDTSSVSTGDTTPLPVTSTSSASTGHVTPLHVTSPSSASTGHATPLPVTSLSSASTGDTMPLPVTSPSSASTGDTTPLPVTDASSVSTGHTTPLHVTDASSASTGQATPLPVTSLSSVSTGDTTPLPVTSPSSASTGHATPLLVTDTSSASTGHATPLPVTDASSVSTDHATSLPVTIPSAASTGHTTPLPVTDTSSASTGQATSLLVTDTSSVSTGDTTPLPVTSTSSASTGHVTPLHVTSPSSASTGHATPLPVTSLSSASTGDTMPLPVTSPSSASTGDTTPLPVTDASSVSTGHTTPLPVTSPSSASTGHTTPLPVTDTSSASKGDTTPLPVTSPSSASTGHTTPLPVTDTSSASTGDTTPLPVTNASSLSTGHATPLHVTSPSSASTGHATPLPVTSTSSASTGHATPLPVTGLSSATTDDTTRLPVTDVSSASTGQATPLPVTSLSSVSTGDTTPLPVTSPSSASTGHASPLLVTDASSASTGQATPLPVTDTSSVSTAHATPLPVTGLSSASTDDTTRLPVTDVSSASTGQAIPLPVTSPSSASTGDTTPLPVTDASSASTGDTTSLPVTIPSSASSGHTTSLPVTDASSVSTGHATSLLVTDASSVSTGDTTPLPVTDTNSASTGDTTPLHVTDASSVSTGHATSLPVTSLSSASTGDTTPLPVTSPSSASSGHTTPLPVTDASSVPTGHATSLPVTDASSVSTGHATPLPVTDASSVSTGHATPLPVTDTSSVSTGQATPLPVTSLSSASTGDTTPLPVTDTSSASTGQDTPLPVTSLSSVSTGDTTPLPVTNPSSASTGHATPLLVTDASSISTGHATSLLVTDASSVSTGHATALHDTDASSLSTGDTTPLPVTSPSSTSTGDTTPLPVTETSSVSTGHATSLPVTDTSSASTGHATSLPVTDTSSASTGHATPLPVTDTSSASTGQATPLPVTSPSSASTGHAIPLLVTDTSSASTGQATPLPVTSLSSASTGDTTPLPVTDASSVSTGHATSLPVTSLSSVSTGDTTPLPVTSPSSASTGHATPLHVTDASSASTGHATPLPVTSLSSASTGDTTPLPVTSPSSASTGHATPLHVTDASSVSTGDTTPLPVTSSSSASSGHTTPLPVTDASSASTGDTTPLPVTDTSSASTGHATHLPVTGLSSASTGDTTRLPVTNVSSASTGHATPLPVTSTSSASTGDTTPLPGTDTSSVSTGHTTPLLVTDASSVSTGDTTRLPVTSPSSASTGHTTPLPVTDTPSASTGDTTPLPVTNASSLSTRHATSLHVTSPSSASTGHATSLPVTDTSAASTGHATPLPVTSTSSASTGDTTPLPVTDTYSASTGQATPLPVTSLSSVSTGDTTPLPVTSPSSASTGHATPLLVTDASSASTGQATPLPVTSLSSVSTGDTTPLPVTSPSSASTGHATSLPVTDTSSASTGDTTSLPVTDTSSAYTGDTTSLPVTDTSSSSTGDTTPLLVTETSSVSTGDTTPLPVTDTSSASTGHATPLPVTNTSSVSTGHATPLHVTSPSSASTGHTTPLPVTDASSVSTGHATSLPVTDASSVFTGHATSLPVTIPSSASSGHTTPLPVTDASSVSTGHATSLPVTDASSVSTGHATPLPVTDASSVSTGHATPLPLTSLSSVSTGDTTPLPVTDTSSASTGQATPLPVTSLSSVSTGDTTPLPVTDTSSASTGHATSLPVTDTSSASTGHATPLPDTDTSSASTGHATLLPVTDTSSASIGHATSLPVTDTSSISTGHATPLHVTSPSSASTGHATPLPVTDTSSASTGHANPLHVTSPSSASTGHATPLPVTDTSSASTGHATPLPVTSLSSVSTGDTTPLPVTSPSSASTGHTTPLPVTDTSSASTGQATALPVTSTSSASTGDTTPLPVTDTSSASTGQATPLPVTSLSSVSTGDTTPLPVTSPSSASTGHATPLLVTDASSASTGQATPLPVTSLSSVSTGDTTPLPVTSPSSASTGHATSLPVTDTSSASTGDTTSLPVTDTSSAYTGDTTSLPVTDTSSSSTGDTTPLLVTETSSVSTGHATPLLVTDASSASTGHATPLHVTSPSSASTGDTTPVPVTDTSSVSTGHATPLPVTGLSSASTGDTTRLPVTDISSASTGQATPLPVTNTSSVSTGDTMPLPVTSPSSASTGHATPLPVTSTSSASTGHATPVPVTSTSSASTGHTTPLPVTDTSSASTGDTTPLPVTSPSSASTGHTTPLHVTIPSSASTGDTSTLPVTGASSASTGHATPLPVTDTSSVSTGHATPLPVTSLSSVSTGDTTPLPVTDASSASTGQATPLPVTSLSSVSTGDTTPLLVTDASSVSTGHATPLPVTDTSSASTGDTTRLPVTDTSSASTGQATPLPVTSLSSVSTGDTTPLLVTDASSVSTGHATPLPVTDTSSASTGDTTRLPVTDTSSASTGQATPLPVTIPSSSSSGHTTPLPVTSTSSVSTGHVTPLHVTSPSSASTGHVTPLPVTSTSSASTGHATPLLVTDASSVSTGHATPLPVTDASSASTGDTTPLPVTDTSSASTGQATPLPVTSLSSVSTGDTTPLPVTDASSASTGHATPLPVTIPSSVSTGDTMPLPVTSPSSASTGHATPLPVTGLSSASTGDTTPLPVTDTSSASTRHATPLPVTDTSSASTDDTTRLPVTDVSSASTGHATPLPVTSTSSASTGDTTPLPVTDTSSVSTGHATSLPVTSRSSASTGHATPLPVTDTSSVSTGHATPLPVTSTSSVSTGHATPLPVTSPSSASTGHATPVPVTSTSSASTGDTTPLPVTNASSLSTGHATPLHVTSPSSASRGDTSTLPVTDASSASTGHATPLPLTSLSSVSTGDTTPLPVTDTSSASTGQATPLPVTSLSSVSTGDTTPLPVTIPSSASSGHTTSLPVTDASSVSTGHGTPLPVTSTSSASTGDTTPLPVTDTSSASTGHATPLPVTDTSSASTGHATPLPVTSLSSVSTGHATPLAVSSATSASTVSSDSPLKMETPGMTTPSLKTDGGRRTATSPPPTTSQTIISTIPSTAMHTRSTAAPIPILPERGVSLFPYGAGAGDLEFVRRTVDFTSPLFKPATGFPLGSSLRDSLYFTDNGQIIFPESDYQIFSYPNPLPTGFTGRDPVALVAPFWDDADFSTGRGTTFYQEYETFYGEHSLLVQQAESWIRKMTNNGGYKARWALKVTWVNAHAYPAQWTLGSNTYQAILSTDGSRSYALFLYQSGGMQWDVAQRSVEMAISKTAH

SEQ ID NO: 14194 - protein, 104 aa, Homo sapiens
MGPLMVLFCLLFLYPGLADSAPSCPQNVNISGGTFTLSHGWAPGSLLTYSCPQGLYPSPASRLCKSSGQWQTPGATRSLSKAVCKREAPCGLCSGCALSSPCLL

SEQ ID NO: 14195 - protein, 106 aa, Homo sapiens
MALDPADQHLRHVEKDVLIPKIMREKAKERCSEQVQDFTKCCKNSGVLMVVKCRKENSALKECLTAYYNDPAFYEECKMEYLKEREEFRKTGIPTKKRLQKLPTSM

SEQ ID NO: 14196 - protein, 117 aa, Homo sapiens
MDMRVPAQLLGLLLLWFPGARCDIQMTQSPSSLSASVGDRVTITCRASQGIRNDLGWYQQKPGKAPKRLIYAASSLQSGVPSRFSGSGSGTEFTLTISSLQPEDFATYYCLQHNSYP

SEQ ID NO: 14197 - protein, 960 aa, Homo sapiens
MALLGKRCDVPTNGCGPDRWNSAFTRKDEIITSLVSALDSMCSALSKLNAEVACVAVHDESAFVVGTEKGRMFLNARKELQSDFLRFCRGPPWKDPEAEHPKKVQRGEGGGRSLPRSSLEHGSDVYLLRKMVEEVFDVLYSEALGRASVVPLPYERLLREPGLLAVQGLPEGLAFRRPAEYDPKALMAILEHSHRIRFKLKRPLEDGGRDSKALVELNGVSLIPKGSRDCGLHGQAPKVPPQDLPPTATSSSMASFLYSTALPNHAIRELKQEAPSCPLAPSDLGLSRPMPEPKATGAQDFSDCCGQKPTGPGGPLIQNVHASKRILFSIVHDKSEKWDAFIKETEDINTLRECVQILFNSRYAEALGLDHMVPVPYRKIACDPEAVEIVGIPDKIPFKRPCTYGVPKLKRILEERHSIHFIIKRMFDERIFTGNKFTKDTTKLEPASPPEDTSAEVSRATVLDLAGNARSDKGSMSEDCGPGTSGELGGLRPIKIEPEDLDIIQVTVPDPSPTSEEMTDSMPGHLPSEDSGYGMEMLTDKGLSEDARPEERPVEDSHGDVIRPLRKQVELLFNTRYAKAIGISEPVKVPYSKFLMHPEELFVVGLPEGISLRRPNCFGIAKLRKILEASNSIQFVIKRPELLTEGVKEPIMDSQERDSGDPLVDESLKRQGFQENYDARLSRIDIANTLREQVQDLFNKKYGEALGIKYPVQVPYKRIKSNPGSVIIEGLPPGIPFRKPCTFGSQNLERILAVADKIKFTVTRPFQGLIPKPDEDDANRLGEKVILREQVKELFNEKYGEALGLNRPVLVPYKLIRDSPDAVEVTGLPDDIPFRNPNTYDIHRLEKILKAREHVRMVIINQLQPFAEICNDAKVPAKDSSIPKRKRKRVSEGNSVSSSSSSSSSSSSNPDSVASANQISLVVKLHRFGLRHSSLWPSPLCLAGPSTLGCGPRGRGGTGL

SEQ ID NO: 14198 - protein, 1024 aa, Homo sapiens
MADPEVCCFITKILCAHGGRMALDALLQEIALSEPQLCEVLQVAGPDRFVVLETGGEAGITRSVVATTRARVCRRKYCQRPCDNLHLCKLNLLGRCNYSQSERNLCKYSHEVLSEENFKVLKNHELSGLNKEELAVLLLQSDPFFMPEICKSYKGEGRQQICNQQPPCSRLHICDHFTRGNCRFPNCLRSHNLMDRKVLAIMREHGLNPDVVQNIQDICNSKHMQKNPPGPRAPSSHRRNMAYRARSKSRDRFFQGSQEFLASASASAERSCTPSPDQISHRASLEDAPVDDLTRKFTYLGSQDRARPPSGSSKATDLGGTSQAGTSQRFLENGSQEDLLHGNPGSTYLASNSTSAPNWKSLTSWTNDQGARRKTVFSPTLPAARSSLGSLQTPEAVTTRKGTGLLSSDYRIINGKSGTQDIQPGPLFNNNADGVATDITSTRSLNYKSTSSGHREISSPRIQDAGPASRDVQATGRIADDADPRVALVNGKYKGKTLWASTFVHDIPNGSSQVVDKTTDVEKTGATGFGLTMAVKAEKDMLRTGSQSLRNLVPTTPGESTAPAQVSTLPQSPAALSSSNRAAVWGAQGQNCTQVPVSSASELTRKTTGSAQYSLSDVTSTTSSRVDDHDSEEICLDHLCKGCPLNGSCSKVHFHLPYRWQMLIGKTWTDFEHMETIEKGYCNPGIHLCSVGSYTINFRVMSCDSFPIRRLSTPSSVTKPANSVFTTKWIWYWKNESGTWIQYGEEKDKRKNSNVDSSYLESLYQSCPRGVVPFQAGSRNYELSFQGMIQTNIASKTQKDVIRRPTFVPQWYVQQMKRGPDHQPAKTSSVSLTATFRPQEDFCFLSSKKYKLSEIHHLHPEYVRVSEHFKASMKNFKIEKIKKIENSELLDKFTWKKSQMKEEGKLLFYATSRAYVESICSNNFDSFLHETHENKYGKGIYFAKDAIYSHKNCPYDAKNVVMFVAQVLVGKFTEGNITYTSPPPQFDSCVDTRSNPSVFVIFQKDQVYPQYVIEYTEDKACVIS

SEQ ID NO: 14199 - protein, 84 aa, Homo sapiens
MVARVSGLIVTLLSSSFPGGPLQNGQPSAEIQEEVALTSLGSGPAATNKRHSTSDKMHFPRSSLQPITTLGRPQAVPEDFQEQG

SEQ ID NO: 14200 - protein, 177 aa, Homo sapiens
MRWILFIGALIGSSICGQEKFFGDQVLRINVRNGDEISKLSQLVNSNNLKLNFWKSPSSFNRPVDVLVPSVSLQAFKSFLRSQGLEYAVTIEDLQIYHEMDNIAADFPDLARRVKIGHSFENRPMYVLKFSTGKGVRRPAVWLNAGIHSREWISQATAIWTARKIVSDYQRDPAITS

SEQ ID NO: 14201 - protein, 120 aa, Homo sapiens
MRLAVGALLVCAVLGLCLAVPDKTVRWCAVSEHEATKCQSFRDHMKSVIPSDGPSVACVKKASYLDCIRAIAANEADAVTLDAGLVYDAYLAPNNLKPVVAEFYGSKEDFLLCCCCGEEG

SEQ ID NO: 14202 - protein, 423 aa, Homo sapiens
MATATRLLGWRVASWRLRPPLAGFVSQRAHSLLPVDDAINGLSEEQRQLRQTMAKFLQEHLAPKAQEIDRSNEFKNLREFWKQLGNLGVLGITAPVQYGGSGLGYLEHVLVMEEISRASGAVGLSYGAHSNLCINQLVRNGNEAQKEKYLPKLISGEYIGALAMSEPNAGSDVVSMKLKAEKKGNHYILNGNKFWITNGPDADVLIVYAKTDLAAVPASRGITAFIVEKGMPGFSTSKKLDKLGMRGSNTCELIFEDCKIPAANILGHENKGVYVLMSGLDLERLVLAGGPLGLMQAVLDHTIPYLHVREAFGQKIGHFQLMQGKMADMYTRLMACRQYVYNVAKACDEGHCTAKDCAGVILYSAECATQVALDGIQCFGGNGYINDFPMGRFLRDAKLYEIGAGTSEVRRLVIGRAFNADFH

SEQ ID NO: 14203 - protein, 271 aa, Homo sapiens
MASADSRRVADGGGAGGTFQPYLDTLRQELQQTDPTLLSVVVAVLAVLLTLVFWKLIRSRRSSQRAVLLVGLCDSGKTLLFVRLLTGLYRDTQTSITDSCAVYRVNNNRGNSLTLIDLPGHESLRLQFLERFKSSARAIVFVVDSAAFQREVKDVAEFLYQVLIDSMGLKNTPSFLIACNKQDIAMAKSAKLIQQQLEKELNTLRVTRSAAPSTLDSSSTAPAQLGKKGKEFEFSQLPLKVEFLECSAKGGRGDVGSADIQDLEKWLAKIA

SEQ ID NO: 14204 - protein, 399 aa, Homo sapiens
MACLLETPIRMSVLSEVTASSRHYVDRLFDPDPQKVLQGVIDMKNAVIGNNKQKANLIVLGAVPRLLYLLQQETSSTELKTECAVVLGSLAMGTENNVKSLLDCHIIPALLQGLLSPDLKFIEACLRCLRTIFTSPVTPEELLYTDATVIPHLMALLSRSRYTQEYICQIFSHCCKGPDHQTILFNHGAVQNIAHLLTSLSYKVRMQALKCFSVLAFENPQVSMTLVNVLVDGELLPQIFVKMLQRDKPIEMQLTSAKCLTYMCRAGAIRTDDNCIVLKTLPCLVRMCSKERLLEERVEGAETLAYLIEPDVELQRIASITDHLIAMLADYFKYPSSVSAITDIKRLDHDLKHAHELRQAAFKLYASLGANDEDIRKKVSLGEGRPPVLTASRQGVTST

SEQ ID NO: 14205 - protein, 142 aa, Homo sapiens
MPRGSRSAASRPASRPAAPSAHPPAHPPPSAAAPAPAPSGQPGLMAQMATTAAGVAVGSAVGHVMGSALTGAFSGGSSEPSQPAVQQAPTPAAPQPLQMGPCAYEIRQFLDCSTTQSDLSLCEGFSEALKQCKYYHGLSSLP

SEQ ID NO: 14206 - protein, 193 aa, Homo sapiens
MVSRMVSTMLSGLLFWLASGWTPAFAYSPRTPDRVSEADIQRLLHGVMEQLGIARPRVEYPAHQAMNLVGPQSIEGGAHEGLQHLGPFGNIPNIVAELTGDNIPKDFSEDQGYPDPPNPCPVGKTDDGCLENTPDTAEFSREFQLHQHLFDPEHDYPGLGKWSVNPYLQGQRLDNVVAKKSVPHFSDEDKDPE

SEQ ID NO: 14207 - protein, 712 aa, Homo sapiens
MGSGARFPSGTLRVRWLLLLGLVGPVLGAARPGFQQTSHLSSYEIITPWRLTRERREAPRPYSKQVSYVIQAEGKEHIIHLERNKDLLPEDFVVYTYNKEGTLITDHPNIQNHCHYRGYVEGVHNSSIALSDCFGLRGLLHLENASYGIEPLQNSSHFEHIIYRMDDVYKEPLKCGVSNKDIEKETAKDEEEEPPSMTQLLRRRRAVLPQTRYVELFIVVDKERYDMMGRNQTAVREEMILLANYLDSMYIMLNIRIVLVGLEIWTNGNLINIVGGAGDVLGNFVQWREKFLITRRRHDSAQLVLKKGFGGTAGMAFVGTVCSRSHAGGINVFGQITVETFASIVAHELGHNLGMNHDDGRDCSCGAKSCIMNSGASGSRNFSSCSAEDFEKLTLNKGGNCLLNIPKPDEAYSAPSCGNKLVDAGEECDCGTPKECELDPCCEGSTCKLKSFAECAYGDCCKDCRFLPGGTLCRGKTSECDVPEYCNGSSQFCQPDVFIQNGYPCQNNKAYCYNGMCQYYDAQCQVIFGSKAKAAPKDCFIEVNSKGDRFGNCGFSGNEYKKCATGNALCGKLQCENVQEIPVFGIVPAIIQTPSRGTKCWGVDFQLGSDVPDPGMVNEGTKCGAGKICRNFQCVDASVLNYDCDVQKKCHGHGVCNSNKNCHCENGWAPPNCETKGYGGSVDSGPTYNGQMAKIKQTLLDSRGVFLDMFLQ

SEQ ID NO: 14208 - protein, 867 aa, Homo sapiens
MGPPSLVLCLLSATVFSLLGGSSAFLSHHRLKGRFQRDRRNIRPNIILVLTDDQDVELGSMQVMNKTRRIMEQGGAHFINAFVTTPMCCPSRSSILTGKYVHNHNTYTNNENCSSPSWQAQHESRTFAVYLNSTGYRTAFFGKYLNEYNGSYVPPGWKEWVGLLKNSRFYNYTLCRNGVKEKHGSDYSKDYLTDLITNDSVSFFRTSKKMYPHRPVLMVISHAAPHGPEDSAPQYSRLFPNASQHITPSYNYAPNPDKHWIMRYTGPMKPIHMEFTNMLQRKRLQTLMSVDDSMETIYNMLVETGELDNTYIVYTADHGYHIGQFGLVKGKSMPYEFDIRVPFYVRGPNVEAGCLNPHIVLNIDLAPTILDIAGLDIPADMDGKSILKLLDTERPVNRFHLKKKMRVWRDSFLVERGKLLHKRDNDKVDAQEENFLPKYQRVKDLCQRAEYQTACEQLGQKWQCVEDATGKLKLHKCKGPMRLGGSRALSNLVPKYYGQGSEACTCDSGDYKLSLAGRRKKLFKKKYKASYVRSRSIRSVAIEVDGRVYHVGLGDAAQPRNLTKRHWPGAPEDQDDKDGGDFSGTGGLPDYSAANPIKVTHRCYILENDTVQCDLDLYKSLQAWKDHKLHIDHEIETLQNKIKNLREVRGHLKKKRPEECDCHKISYHTQHKGRLKHRGSSLHPFRKGLQEKDKVWLLREQKRKKKLRKLLKRLQNNDTCSMPGLTCFTHDNQHWQTAPFWTLGPFCACTSANNNTYWCMRTINETHNFLFCEFATGFLEYFDLNTDPYQLMNAVNTLDRDVLNQLHVQLMELRSCKGYKQCNPRTRNMDLDGGSYEQYRQFQRRKWPEMKRPSSKSLGQLWEGWEG

SEQ ID NO: 14209 - protein, 378 aa, Homo sapiens
MRKKWKMGGMKYIFSLLFFLLLEGGKTEQVKHSETYCMFQDKKYRVGERWHPYLEPYGLVYCVNCICSENGNVLCSRVRCPNVHCLSPVHIPHLCCPRCPGDGELSWEHSDGDIFRQPANREARHSYHRSHYDPPPSRQAGGLSRFPGARSHRGALMDSQQASGTIVQIVINNKHKHGQVCVSNGKTYSHGESWHPNLRAFGIVECVLCTCNVTKQECKKIHCPNRYPCKYPQKIDGKCCKVCPGKKAKEELPGQSFDNKGYFCGEETMPVYESVFMEDGETTRKIALETERPPQVEVHVWTIRKGILQHFHIEKISKRMFEELPHFKLVTRTTLSQWKIFTEGEAQISQMCSSRVCRTELEDLVKVLYLERSEKGHC

SEQ ID NO: 14210 - protein, 309 aa, Homo sapiens
MDEKVFTKELDQWIEQLNECKQLSESQVKSLCEKAKEILTKESNVQEVRCPVTVCGDVHGQFHDLMELFRIGGKSPDTNYLFMGDYVDRGYYSVETVTLLVALKVRYRERITILRGNHESRQITQVYGFYDECLRKYGNANVWKYFTDLFDYLPLTALVDGQIFCLHGGLSPSIDTLDHIRALDRLQEVPHEGPMCDLLWSDPDDRGGWGISPRGAGYTFGQDISETFNHANGLTLVSRAHQLVMEGYNWCHDRNVVTIFSAPNYCYRCGNQAAIMELDDTLKYSFLQFDPAPRRGEPHVTRRTPDYFL

SEQ ID NO: 14211 - protein, 151 aa, Homo sapiens
METGALRRPQLLPLLLLLCGGCPRAGGCNETGMLERLPLCGKAFADMMGKVDVWKWCNLSEFIVYYESFTNCTEMEANVVGCYWPNPLAQGFITGIHRQFFSNCTVDRVHLEDPPDEVLIPLIVIPVVLTVAMAGLVVWRSKRTDTLLCGN

SEQ ID NO: 14212 - protein, 370 aa, Homo sapiens
MEPPGRRECPFPSWRFPGLLLAAMVLLLYSFSDACEEPPTFEAMELIGKPKPYYEIGERVDYKCKKGYFYIPPLATHTICDRNHTWLPVSDDACYRETCPYIRDPLNGQAVPANGTYEFGYQMHFICNEGYYLIGEEILYCELKGSVAIWSGKPPICEKVLCTPPPKIKNGKHTFSEVEVFEYLDAVTYSCDPAPGPDPFSLIGESTIYCGDNSVWSRAAPECKVVKCRFPVVENGKQISGFGKKFYYKATVMFECDKGFYLDGSDTIVCDSNSTWDPPVPKCLKVSTSSTTKSPASSASGYPKPEEGILDSLDVWVIAVIVIAIVVGVAVICVVPYRYLQRRKKKGKADGGAEYATYQTKSTTPAEQRG

SEQ ID NO: 14213 - protein, 75 aa, Homo sapiens
MAAEWASRFWLWATLLIPAAAVYEDQVGKFDWRQQYVGKVKFASLEFSPGSKKLVVATEKNVIAALNSRTGEICE

SEQ ID NO: 14214 - protein, 216 aa, Homo sapiens
SGLLFWLASGWTPAFAYSPRTPDRVSEADIQRLLHGVMEQLGIARPRVEYPAHQAMNLVGPQSIEGGAHEGLQHLGPFGNIPNIVAELTGDNIPKDFSEDQGYPDPPNPCPVGKTADDGCLENTPDTAEFSREFQLHQHLFDPEHDYPGLGKWNKKLLYEKMKGGERRKRRVTRAWLDCCGDAWSFLSGAVNRLKPSLVGKSQNPPLCSPEKHWSM

SEQ ID NO: 14215 - protein, 139 aa, Homo sapiens
MWKRWLALALALVAVAWVRAEEELRSKSKICANVFCGAGRECAVTEKGEPTCLCIEQCKPHKRPVCGSNGKTYLNHCELHRDACLTGSKIQVDYDGHCKEKKSVSPSASPVVCYQSNRDELRRRIIQWLEAEIIPDGWF

SEQ ID NO: 14216 - protein, 100 aa, Homo sapiens
MSRELAPLLLLLLSIHSALAMRICSFNVRSFGESKQEDKNAMDVIVKVIKRCDIILVMEIKDSNNRICPILMEKLNRNSRRGITYNYVISSRLGRNTYKE

SEQ ID NO: 14217 - protein, 219 aa, Homo sapiens
MAPPSRHCLLLISTLGVFALNCFTKGQKNSTLIFTRENTIRNCSCSADIRDCDYSLANLMCNCKTVLPLAVERTSYNGHLTIWFTDTSALGHLLNFTLVQDLKLSLCSTNTLPTEYLAICGLKRLRINMEAKHPFPEQSLLIHSGGDSDSREKPMWLHKGWQPCMYISFLDMALFNRDSALKSYSIENVTSIANNFPDFSYFRTFPMPSNKSYVVTFIY

SEQ ID NO: 14218 - protein, 152 aa, Homo sapiens
MLSTLSQCEFSMGKTLLVYDMNLREMENYEKIYKEIECSIAGAHEKIAECKKQILQAKRIRKNRQEYDALAKVIQHHPDRHETLKELEALGKELEHLSHIKESVEDKLELRRKQFHVLLSTIHELQQTLENDEKLSEVEEAQEASMETDPKP

SEQ ID NO: 14219 - protein, 676 aa, Homo sapiens
MMQESGTETKSNGSAIQNGSGGSNHLLECGGLREGRSNGETPAVDIGAADLAHAQQQQQQALQVARQLLLQQQQQQQVSGLKSPKRNDKQPALQVPVSVAMMTPQVITPQQMQQILQQQVLSPQQLQVLLQQQQALMLQQQQLQEFYKKQQEQLQLQLLQQQHAGKQPKEQQQVATQQLAFQQQLLQMQQLQQQHLLSLQRQGLLTIQPGQPALPLQPLAQGMIPTELQQLWKEVTSAHTAEETTGNNHSSLDLTTTCVSSSAPSKTSLIMNPHASTNGQLSVHTPKRESLSHEEHPHSHPLYGHGVCKWPGCEAVCEDFQSFLKHLNSEHALDDRSTAQCRVQMQVVQQLELQLAKDKERLQAMMTHLHVKSTEPKAAPQPLNLVSSVTLSKSASEASPQSLPHTPTTPTAPLTPVTQGPSVITTTSMHTVGPIRRRYSDKYNVPISSDIAQNQEFYKNAEVRPPFTYASLIRQAILESPEKQLTLNEIYNWFTRMFAYFRRNAATWKNAVRHNLSLHKCFVRVENVKGAVWTVDEVEFQKRRPQKISGNPSLIKNMQSSHAYCTPLNAALQASMAENSIPLYTTASMGNPTLGNLASAIREELNGAMEHTNSNESDSSPGRSPMQAVHPVHVKEEPLDPEEAEGPLSLVTTANHSPDFDHDRDYEDEPVNEDME

SEQ ID NO: 14220 - protein, 372 aa, Homo sapiens
MAAERQEALREFVAVTGAEEDRARFFLESAGWDLQIALASFYEDGGDEDIVTISQATPSSVSRGTAPSDNRVTSFRDLIHDQDEDEEEEEGQRSRFYAGGSERSGQQIVGPPRKKSPNELVDDLFKGAKEHGAVAVERVTKSPGETSKPRPFAGGGYRLGAAPEEESAYVAGEKRQHSSQDVHVVLKLWKSGFSLDNGELRSYQDPSNAQFLESIRRGEVPAELRRLAHGGQVNLDMEDHRDEDFVKPKGAFKAFTGEGQKLGSTAPQVLSTSSPAQQAENEAKASSSILIDESEPTTNIQIRLADGGRLVQKFNHSHRISDIRLFIVDARPAMAATSFILMTTFPNKELADESQTLKEANLLNAVIVQRLT

SEQ ID NO: 14221 - protein, 534 aa, Homo sapiens
MATGLQVPLPWLATGLLLLLSVQPWAESGKVLVVPIDGSHWLSMREVLRELHARGHQAVVLTPEVNMHIKEENFFTLTTYAISWTQDEFDRHVLGHTQLYFETEHFLKKFFRSMAMLNNMSLVYHRSCVELLHNEALIRHLNATSFDVVLTDPVNLCAAVLAKYLSIPTVFFLRNIPCDLDFKGTQCPNPSSYIPRLLTTNSDHMTFMQRVKNMLYPLALSYICHAFSAPYASLASELFQREVSVVDILSHASVWLFRGDFVMDYPRPIMPNMVFIGGINCANRKPLSQEFEAYINASGEHGIVVFSLGSMVSEIPEKKAMAIADALGKIPQTVLWRYTGTRPSNLANNTILVKWLPQNDLLGHPMTRAFITHAGSHGVYESICNGVPMVMMPLFGDQMDNAKRMETKGAGVTLNVLEMTSEDLENALKAVINDKSYKENIMRLSSLHKDRPVEPLDLAVFWVEFVMRHKGAPHLRPAAHDLTWYQYHSLDVIGFLLAVVLTVAFITFKCCAYGYRKCLGKKGRVKKAHKSKTH

SEQ ID NO: 14222 - protein, 485 aa, Homo sapiens
MSTGFSFGSGTLGSTTVAAGGTSTGGVFSFGTGASSNPSVGLNFGNLGSTSTPATTSAPSSGFGTGLFGSKPATGFTLGGTNTGIATTITTGLTLGTPATTSAATTGFSLGFNKPAASATPFALPITSTSASGLTLSSALTSTPAASTGFTLNNLGGTTATTTTASTGLSLGGALAGLGGSLFQSTNTGTSGLGQNALGLTLGTTAATSTAGNEGLGGIDFSSSSDKKSDKTGTRPEDSKALKDENLPPVICQDVENLQKFVKEQKQVQEEISRMSSKAMLKVQEDIKALKQLLSLAANGIQRNTLNIDKLKIETAQELKNAEIALRTQKTPPGLQHEYAAPADYFRILVQQFEVQLQQYRQQIEELENHLATQANNSHITPQDLSMAMQKIYQTFVALAAQLQSIHENVKVLKEQYLGYRKMFLGDAVDVFETRRAEAKKWQNTPRVTTGPTPFSTMPNAAAVAMAATLTQQQQPATGLNAFKL

SEQ ID NO: 14223 - protein, 228 aa, Homo sapiens
MQPRRQRLPAPWSGPRGPRPTAPLLALLLLLAPVAAPAGSGDPDDPGQPQDAGVPRRLLQQAARAALHFFNFRSGSPSALRVLAEVQEGRAWINPKEGCKVHVVFSTERYNPESLLQEGEGRLGKCSARVFFKNQKPRPTINVTCTRLIEKKKRQQEDYLLYKQMKQLKNPLEIVSIPDNHGHIDPSLRLIWDLAFLGSSYVMWEMTTQVSHYYLAQLTSVRQWVRKT

SEQ ID NO: 14224 - protein, 249 aa, Homo sapiens
MPALGWAVAAILMLQTAMAEPSPGTLPRKAGVFSDLSNQELKAVHSFLWSKKELRLQPSSTTTMAKNTVFLIEMLLPKKYHVLRFLDKGERHPVREARAVIFFGDQEHPNVTEFAVGPLPGPCYMRALSPRPGYQSSWASRPISTAEYALLYHTLQEATKPLHQFFLNTTGFSFQDCHDRCLAFTDVAPRGVASGQRRSWLIIQRYVEGYFLHPTGLELLVDHGSTDAGHWAVEQVWYNGKFYGSPEEL

SEQ ID NO: 14225 - protein, 190 aa, Homo sapiens
MLLLGLLLLLPLLAGARLLWNWWKLRSLHLPPLAPGFLHLLQPDLPIYLLGLTQKFGPIYRLHLGLQDVVVLNSKRTIEEAMVKKWADFAGRPEPLTYKLVSRNYPDLSLGDYSLLWKAHKKLTRSALLLGIRDSMEPVVEQLTQEFCERMRAQPGTPVAIEEEFSLLTCSIICYLTFGDKIKEVLKTWS

SEQ ID NO: 14226 - protein, 667 aa, Homo sapiens
MGSPVHRVSLGDTWSRQMHPDIESERYMQSFDVERLTNILDGGAQNTALRRKVESIIHSYPEFSCKDNYFMTQNERYKAAMRRAFHIRLIARRLGWLEDGRELGYAYRALSGDVALNIHRVFVRALRSLGSEEQIAKWDPLCKNIQIIATYAQTELGHGTYLQGLETEATYDAATQEFVIHSPTLTATKWWPGDLGRSATHALVQAQLICSGARRGMHAFIVPIRSLQDHTPLPGIIIGDIGPKMDFDQTDNGFLQLNHVLPDGTYVKLGTAQSNYLPMVVVRVELLSGEILPILQKACVIAMRYSVIRRQSRLRPSDPEAKVLDYQTQQQKLFPQLAISYAFHFLAVSLLEFFQHSYTAILNQDFSFLPELHALSTGMKAMMSEFCTQGAEMCRRACGGHGYSKLSGLPSLVTKLSASCTYEGENTVLYLQVARFLVKSYLQTQMSPGSTPQRSLSPSVAYLTAPDLARCPAQRAADFLCPELYTTAWAHVAVRLIKDSVQHLQTLTQSGADQHEAWNQTTVIHLQAAKVHCYYVTVKGFTEALEKLENEPAIQQVLKRLCDLHAIHGILTNSGDFLHDAFLSGAQVDMARTAYLDLLRLIRKDAILLTDAFDFTDQCLNSALGCYDGNVYERLFQWAQKSPTNTQENPAYEEYIRPLLQSWRSKL

SEQ ID NO: 14227 - protein, 1029 aa, Homo sapiens
MADKTPGGSQKASSKTRSSDVHSSGSSDAHMDASGPSDSDMPSRTRPKSPRKHNYRNESARESLCDSPHQNLSRPLLENKLKAFSIGKMSTAKRTLSKKEQEELKKKEDEKAAAEIYEEFLAAFEGSDGNKVKTFVRGGVVNAAKEEHETDEKRGKIYKPSSRFADQKNPPNQSSNERPPSLLVIETKKPPLKKGEKEKKKSNLELFKEELKQIQEERDERHKTKGRLSRFEPPQSDSDGQRRSMDAPSRRNRSSGVLDDYAPGSHDVGDPSTTNLYLGNINPQMNEEMLCQEFGRFGPLASVKIMWPRTDEERARERNCGFVAFMNRRDAERALKNLNGKMIMSFEMKLGWGKAVPIPPHPIYIPPSMMEHTLPPPPSGLPFNAQPRERLKNPNAPMLPPPKNKEDFEKTLSQAIVKVVIPTERNLLALIHRMIEFVVREGPMFEAMIMNREINNPMFRFLFENQTPAHVYYRWKLYSILQGDSPTKWRTEDFRMFKNGSFWRPPPLNPYLHGMSEEQETEAFVEEPSKKGALKEEQRDKLEEILRGLTPRKNDIGDAMVFCLNNAEAAEEIVDCITESLSILKTPLPKKIARLYLVSDVLYNSSAKVANASYYRKFFETKLCQIFSDLNATYRTIQGHLQSENFKQRVMTCFRAWEDWAIYPEPFLIKLQNIFLGLVNIIEEKETEDVPDDLDGAPIEEELDGAPLEDVDGIPIDATPIDDLDGVPIKSLDDDLDGVPLDATEDSKKNEPIFKVAPSKWEAVDESELEAQAVTTSKWELFDQHEESEEEENQNQEEESEDEEDTQSSKSEEHHLYSNPIKEEMTESKFSKYSEMSEEKRAKLREIELKVMKFQDELESGKRPKKPGQSFQEQVEHYRDKLLQREKEKELERERERDKKDKEKLESRSKDKKEKDECTPTRKERKRRHSTSPSPSRSSSGRRVKSPSPKSERSERSERSHKESSRSRSSHKDSPRDVSKKAKRSPSGSRTPKRSRRSRSRSPKKSGKKSRSQSRSPHRSHKKSKKNKH

SEQ ID NO: 14228 - protein, 408 aa, Homo sapiens
MRSSCVLLTALVALAAYYVYIPLPGSVSDPWKLMLLDATFRGAQQVSNLIHYLGLSHHLLALNFIIVSFGKKSAWSSAQVKVTDTDFDGVEVRVFEGPPKPEEPLKRSVVYIHGGGWALASAKIRYYDELCTAMAEELNAVIVSIEYRLVPKVYFPEQIHDVVRATKYFLKPEVLQKYMVDPGRICISGDSAGGNLAAALGQQFTQDASLKNKLKLQALIYPVLQALDFNTPSYQQNVNTPILPRYVMVKYWVDYFKGNYDFVQAMIVNNHTSLDVEEAAAVRARLNWTSLLPASFTKNYKPVVQTTGNARIVQELPQLLDARSAPLIADQAVLQLLPKTYILTCEHDVLRDDGIMYAKRLESAGVEVTLDHFEDGFHGCMIFTSWPTNFSVGIRTRNSYIKWLDQNL

SEQ ID NO: 14229 - protein, 41 aa, Homo sapiens
MWFWILWRFWHDSEEVLGHFPYPDPSQWTDEELGIPPDDED

SEQ ID NO: 14230 - protein, 386 aa, Homo sapiens
MIISTPQRLTSSGSVLIGSPYTPAPAMVTQTHIAEATGWVPGDRKRARKFIDSDFSESKRSKKGDKNGKGLRHFSMKVCEKVQRKGTTSYNEVADELVSEFTNSNNHLAADSQAYDQKNIRRRVYDALNVLMAMNIISKEKKEIKWIGLPTNSAQECQNLEIEKQRRIERIKQKRAQLQELLLQQIAFKNLVQRNRQNEQQNQGPPALNSTIQLPFIIINTSRKTVIDCSISSDKFEYLFNFDNTFEIHDDIEVLKRMGMSFGLESGKCSLEDLKLAKSLVPKALEGYITDISTGPSWLNQGLLLNSTQSVSNLDLTTGATLPQSSVNQGLCLDAEVALATGQFLAPNSHQSSSAASHCSESRGETPCSFNDEDEEDDEEDSSSPE

SEQ ID NO: 14231 - protein, 298 aa, Homo sapiens
MRLLPRLLLLLLLVFPATVLFRGGPRGLLAVAQDLTEDEETVEDSIIEDEDDEAEVEEDEPTDLVEDKEEEDVSGEPEASPSADTTILFVKGEDFPANNIVKFLVGFTNKGTEDFIVESLDASFRYPQDYQFYIQNFTALPLNTVVPPQRQATFEYSFIPAEPMGGRPFGLVINLNYKDLNGNVFQDAVFNQTVTVIEREDGLDGETIFMYMFLAGLGLLVIVGLHQLLESRKRKRPIQKVEMGTSSQNDVDMSWIPQETLNQIMQSRRDKASPRRLPRKRAQKRSVGSDERRRRETH

SEQ ID NO: 14232 - protein, 348 aa, Homo sapiens
MSLVLLSLAALCRSAVPREPTVQCGSETGPSPEWMLQHDLIPGDLRDLRVEPVTTSVATGDYSILMNVSWVLRADASIRLLKATKICVTGKSNFQSYSCVRCNYTEAFQTQTRPSGGKWTFSYIGFPVELNTVYFIGAHNIPNANMNEDGPSMSVNFTSPGSLWDPNITACKKNEETVEVNFTTTPLGNRYMALIQHSTIIGFSQVFEPHQKKQTRASVVIPVTGDSEGATVQLTPYFPTCGSDCIRHKGTVVLCPQTGVPFPLDNNKSKPGGWLPLLLLSLLVATWVLVAGIYLMWRHERIKKTSFSTTTLLPPIKVLVVYPSEICFHHTICYFTEFLQNHCRSEVI

SEQ ID NO: 14233 - protein, 116 aa, Homo sapiens
METPAQLLFLLLLWLPDTTGEIVLTQSPGTLSLSPGERATLSCRASQSVSSSYLAWYQQKPGQAPRLLIYGASSRATGIPDRFSGSGSGTDFTLTISRLEPEDFAVYYCQQYGSSP

SEQ ID NO: 14234 - protein, 235 aa, Homo sapiens
MACRPRSPPRHQSRCDGDASPPSPARWSLGRKRRADGRRWRPEDAEEAEHRGAERRPERYKRKLLINDFGRERKSSSGSSDSKESMSTVPADFETDESVLMRRQKQINYGKNTIAYDRYIKEVPRHLRQPGIHPKTPNKFKKYSRRSWDQQIKLWKVALHFWDPPAEEGCDLQEIHPVDLESAESSSEPQTSSQDDFDVYSGTPTKVRHMDSQVEDEFDLEACLTEPLRDFSAMS

SEQ ID NO: 14235 - protein, 135 aa, Homo sapiens
MPALLPVASRLLLLPRVLLTMASGSPPTQPSPASDSGSGYVPGSVSAAFVTCPNEKVAKEIARAVVEKRLAACVNLIPQITSIYEWKGKIEEDSEVLMMIKTQSSLVPALTDFVRSVHPYEVAESCHDEPCSCSS

SEQ ID NO: 14236 - protein, 184 aa, Homo sapiens
MKAIIHLTLLALLSVNTEDNQSSGPPTGTALLETSTLNSTGPSNPCQDDPCADNSLCVKLHNTSFCLCLEGYYYNSSTCKKGKVFPGKISVTVSETFDPEEKHSMAYQDLHSEITSLFKDVFGTSVYGQTVILTVSTSLSPRSEMRADDKFVNVTIVTILAETTSDNEKTVTEKINKAIRSSSS

SEQ ID NO: 14237 - protein, 214 aa, Homo sapiens
MRPGGFLGAGQRLSRAMSRCVLEPRPPGKRWMVAGLGNPGLPGTRHSVGMAVLGQLARRLGVAESWTRDRHCAADLALAPLGDAQLVLLRPRRLMNANGRSVARAAELFGLTAEEVYLVHDELDKPLGRLALKLGGSARGHNGVRSCISCLNSNAMPRLRVGIGRPAHPEAVQAHVLGCFSPAEQELLPLLLDRATDLILDHIRERSQGPSLGP

SEQ ID NO: 14238 - protein, 569 aa, Homo sapiens
MSEASGNLNSLRMANVALREELNALRGENANLGLQLGRALAEVNSLRGNVSSYIRWPVPIVPVLAEENLEFALSEIEVIPGGELPFLCRPPPRAEPDCISDDLLINVIQDRSTPDGPADPPLLPIPPPPALPPPASKEPPPQPPLAPLERPEIEPFSGDPVYLAEFLMQLETFIADHEVHFPGGAERVAFLISFFTGEAKDWAISVTQEGSPLHANFPRFLDEIRKEFCGPIPPRVAKKAIRKLKQGHCTLGSYADAFQFLAQFLSWDDCRLQNQFLKGLSEFFRKELLWSTEMADLDELILECVEIERKVRVPKPIPLPGVRNIIFPFAPSPNEEESEDEEYYSEDEDQEARRHRLHSKDQRKRMRAFQQEMKEKEEEEMKKEEEMKKKEEKEEEEEEEMKQKEEEEEIRNKNEEEGESKDEEDEDEDGGQKPEGEPQQDPGTEETYGEVEEEPLDEAQDDDLDELMEMEPTFVHASSQTSGPTSGYHAENFLGASPPIIQPSRRRNQNRVPLLEGLPGTNSPFYSSPQLIRRTGRLGQRQVRRRPPVLFRLTPRQGGHRAARGRIRV

SEQ ID NO: 14239 - protein, 1001 aa, Homo sapiens
MAFYSCCWVLLALTWHTSAYGPDQRAQKKGDIILGGLFPIHFGVAAKDQDLKSRPESVECIRYNFRGFRWLQAMIFAIEEINSSPALLPNLTLGYRIFDTCNTVSKALEATLSFVAQNKIDSLNLDEFCNCSEHIPSTIAVVGATGSGVSTAVANLLGLFYIPQVSYASSSRLLSNKNQFKSFLRTIPNDEHQATAMADIIEYFRWNWVGTIAADDDYGRPGIEKFREEAEERDICIDFSELISQYSDEEEIQHVVEVIQNSTAKVIVVFSSGPDLEPLIKEIVRRNITGKIWLASEAWASSSLIAMPQYFHVVGGTIGFALKAGQIPGFREFLKKVHPRKSVHNGFAKEFWEETFNCHLQEGAKGPLPVDTFLRGHEESGDRFSNSSTAFRPLCTGDENISSVETPYIDYTHLRISYNVYLAVYSIAHALQDIYTCLPGRGLFTNGSCADIKKVEAWQVPFSNCSRDCLAGTRKGIIEGEPTCCFECVECPDGEYSDETDASACNKCPDDFWSNENHTSCIAKEIEFLSWTEPFGIALTLFAVLGIFLTAFVLGVFIKFRNTPIVKATNRELSYLLLFSLLCCFSSSLFFIGEPQDWTCRLRQPAFGISFVLCISCILVKTNRVLLVFEAKIPTSFHRKWWGLNLQFLLVFLCTFMQIVICVIWLYTAPPSSYRNQELEDEIIFITCHEGSLMALGFLIGYTCLLAAICFFFAFKSRKLPENFNEAKFITFSMLIFFIVWISFIPAYASTYGKFVSAVEVIAILAASFGLLACIFFNKIYIILFKPSRNTIEEVRCSTAAHAFKVAARATLRRSNVSRKRSSSLGGSTGSTPSSSISSKSNSEDPFPQPERQKQQQPLALTQQEQQQQPLTLPQQQRSQQQPRCKQKVIFGSGTVTFSLSFDEPQKNAMAHRNSTHQNSLEAQKSSDTLTRHEPLLPLQCGETDLDLTVQETGLQGPVGGDQRPEVEDPEELSPALVVSSSQSFVISGGGSTVTENVVNS

SEQ ID NO: 14240 - protein, 319 aa, Homo sapiens
MKIELSMQPWNPGYSSEGATAQETYTCPKMIEMEQAEAQLAELDLLASMFPGENELIVNDQLAVAELKDCIEKKTMEGRSSKVYFTINMNLDVSDEKMAMFSLACILPFKYPAVLPEITVRSVLLSRSQQTQLNTDLTAFLQKHCHGDVCILNATEWVREHASGYVSRDTSSSPTTGSTVQSVDLIFTRLWIYSHHIYNKCKRKNILEWAKELSLSGFSMPGKPGVVCVEGPQSACEEFWSRLRKLNWKRILIRHREDIPFDGTNDETERQRKFSIFEEKVFSVNGARGNHMDFGQLYQFLNTKGCGDVFQMFFGVEGQ

SEQ ID NO: 14241 - protein, 442 aa, Homo sapiens
MPLENLEEEGLPKNPDLRIAQLRFLLSLPEHRGDAAVRDELMAAVRDNNFWNRIRQEQTEDCPPSSPSRGWHCQDWPSRKPPTSIRLCFAKPIIKRHRMPSYMAPYYEALCKSLDWQIDVDLLNKMKKANEDELKRLDEELEDAEKNLGESEIRDAMMAKAEYLCRIGDKEGALTAFRKTYDKTVALGHRLDIVFYLLRIGLFYMDNDLITRNTEKAKSLIEEGGDWDRRNRLKVYQGLYCVAIRDFKQAAELFLDTVSTFTSYELMDYKTFVTYTVYVSMIALERPDLREKVIKGAEILEVLHSLPAVRQYLFSLYECRYSVFFQSLAVVEQEMKKDWLFAPHYRYYVREMRIHAYSQLLESYRSLTLGYMAEAFGVGVEFIDQELSRFIAAGRLHCKIDKVNEIVETNRPDSKNWQYQETIKKGDLLLNRVQKLSRVINM

SEQ ID NO: 14242 - protein, 102 aa, Homo sapiens
MRLAVGALLVCAVLGLCLAVPDKTVRWCAVSEHEATKCQSFRDHMKSVIPSDGPFSYRRGPKYGRQGGLDLGASQPGPGTFWQRQIKRIPTIQLSSWEGPAV

SEQ ID NO: 14243 - protein, 152 aa, Homo sapiens
MNLQPIFWIGLISSVCCVFAQTDENRCLKANAKSCGECIQAGPNCGWCTNSVSKTFLQEGMPTSARCDDLEALKKKGCPPDDIENPRGSKDIKKNKNVTNRSKGTAEKLKPEDITQIQPQQLVLRLRSGEPQTFTLKFKRAEDYPIDLYYLM

SEQ ID NO: 14244 - protein, 828 aa, Homo sapiens
MAAEEADVDIEGDVVAAAGAQPGSGENTASVLQKDHYLDSSWRTENGLIPWTLDNTISEENRAVIEKMLLEEEYYLSKKSQPEKVWLDQKEDDKKYMKSLQKTAKIMVHSPTKPASYSVKWTIEEKELFEQGLAKFGRRWTKISKLIGSRTVLQVKSYARQYFKNKVKCGLDKETPNQKTGHNLQVKNEDKGTKAWTPSCLRGRADPNLNAVKIEKLSDDEEVDITDEVDELSSQTPQKNSSSDLLLDFPNSKMHETNQGEFITSDSQEALFSKSSRGCLQNEKQDETLSSSEITLWTEKQSNGDKKSIELNDQKFNELIKNCNKHDGRGIIVDARQLPSPEPCEIQKNLNDNEMLFHSCQMVEESHEEEELKPPEQEIEIDRNIIQEEEKQAIPEFFEGRQAKTPERYLKIRNYILDQWEICKPKYLNKTSVRPGLKNCGDVNCIGRIHTYLELIGAINFGCEQAVYNRPQTVDKVRIRDRKDAVEAYQLAQRLQSMRTRRRRVRDPWGNWCDAKDLEGQTFEHLSAEELAKRREEEKGRPVKSLKVPRPTKSSFDPFQLIPCNFFSEEKQEPFQVKVASEALLIMDLHAHVSMAEVIGLLGGRYSEVDKVVEVCAAEPCNSLSTGLQCEMDPVSQTQASETLAVRGFSVIGWYHSHPAFDPNPSLRDIDTQAKYQSYFSRGGAKFIGMIVSPYNRNNPLPYSQITCLVISEEISPDGSYRLPYKFEVQQMLEEPQWGLVFEKTRWIIEKYRLSHSSVPMDKIFRRDSDLTCLQKLLECMRKTLSKVTNCFMAEEFLTEIENLFLSNYKSNQENGVTEENCTKELLM

SEQ ID NO: 14245 - protein, 1935 aa, Homo sapiens
MQFVSWATLLTLLVRDLAEMGSPDAAAAVRKDRLHPRQVKLLETLSEYEIVSPIRVNALGEPFPTNVHFKRTRRSINSATDPWPAFASSSSSSTSSQAHYRLSAFGQQFLFNLTANAGFIAPLFTVTLLGTPGVNQTKFYSEEEAELKHCFYKGYVNTNSEHTAVISLCSGMLGTFRSHDGDYFIEPLQSMDEQEDEEEQNKPHIIYRRSAPQREPSTGRHACDTSEHKNRHSKDKKKTRARKWGERINLAGDVAALNSGLATEAFSAYGNKTDNTREKRTHRRTKRFLSYPRFVEVLVVADNRMVSYHGENLQHYILTLMSIVASIYKDPSIGNLINIVIVNLIVIHNEQDGPSISFNAQTTLKNFCQWQHSKNSPGGIHHDTAVLLTRQDICRAHDKCDTLGLAELGTICDPYRSCSISEDSGLSTAFTIAHELGHVFNMPHDDNNKCKEEGVKSPQHVMAPTLNFYTNPWMWSKCSRKYITEFLDTGYGECLLNEPESRPYPLPVQLPGILYNVNKQCELIFGPGSQVCPYMMQCRRLWCNNVNGVHKGCRTQHTPWADGTECEPGKHCKYGFCVPKEMDVPVTDGSWGSWSPFGTCSRTCGGGIKTAIRECNRPEPKNGGKYCVGRRMKFKSCNTEPCLKQKRDFRDEQCAHFDGKHFNINGLLPNVRWVPKYSGILMKDRCKLFCRVAGNTAYYQLRDRVIDGTPCGQDTNDICVQGLCRQAGCDHVLNSKARRDKCGVCGGDNSSCKTVAGTFNTVHYGYNTVVRIPAGATNIDVRQHSFSGETDDDNYLALSSSKGEFLLNGNFVVTMAKREIRIGNAVVEYSGSETAVERINSTDRIEQELLLQVLSVGKLYNPDVRYSFNIPIEDKPQQFYWNSHGPWQACSKPCQGERKRKLVCTRESDQLTVSDQRCDRLPQPGHITEPCGTDCDLRWHVASRSECSAQCGLGYRTLDIYCAKYSRLDGKTEKVDDGFCSSHPKPSNREKCSGECNTGGWRYSAWTECSKSCDGGTQRRRAICVNTRNDVLDDSKCTHQEKVTIQRCSEFPCPQWKSGDWSECLVTCGKGHKHRQVWCQFGEDRLNDRMCDPETKPTSMQTCQQPECASWQAGPWGQCSVTCGQGYQLRAVKCIIGTYMSVVDDNDCNAATRPTDTQDCELPSCHPPPAAPETRRSTYSAPRTQWRFGSWTPCSATCGKGTRMRYVSCRDENGSVADESACATLPRPVAKEECSVTPCGQWKALDWSSCSVTCGQGRATRQVMCVNYSDHVIDRSECDQDYIPETDQDCSMSPCPQRTPDSGLAQHPFQNEDYRPRSASPSRTHVLGGNQWRTGPWGACSSTCAGGSQRRVVVCQDENGYTANDCVERIKPDEQRACESGPCPQWAYGNWGECTKLCGGGIRTRLVVCQRSNGERFPDLSCEILDKPPDREQCNTHACPHDAAWSTGPWSSCSVSCGRGHKQRNVYCMAKDGSHLESDYCKHLAKPHGHRKCRGGRCPKWKAGAWSQCSVSCGRGVQQRHVGCQIGTHKIARETECNPYTRPESERDCQGPRCPLYTWRAEEWQECTKTCGEGSRYRKVVCVDDNKNEVHGARCDVSKRPVDRESCSLQPCEYVWITGEWSECSVTCGKGYKQRLVSCSEIYTGKENYEYSYQTTINCPGTQPPSVHPCYLRDCPVSATWRVGNWGSCSVSCGVGVMQRSVQCLTNEDQPSHLCHTDLKPEERKTCRNVYNCELPQNCKEVKRLKGASEDGEYFLMIRGKLLKIFCAGMHSDHPKEYVTLVHGDSENFSEVYGHRLHNPTECPYNGSRRDDCQCRKDYTAAGFSSFQKIRIDLTSMQIITTDLQFARTSEGHPVPFATAGDCYSAAKCPQGRFSINLYGTGLSLTESARWISQGNYAVSDIKKSPDGTRVVGKCGGYCGKCTPSSGTGLEVRVL

SEQ ID NO: 14246 - protein, 628 aa, Homo sapiens
MGSGARFPSGTLRVRWLLLLGLVGPVLGAARPGFQQTSHLSSYEIITPWRLTRERREAPRPYSKQVSYVIQAEGKEHIIHLERNKDLLPEDFVVYTYNKEGTLITDHPNIQNHCHYRGYVEGVHNSSIALSDCFGLRGLLHLENASYGIEPLQNSSHFEHIIYRMDDVYKEPLKCGVSNKDIEKETAKDEEEEPPSMTQLLRRRRAVLPQTRYVELFIVVDKERYDMMGRNQTAVREEMILLANYLDSMYIMLNIRIVLVGLEIWTNGNLINIVGGAGDVLGNFVQWREKFLITRRRHDSAQLVLKKGFGGTAGMAFVGTVCSRSHAGGINVFGQITVETFASIVAHELGHNLGMNHDDGRDCSCGAKSCIMNSGASGSRNFSSCSAEDFEKLTLNKGGNCLLNIPKPDEAYSAPSCGNKLVDAGEECDCGTPKECELDPCCEGSTCKLKSFAECAYGDCCKDCRFLPGGTLCRGKTSECDVPEYCNGSSQFCQPDVFIQNGYPCQNNKAYCYNGMCQYYDAQCQVIFGSKAKAAPKDCFIEVNSKGDRFGNCGFSGNEYKKCATGNALCGKLQCENVQEIPVFGIVPAIIQTPSRGTKCWGVDFQLGSDVPDPGMVNEGTKCGAGKK

SEQ ID NO: 14247 - protein, 612 aa, Homo sapiens
MSNSHPLRPFTAVGEIDHVHILSEHIGALLIGEEYGDVTFVVEKKRFPAHRVILAARCQYFRALLYGGMRESQPEAEIPLQDTTAEAFTMLLKYIYTGRATLTDEKEEVLLDFLSLAHKYGFPELEDSTSEYLCTILNIQNVCMTFDVASLYSLPKLTCMCCMFMDRNAQEVLSSEGFLSLSKTALLNIVLRDSFAAPEKDIFLALLNWCKHNSKENHAEIMQAVRLPLMSLTELLNVVRPSGLLSPDAILDAIKVRSESRDMDLNYRGMLIPEENIATMKYGAQVVKGELKSALLDGDTQNYDLDHGFSRHPIDDDCRSGIEIKLGQPSIINHIRILLWDRDSRSYSYFIEVSMDELDWVRVIDHSQYLCRSWQKLYFPARVCRYIRIVGTHNTVNKIFHIVAFECMFTNKTFTLEKGLIVPMENVATIADCASVIEGVSRSRNALLNGDTKNYDWDSGYTCHQLGSGAIVVQLAQPYMIGSIRLLLWDCDDRSYSYYVEVSTNQQQWTMVADRTKVSCKSWQSVTFERQPASFIRIVGTHNTANEVFHCVHFECPEQQSSQKEENSEESGTGDTSLAGQQLDSHALRAPSGSSLPSSPGSNSRSPNRQHQ

SEQ ID NO: 14248 - protein, 321 aa, Homo sapiens
MAPAFLLLLLLWPQGCVSGPSADSVYTKVRLLEGETLSVQCSYKGYKNRVEGKVWCKIRKKKCEPGFARVWVKGPRYLLQDDAQAKVVNITMVALKLQDSGRYWCMRNTSGILYPLMGFQLDVSPAPQTERNIPFTHLDNILKSGTVTTGQAPTSGPDAPFTTGVMVFTPGLITLPRLLASTRPASKTGYSFTATSTTSQGPRRTMGSQTVTASPSNARDSSAGPESISTKSGDLSTRSPTTGLCLTSRSLLNRLPSMPSIRHQDVYSTVLGVVLTLLVLMLIMVYGFWKKRHMASYSMCSDPSTRDPPGRPEPYVEVYLI

SEQ ID NO: 14249 - protein, 946 aa, Homo sapiens
MKILILGIFLFLCSTPAWAKEKHYYIGIIETTWDYASDHGEKKLISVDTEHSNIYLQNGPDRIGRLYKKALYLQYTDETFRTTIEKPVWLGFLGPIIKAETGDKVYVHLKNLASRPYTFHSHGITYYKEHEGAIYPDNTTDFQRADDKVYPGEQYTYMLLATEEQSPGEGDGNCVTRIYHSHIDAPKDIASGLIGPLIICKKDSLDKEKEKHIDREFVVMFSVVDENFSWYLEDNIKTYCSEPEKVDKDNEDFQESNRMYSVNGYTFGSLPGLSMCAEDRVKWYLFGMGNEVDVHAAFFHGQALTNKNYRIDTINLFPATLFDAYMVAQNPGEWMLSCQNLNHLKAGLQAFFQVQECNKSSSKDNIRGKHVRHYYIAAEEIIWNYAPSGIDIFTKENLTAPGSDSAVFFEQGTTRIGGSYKKLVYREYTDASFTNRKERGPEEEHLGILGPVIWAEVGDTIRVTFHNKGAYPLSIEPIGVRFNKNNEGTYYSPNYNPQSRSVPPSASHVAPTETFTYEWTVPKEVGPTNADPVCLAKMYYSAVEPTKDIFTGLIGPMKICKKGSLHANGRQKDVDKEFYLFPTVFDENESLLLEDNIRMFTTAPDQVDKEDEDFQESNKMHWTFNVECLTTDHYTGGMKQKYTVNQCRRQSEDSTFYLGERTYYIAAVEVEWDYSPQREWEKELHHLQEQNVSNAFLDKGEFYIGSKYKKVVYRQYTDSTFRVPVERKAEEEHLGILGPQLHADVGDKVKIIFKNMATRPYSIHAHGVQTESSTVTPTLPGETLTYVWKIPERSGAGTEDSACIPWAYYSTVDQVKDLYSGLIGPLIVCRRPYLKVFNPRRKLEFALLFLVFDENESWYLDDNIKTYSDHPEKVNKDDEEFIESNKMHAINGRMFGNLQGLTMHVGDEVNWYLMGMGNEIDLHTVHFHGHSFQYKHLLRLTGEYGM

SEQ ID NO: 14250 - protein, 91 aa, Homo sapiens
MAASSRAQVLSLYRAMLRESKRFSAYNYRTYAVRRIRDAFRENKNVKDPVEIQTLVNKAKRDLGVIRRQVHIGQLYSTDKLIIENRDMPRT

SEQ ID NO: 14251 - protein, 285 aa, Homo sapiens
MEVPPPAPRSFLCRALCLFPRVFAAEAVTADSEVLEERQKRLPYVPEPYYPESGWDRLRELFGKDEQQRISKDLANICKTAATAGIIGWVYGGIPAFIHAKQQYIEQSQAEIYHNRFDAVQSAHRAATRGFIRYGWRWGWRTAVFVTIFNTVNTSLNVYRNKDALSHFVIAGAVTGSLFRINVGLRGLVAGGIIGALLGTPVGGLLMAFQKYSGETVQERKQKDRKALHELKLEEWKGRLQVTEHLPEKIESSLQEDEPENDAKKIEALLNLPRNPSVIDKQDKD

SEQ ID NO: 14252 - protein, 505 aa, Homo sapiens
MKRTPTAEEREREAKKLRLLEELEDTWLPYLTPKDDEFYQQWQLKYPKLILREASSVSEELHKEVQEAFLTLHKHGCLFRDLVRIQGKDLLTPVSRILIGNPGCTYKYLNTRLFTVPWPVKGSNIKHTEAEIAAACETFLKLNDYLQIETIQALEELAAKEKANEDAVPLCMSADFPRVGMGSSYNGQDEVDIKSRAAYNVTLLNFMDPQKMPYLKEEPYFGMGKMAVSWHHDENLVDRSAVAVYSYSCEGPEEESEDDSHLEGRDPDIWHVGFKISWDIETPGLAIPLHQGDCYFMLDDLNATHQHCVLAGSQPRFSSTHRVAECSTGTLDYILQRCQLALQNVCDDVDNDDVSLKSFEPAVLKQGEEIHNEVEFEWLRQFWFQGNRYRKCTDWWCQPMAQLEALWKKMEGVTNAVLHEVKREGLPVEQRNEILTAILASLTARQNLRREWHARCQSRIARTLPADQKPECRPYWEKDDASMPLPFDLTDIVSELRGQLLEAKP

SEQ ID NO: 14253 - protein, 128 aa, Homo sapiens
MAGSGVRQATSTASTFVKPIFSRDMNEAKRRVRELYRAWYREVPNTVHQFQLDITVKMGRDKVREMFMKNAHVTDPRVVDLLVIKGKIELEETIKVWKQRTHVMRFFHETEAPRPKDFLSKFYVGHDP

SEQ ID NO: 14254 - protein, 350 aa, Homo sapiens
MGSKKLKRVGLSQELCDRLSRHQILTCQDFLCLSPLELMKVTGLSYRGVHELLCMVSRACAPKMQTAYGIKAQRSADFSPAFLSTTLSALDEALHGGVACGSLTEITGPPGCGKTQFCIMMSILATLPTNMGGLEGAVVYIDTESAFSAERLVEIAESRFPRYFNTEEKLLLTSSKVHLYRELTCDEVLQRIESLEEEIISKGIKLVILDSVASVVRKEFDAQLQGNLKERNKFLAREASSLKYLAEEFSIPVILTNQITTHLSGALASQADLVSPADDLSLSEGTSGSSCVIAALGNTWSHSVNTRLILQYLDSERRQILIAKSPLAPFTSFVYTIKEEGLVLQGQEKP

SEQ ID NO: 14255 - protein, 117 aa, Homo sapiens
MDMRVPAQLLGLLLLWLPDTRCDIQMTQSPSSLSASVGDRVTITCRASQGISNYLAWYQQKPGKVPKLLIYAASTLQSGVPSRFSGSGSGTDFTLTISSLQPEDVATYYCQKYNSAP

SEQ ID NO: 14256 - protein, 64 aa, Homo sapiens
MAPQKDRKPKRSTWRFNLDLTHPVEDGIFDSGNFGTFPSEYLGFSSLVLHFFCFKIGAISTGEG

SEQ ID NO: 14257 - protein, 195 aa, Homo sapiens
MRLLLLLLVAASAMVRSEASANLGGVPSKRLKMQYATGPLLKFQICVSUGYRRVFEEYMRVISQRYPDIRIEGENYLPQPIYRHIASFLSVFKLVLIGLIIVGKDPFAFFGMQAPSIWQWGQENKVYACMMVFFLSNMIENQCMSTGAFEITLNDVPVWSKLESGHLPSMQQLVQILDNEMKLNVHMDSIPHHRS

SEQ ID NO: 14258 - protein, 396 aa, Homo sapiens
MNFQAGGGQSPQQQQSLAAPGGGGAAAQQLVCGGQFGGAGPGAGGGGGPSQQLAGGPPQQFALSNSAAIRAEIQRFESVHPNIYAIYDLIERIEDLALQNQIREHVISIEDSFVNSQEWTLSRSVPELKVGIVGNLSSGKSALVHRYLTGTYVQEESPEGGRFKKEIVVDGQSYLLLIRDEGGPPELQFAAWVDAVVFVFSLEDEISFQTVYNYFLRLCSFRNASEVPMVLVGTQDAISAANPRVIDDSRARKLSTDLKRCTYYETCATYGLNVERVFQDVAQKVVALRKKQQLAIGPCKSLPNSPSHSAVSAASIPAVHINQATNGGGSAFSDYSSSVPSTPSISQRELRIETIAASSTPTPIRKQSKRRSNIFTICATVSNFSSTKRPFQLLPN

SEQ ID NO: 14259 - protein, 323 aa, Homo sapiens
MSGSDGGLEEEPELSITLTLRMLMHGKEVGSIIGKKGETVKRIREQSSARITISEGSCPERITTITGSTAAVFHAVSMIAFKLDEDLCAAPANGGNVSRPPVTLRLVIPASQCGSLIGKAGTKIKEIRETTGAQVQVAGDLLPNSTERAVTVSGVPDAIILCVRQICAVILESPPKGATIPYHPSLSLGTVLLSANQGFSVQGQYGAVTPAEVTKLQQLSSHAVPFATPSVVPGLDPGTQTSSQEFLVPNDLIGCVIGRQGSKISEIRQMSGAHIKIGNQAEGAGERHVTITGSPVSIALAQYLITAWAAAGLGGLHCQDGSS

SEQ ID NO: 14260 - protein, 401 aa, Homo sapiens
MRNKRVLKTKKRRSGRGGQDPGLHPHRSEATAGRSPPTPTVTLGPDCPPPPPPPPPNNNNNNNSKHTGHKSACVPNMTERRRDELSEEINNLREKVMKQSEENNNLQSQVQKLTEENTTLREQVEPTPEDEDDDIELRGAAAAAAPPPPIEEECPEDLPEKFDGNPDMLAPFMAQCQIFMEKSTRDFSVDRVRVCFVTSMMTGRAARWASAKLERSHYLMHNYPAFMMEMKHVFEDPQRREVAKRKIRRLRQGMGSVIDYSNAFQMIAQDLDWNEPALIDQYHEGLSDHIQEELSHLEVAKSLSALIGQCIHIERRLARAAAARKPRSPPRALVLPHIASHHQVDPTEPVGGARMRLTQEEKERRRKLNLCLYCGTGGHYADNCPAKASKSSPAGNSPAPL

SEQ ID NO: 14261 - protein, 120 aa, Homo sapiens
MRLPAQLLGLLMLWVPGSSGDVVMTQSPLSLPVTLGQPASISCRSSQSLVYSDGNTYLNWFQQRPGQSPRRLIYKVSNWDSGVPDRFSGSGSGTDFTLKISRVEAEDVGVYYCMQGTHWP

SEQ ID NO: 14262 - protein, 1752 aa, Homo sapiens
MSVLISQSVINYVEEENIPALKALLEKCKDVDERNECGQTPLMIAAEQGNLEIVKELIKNGANCNLEDLDNWTALISASKEGHVHIVEELLKCGVNLEHRDMGGWTALMWACYKGRTDVVELLLSHGANPSVTGLYSVYPIIWAAGRGHADIVHLLLQNGAKVNCSDKYGTTPLVWAARKGHLECVKHLLAMGADVDQEGANSMTALIVAVKGGYTQSVKEILKRNPNVNLTDKDGNTALMIASKEGHTEIVQDLLDAGTYVNIPDRSGDTVLIGAVRGGHVEIVRALLQKYADIDIRGQDNKTALYWAVEKGNATMVRDILQCNPDTEICTKDGETPLIKATKMRNIEVVELLLDKGAKVSAVDKKGDTPLHIAIRGRSRKLAELLLRNPKDGRLLYRPNKAGETPYNIDCSHQKSILTQIFGARHLSPTETDGDMLGYDLYSSALADILSEPTMQPPICVGLYAQWGSGKSFLLKKLEDEMKTFAGQQIEPLFQFSWLIVFLTLLLCGGLGLLFAFTVHPNLGIAVSLSFLALLYIFFIVIYFGGRREGESWNWAWVLSTRLARHIGYLELLLKLMFVNPPELPEQTTKALPVRFLFTDYNRLSSVGGETSLAEMIATLSDACEREFGFLATRLFRVFKTEDTQGKKKWKKTCCLPSFVIFLFIIGCIISGITLLAIFRVDPKHLTVNAVLISIASVVGLAFVLNCRTWWQVLDSLLNSQRKRLHNAASKLHKLKSEGFMKVLKCEVELMARMAKTIDSFTQNQTRLVVIIDGLDACEQDKVLQMLDTVRVLFSKGPFIAIFASDPHIIIKAINQNLNSVLRDSNINGHDYMRNIVHLPVFLNSRGLSNARKFLVTSATNGDVPCSDTTGIQEDADRRVSQNSLGEMTKLGSKTALNRRDTYRRRQMQRTITRQMSFDLTKLLVTEDWFSDISPQTMRRLLNIVSVTGRLLRANQISFNWDRLASWINLTEQWPYRTSWLILYLEETEGIPDQMTLKTIYERISKNIPTTKDVEPLLEIDGDIRNFEVFLSSRTPVLVARDVKVFLPCTVNLDPKLREIIADVRAAREQISIGGLAYPPLPLHEGPPRAPSGYSQPPSVCSSTSFNGPFAGGVVSPQPHSSYYSGMTGPQHPFYNRPFFAPYLYTPRYYPGGSQHLISRPSVKTSLPRDQNNGLGSGPAPGPVVLLNSLNVDAVCEKLKQIEGLDQSMLPQYCTTIKKANINGRVLAQCNIDELKKEMNMNFGDWHLFRSTVLEMRNAESHVVPEDPRFLSESSSGPAPHGEPARRASHNELPHTELSSQTPYTLNFSFEELNTLGLDEGAPRHSNLSWQSQTRRTPSLSSLNSQDSSIEISKLTDKVQAEYRDAYREYIAQMSQLEGGPGSTTISGRSSPHSTYYMGQSSSGGSIHSNLEQEKGKDSEPKPDDGRKSFLMKRGDVIDYSSSGVSTNDASPLDPITEEDEKSDQSGSKLLPGKKSSERSSLFQTDLKLKGSGLRYQKLPSDEDESGTEESDNTPLLKDDKDRKAEGKVERVPKSPEHSAEPIRTFIKAKEYLSDALLDKKDSSDSGVRSSESSPNHSLHNEVADDSQLEKANLIELEDDSHSGKRGIPHSLSGLQDPIIARMSICSEDKKSPSECSLIASSPEENWPACQKAYNLNRTPSTVTLNNNSAPANRANQNFDEMEGIRETSQVILRPSSSPNPTTIQNENLKSMTHKRSQRSSYTRLSKDPPELHAAASSESTGFGEERESIL

SEQ ID NO: 14263 - protein, 193 aa, Homo sapiens
MGDKIWLPFPVLLLAALPPVLLPGAAGFTPSLDSDFTFTLPAGQKECFYQPMPLKASLEIEYQVLDGAGLDIDFHLASPEGKTLVFEQRKSDGVHTVETEVGDYMFCFDNTFSTISEKVIFFELILDNMGEQAQEQEDWKKYITGTDILDMKLEDILDPIIKIASDVQIRLHLGIHQQHQVQTKQKWAHTNSA

SEQ ID NO: 14264 - protein, 1115 aa, Homo sapiens
MGPLMVLFCLLFLYPGLADSAPSCPQNVNISGGTFTLSHGWAPGSLLTYSCPQGLYPSPASRLCKSSGQWQTPGATRSLSKAVCKPVRCPAPVSFENGIYTPRLGSYPVGGNVSFECEDGFILRGSPVRQCRPNGMWDGETAVCDNGDHENGTGTNTYAALNSVYLMMNNQMRLLGMETMAWQEIRHAIILLTDGKSNMGGSPKTAVDHIREILNINQKRNDYLDVSKLTDTICGVGNMSANASDQERTPWHVTIKPKSQETCRGALISDQWVLTAAHCFRDGNDHSLWRVNVGDPKSQWGKEFLIEKAVISPGFDVFAKKNQGILEFYGDDIALLKLAQKVKMSTHARPICLPCTMEANLALRRPQGSTCRDHENELLNKQSVPAHFVALNGSKLNINLKMGVEWTSCAEVVSQEKTMFPNLTDVREVVTDQFLCSGTQEDESPCKGGSAIHCPRPHDFENGEYWPRSPYYNVSDEISFHCYDGYTLRGSANRTCQVNGRWSGQTAICDNGAGYCSNPGIPIGTRKVGSQYRLEDSVTYHCSRGLTLRGSQRRTCQEGGSWSGTEPSCQDSFMYDTPQEVAEAFLSSLTETIEGVDAEDGHGPGEQQKRKIVLDPSGSMNIYLVLDGSDSIGASNFTGAKKCLVNLIEKVASYGVKPRYGLVTYATYPKIWVKVSEADSSNADWVTKQLNEINYEDHKLKSGTNTKKALQAVYSMMSWPDDVPPEGWNRTRHVIILMTDGLHNMGGDPITVIDEIRDLLYIGKDRKNPREDYLDVYVFGVGPLVNQVNINALASKKDNEQHVFKVKDMENLEDVFYQMIDESQSLSLCGMVWEHRKGTDYHKQPWQAKISVIRPSKGHESCMGAVVSEYFVLTAAHCFTVDDKEHSIKVSVGGEKRDLEIEVVLFHPNYNINGKKEAGIPEFYDYDVALIKLKNKLKYGQTIRPICLPCTEGTTRALRLPPTTTCQQQKEELLPAQDIKALFVSEEEKKLTRKEVYIKNGDKKGSCERDAQYAPGYDKVKDISEVVTPRFLCTGGVSPYADPNTCRGDSGGPLIVHKRSRFIQVGVISWGVVDVCKNQKRQKQVPAHARDFHINLFQVLPWLKEKLQDEDLGFL

SEQ ID NO: 14265 - protein, 269 aa, Homo sapiens
MSPHPTALLGLVLCLAQTIHTQEDLPRPSISAEPGTVIPLGSHVTFVCRGPVGVQTFRLERDSRSTYNDTEDVSQASPSESEARFRIDSVREGNAGLYRCIYYKPPKWSEQSDYLELLVKGPTQRPSDNSHNEHAPASQGLKAEHLYILIGVSVVFLFCLLLLVLFCLHRQNQIKQGPPRSKDEEQKPQQRPDLAVDVLERTADKATVNGLPEKDRETDTSALAAGSSQEVTYAQLDHWALTQRTARAVSPQSTKPMAESITYAAVARH

SEQ ID NO: 14266 - protein, 338 aa, Homo sapiens
MVRRVQPDRKQLPLVLLRLLCLLPTGLPVRSVDFNRGTDNITVRQGDTAILRCVVEDKNSKVAWLNRSGIIFAGHDKWSLDPRVELEKRHSLEYSLRIQKVDVYDEGSYTCSVQTQHEPKTSQVYLIVQVPPKISNISSDVTVNEGSNVTLVCMANGRPEPVITWRHLTPTGREFEGEEEYLEILGITREQSGKYECKAANEVSSADVKQVKVTVNYPPTITESKSNEATTGRQASLKCEASAVPAPDFEWYRDDTRINSANGLEIKSTEGQSSLTVTNVTEEHYGNYTCVAANKLGVTNASLVLFRPGSVRGINGSISLAVPLWLLAASLLCLLSKC

SEQ ID NO: 14267 - protein, 819 aa, Homo sapiens
MDFSMVAGAAAYNEKSETGALGENYSWQIPINHNDFKILKNNERQLCEVLQNKFGCISTLVSPVQEGNSKSLQVFRKMLTPRIELSVWKDDLTTHAVDAVVNAANEDLLHGGGLALALVKAGGFEIQEESKQFVARYGKVSAGEIAVTGAGRLPCKQIIHAVGPRWMEWDKQGCTGKLQRAIVSILNYVIYKNTHIKTVAIPALSSGIFQFPLNLCTKTIVETIRVSLQGKPMMSNLKEIHLVSNEDPTVAAFKAASEFILGKSELGQETTPSFNAMVVNNLTLQIVQGHIEWQTADVIVNSVNPHDITVGPVAKSILQQAGVEMKSEFLATKAKQFQRSQLVLVTKGFNLFCKYIYHVLWHSEFPKPQILKHAMKECLEKCIEQNITSISFPALGTGNMEIKKETAAEILFDEVLTFAKDHVKHQLTVKFVIFPTDLEIYKAFSSEMAKRSKMLSLNNYSVPQSTREEKRENGLEARSPAINLMGFNVEEMYEAHAWIQRILSLQNHHIIENNHILYLGRKEHDILSQLQKTSSVSITEIISPGRTELEIEGARADLIEVVMNIEDMLCKVQEEMARKKERGLWRSLGQWTIQQQKTQDEMKENIIFLKCPVPPTQELLDQKKQFEKCGLQVLKVEKIDNEVLMAAFQRKKKMMEEKLHRQPVSHRLFQQVPYQFCNVVCRVGFQRMYSTPCDPKYGAGIYFTKNLKNLAEKAKKISAADKLIYVFEAEVLTGFFCQGHPLNIVPPPLSPGAIDGHDSVVDNVSSPETFVIFSGMQAIPQYLWTCTQEYVQSQDYSSGPMRPFAQHPWRGFASGSPVD

SEQ ID NO: 14268 - protein, 756 aa, Homo sapiens
MGKRGSRSQSQLLNTLTKKQKKHLRDFGEEHPFYDRVSRKEAKPQICQLSESSDSSDSESDSESEPQQVSGYHRLLATLKNVSEEEEEDEEEEEEEDSIVDDAEMNDEDGGSDVSVEEEMAAESTESPENVALSADPEGKEDGEEPPGTSQTSPEEFTDAKHESLFSLETNFLEEESGDNSSLKASQDPFLQHVNKELKEKAIQAVATNPKTTHELKWPILGQLFFSSKFQKLETFKPPKDIDLKSLHLQKPLESTWTKTNSQFLSGPQKSSSPFTPLQKELFLIMNSYRDLFYPERTALKNGEEIRHVYCLHVINHILKANAQVLGNNSRRRSQKFGVGDDDDFRDQGLTRPKVLIVVPFREAALRVVQLFISLLEGDSKKKIIVSNKKRFQGEYGSDPEERPPNLKRPEDYEAVFVGNIDDHFRIGVAILQRSIRLYAPFYSSDILIASPLGLRTIIGGEGEKKRDFDFLSSIELLIIDQADIYLMQNWEHVLHLMNHMNLLPLDSHGVDFSRVRMWSLNNWSKYYRQTLLFGALQDAQINSVFNKYCVNMQGQVAVRNVPMTGSISHVLVQLPHVFQRMEAENLASVIDARFNFFVNKILPQYRDAVMSHTLIYIPSYFDFVRLRNYFKKEELNFTHICEYTQKSGVSRARHFFLQGEKQFLLFTERFHFYKRYTIKGIRNLIFYELPTYPHFYSEICNMLRATNRGEEATWTCTVLYSKYDAQRLAAVVGVERAAQMLQSNKNVHLFITGEK

SEQ ID NO: 14269 - protein, 102 aa, Homo sapiens
MSAPKLLSLGCIFFPLLLFQQARAQFPRQCATVEALRSGMCCPDLSPVSGPGTDRCGSSSGRGRCEAVTADSRPHSPQYPHDGRDDREVWPLRFFNRTCHCN

SEQ ID NO: 14270 - protein, 92 aa, Homo sapiens
MKCLGKRRGQAAAFLPLCWLFLKILQPGHSHLYNNRYAGDKVIRFIPKTEEEAYALKKISYQLKGPHRRSSENTGEGKQLAHPEKPKIPLWI

SEQ ID NO: 14271 - protein, 1229 aa, Homo sapiens
MRGGKCNMLSSLGCLLLCGSITLALGNAQKLPKGKRPNLKVHINTTSDSILLKFLRPSPNVKLEGLLLGYGSNVSPNQYFPLPAEGKFTEAIVDAEPKYLIVVRPAPPPSQKKSCSGKTRSRKPLQLVVGTLTPSSVFLSWGFLINPHHDWTLPSHCPNDRFYTIRYREKDKEKKWIFQICPATETIVENLKPNTVYEFGVKDNVEGGIWSKIFNHKTVVGSKKVNGKIQSTYDQDHTVPAYVPRKLIPITIIKQVIQNVTHKDSAKSPEKAPLGGVILVHLIIPGLNETTVKLPASLMFEISDALKTQLAKNETLALPAESKTPEVEKISARPTTVTPETVPRSTKPTTSSALDVSETTLASSEKPWIVPTAKISEDSKVLQPQTATYDVFSSPTTSDEPEISDSYTATSDRILDSIPPKTSRTLEQPRATLAPSETPFVPQKLEIFTSPEMQPTTPAPQQTTSIPSTPKRRPRPKPPRTKPERTTSAGTITPKISKSPEPTWTTPAPGKTQFISLKPKIPLSPEVTHTKPAPEPQTLLPSQSTIGPETPGTKPSTTLAPRKTKRPGRRPRPRPRPKTTPSPEVPKSKPALEPATIQPEPLVPTTVSEPVPFETEAPSMTIVPTTDIEPVTVRTEATVTTLAPKTSQRTRTRRPRPKHKTTPRPETLQTKLDFGPITPGTSSAPTTTTKRTRRPHPKPKTTPHPEVPQTKLAPKQTPRAPPKPKTSPRPRIPQTQPVPKVPQRVTAKPKTSPSPEVSYTTPAPKDVLLPHKPYPEVSQSEPAPLETRGIPFIPMISPSPSQEELQTTLAPHRFYTTVRPRTSDKPHIRPGVKQAPRPSGADRNVSVDSTHPTKKPGTRRPPLPPRPTHPRRKPLPPNNVTGKPGSAGIISSGPITTPPLRSTPRPTGTPLERIETDIKQPTVPASGEELENITDFSSSPTRETDPLGKPRFKGPHVRYIQKPDNSPCSITDSVKRFPKEEATEGNATSPPQNPPTNLTVVTVEGCPSFVILDWEKPLNDTVTEYEVISRENGSFSGKNKSIQMTNQTFSTVENLKPNTSYEFQVKPKNPLGEGPVSNTVAFSTESADPRVSEPVSAGRDAIWTERPFNSDSYSECKGKQYVKRTWYKKFVGVQLCNSLRYKIYLSDSLTGKFYNIGDQRGHGEDHCQFVDSFLDGRTGQQLTSDQLPIKEGYFRAVRQEPVQFGEIGGHTQINYVQWYECGTTIPGKW

SEQ ID NO: 14272 - protein, 1323 aa, Homo sapiens
MSFLEEARAAGRAVVLALVLLLLPAVPVGASVPPRPLLPLQPGMPHVCAEQELTLVGRRQPCVQALSHTVPVWKAGCGWQAWCVGHERRTVYYMGYRQVYTTEARTVLRCCRGWMQQPDEEGCLSDVGECANANGGCAGRCRDTVGGFYCRWPPPSHQLQGDGETCQDVDECRTHNGGCQHRCVNTPGSYLCECKPGFRLHTDSRTCLAINSCALGNGGCQHHCVQLTITRHRCQCRPGFQLQEDGRHCVRRSPCANRNGSCMHRCQVVRGLARCECHVGYQLAADGKACEDVDECAAGLAQCAHGCLNTQGSFKCVCHAGYELGADGRQCYRIEMEIVNSCEANNGGCSHGCSHTSAGPLCTCPRGYELDTDQRTCIDVDDCADSPCCQQVCTNNPGGYECGCYAGYRLSADGCGCEDVDECASSRGGCEHHCTNLAGSFQCSCEAGYRLHEDRRGCSPLEEPMVDLDGELPFVRPLPHIAVLQDELPQLFQDDDVGADEEEAELRGEHTLTEKFVCLDDSFGHDCSLTCDDCRNGGTCLLGLDGCDCPEGWTGLICNETCPPDTFGKNCSFSCSCQNGGTCDSVTGACRCPPGVSGTNCEDGCPKGYYGKHCRKKCNCANRGRCHRLYGACLCDPGLYGRFCHLTCPPWAFGPGCSEECQCVQPHTQSCDKRDGSCSCKAGFRGERCQAECELGYFGPGCWQACTCPVGVACDSVSGECGKRCPAGFQGEDCGQECPVGTFGVNCSSSCSCGGAPCHGVTGQCRCPPGRTGEDCEADCPEGRWGLGCQEICPACQHAARCDPETGACLCLPGFVGSRCQDVCPAGWYGPSCQTRCSCANDGHCHPATGHCSCAPGWTGFSCQRACDTGHWGPDCSHPCNCSAGHGSCDAISGLCLCEAGYVGPRCEQQCPQGHFGPGCEQRCQCQHGAACDHVSGACTCPAGWRGTFCEHACPAGFFGLDCRSACNCTAGAACDAVNGSCLCPAGRRGPRCAETCPAHTYGHNCSQACACFNGASCDPVHGQCHCAPGWMGPSCLQACPAGLYGDNCRHSCLCQNGGTCDPVSGHCACPEGWAGLACEKECLPRDVRAGCRHSGGCLNGGLCDPHTGRCLCPAGWTGDKCQSPCAKGTFGPHCEGRCACRWGGPCHLATGACLCPPGWRGAPGVRMPACGAGLERPVPSAAAARLALPATTSLGPAAVPLASLAPAASRPAHPAALGRTVRRCASVPVRTRPATLPPGPAHVLLATTAPAASNDVRPGGMGQAVNSCVGVSTGAPVMRPRGPAAAPLGSSGRTATSPVRRAASAPTAPTCVGVGRGRPATL

SEQ ID NO: 14273 - protein, 459 aa, Homo sapiens
MGAARGSPARPRRLPLLSVLLLPLLGGTQTAIVFIKQPSSQDALQGRRALLRCEVEAPGPVHVYWLLDGAPVQDTERRFAQGSSLSFAAVDRLQDSGTFQCVARDDVTGEEARSANASFNIKWIEAGPVVLKHPASEAEIQPQTQVTLRCHIDGHPRPTYQWFRDGTPLSDGQSNHTVSSKERNLTLRPAGPEHSGLYSCCAHSAFGQACSSQNFTLSIADESFARVVLAPQDVVVARYEEAMFHCQFSAQPPPSLQWLFEDETPITNRSRPPHLRRATVFANGSLLLTQVRPRNAGIYRCIGQGQRGPPIILEATLHLAEIEDMPLFEPRVFTAGSEERVTCLPPKGLPEPSVWWEHAGVRLPTHGRVYQKGHELVLANIAESDAGVYTCHAANLAGQRRQDVNITVASEHLCPEGQGEVEGNTGLGVMDRGFPGTHLRSSQFWALQAWESVHYWESV

SEQ ID NO: 14274 - protein, 121 aa, Homo sapiens
MAPKDRKPKRSTWRFNLDLTHPVEDGIFDSGNFEQFLREKVKVNGKTGNLGNVVHIERFKNKITVVSEKQFSKRYLKYLTKKYLKKNNLRDWLRVVASDKETYELRYFQISQDEDESESED

SEQ ID NO: 14275 - protein, 330 aa, Homo sapiens
MESAAALHFSRPASLLLLLLSLCALVSAQFIVVGPTDPILATVGENTTLRCHLSPEKNAEDMEVRWFRSQFSPAVFVYKGGRERTEEQMEEYRGRTTFVSKDISRGSVALVIHNITAQENGTYRCYFQEGRSYDEAILHLVVAGLGSKPLISMRGHEDGGIRLECISRGWYPKPLTVWRDPYGGVAPALKEVSMPDADGLFMVTTAVIIRDKSVRNMSCSINNTLLGQKKESVIFIPESFMPSVSPCAVALPIIVVILMIPIAVCIYWINKLQKEKKILSGEKEFERETREIALKELEKERVQKEEELQVKEKLQEELRWRRTFLHAGPV

SEQ ID NO: 14276 - protein, 563 aa, Homo sapiens
MAFMEKPPAGKVLLDDTVPLTAAIEASQSLQSHTIVRRYSDFDLLNNSLQIAGLSLPLPPKKLIGNMDREFIAERQKGLQNYLNVITTNHILSNCELVKKFLDPNNYSANYTEIALQQVSMFFRSEPKWEVVEPLKDIGWRIRKKYFLMKIKNQPKERLVLSWADLGPDKYLSDKDFQCLIKLLPSCLHPYIYRVTFATANESSALLIRMFNEKGTLKDLIYKAKPKDPFLKKYCNPKKIQGLELQQIKTYGRQILEVLKFLHDKGFPYGHLHASNVMLDGDTCRLLDLENSLLGLPSFYRSYFSQFRKINTLESVDVHCFGHLLYEMTYGRPPDSVPVDSFPPAPSMAVVAVLESTLSCEACKNGMPTISRLLQMPLFSDVLLTTSEKPQFKIPTKLKEALRIAKECIEKRLIEEQKQIHQHRRLTRAQSHHGSEEERKKRKILARKKSKRSALENSEEHSAKYSNSNNSGSGASSPLTSPSSPTPPSTSAALGLSKRCKERDICITSTSSTSTTTSSSLASCEHRGTCPALVSGCEWHEPRGLAQLHPEFPKRNFEESQNL

SEQ ID NO: 14277 - protein, 275 aa, Homo sapiens
MSRELAPLLLLLLSIHSALAMRICSFNVRSFGESKQEDKNAMDVIVKVIKRCDIILVMEIKDSNNRICPILMEKLNREKLVSVKRSYHYHDYQDGDADVFSREPFVVWFQSPHTAVKDFVIIPLHTTPETSVKEIDELVEVYTDVKHRWKAENFIFMGDFNAGCSYVPKKAWKNIRLRTDPRFVWLIGDQEDTTVKKSTNCAYDRIVLRGQEIVSSVVPKSNSVFDFQKAYKLTEEEALDVSDHFPVEFKLQSSRAFTNSKKSVTLRKKTKSKRS

SEQ ID NO: 14278 - protein, 117 aa, Homo sapiens; identical to SEQ ID NO: 13403

SEQ ID NO: 14279 - protein, 180 aa, Homo sapiens
MPRQLSAAAALFASLAVILHDGSQMRAKAFPETRDYSQPTAAATVQDIKKPVQQPAKQAPHQTLAARFMDGHITFQTAATVKIPTTTPATTKNTATTSPITYTLVTTQATPNNSHTAPPVTEVTVGPSLAPYSLPPTITPPAHTTGTSSSTVSHTTGNTTQPSNQTTLPATLSIALHKST

SEQ ID NO: 14280 - protein, 224 aa, Homo sapiens
MSGFQINLNPLKEPLGFIKVLEWIASIFAFATCGGFKGQTEIQVNCPPAVTENKTVTATFGYPFRLNEASFQPPPGVNICDVNWKDYVLIGDYSSSAQFYVTFAVFVFLYCIAALLLYVGYTSLYLDSRKLPMIDFVVTLVATFLWLVSTSAWAKALTDIKIATGHNIIDELPPCKKKAVLCYFGSVTSMGSLNVSVMEFRYVAQTGVQWHDLGTLQPPPPGFK

SEQ ID NO: 14281 - protein, 746 aa, Homo sapiens
LLVLGLLVAGAADGCELVPRHLRGRRATGSAATAASSPAAAAGDSPALMTDPCMSLSPPCFTEEDRFSLEALQTIHKQMDDDKDGGIEVEESDEFIREDMKYKDATNKHSHLHREDKHITIEDLWKRWKTSEVHNWTLEDTLQWLIEFVELPQYEKNFRDNNVKGTTLPRIAVHEPSFMISQLKISDRSHRQKLQLKALDVVLFGPLTRPPHNWMKDFILTVSIVIGVGGCWFAYTQNKTSKEHVAKMMKDLESLQTAEQSLMDLQERLEKAQEENRNVAVEKQNLERKMMDEINYAKEEACRLRELREGAECELSRRQYAEQELEQVRMALKKAEKEFELRSSWSVPDALQKWLQLTHEVEVQYYNIKRQNAEMQLAIAKDEAEKIKKKRSTVFGTLHVAHSSSLDEVDHKILEAKKALSELTTCLRERLFRWQQIEKICGFQIAHNSGLPSLTSSLYSDHSWVVMPRVSIPPYPIAGGVDDLDEDTPPIVSQFPGTMAKPPGSLARSSSLCRSRRSIVPSSPQPQRAQLAPHAPHPSHPRHPHHPQHTPHSLPSPDPDILSVSSCPALYRNEEEEEAIYFSAEKQWEVPDTASECDSLNSSIGRKQSPPLSLEIYQTLSPRKISRDEVSLEDSSRGDSPVTVDVSWGSPDCVGLTETKSMIFSPASKVYNGILEKSCSMNQLSSGIPVPKPRHTSCSSAGNDSKPVQEAPSVARISSIPHDLCHNGEKSKKPSKIKSLFKKKSK

SEQ ID NO: 14282 - protein, 281 aa, Homo sapiens
MDVLPMCSIFQELQIVHETGYFSALPSLEEYWQQTCLELERYLQSEPCYVSASEIKFDSQEDLWTKIILAREKKEESELKISSSPPEDTLISPSFCYNLETNSLNSDVSSESSDSSEELSPTAKFTSDPIGEVLVSSGKLSSSVTSTPPSSPELSREPSQLWGCVPGELPSPGKVRSGTSGKPGDKGNGDASPDGRRRVHRCHFNGCRKVYTKSSHLKAHQRTHTGQCPRGPRRAAAGGRHCIAPALEGAGPGCTGCGQGRQILTSSDVFHQSIRSFWSSE

SEQ ID NO: 14283 - protein, 181 aa, Homo sapiens
MAKATSGAAGLRLLLLLLLPLLGKDVAEEAGCPLSCAVSKRRLECEECGGLGSPTGRCEWRQGDGKGITRNFSTCSPSTKTCPDGHCDVVETQDINICPQDCLRGSIVGGHEPGEPRGIKAGYGTCNCFPEEEKCFCEPEDIQDPLCDELCRTVIAAAVLFSFIVSVLLSAFCIHCYHKFA

SEQ ID NO: 14284 - protein, 154 aa, Homo sapiens
MGSLSGLRLAAGSCFRLCERDVSSSLRLTRSSDLKRINGFCTKPQESPGAPSRTYNRVPLHKPTDWQKKILIWSGRFKKEDEIPETVSLEMLDAAKNKMRVKISYLMIALTVVGCIFMVIEGKKAAQRHETLTSLNLEKKARLKEEAAMKAKTE

SEQ ID NO: 14285 - protein, 152 aa, Homo sapiens
MSSPSPGKRRMDTDVVKLIESKHEVTILGGLNEFVVKFYGPQGTPYEGGVWKVRVDLPDKYPFKSPSIDLTNIFESFLPQLLAYPNPIDPLNGDAAAMYLHRPEEYKQKIKEYIQKYATEEALKEQEEGTGDSSSESSMSDFSEDEAQDMEL

SEQ ID NO: 14286 - protein, 1091 aa, Homo sapiens; identical to SEQ ID NO: 3362

SEQ ID NO: 14287 - protein, 59 aa, Homo sapiens
MLALLVLVTVALASAHHGGEHFEGEKVFRVNVEDENHINIIRELASTTQIDFWKPDSVT

SEQ ID NO: 14288 - protein, 167 aa, Homo sapiens
MGLSNILFVMAFLLSGAAPLKIQAYFNETADLPCQFANSQNQSLSELVVFWQDQENLVLNEVYLGKEKFDSVHSKYMGRTSFDSDSWTLRLHNLQIKDKGLYQCIIHHKKPTGMIRIHQMNSELSVLANFSQPEIVPISNITENVYINLTCSSIHGYPEPKKMSVLL

SEQ ID NO: 14289 - protein, 445 aa, Homo sapiens
METRTEDGGLTRRPTLASSWDVAGGALTHSLLLTRAGLGPGDFDWEELLAPPAPGQDLVILKRNHNNKDENPCFLYLRCGPDGGEEIASIGILSSARNMEVYLGEEYCGTSRGKNVCTVLDDSEHEKIILYKKNLKLESSTHACKIKLLSFGERQCVFISKVVVHMRSVFANSSTSSPALGSRIDLDKVQTIMESMGSKLSPGAQQLMDMVRCQQRNCIPIGEQLQSVLGNSGYKHMIGLQSSSTLGTLNKSSSTPFPFRTGLTSGNVTENLQTYIDKSTQLPGGENSTKLDECKVMPQNHSFLENDLKNAMASFLPKKVSDNSNIPNSELLPFLQNLCSQVNHLHVGNKTECQENITKHGERILGVGMEEQSICSYLEKILSKNMELMEKKLMDYIDQRIHELQEHIDDKIALLLDLLQNPNSPPTGIPLRHYDSGERLSNGER

SEQ ID NO: 14290 - protein, 100 aa, Homo sapiens
MSSGTELLWPGAALLVLLGVAASLCVRCSRPGAKRREDQQSFTGSRTYSLVGQAWPGPLADMAPTRKDKLLQFYPSLEDPASSRYQNFSKGSRHGSEEAY

SEQ ID NO: 14291 - protein, 741 aa, Homo sapiens
MLERKKPKTAENQKASEENEITQPGGSSAKPGLPCLNFEAVLSPDPALIHSTHSLTNSHAHTGSSDCDISCKGMTERIHSINLHNFSNSVLETLNEQRNRGHFCDVTVRIHGSMLRAHRCVLAAGSPFFQDKLLLGYSDIEIPSVVSVQSVQKLIDFMYSGVLRVSQSEALQILTAASILQIKTVIDECTRIVSQNVGDVFPGIQDSGQDTPRGTPESGTSGQSSDTESGYLQSHPQHSVDRIYSALYACSMQNGSGERSFYSGAVVSHHETALGLPRDHHMEDPSWITRIHERSQQMERYLSTTPETTHCRKQPRPVRIQTLVGNIHIKQEMEDDYDYYGQQRVQILERNESEECTEDTDQAEGTESEPKGESFDSGVSSSIGTEPDSVEQQFGPGAARDSQAEPTQPEQAAEAPAEGGPQTNQLETGASSPERSNEVEMDSTVITVSNSSDKSVLQQPSVNTSIGQPLPSTQLYLRQTETLTSNLRMPLTLTSNTQVIGTAGNTYLPALFTTQPAGSGPKPFLFSLPQPLAGQQTQFVTVSQPGLSTFTAQLPAPQPLASSAGHSTASGQGEKKPYECTLCNKTFTAKQNYVKHMFVHTGEKPHQCSICWRSFSLKDYLIKHMVTHTGVRAYQCSICNKRFTQKSSLNVHMRLHRGEKSYECYICKKKFSHKTLLERHVALHSASNGTPPAGTPPGARAGPPGVVACTEGTTYVCSVCPAKFDQIEQFNDHMRMHVSDG

SEQ ID NO: 14292 - protein, 92 aa, Homo sapiens
MTSFRLALIQLQISSIKSDNVTRACSFIREAATQGAKIVSLPECFNSPYGAKYFPEYAEKIPGESTQKLSEVAKECSIYLIGGNFLPTRLYP

SEQ ID NO: 14293 - protein, 1227 aa, Homo sapiens
MTQPEPESLGPGTPGFPEQEEDELHRTLGVERFEEILQEAGSRGGEEPGRSYGEEDFEYHRQSSHHIHHPLSTHLPPDARRRKTPQGPGRKPRRRPGASPTGETPTIEEGEEDEDEASEAEGARALTQPSPVSTPSSVQFFLQEDDSADRKAERTSPSSPAPLPHQEATPRASKGAQAGTQVEEAEAEAVAVASGTAGGDDGGASGRPLPKAQPGHRSYNLQERRRIGSMTGAEQALLPRVPTDEIEAQTLATADLDLMKSHRFEDVPGVRRHLVRKNAKGSTQSGREGREPGPTPRARPRAPHKPHEVFVELNELLLDKNQEPQWRETARWIKFEEDVEEETERWGKPHVASLSFRSLLELRRTLAHGAVLLDLDQQTLPGVAHQVVEQMVISDQIKAEDRANVLRALLLKHSHPSDEKDFSFPRNISAGSLGSLLGHHHGQGAESDPHVTEPLMGGVPETRLEVERERELPPPAPPAGITRSKSKHELKLLEKIPENAEATVVLVGCVEFLSRPTMAFVRLREAVELDAVLEVPVPVRFLFLLLGPSSANMDYHEIGRSISTLMSDKQFHEAAYLADEREDLLTAINAFLDCSVVLPPSEVQGEELLRSVAHFQRQMLKKREEQGRLLPTGAGLEPKSAQDKALLQMVEAAGAAEDDPLRRTGRPFGGLIRDVRRRYPHYLSDFRDALDPQCLAAVIFIYFAALSPAITFGGLLGEKTQDLIGVSELIMSTALQGVVFCLLGAQPLLVIGFSGPLLVFEEAFFSFCSSNHLEYLVGRVWIGFWLVFLALLMVALEGSFLVRFVSRFTQEIFAFLISLIFIYETFYKLVKIFQEHPLHGCSASNSSEVDGGENMTWAGARPTLGPGNRSLAGQSGQGKPRGQPNTALLSLVLMAGTFFIAFFLRKFKNSRFFPGRIRRVIGDFGVPIAILIMVLVDYSIEDTYTQKLSVPSGFSVTAPEKRGWVINPLGEKSPFPVWMMVASLLPAILVFILIFMETQITTLIISKKERMLQKGSGFHLDLLLIVAMGGICALFGLPWLAAATVRSVTHANALTVMSKAVAPGDKPKIQEVKEQRVTGLLVALLVGLSIVIGDLLRQIPLAVLFGIFLYMGVTSLNGIQFYERLHLLLMPPKHHPDVTYVKKVRTLRMHLFTALQLLCLALLWAVMSTAASLAFPFILILTVPLRMVVLTRIFTDREMKCLDANEAEPVFDEREGVDEYNEMPMPV

SEQ ID NO: 14294 - protein, 186 aa, Homo sapiens
MAPSAWAICWLLGGLLLHGGSSGPSPGPSVPRLRLSYRGAMVRKPSSTMWMETFSRYLLSANRSAIFLGPQGSLNLQAMYLDEYRDRLFLGGLDALYSLRLDQAWPDPREVLWPPQPGQREECVRKGRDPLTECANFVRVLQPHNRTHLLACGTGAFQPTCALITVGHRGEHVLHLEPGSVESGRG

SEQ ID NO: 14295 - protein, 428 aa, Homo sapiens
MEPLKVEKFATAKRGNGLRAVTPLRPGELLFRSDPLAYTVCKGSRGVVCDRCLLGKEKLMRCSQCRVAKYCSAKCQKKAWPDHKRECKCLKSCKPRYPPDSVRLLGRVVFKLMDGAPSESEKLYSFYDLESNINKLTEDKKEGLRQLVMTFQHFMREEIQDASQLPPAFDLFEAFAKVICNSFTICNAEMQEVGVGLYPSISLLNHSCDPNCSIVFNGPHLLLRAVRDIEVGEELTICYLDMLMTSEERRKQLRDQYCFECDCFRCQTQDKDADMLTGDEQVWKEVQESLKKIEELKAHWKWEQVLAMCQAIISSNSERLPDINIYQLKVLDCAMDACINLGLLEEALFYGTRTMEPYRIFFPGSHPVRGVQVMKVGKLQLHQGMFPQAMKNLRLAFDIMRVTHGREHSLIEDLILLLEECDANIRAS

SEQ ID NO: 14296 - protein, 918 aa, Homo sapiens
MDCQLSILLLLSCSVLDSFGELIPQPSNEVNLLDSKTIQGELGWISYPSHGWEEISGVDEHYTPIRTYQVCNVMDHSQNNWLRTNWVPRNSAQKIYVELKFTLRDCNSIPLVLGTCKETFNLYYMESDDDHGVKFREHQFTKIDTIAADESFTQMDLGDRILKLNTEIREVGPVNKKGFYLAFQDVGACVALVSVRVYFKKCPFTVKNLAMFPDTVPMDSQSLVEVRGSCVNNSKEEDPPRMYCSTEGEWLVPIGKCSCNAGYEERGFMCQACRPGFYKALDGNMKCAKCPPHSSTQEDGSMNCRCENNYFRADKDPPSMACTRPPSSPRNVISNINETSVILDWSWPLDTGGRKDVTFNIICKKCGWNIKQCEPCSPNVRFLPRQFGLTNTTVTVTDLLAHTNYTFEIDAVNGVSELSSPPRQFAAVSITTNQAAPSPVLTIKKDRTSRNSISLSWQEPEHPNGIILDYEVKYYEKQEQETSYTILRARGTNVTISSLKPDTIYVFQIRARTAAGYGTNSRKFEFETSPDSFSISGESSQVVMIAISAAVAIILLTVVIYVLIGRFCGYKSKHGADEKRLHFGNGHLKLPGLRTYVDPHTYEDPTQAVHEFAKELDATNISIDKVVGAGEFGEVCSGRLKLPSKKEISVAIKTLKVGYTEKQRRDFLGEASIMGQFDHPNIIRLEGVVTKSKPVMIVTEYMENGSLDSFLRKHDAQFTVIQLVGMLRGIASGMKYLSDMGYVHRDLAARNILINSNLVCKVSDFGLSRVLEDDPEAAYTTRGGKIPIRWTSPEAIAYRKFTSASDVWSYGIVLWEVMSYGERPYWEMSNQDVIKAVDEGYRLPPPMDCPAALYQLMLDCWQKDRNNRPKFEQIVSILDKLIRNPGSLKIITSAAARPSNLLLDQSNVDITTFRTTVT

SEQ ID NO: 14297 - protein, 115 aa, Homo sapiens
MRVPAQLLGLLLLWLPGARCAIRMTQSPSSFSASTGDRVTITCRASQGISSYLAWYQQKPGKAPKLLIYAASTLQSGVPSRFSGSGSGTDFTLTISCLQSEDFATYYCQQYYSYP

SEQ ID NO: 14298 - protein, 488 aa, Homo sapiens
MQFVSWATLLTLLVRDLAEMGSPDAAAAVRKDRLHPRQVKLLETLSEYEIVSPIRVNALGEPFPTNVHFKRTRRSINSATDPWPAFASSSSSSTSSQAHYRLSAFGQQFLFNLTANAGFIAPLFTVTLLGTPGVNQTKFYSEEEAELKHCFYKGYVNTNSEHTAVISLCSGMLGTFRSHDGDYFIEPLQSMDEQEDEEEQNKPHIIYRRSAPQREPSTGRHACDTSEHKNRHSKDKKKTRARKWGERINLAGDVAALNSGLATEAFSAYGNKTDNTREKRTHRRTKRFLSYPRFVEVLVVADNRMVSYHGENLQHYILTLMSIVASIYKDPSIGNLINIVIVNLIVIHNEQDGPSISFNAQTTLKNFCQWQHSKNSPGGIHHDTAVLLTRQDICRAHDKCDTLGLAELGTICDPYRSCSISEDSGLSTAFTIAHELGHVFNMPHDDNNKCKEEGVKSPQHVMAPTLNFYTNPWMWSKCSRKYITEFLE

SEQ ID NO: 14299 - protein, 205 aa, Homo sapiens
MARHGCLGLGLFCCVLFAATVGPQPTPSIPGAPATTLTPVPQSEASMLSLNLGLNFKFHLRGPAAVWGSPVTETQPLSLGPGQEPGEEVASGLRTDPLWELLVGSSGNSLTEWGSTEGGSKPRASSLLPESTSRRSGPSDGPTAPYQPRRSTVTWDTALMVTALPSSAPRPHQSELELKFDMALRAGAAPTLGHRTLPLLPSLRA

SEQ ID NO: 14300 - protein, 921 aa, Homo sapiens
MATPSAAFEALMNGVTSWDVPEDAVPCELLLIGEASFPVMVNDMGQVLIAASSYGRGRLVVVSHEDYLVEAQLTPFLLNAVGWLCSSPGAPIGVHPSLAPLAKILEGSGVDAKVEPEVKDSLGVYCIDAYNETMTEKLVKFMKCGGGLLIGGQAWDWANQGEDERVLFTFPGNLVTSVAGIYFTDNKGDTSFFKVSKKMPKIPVLVSCEDDLSDDREELLHGISELDISNSDCFPSQLLVHGALAFPLGLDSYHGCVIAAARYGRGRVVVTGHKVLFTVGKLGPFLLNAVRWLDGGRRGKVVVQTELRTLSGLLAVGGIDTSIEPNLTSDASVYCFEPVSEVGVKELQEFVAEGGGLFVGAQAWWWAFKNPGVSPLARFPGNLLLNPFGISITSQSLNPGPFRTPKAGIRTYHFRSTLAEFQVIMGRKRGNVEKGWLAKLGPDGAAFLQIPAEEIPAYMSVHRLLRKLLSRYRLPVATRENPVINDCCRGAMLSLATGLAHSGSDLSLLVPEIEDMYSSPYLRPSESPITVEVNCTNPGTRYCWMSTGLYIPGRQIIEVSLPEAAASADLKIQIGCHTDDLTRASKLFRGPLVINRCCLDKPTKSITCLWGGLLYIIVPQNSKLGSVPVTVKGAVHAPYYKLGETTLEEWKRRIQENPGPWGELATDNIILTVPTANLRTLENPEPLLRLWDEVMQAVARLGAEPFPLRLPQRIVADVQISVGWMHAGYPIMCHLESVQELINEKLIRTKGLWGPVHELGRNQQRQEWEFPPHTTEATCNLWCVYVHETVLGIPRSRANIALWPPVREKRVRIYLSKGPNVKNWNAWTALETYLQLQEAFGWEPFIRLFTEYRNQTNLPTENVDKMNLWVKMFSHQVQKNLAPFFEAWAWPIQKEVATSLAYLPEWKENIMKLYLLTQMPH

SEQ ID NO: 14301 - protein, 570 aa, Homo sapiens
MESKGASSCRLLFCLLISATVFRPGLGWYTVNSAYGDTIIIPCRLDVPQNLMFGKWKYEKPDGSPVFIAFRSSTKKSVQYDDVPEYKDRLNLSENYTLSISNARISDEKRFVCMLVTEDNVFEAPTIVKVFKQPSKPEIVSKALFLETEQLKKLGDCISEDSYPDGNITWYRNGKVLHPLEGAVVIIFKKEMDPVTQLYTMTSTLEYKTTKADIQMPFTCSVTYYGPSGQKTIHSEQAVFDIYYPTEQVTIQVLPPKNAIKEGDNITLKCLGNGNPPPEEFLFYLPGQPEGIRSSNTYTLTDVRRNATGDYKCSLIDKKSMIASTAITVHYLDLSLNPSGEVTRQIGDALPVSCTISASRNATVVWMKDNIRLRSSPSFSSLHYQDAGNYVCETALQEVEGLKKRESLTLIVEGKPQIKMTKKTDPSGLSKTIICHVEGFPKPAIQWTITGSGSVINQTEESPYINGRYYSKIIISPEENVTLTCTAENQLERTVNSLNVSANENREKVNDQAKLIVGIVVGLLLAALVAGVVYWLYMKKSKTASKHVNKDLGNMEENKKLEENNHKTEA

SEQ ID NO: 14302 - protein, 210 aa, Homo sapiens
MWTLGRRAVAGLLASPSPAQAQTLTRVPRPAELAPLCGRRGLRTDIDATCTPRRASSNQRGLNQIWNVKKQSVYLMNLRKSGTLGHPGSLDETTYERLAEETLDSLAEFFEDLADKPYTFEDYDVSFGSGVLTVKLGGDLGTYVINKQTPNKQIWLSSPSSGPKRYDWTGKNWVYSHDGVSLHELLAAELTKALKTKLDLSSLAYSGKDA

SEQ ID NO: 14303 - protein, 157 aa, Homo sapiens
MDTIFLWSLLLLFFGSQASRCSAQKNTEFAVDLYQEVSLSHKDNIIFSPLGITLVLEMVQLGAKGKAQQQIRQTLKQQETSAEKKQEFTFNLANALYLQEGFTVKEQYLHGNKEFFQSAIKLVDFQDAKACAEMISTWVERKTDGKIKDMFSGEEFG

SEQ ID NO: 14304 - protein, 343 aa, Homo sapiens
MTSKGPEEEHPSVTLFRQYLRIRTVQPKPDYGAAVAFFEETARQLGLGCQKVEVAPGYVVTVLTWPGTNPTLSSILLNSHTDVVPVFKEHWSHDPFEAFKDSEGYIYARGAQDMKCVSIQYLEAVRRLKVEGHRFPRTIHMTFVPDEEVGGHQGMELFVQRPEFHALRAGFALDEGIANPTDAFTVFYSERSPWWVRVTSTGRPGHASRFMEDTAAEKLAFEEQLQSWCQAAGEGVTLEFAQKWMHPQVTPTDDSNPWWAAFSRVCKDMNLTLEPEIMPAATDNRYIRAVGVPALGFSPMNRTPVLLHDHDERLHEAVFLRGVDIYTRLLPALASVPALPSDS

SEQ ID NO: 14305 - protein, 778 aa, Homo sapiens
MIATWMLFSLFTKPPQLSEDDIWLKSEGDNYSATLLEPAASSLSPDHKNMEIEVSVAECKSVPGITSTPHPMDHPSAFYSPPHNGLLTDHHESLDNDVAREIRYLDEVLEANCCDSAVDGTYNGTSSPEPGAVVLVGGLSPPVHEATQPEPTERTASRQAPPHIELSNSSPDPMAEAERTNGHSPSQPRDALGDSLQVPVSPSSTTSSRCSSRDGEFTLTTLKKEAKFELRAFHEDKKPSKLFEDDEHEKEQYCIRKVRPSEEMLELEKERRELIRSQAVKKNPGIAAKWWNPPQEKTIEEQLDEEHLESHKKYKERKERRAQQEQLLLQKQLQQQQQQPPSQLCTAPASSHERASMIDKAKEDIVTEQIDFSAARKQFQLMENSRQAVAKGQSTPRLFSIKPFYRPLGSVNSDKPLTNPRPPSVGGPPEDSGASAAKGQKSPGALETPSAAGSQGNTASQGKEGPYSEPSKRGPLSKLWAEDGEFTSARAVLTVVKDDDHGILDQFSRSVNVSLTQEELDSGLDELSVRSQDTTVLETLSNDFSMDNISDSGASNETTNALQENSLADFSLPQTPQTDNPSEGRGEGVSKSFSDHGFYSPSSTLGDSPLVDDPLEYQAGLLVQNAIQQAIAEQVDKAVSKTSRDGAEQQGPEATVEEAEAAAFGSEKPQSMFEPPQVSSPVQEKRDVLPKILPAEDRALRERGPPQPLPAVQPSGPINMEETRPEGSYFSKYSEAAELRSTASLLATQESDVMVGPFKLRSRKQRTLSMIEEEIRAA

SEQ ID NO: 14306 - protein, 554 aa, Homo sapiens
MMLSRAKPAVGRGVQHTDKRKKKGRKIPKLEELLSKRDFTGAITLLEFKRHVGEEEEDTNLWIGYCAFHLGDYKRALEEYENATKEENCNSEVWVNLACTYFFLGMYKQAEAAGFKASKSRLQNRLLFHLAHKFNDEKKLMSFHQNLQDVTEDQLSLASIHYMRSHYQEAIDIYKRILLDNREYLALNVYVALCYYKLDYYDVSQEVLAVYLQQIPDSTIALNLKACNHFRLYNGRAAEAELKSLMDNASSSFEFAKELIRHNLVVFRGGEGALQVLPPLVDVIPEARLNLVIYYLRQDDVQEAYNLIKDLEPTTPQEYILKGVVNAALGQEMGSRDHMKIAQQFFQLVGGSASECDTIPGRQCMASCFFLLKQFDDVLIYLNSFKSYFYNDDIFNFNYAQAKAATGNTSEGEEAFLLIQSEKMKNDYIYLSWLARCYIMNKKPRLAWELYLKMETSGESFSLLQLIANDCYKMGQFYYSAKAFDVLERLDPNPEYWEGKRGACVGIFQMIIAGREPKETLREVLHLLRSTGNTQVEYMIRIMKKWAKENRVSI

SEQ ID NO: 14307 - protein, 479 aa, Homo sapiens
MARHGCLGLGLFCCVLFAATVGPQPTPSIPGAPATTLTPVPQSEASMLSLNLGLNFKFHLRGPAAVWGSPVTETQPLSLGPGQEPGEEVASGLRTDPLWELLVGSSGNSLTEWGSTEGGSKPRASSLLPESTSRRSGPSDGPTAPYQPRRSTVTWDTALMVTALPSSAPRPHQSELELKFDMALRAGAAPTLGHRTLPLLPSLRASLAEIAGRLGPFGFFGTTLSPLRNFSGLSPPGETTSTSSASGVSGSLGFLGTTLSLPPYSLERKLSSPSPLDPAASLSFASIATTSLDPTVPISGPDDLSPPASLGNPSGQPECGPGSCSVGELPEREGQPPEAPRPLFFLTLEADWAEARARWGLAWEAHVYGVGALFGLVALLALLALALLPWRCPPGAPCLALLDLLLLSAGTTRAFPLFYDAYGHRDRLPALAWLLLQDLPLPCLAAGLGLACLLLARPRPPRCPTGLAALLLLGLGLAA

SEQ ID NO: 14308 - protein, 187 aa, Homo sapiens
MEWWASSPLRLWLLLFLLPSAQGRQKESGSKWKVFIDQINRSLENYEPCSSQNCSCYHGVIEEDLTPFRGGISRKMMAEVVRRKLGTHYQITKNRLYRENDCMFPSRCSGVEHFILEVIGRLPDMEMVINVRDYPQVPKWMEPAIPVFSFSKTCFISCVASGQRPHLCCISHGLASFLESVWFHCLS

SEQ ID NO: 14309 - protein, 429 aa, Homo sapiens
MARHGCLGLGLFCCVLFAATVGPQPTPSIPGAPATTLTPVPQSEASMLSLNLGLNFKFHLRGPAAVWGSPVTETQPLSLGPGQEPGEEVASGLRTDPLWELLVGSSGNSLTEWGSTEGGSKPRASSLLPESTSRRSGPSDGPTAPYQPRRSTVTWDTALMVTALPSSAPRPHQSELELKFDMALRAGAAPTLGHRTLPLLPSLRASLAEIAGRLGPFGFFGTTLSPLRNFSGLSPPGETTSTSSASGVSGSLGFLGTTLSLPPYSLERKLSSPSPLDPAASLSFASIATTSLDPTVPISGPDDLSPPASLGNPSGQPECGPGSCSVGELPEREGQPPEAPRPLFFLTLEADWAEARARWGLAWEAHVYGRLHRGLPPALPNQPATQHRGGPLQRGPACAWPLPGPCLRGRSAWARTLPHRLAGDRGQGQ

SEQ ID NO: 14310 - protein, 120 aa, Homo sapiens
MRLLAQLLGLLMLWVPGSSGDIVMTQTPLSSPVTLGQPASISCRSSQSLVHSDGNTYLSWLQQRPGQPPRLLIYKISNRFSGVPDRFSGSGAGTDFTLKISRVEAEDVGVYYCMQATQFP

SEQ ID NO: 14311 - protein, 220 aa, Homo sapiens
MAVFLQLLPLLLSRAQGNPGASLDGRPGDRVNLSCGGVSHPIRWVWAPSFPACKGLSKGRRPILWASSSGTPTVPPLQPFVGRLRSLDSGIRRLELLLSAGDSGTFFCKGRHEDESRTVLHVLGDRTYCKAPGPTHGSVYPQLLIPLLGAGLVLGLGALGLVWWLHRRLPPQPIRPLPRFAPLVKTEPQRPVKEEEPKIPGDLDQEPVRAWGWEGDSQNL

SEQ ID NO: 14312 - protein, 127 aa, Homo sapiens
MKMASSLAFLLLNFHVSLFLVQLLTPCSDADLPCHLFPTMSAETMELRWVSSSLRQVVNVYADGKEVEDRQSAPYRGRTSILRDGITAGKAALRIHNVTASDSGKYLCYFQDGDFYEKALVELKVAA

SEQ ID NO: 14313 - protein, 440 aa, Homo sapiens
MASPVAAQAGKLLRALALRPRFLAAGSQAVQLTSRRWLNLQEYQSKKLMSDNGVRVQRFFVADTANEALEAAKRLNAKEIVLKAQILAGGRGKGVFNSGLKGGVHLTKDPNVVGQLAKQMIGYNLATKQTPKEGVKVNKVMVAEALDISRETYLAILMDRSCNGPVLVGSPQGGVDIEEVAASNPELIFKEQIDIFEGIKDSQAQRMAENLGFVGPLKSQAADQITKLYNLFLKIDATQVEVNPFGETPEGQVVCFDAKINFDDNAEFRQKDIFAMDDKSENEPIENEAAKYDLKYIGLDGNIACFVNGAGLAMATCDIIFLNGGKPANFLDLGGGVKEAQVYQAFKLLTADPKVEAILVNIFGGIVNCAIIANGITKACRELELKVPLVVRLEGTFMEKKGSYMHIKQETGNSNENITGIQENVAHQNLSKCAISIFLC

SEQ ID NO: 14314 - protein, 108 aa, Homo sapiens
MADVEDGEETCALASHSGSSGSKSGGDKMFSLKKWNAVAMWSWDVECDTCAICRVQVMDEGIGVRNWSEALNLINASEMGFDCRSGSTALAVPSVSLASHQPCLDDHR

SEQ ID NO: 14315 - protein, 517 aa, Homo sapiens
RKWSRQFLLSFWCTVCSAHQGTIFLSLKIQFADQKQEFNKRPTKIGRRSLSRSISQSSTDSYSSAASYTDSSDDETSPRDKQQKNSKGSSDFCVKNIKQAEFGRREIEIAEQEMPALMALRKRAQGEKPLAGAKIVGCTHITAQTAVLMETLGALGAQCRWAACNIYSTLNEVAAALAESGFPVFAWKGESEDDFWWCIDRCVNVEGWQPNMILDDGGDLTHWIYKKYPNMFKKIKGIVEESVTGVHRLYQLSKAGKLCVPAMNVNDSVTKQKFDNLYCCRESILDGLKRTTDMMFGGKQVVVCGYGEVGKGCCAALKAMGSIVYVTEIDPICALQACMDGFRLVKLNEVIRQVDIVITCTGNKNVVTREHLDRMKNSCIVCNMGHSNTEIDVASLRTPELTWERVRSQVDHVIWPDGKRIVLLAEGRLLNLSCSTVPTFVLSITATTQALALIELYNAPEGRYKQDVYLLPKKMDEYVASLHLPTFDAHLTELTDEQAKYLGLNKNGPFKPNYYRY

SEQ ID NO: 14316 - protein, 120 aa, Homo sapiens; identical to SEQ ID NO: 12584

SEQ ID NO: 14317 - protein, 131 aa, Homo sapiens
MLLLLLLAPLFLRPPGAGGAQTPNATSEGCQIIHPPWEGGIRYRGLTRDQVKAINFLPVDYEIEYVCRGEREVVGPKVRKCLANGSWTDMDTPSRCGTLPSETQASALPGLQHGQVWEGAGDQAREAGRQW

SEQ ID NO: 14318 - protein, 244 aa, Homo sapiens
MIFTQSSEKTAVSCLSQNDWKLDVATDNFFQNPELYIRESVKGSLDRKKLEQLYNRYKDPQDENKIGIDGIQQFCDDLALDPASISVLIIAWKFRAATQCEFSKQEFMDGMTELGCDSIEKLKAQIPKMEQELKEPGRFKDFYQFTFNFAKNPGQKGLDLEMAIAYWNLVLNGRFKFLDLWNKFLLEHHKRSIPKDTWNLLLDFSTMIADDMSNYDEEGAWPVLIDDFVEFARPQIAGTKSTTV

SEQ ID NO: 14319 - protein, 234 aa, Homo sapiens
MGPGGRVARLLAPLMWRRAVSSVAGSAVGAEPGLRLLAVQRLPVGAAFCRACQTPNFVRGLHSEPGLEERAEGTVNEGRPESDAADHTGPKFDIDMMVSLLRQENARDICVIQVPPEMRYTDYFVIVSGTSTRHLHAMAFYVVKMYKHLKCKRDPHVKIEGKDTDDWLCVDFGSMVIHLMLPETREIYELEKLWTLRSYDDQLAQIAPETVPEDFILGIEDDTSSVTPVELKCE

SEQ ID NO: 14320 - protein, 392 aa, Homo sapiens
MDALVEDDICILNHEKAHKRDTVTPVSIYSGDESVASHFALVTAYEDIKKRLKDSEKENSLLKKRIRFLEEKLIARFEEETSSVGREQVNKAYHAYREVCIDRDNLKSKLDKMNKDNSESLKVLNEQLQSKEVELLQLRTEVETQQVMRNLNPPSSNWEVEKLSCDLKIHGLEQELELMRKECSDLKIELQKAKQTDPYQEDNLKSRDLQKLSISSDNMQHAYWELKREMSNLHLVTQVQAELLRKLKTSTAIKKACAPVGCSEDLGRDSTKLHLMNFTATYTRHPPLLPNGKALCHTTSSPLPGDVKVLSEKAILQSWTDNERSIPNDGTCFQEHSSYGRNSLEDNSWVFPSPPKSSETAFGETKTKTLPLPNLPPLHYLDQHNQNCLYKN

SEQ ID NO: 14321 - protein, 236 aa, Homo sapiens
MAETKLQLFVKASEDGESVGHCPSCQRLFMVLLLKGVPFTLTTVDTRRSPDVLKDFAPGSQLPILLYDSDAKTDTLQIEDFLEETLGPPDFPSLAPRYRESNTAGNDVFHKFSAFIKNPVPAQDEALYQQLLRALARLDSYLRAPLEHELAGEPQLRESRRRFLDGDRLTLADCSLLPKLHIVDTVCAHFRQAPIPAELRGVRRYLDSAMQEKEFKYTCPHSAEILAAYRPAVHPR

SEQ ID NO: 14322 - protein, 599 aa, Homo sapiens
LLVLGLLVAGAADGCELVPRHLRGRRATGSAATAASSPAAAAGDSPALMTDPCMSLSPPCFTEEDRFSLEALQTIHKQMDDDKDGGIEVEESDEFIREDMKYKDATNKHSHLHREDKHITIEDLWKRWKTSEVHNWTLEDTLQWLIEFVELPQYEKNFRDNNVKGTTLPRIAVHEPSFMISQLKISDRSHRQKLQLKALDVVLFGPLTRPPHNWMKDFILTVSIVIGVGGCWFAYTQNKTSKEHVAKMMKDLESLQTAEQSLMDLQERLEKAQEENRNVAVEKQNLERKMMDEINYAKEEACRLRELREGAECELSRRQYAEQELEQVRMALKKAEKEFELRSSWSVPDALQKWLQLTHEVEVQYYNIKRQNAEMQLAIAKDEAEKIKKKRSTVFGTLHVAHSSSLDEVDHKILEAKKALSELTTCLRERLFRWQQIEKICGFQIAHNSGLPSLTSSLYSDHSWVVMPRVSIPPYPIAGGVDDLDEDTPPIVSQFPGTMAKPPGSLARSSSLCRSRRSIVPSSPQPQRAQLAPHAPHPSHPRHPHHPQHTPHSLPSPDPDILSVSSCPALYRNEEEEEAIYFSAEKQCIHLGLGACKSE

SEQ ID NO: 14323 - protein, 121 aa, Homo sapiens
MEAPAAGLFLLLLLGTWAPAPGSASSEAPPLINEDVKRTVDLSSHLAKVTAEVVLAHLGGGSTSRATSFLLALEPELEARLAHLGVQVKGEDEEENNLEVRETKIKGKRVCCPGSITVVPC

SEQ ID NO: 14324 - protein, 187 aa, Homo sapiens
MWCASPVAVVAFCAGLLVSHPVLTQGQEAGGRPGADCEVCKEFLNRFYKSLIDRGVNFSLDTIEKELISFCLDTKGKENRLCYYLGATKDAATKILSEVTRPMSVHMPAMKICEKLKKLDSQICELKYEKTLDLASVDLRKMRVAELKQILHSWGEECRACAEKTDYVNLIQELAPKYAATHPKTEL

SEQ ID NO: 14325 - protein, 673 aa, Homo sapiens
MACLLETPIRMSVLSEVTASSRHYVDRLFDPDPQKVLQGVIDMKNAVIGNNKQKANLIVLGAVPRLLYLLQQETSSTELKTECAVVLGSLAMGTENNVKSLLDCHIIPALLQGLLSPDLKFIEACLRCLRTIFTSPVTPEELLYTDATVIPHLMALLSRSRYTQEYICQIFSHCCKGPDHQTILFNHGAVQNIAHLLTSLSYKVRMQALKCFSVLAFENPQVSMTLVNVLVDGELLPQIFVKMLQRDKPIEMQLTSAKCLTYMCRAGAIRTDDNCIVLKTLPCLVRMCSKERLLEERVEGAETLAYLIEPDVELQRIASITDHLIAMLADYFKYPSSVSAITDIKRLDHDLKHAHELRQAAFKLYASLGANDEDIRKKIIETENMMDRIVTGLSESSVKVRLAAVRCLHSLSRSVQQLRTSFQDHAVWKPLMKVLQNAPDEILVVASSMLCNLLLEFSPSKEPILESGAVELLCGLTQSENPALRVNGIWALMNMAFQAEQKIKADILRSLSTEQLFRLLSDSDLNVLMKTLGLLRNLLSTRPHIDKIMSTHGKQIMQAVTLILEGEHNIEVKEQTLCILANIADGTTAKDLIMTNDDILQKIKYYMGHSHVKLQLAAMFCISNLIWNEEEGSQERQDKLRDMGIVDILHKLSQSPDSNLCDKAKMALQQYLA

SEQ ID NO: 14326 - protein, 182 aa, Homo sapiens
MAAEEKDPLSYFAAYGSSSSGSSDEEDNIEPEETSRRTPDPAKSAGGCRNKAEKRLPGPDELFRSVTRPAFLYNPLNKQIDWERHVVKAPEEPPKEFKIWKSNYVPPPETYTTEKKPPPPELDMAIKWSNIYEDNGDDAPQNAKKARLLPEGEETLESDDEKDEHTSKKRKVEPGEPAKKKK

SEQ ID NO: 14327 - protein, 203 aa, Homo sapiens
MLALLVLVTVALASAHHGGEHFEGEKVFRVNVEDENHINIIRELASTTQIDFWKPDSVTQIKPHSTVDFRVKAEDTVTVENVLKQNELQYKVLISNLRNVVEAQFDSRVRATGHSYEKYNKWETVGKAGQNKPAIFMDCGFHAREWISPAFCQWFVREAVRTYGREIQVTELLDKLDFYVLPVLNIDGYIYTWTKSRFWRKTR

SEQ ID NO: 14328 - protein, 303 aa, Homo sapiens
MNTGPYYFVKNLPLHELITPEFISTFIKKGSCYALTYNTHIDEDNTVALLPNGKLILSLDKDTYEETGLQGHPSQFSGRKIMKFIVSIDLMELSLNLDSKKYERISWSFKEKKPLKFDFLLAWHKTGSEESTMMSYFSKYQIQEHQPKVALSTLRDLQCPVLQSSELEGTPEVSCRALELFDWLGAVFSNVDLNNEPNNFISTYCCPEPSTVVAKAYLCTITGFILPEKICLLLEHLCHYFDEPKLAPWVTLSVQGFADSPVSWEKNEHGFRKGGEHLYNFVIFNNQDYWLQMAVGANDHCPP

SEQ ID NO: 14329 - protein, 103 aa, Homo sapiens
CVLLLAALLEAALGLPVKKPRLRGPRPGSLTRLAEVSGGGTGLRSALSVPPPQPAGSSRAGSGTGTHTGSDPPMERGAGAGRKLPDTGRCPGAPDFGASTPRA

SEQ ID NO: 14330 - protein, 99 aa, Homo sapiens
MAVWLAQWLGPLLLVSLWGLLAPASLLRRLGEHIQQFQESSAQGLGLSLGPGAAALPKVGWLEQLLDPFNVSDRRSFLQMSPVRIPDVLSPSSQHCPPS

SEQ ID NO: 14331 - protein, 819 aa, Homo sapiens
MGSGARFPSGTLRVRWLLLLGLVGPVLGAARPGFQQTSHLSSYEIITPWRLTRERREAPRPYSKQVSYVIQAEGKEHIIHLERNKDLLPEDFVVYTYNKEGTLITDHPNIQNHCHYRGYVEGVHNSSIALSDCFGLRGLLHLENASYGIEPLQNSSHFEHIIYRMDDVYKEPLKCGVSNKDIEKETAKDEEEEPPSMTQLLRRRRAVLPQTRYVELFIVVDKERYDMMGRNQTAVREEMILLANYLDSMYIMLNIRIVLVGLEIWTNGNLINIVGGAGDVLGNFVQWREKFLITRRRHDSAQLVLKKGFGGTAGMAFVGTVCSRSHAGGINVFGQITVETFASIVAHELGHNLGMNHDDGRDCSCGAKSCIMNSGASGSRNFSSCSAEDFEKLTLNKGGNCLLNIPKPDEAYSAPSCGNKLVDAGEECDCGTPKECELDPCCEGSTCKLKSFAECAYGDCCKDCRFLPGGTLCRGKTSECDVPEYCNGSSQFCQPDVFIQNGYPCQNNKAYCYNGMCQYYDAQCQVIFGSKAKAAPKDCFIEVNSKGDRFGNCGFSGNEYKKCATGNALCGKLQCENVQEIPVFGIVPAIIQTPSRGTKCWGVDFQLGSDVPDPGMVNEGTKCGAGKICRNFQCVDASVLNYDCDVQKKCHGHGVCNSNKNCHCENGWAPPNCETKGYGGSVDSGPTYNEMNTALRDGLLVFFFLIVPLIVCAIFIFIKRDQLWRSYFRKKRSQTYESDGKNQANPSRQPGSVPRHVSPVTPPREVPIYANRFAVPTYAAKQPQQFPSRPPPPQPKVSSQGNLIPARPAPAPPLYSSLT

SEQ ID NO: 14332 - protein, 153 aa, Homo sapiens
MNAPLGGIWLWLPLLLTWLTPEVNSSWWYMRATGGSSRVMCDNVPGLVSSQRQLCHRHPDVMRAISQGVAEWTAECQHQFRQHRWNCNTLDRDHSLFGRVLLRSCKAVLETRVQVPRGERLMYSQDMLAGHGRLQENGRLSLEEVQWGHPGGH

SEQ ID NO: 14333 - protein, 384 aa, Homo sapiens
MGSKKLKRVGLSQELCDRLSRHQILTCQDFLCLSPLELMKVTGLSYRGVHELLCMVSRACAPKMQTAYGIKAQRSADFSPAFLSTTLSALDEALHGGVACGSLTEITGPPGCGKTQFCIMMSILATLPTNMGGLEGAVVYIDTESAFSAERLVEIAESRFPRYFNTEEKLLLTSSKVHLYRELTCDEVLQRIESLEEEIISKGIKLVILDSVASVVRKEFDAQLQGNLKERNKFLAREASSLKYLAEEFSIPVILTNQITTHLSGALASQADLVSPADDLSLSEGTSGSSCVIAALGNTWSHSVNTRLILQYLDSERRQILIAKSPLAPFTSFVYTIKEEGLVLQETTFCSVTQAELNWAPEILPPQPPEQLGLQMCHHTQLIF

SEQ ID NO: 14334 - protein, 199 aa, Homo sapiens
MLLELSEEHKEHLAFLPQVDSAVVAEFGRIAVEFLRRGANPKIYEGAARKLNVSSDTVQHGVEGLTYLLTESSKLMISELDFQDSVFVLGFSEELNKLLLQLYLDNRKEIRTILSELAPSLPSYHNLEWRLDVQLASRSLRQQIKPAVTIKLHLNQNGDHNTKVLQTDPATLLHLVQQLEQALEEMKTNHCRRVVRNIK

SEQ ID NO: 14335 - protein, 175 aa, Homo sapiens
MSHRTSSTFRAERSFHSSSSSSSSSTSSSASRALPAQDPPMEKALSMFSDDFGSFMRPHSEPLAFPAAHPTARPGGAGNIKTLGDAYEFAVDVRDFSPEDIIVTTSNNHIEVRAEKLAADGTVMNTFAHKCQLPEDVDPTSVTSALREDGSLTIRARRHPHTEHVQQTFRTEIKI

SEQ ID NO: 14336 - protein, 746 aa, Homo sapiens
MPCLGLLANLCRHNLSVQTHIKTLSNVKSFYRTLITLLAHSSLTVVVFALSILSSLTLNEEVGEKLFHARNIHQTFQLIFNILINGDGTLTRKYSVDLLMDLLKNPKIADYLTRYEHFSSCLHQVLGLLNGKDPDSSSKVLELLLAFCSVTQLRHMLTQMMFEQSPPGSATLGSHTKCLEPTVALLRWLSQPLDGSENCSVLALELFKEIFEDVIDAANCSSADRFVTLLLPTILDQLQFTEQNLDEALTRKKCERIAKAIEVLLTLCGDDTLKMHIAKILTTVKCTTLIEQQFTYGKIDLGFGTKVADSELCKLAADVILKTLDLINKLKPLVPGMEVSFYKILQDPRLITPLAFALTSDNREQVQSGLRILLEAAPLPDFPALVLGESIAANNAYRQQETEHIPRKMPWQSSNHSFPTSIKCLTPHLKDGVPGLNIEELIEKLQSGMVVKDQICDVRISDIMDVYEMKLSTLASKESRLQDLLETKALALAQADRLIAQHRCQRTQAETEARTLASMLREVERKNEELSVLLKAQQVESERAQSDIEHLFQHNRKLESVAEEHEILTKSYMELLQRNESTEKKNKDLQITCDSLNKQIETVKKLNESLKEQNEKSIAQLIEKEEQRKEVQNQLVDREHKLANLHQKTKVQEEKIKTLQKEREDKEETIDILRKELSRTEQIRKELSIKASSLEVQKAQLEGRLEEKESLVKLQQEELNKHSHMIAMIHSLSGGKINPETVNLSI

SEQ ID NO: 14337 - protein, 166 aa, Homo sapiens
MAVWLAQWLGPLLLVSLWGLLAPASLLRRLGEHIQQFQESSAQGLGLSLGPGAAALPKVGWLEQLLDPFNVSDRRSFLQRYWVNDQHWVGQDGPIFLHLGGEGSLGPGSVMRGHPAALAPAWGALVISLEHRFYGLSIPAGGLEMAQLRFLSSRLALSCTAWARSV

SEQ ID NO: 14338 - protein, 270 aa, Homo sapiens
MGTALDIKIKRANKVYHAGEVLSGVVVISSKDSVQHQGVSLTMEGTVNLQLSAKSVGVFEAFYNSVKPIQIINSTIEMVKPGKFPSGKTEIPFEFPLHLKGNKVLYETYHGVFVNIQPQKGKFTPSPVDFTITPETLQNVKERALLPKFLLRGHLNSTNCVITQPLTGELVVESSEAAIRSVELQLVRVETCGCAEGYARDATEIQNIQIADGDVCRGLSVPIYMVFPRLFTCPTLETTNFKVEFEVNIVVLLHPDHLITENFPLKLCRI

SEQ ID NO: 14339 - protein, 56 aa, Homo sapiens
IPVAIFITLVNVFIGQAELAEIPEGYVPEHWEYYKGKGAGSAKIDACERRWTLVLL

SEQ ID NO: 14340 - protein, 232 aa, Homo sapiens
MGPLALPAWLQPRYRKNAYLFIYYLIQFCGHSWIFTNMTVRFFSFGKDSMVDTFYAIGLVMRLCQSVSLLELLHIYVGIESNHLLPRFLQLTERIIILFVVITSQEEVQEKYVVCVLFVFWNLLDMVRYTYSMLSVIGISYAVLTWLSQTLWMPIYPLCVLAEAFAIYQSLPYFESFGTYSTKLPFDLSIYFPYVLKIYLMMLFIGMYFTYSHLYSERRDILGIFPIKKKKM

SEQ ID NO: 14341 - protein, 562 aa, Homo sapiens
MHSKVTIICIRFLFWFLLLCMLIGKSHTEDDIIIATKNGKVRGMNLTVFGGTVTAFLGIPYAQPPLGRLRFKKPQSLTKWSDIWNATKYANSCCQNIDQSFPGFHGSEMWNPNTDLSEDCLYLNVWIPAPKPKNATVLIWIYGGGFQTGTSSLHVYDGKFLARVERVIVVSMNYRVGALGFLALPGNPEAPGNMGLFDQQLALQWVQKNIAAFGGNPKSVTLFGESAGAASVSLHLLSPGSHSLFTRAILQSGSFNAPWAVTSLYEARNRTLNLAKLTGCSRENETEIIKCLRNKDPQEILLNEAFVVPYGTPLSVNFGPTVDGDFLTDMPDILLELGQFKKTQILVGVNKDEGTAFLVYGAPGFSKDNNSIITRKEFQEGLKIFFPGVSEFGKESILFHYTDWVDDQRPENYREALGDVVGDYNFICPALEFTKKFSEWGNNAFFYYFEHRSSKLPWPEWMGVMHGYEIEFVFGLPLERRDNYTKAEEILSRSIVKRWANFAKYGNPNETQNNSTSWPVFKSTEQKYLTLNTESTRIMTKLRAQQCRFWTSFFPKVLEMTG

SEQ ID NO: 14342 - protein, 574 aa, Homo sapiens
MSLSPPCFTEEDRFSLEALQTIHKQMDDDKDGGIEVEESDEFIREDMKYKDATNKHSHLHREDKHITIEDLWKRWKTSEVHNWTLEDTLQWLIEFVELPQYEKNFRDNNVKGTTLPRIAVHEPSFMISQLKISDRSHRQKLQLKALDVVLFGPLTRPPHNWMKDFILTVSIVIGVGGCWFAYTQNKTSKEHVAKMMKDLESLQTAEQSLMDLQERLEKAQEENRNVAVEKQNLERKMMDEINYAKEEACRLRELREGAECELSRRQYAEQELEQVRMALKKAEKEFELRSSWSVPDALQKWLQLTHEVEVQYYNIKRQNAEMQLAIAKDEVAASYLIQAEKIKKKRSTVFGTLHVAHSSSLDEVDHKILEAKKALSELTTCLRERLFRWQQIEKICGFQIAHNSGLPSLTSSLYSDHSWVVMPRVSIPPYPIAGGVDDLDEDTPPIVSQFPGTMAKPPGSLARSSSLCRSRRSIVPSSPQPQRAQLAPHAPHPSHPRHPHHPQHTPHSLPSPDPDILSVSSCPALYRNEEEEEAIYFSAEKQCMIIVTSKMPLLTELVLCGFWKSEGKLESCTV

SEQ ID NO: 14343 - protein, 298 aa, Homo sapiens
MGDTWAQLPWPGPPHPAMLLISLLLAAGLMHSDAGTSCPVLCTCRNQVVDCSSQRLFSVPPDLPMDTRNLSLAHNRITAVPPGYLTCYMELQVLDLHNNSLMELPRGLFLHAKRLAHLDLSYNNFSHVPADMFQEAHGLVHIDLSHNPWLRRVHPQAFQGLMQLRDLDLSYGGLAFLSLEALEGLPGLVTLQIGGNPWVCGCTMEPLLKWLRNRIQRCTADSQLAECRGPPEVEGAPLFSLTEESFKACHLTLTLDDYLFIAFVGFVVSIASVATNFLLGITANCCHRWSKASEEEEI

SEQ ID NO: 14344 - protein, 431 aa, Homo sapiens
MLVHLFRVGIRGGPFPGRLLPPLRFQTFSAVRYSDGYRSSSLLRAVAHLRSQLWAHLPRAPLAPRWSPSAWCWVGGALLGPMVLSKHPHLCLVALCEAEEAPPASSTPHVVGSRFNWKLFWQFLHPHLLVLGVAVVLALGAALVNVQIPLLLGQLVEVVAKYTRDHVGSFMTESQNLSTHLLILYGVQGLLTFGYLVLLSHVGERMAVDMRRALFSSLLRQDITFFDANKTGQLVSRLTTDVQEFKSSFKLVISQGLRSCTQVAGCLVSLSMLSTRLTLLLMVATPALMGVGTLMGSGLRKLSRQCQEQIARAMGVADEALGNVRTVRAFAMEQREEERYGAELEACRCRAEELGRGIALFQGLSNIAFNCMVLGTLFIGGSLVAGQQLTGGDLMSFLVASQTVQSFLRVAPCPNSLPLQAVTFHAWKDHP

SEQ ID NO: 14345 - protein, 692 aa, Homo sapiens
MFYFRGCGRWVAVSFTKQQFPLARLSSDSAAPRTPHFDVIVIGGGHAGTEAATAAARCGSRTLLLTHRVDTIGQMSCNPSFGGIGKGHLMREVDALDGLCSRICDQSGVHYKVLNRRKGPAVWGLRAQIDRKLYKQNMQKEILNTPLLTVQEGAVEDLILTEPEPEHTGKCRVSGVVLVDGSTVYAESVILTTGTFLRGMIVIGLETHPAGRLGDQPSIGLAQTLEKLGFVVGRLKTGTPPRIAKESINFSILNKHIPDNPSIPFSFTNETVWIKPEDQLPCYLTHTNPRVDEIVLKNLHLNSHVKETTRGPRYCPSIESKVLRFPNRLHQVWLEPEGMDSDLIYPQGLSMTLPAELQEKMITCIRGLEKAKVIQPGYGVQYDYLDPRQITPSLETHLVQRLFFAGQINGTTGYEEAAAQGVIAGINASLRVSRKPPFVVSRTEGYIGVLIDDLTTLGTSEPYRMFTSRVEFRLSLRPDNADSRLTLRGYKDAGCVSQQRYERACWMKSSLEEGISVLKSIEFLSSKWKKLIPEASISTSRSLPVRALDVLKYEEVDMDSLAKAVPEPLKKYTKCRELAERLKIEATYESVLFHQLQEIKGVQQDEALQLPKDLDYLTIRDVSLSHEVREKLHFSRPQTIGAASRIPGVTPAAIINLLRFVKTTQRRQSAMNESSKTDQYLCDADRLQEREL

SEQ ID NO: 14346 - protein, 186 aa, Homo sapiens
MLLLGLLLLLPLLAGARLLWNWWKLRSLHLPPLAPGFLHLLQPDLPIYLLGLTQKFGPIYRLHLGLQDVVVLNSKRTIEEAMVKKWADFAGRPEPLTFPTLQPPPPPADKLVSRNYPDLSLGDYSLLWKAHKKLTRSALLLGIRDSMEPVVEQLTQEFCERMRAQPGTPVAIEEEFSLLTCSIICY

SEQ ID NO: 14347 - protein, 53 aa, Homo sapiens
MKPRPAGFVDNKLKQRVIQYLTSNKCGKYVDIGVLASDLQRVYRLWSKKKKCF

SEQ ID NO: 14348 - protein, 151 aa, Homo sapiens
MEDEEVAESWEEAADSGEIDRRLEKKLKITQKERKSKSPPKVPIVIQDDSLPAGPPPQIRILKRPTSNGVVSSPNSTSRPTLPVKSLAQREAEYAEARKRILGSASPEEEQEKPILDRPTRISQPEDSRQPNNVIRQPLGPDGSQGFKQRR

SEQ ID NO: 14349 - protein, 117 aa, Homo sapiens
MDMRVPAQLLGLLLLWLPGARCDIQLTQSPSFLSASVGDRVTITCRASQGISSYLAWYQQKPGKAPKLLIYAASTLQSGVPSRFSGSGSGTEFTLTISSLQPEDFATYYCQQLNSYP

SEQ ID NO: 14350 - protein, 82 aa, Homo sapiens
MAVFHDEVEIEDFQYDEDSETYFYPCPCGDNFSITKEDLENGEDVATCPSCSLIIKVIYDKDQFVCGETVPAPSANKELVKC

SEQ ID NO: 14351 - protein, 874 aa, Homo sapiens
MAAVDSDVESLPRGGFRCCLCHVTTANRPSLDAHLGGRKHRHLVELRAARKAQGLRSVFVSGFPRDVDSAQLSEYFLAFGPVASVVMDKDKGVFAIVEMGDVGAREAVLSQSQHSLGGHRLRVRPREQKEFQSPASKSPKGAAPDSHQLAKALAEAADVGAQMIKLVGLRELSEAERQLRSLVVALMQEVFTEFFPGCVVHPFGSSINSFDVHGCDLDLFLDLGDLEEPQPVPKAPESPSLDSALASPLDPQALACTPASPPDSQPPASPQDSEALDFETPSSSLAPQTPDSALASETLASPQSLPPASPLLEDREEGDLGKASELAETPKEEKAEGAAMLELVGSILRGCVPGVYRVQTVPSARRPVVKFCHRPSGLHGDVSLSNRLALHNSRFLSLCSELDGRVRPLVYTLRCWAQGRGLSGSGPLLSNYALTLLVIYFLQTRDPPVLPTVSQLTQKAGEGEQVEVDGWDCSFPRDASRLEPSINVEPLSSLLAQFFSCVSCWDLRGSLLSLREGQALPVAGGLPSNLWEGLRLGPLNLQDPFDLSHNVAANVTSRVAGRLQNCCRAAANYCRSLQYQRRSSRGRDWGLLPLLQPSSPSSLLSATPIPLPLAPFTQLTAALVQVFREALGCHIEQATKRTRSEGGGTGESSQGGTSKRLKVDGQKNCCEEGKEEQQGCAGDGGEDRVEEMVIEVGEMVQDWAMQSPGQPGDLPLTTGKHGAPGEEGQPSHAALAERGPKGHEAAQEWSQGEAGKGASLPSSASWRCALWHRVWQGRRRARRRLQQQTKEGAGGGAGTRAGWLATEAQVTQELKGLSGGEERPETEPLLSFVASVSPADRMLTVTPLQDPQGLFPDLHHFLQVFLPQAIRHLK

SEQ ID NO: 14352 - protein, 162 aa, Homo sapiens
MKPSIAEMLHRGRMLWIILLSTIALGWTTPIPLIEDSEEIDEPCFDPCYCEVKESLFHIHCDSKGFTNISQITEFWSRPFKLYLQRNSMRKLYTNSFLHLNNAVSINLGNNALQDIQTGAFNGLKILKRLYLHENKLDVFRNDTFLGLESLEYLQADYNVIK

SEQ ID NO: 14353 - protein, 66 aa, Homo sapiens
MAVARAALGPLVTGLYDVQAFKFGDFVLKSGLSSPIYIDLRGIVSRPRLLSQMGSLLRHPGWSAAL

SEQ ID NO: 14354 - protein, 313 aa, Homo sapiens
MDWLNVFKDFFSIGKVKRKPSVPDSASPADDSFVDPGERLYDLNMPAYVKFNYMAEREDELSLIKGTKVIVMEKCSDGWWRGSYNGQVGWFPSNYVTEEGDSPLGDHVGSLSEKLAAVVNNLNTGQVLHVVQALYPFSSSNDEELNFEKGDVMDVIEKPENDPEWWKCRKINGMVGLVPKNYVTVMQNNPLTSGLEPSPPQCDYIRPSLTGKFAGNPWYYGKVTRHQAEMALNERGHEGDFLIRDSESSPNDFSVSLKAQGKNKHFKVQLKETVYCIGQRKFSTMEELVEHYKKAPIFTSEQGEKLYLVKHLS

SEQ ID NO: 14355 - protein, 137 aa, Homo sapiens
MAAMSLLRRVSVTAVAALSGRPLGTRLGFGGFLTRGFPKAAGQAELAEIPEGYVPEHWEYYKHPISRWIARNFYDSPEKIYERTMAVLQIEAEKAELRVKELEVRKLMHVRGDGPWYYYETIDKELIDHSPKATPDN

SEQ ID NO: 14356 - protein, 361 aa, Homo sapiens
MKSLSLLLAVALGLATAVSAGPAVIECWFVEDASGKGLAKRPGALLLRQGPGEPPPRPDLDPELYLSVHVVLTVLTHTPAPRVRLGQDALLDLSFAYMPPTSEAASSLAPGPPPFGLEWRRQHLGKGHLLLAATPGLNGQMPAAQEGAVAFAAWDDDEPWGPWTGNGTFWLPTVQPFQEGTYLATIHLPYLQGQVTLELAVYKPPKVSLMPATLARAAPGEAPPELLCLVSHFYPSGGLEVEWELRGGPGGRSQKAEGQRWLSALRHHSDGSVSLSGHLQPPPVTTEQHGARYACRIHHPSLPASGRSAEVTLEVAGLSGPSLEDSVGLFLSAFLLLGLFKALGWAAVYLSTCKDSKKKAE

SEQ ID NO: 14357 - protein, 317 aa, Homo sapiens
MQHNEGQERSSNNFNYGAYHSLEAIYHEMDNIAADFPDLARRVKIGHSFENRPMYVLKFSTGKGVRRPAVWLNAGIHSREWISQATAIWTARKIVSDYQRDPAITSILEKMDIFLLPVANPDGYVYTQTQNRLWRKTRSRNPGSSCIGADPNRNWNASFAGKGASDNPCSEVYHGPHANSEVEVKSVVDFIQKHGNFKGFIDLHSYSQLLMYPYGYSVKKAPDAEELDKVARLAAKALASVSGTEYQVGPTCTTVYPASGSSIDWAYDNGIKFAFTFELRDTGTYGFLLPANQIIPTAEETWLGLKTIMEHVRDNLY

SEQ ID NO: 14358 - protein, 557 aa, Homo sapiens
MLGGSGSHGRRSLAALSQIAYQRNDDDEEEAARERRRRARQERLRQKQEEESLGQVTDQVEVNAQNSVPDEEAKTTTTNTQVEGDDEAAFLERLARREERRQKRLQEALERQKEFDPTITDASLSLPSRRMQNDTAENETTEKEEKSESRQERYEIEETETVTKSYQKNDWRDAEENKKEDKEKEEEEEEKPKRGSIGENQGEEKGTKVQAKREKLQEDKPTFKKEEIKDEKIKKDKEPKEEVKSFMDRKKGFTEVKSQNGEFMTHKLKHTENTFSRPGGRASVDTKEAEGAPQVEAGKRLEELRRRRGETESEEFEKLKQKQQEAALELEELKKKREERRKVLEEEEQRRKQEEADRKLREEEEKRRLKEEIERRRAEAAEKRQKMPEDGLSDDKKPFKCFTPKGSSLKIEERAEFLNKSVQKSGVKSTHQAAIVSKIDSRLEQYTSAIEGTKSAKPTKPAASDLPVPAEGVRNIKSMWEKGNVFSSPTAAGTPNKETAGLKVGVSSRINEWLTKTPDGNKSPAPKPSDLRPGDVSSKRNLWEKQSVDKVTSPTKV

SEQ ID NO: 14359 - protein, 462 aa, Homo sapiens
MDTKHFLPLDFSTQVNSSLTSPTGRGSMAAPSLHPSLGPGIGSPGQLHSPISTLSSPINGMGPPFSVISSPMGPHSMSVPTTPTLGFSTGSPQLSSPMNPVSSSEDIKPPLGLNGVLKVPAHPSGNMASFTKHICAICGDRSSGKHYGVYSCEGCKGFFKRTVRKDLTYTCRDNKDCLIDKRQRNRCQYCRYQKCLAMGMKREAVQEERQRGKDRNENEVESTSSANEDMPVERILEAELAVEPKTETYVEANMGLNPSSPNDPVTNICQAADKQLFTLVEWAKRIPHFSELPLDDQVILLRAGWNELLIASFSHRSIAVKDGILLATGLHVHRNSAHSAGVGAIFDRVLTELVSKMRDMQMDKTELGCLRAIVLFNPDSKGLSNPAEVEALREKVYASLEAYCKHKYPEQPGRFAKLLLRLPALRSIGLKCLEHLFFFKLIGDTPIDTFLMEMLEAPHQMT

SEQ ID NO: 14360 - protein, 96 aa, Homo sapiens
MALCALTRALRSLNLAPPTVAAPAPSLFPAAQMMNNGLLQQPSALMLLPCRPVLTSVALNANFVSWKSRTKYTITPVKMRKSGGRDHTGGNKDRGI

SEQ ID NO: 14361 - protein, 345 aa, Homo sapiens
MGPRARPALLLLMLLQTAVLQGRLLRSHSLHYLFMGASEQDLGLSLFEALGYVDDQLFVFYDHESRRVEPRTPWVSSRISSQMWLQLSQSLKGWDHMFTVDFWTIMENHNHSKESHTLQVILGCEMQEDNSTEGYWKYGYDGQDHLEFCPDTLDWRAAEPRAWPTKLEWERHKIRARQNRAYLERDCPAQLQQLLELGRGVLDQQEGSESSSLPGKVTTLRCRALNYYPQNITMKWLKDKQPMDAKEFEPKDVLPNGDGTYQGWITLAVPPGEEQRYTCQVEHPGLDQPLIVIWEPSPSGTLVIGVISGIAVFVVILFIGILFIILRKRQGSRGAMGHYVLAERE

SEQ ID NO: 14362 - protein, 384 aa, Homo sapiens
MAALTLRGVRELLKRVDLATVPRRHRYKKKWAATEPKFPAVRLALQNFDMTYSVQFGDLWPSIRVSLLSEQKYGALVNNFAAWDHVSAKLEQLSAKDFVNEAISHWELQSEGGQSAAPSPASWACSPNLRCFTFDRGDISRFPPARPGSLGVMEYYLMDAASLLPVLALGLQPGDIVLDLCAAPGGKTLALLQTGCCRNLAANDLSPSRIARLQKILHSYVPEEIRDGNQVRVTSWDGRKWGELEGDTYDRVLVDVPCTTDRHSLHEEENNIFKRSRKKERQILPVLQVQLLAAGLLATKPGGHVVYSTCSLSHLQNEYVVQGAIELLANQYSIQVQVEDLTHFRRVFMDTFCFFSSCQVGELVIPNLMANFGPMYFCKMRRLT

SEQ ID NO: 14363 - protein, 103 aa, Homo sapiens
MALCALTRALRSLNLAPPTVAAPAPSLFPAAQMMNNGLLQQPSALMLLPCRPVLTSVALNANFVSWKSRTKYTITPVKMRKSGGRDHTGAGNVRSNSRPSIQR

SEQ ID NO: 14364 - protein, 156 aa, Homo sapiens
MLLLLLLAPLFLRPPGAGGAQTPNATSEGCQIIHPPWEGGIRYRGLTRDQVKAINFLPVDYEIEYVCRGEREVVGPKVRKCLANGSWTDMDTPSRCVRICSKSYLTLENGKVFLTGGDLPALDGARVDFRCDPDFHLVGSSRSICSQGQWSTPKPH

SEQ ID NO: 14365 - protein, 636 aa, Homo sapiens
MGTASSLVSPAGGEVIEDTYGAGGGEACEIPVEVKPKARLLRNSFRRGAGAAAGAGPGSLPRGVGAGGLLGASFKSTGSSVPELEYAAAEYERLRKEYEIFRVSKNQELLSMGRREAKLDTENKRLRAELQALQKTYQKILREKESALEAKYQAMERAATFEHDRDKVKRQFKIFRETKENEIQDLLRAKRELESKLQRLQAQGIQVFDPGESDSDDNCTDVTAAGTQCEYWTGGALGSEPSIGSMIQLQQSFRGPEFAHSSIDVEGPFANVNRDDWDIAVASLLQVTPLFSHSLWSNTVRCYLIYTDETQPEMDLFLKDYSPKLKRMCETMGYFFHAVYFPIDVENQYLTVRKWEIEKSSLVILFIHLTLPSLLLEDCEEAFLKNPEGKPRLIFHRLEDGKVSSDSVQQLIDQVSNLNKTSKAKIIDHSGDPAEGVYKTYICVEKIIKQDILGFENTDLETKDLGSEDSIPEEDDFGDVLWDIHDEQEQMETFQQASNSAHELGFEKYYQRLNDLVAAPAPIPPLLVSGGPGSGKSLLLSKWIQLQQKNSPNTLILSHFVGRPMSTSSESSLIIKRLTLKLMQHSWSVSALTLDPAKLLEEFPRWLEKLSARHQGSIIIVIDSIDQVQVVAYTSS

SEQ ID NO: 14366 - protein, 597 aa, Homo sapiens
MGKKHKKHKAEWRSSYEDYADKPLEKPLKLVLKVGGSEVTELSGSGHDSSYYDDRSDHERERHKEKKKKKKKKSEKEKHLDDEERRKRKEEKKRKREREHCDTEGEADDFDPGKKVEVEPPPDRPVRACRTQPAENESTPIQQLLEHFLRQLQRKDPHGFFAFPVTDAIAPGYSMIIKHPMDFGTMKDKIVANEYKSVTEFKADFKLMCDNAMTYNRPDTVYYKLAKKILHAGFKMMSKQAALLGNEDTAVEEPVPEVVPVQVETAKKSKKPSREVISCMFEPEGNACSLTDSTAEEHVLALVEHAADEARDRINRFLPGGKMGYLKRNGDGSLLYSVVNTAEPDADEEETHPVDLSSLSSKLLPGFTTLGFKDERRNKVTFLSSATTALSMQNNSVFGDLKSDEMELLYSAYGDETGVQCALSLQEFVKDAGSYSKKVVDDLLDQITGGDHSRTLFQLKQRRNVPMKPPDEAKVGDTLGDSSSSVLEFMSMKSYPDVSVDISMLSSLGKVKKELDPDDSHLNLDETTKLLQDLHEAQAERGGSRPSSNLSSLSNASERDQHHLGSPSRLSVGEQPDVTHDPYEFLQSPEPAASAKT

SEQ ID NO: 14367 - protein, 146 aa, Homo sapiens
MALETHFWTWINHLVTWGSIIFYFVFSLFYGGILWPFLGSQNMYFVFIQLLSSGSAWFAIILMVVTCLFLDIIKKVFDRHLHPTSTEKAQLTETNAGIKCLDSMCCFPEGEAACASVGRMLERVIGRCSPTHISRCEISLSSLCCR

SEQ ID NO: 14368 - protein, 292 aa, Homo sapiens
MQKYEKLEKIGEGTYGTVFKAKNRETHEIVALKRVRLDDDDEGVPSSALREICLLKELKHKNIVRLHDVLHSDKKLTLVFEFCDQDLKKYFDSCNGDLDPEIVKSFLFQLLKGLGFCHSRNVLHRDLKPQNLLINRNGELKLADFGLARAFGIPVRCYSAEVVTLWYRPPDVLFGAKLYSTSIDMWSAGCIFAELANAGRPLFPGNDVDDQLKRIFRLLGTPTEEQWPSMTKLPDYKPYPMYPATTSLVNVVPKLNATGRDLLQNLLKCNPVQRISAEEALQHPYFSDFCPP

SEQ ID NO: 14369 - protein, 502 aa, Homo sapiens
MPVKMLFKELLLLLMMMPLQHYTKTCGFVVYQNDKLFQSKTFTAKSDFSQKIISSKTDENEQDQSASVDMVFSPKYNQKEFQLYSYACVYWNLSAKDWDTYGCQKDKGTDGFLRCRCNHTTNFAVLMTFKKDYQYPKSLDILSNVGCALSVTGLALTVIFQIVTRKVRKTSVTWVLVNLCISMLIFNLLFVFGIENSNKNLQTSDGDINNIDFDNNDIPRTDTINIPNPMCTAIAALLHYFLLVTFTWNALSAAQLYYLLIRTMKPLPRHFILFISLIGWGVPAIVVAITVGVIYSQNGNNPQWELDYRQEKICWLAIPEPNGVIKSPLLWSFIVPVTIILISNVVMFITISIKVLWKNNQNLTSTKKVSSMKKIVSTLSVAVVFGITWILAYLMLVNDDSIRIVFSYIFCLFNTTQGLQIFILYTVRTKVFQSEASKVLMLLSSIGRRKSLPSVTRPRLRVKMYNFLRSLPTLHERFRLLETSPSTEEITLSESDNAKESI

SEQ ID NO: 14370 - protein, 5070 aa, Homo sapiens
MKGARWRRVPWVSLSCLCLCLLPHVVPGTTEDTLITGSKTAAPVTSTGSTTATLEGQSTAASSRTSNQDISASSQNHQTKSTETTSKAQTDTLTQMMTSTLFSSPSVHNVMETAPPDEMTTSFPSSVTNTLMMTSKTITMTTSTDSTLGNTEETSTAGTESSTPVTSAVSITAGQEGQSRTTSWRTSIQDTSASSQNHWTRSTQTTRESQTSTLTHRTTSTPSFSPSVHNVTGTVSQKTSPSGETATSSLCSVTNTSMMTSEKITVTTSTGSTLGNPGETSSVPVTGSLMPVTSAALVTFDPEGQSPATFSRTSTQDTTAFSKNHQTQSVETTRVSQINTLNTLTPVTTSTVLSSPSGFNPSGTVSQETFPSGETTTSSPSSVSNTFLVTSKVFRMPTSRDSTLGNTEETSLSVSGTISAITSKVSTIWWSDTLSTALSPSSLPPKISTAFHTQQSEGAETTGRPHERSSFSPGVSQEIFTLHETTTWPSSFSSKGHTTWSQTELPSTSTGAATRLVTGNPSTGTAGTIPRVPSKVSAIGEPGEPTTYSSHSTTLPKTTGAGAQTQWTQETGTTGEALLSSPSYSVTQMIKTATSPSSSPMLDRHTSQQITTAPSTNHSTIHSTSTSPQESPAVSQRGHTQAPQTTQESQTTRSVSPMTDTKTVTTPGSSFTASGHSPSEIVPQDAPTISAATTFAPAPTGDGHTTQAPTTALQAAPSSHDATLGPSGGTSLSKTGALTLANSVVSTPGGPEGQWTSASASTSPDTAAAMTHTHQAESTEASGQTQTSEPASSGSRTTSAGTATPSSSGASGTTPSGSEGISTSGETTRFSSNPSRDSHTTQSTTELLSASASHGAIPVSTGMASSIVPGTFHPTLSEASTAGRPTGQSSPTSPSASPQETAAISRMAQTQRTRTSRGSDTISLASQATDTFSTVPPTPPSITSTGLTSPQTETHTLSPSGSGKTFTTALISNATPLPVTYASSASTGHTTPLHVTDASSVSTGHATPLPVTSPSSVSTGHTTPLPVTDTSSESTGHVTPLPVTSFSSASTGDSTPLPVTDTSSASTGHVTPLPVTSLSSASTGDTTPLPVTDTSSASTGHATSLPVTDTSSVSTGHTTPLPVTDTSSASTGHATSLPVTDTSSVSTGHTTPLHVTDASSASTGQATPLPVTSLSSVSTGDTTPLPVTSPSSASTGHATPLLVTDTSSASTGHATPLPVTDASSVSTDHATSLPVTIPSAASTGHTTPLPVTDTSSASTGQATSLLVTDTSSVSTGDTTPLPVTSTSSASTGHVTPLHVTSPSSASTGHATPLPVTSLSSASTGDTMPLPVTSPSSASTGDTTPLPVTDASSVSTGHTTPLHVTDASSASTGQATPLPVTSLSSVSTGDTTPLPVTSPSSASTGHATPLLVTDTSSASTGHATPLPVTDASSVSTDHATSLPVTIPSAASTGHTTPLPVTDTSSASTGQATSLLVTDTSSVSTGDTTPLPVTSTSSASTGHVTPLHVTSPSSASTGHATPLPVTSLSSASTGDTMPLPVTSPSSASTGDTTPLPVTDASSVSTGHTTPLPVTSPSSASTGHTTPLPVTDTSSASKGDTTPLPVTSPSSASTGHTTPLPVTDTSSASTGDTTPLPVTNASSLSTGHATPLHVTSPSSASTGHATPLPVTSTSSASTGHATPLPVTGLSSATTDDTTRLPVTDVSSASTGQATPLPVTSLSSVSTGDTTPLPVTSPSSASTGHASPLLVTDASSASTGQATPLPVTDTSSVSTAHATPLPVTGLSSASTDDTTRLPVTDVSSASTGQAIPLPVTSPSSASTGDTTPLPVTDASSASTGDTTSLPVTIPSSASSGHTTSLPVTDASSVSTGHATSLLVTDASSVSTGDTTPLPVTDTNSASTGDTTPLHVTDASSVSTGHATSLPVTSLSSASTGDTTPLPVTSPSSASSGHTTPLPVTDASSVPTGHATSLPVTDASSVSTGHATPLPVTDASSVSTGHATPLPVTDTSSVSTGQATPLPVTSLSSASTGDTTPLPVTDTSSASTGQDTPLPVTSLSSVSTGDTTPLPVTNPSSASTGHATPLLVTDASSISTGHATSLLVTDASSVSTGHATALHDTDASSLSTGDTTPLPVTSPSSTSTGDTTPLPVTETSSVSTGHATSLPVTDTSSASTGHATSLPVTDTSSASTGHATPLPVTDTSSASTGQATPLPVTSPSSASTGHAIPLLVTDTSSASTGQATPLPVTSLSSASTGDTTPLPVTDASSVSTGHATSLPVTSLSSVSTGDTTPLPVTSPSSASTGHATPLHVTDASSASTGHATPLPVTSLSSASTGDTTPLPVTSPSSASTGHATPLHVTDASSVSTGDTTPLPVTSSSSASSGHTTPLPVTDASSASTGDTTPLPVTDTSSASTGHATHLPVTGLSSASTGDTTRLPVTNVSSASTGHATPLPVTSTSSASTGDTTPLPGTDTSSVSTGHTTPLLVTDASSVSTGDTTRLPVTSPSSASTGHTTPLPVTDTPSASTGDTTPLPVTNASSLSTRHATSLHVTSPSSASTGHATSLPVTDTSAASTGHATPLPVTSTSSASTGDTTPLPVTDTYSASTGQATPLPVTSLSSVSTGDTTPLPVTSPSSASTGHATPLLVTDASSASTGQATPLPVTSLSSVSTGDTTPLPVTSPSSASTGHATSLPVTDTSSASTGDTTSLPVTDTSSAYTGDTTSLPVTDTSSSSTGDTTPLLVTETSSVSTGDTTPLPVTDTSSASTGHATPLPVTNTSSVSTGHATPLHVTSPSSASTGHTTPLPVTDASSVSTGHATSLPVTDASSVFTGHATSLPVTIPSSASSGHTTPLPVTDASSVSTGHATSLPVTDASSVSTGHATPLPVTDASSVSTGHATPLPLTSLSSVSTGDTTPLPVTDTSSASTGQATPLPVTSLSSVSTGDTTPLPVTDTSSASTGHATSLPVTDTSSASTGHATPLPDTDTSSASTGHATLLPVTDTSSASIGHATSLPVTDTSSISTGHATPLHVTSPSSASTGHATPLPVTDTSSASTGHANPLHVTSPSSASTGHATPLPVTDTSSASTGHATPLPVTSLSSVSTGDTTPLPVTSPSSASTGHTTPLPVTDTSSASTGQATALPVTSTSSASTGDTTPLPVTDTSSASTGQATPLPVTSLSSVSTGDTTPLPVTSPSSASTGHATPLLVTDASSASTGQATPLPVTSLSSVSTGDTTPLPVTSPSSASTGHATSLPVTDTSSASTGDTTSLPVTDTSSAYTGDTTSLPVTDTSSSSTGDTTPLLVTETSSVSTGHATPLLVTDASSASTGHATPLHVTSPSSASTGDTTPVPVTDTSSVSTGHATPLPVTGLSSASTGDTTRLPVTDISSASTGQATPLPVTNTSSVSTGDTMPLPVTSPSSASTGHATPLPVTSTSSASTGHATPVPVTSTSSASTGHTTPLPVTDTSSASTGDTTPLPVTSPSSASTGHTTPLHVTIPSSASTGDTSTLPVTGASSASTGHATPLPVTDTSSVSTGHATPLPVTSLSSVSTGDTTPLPVTDASSASTGQATPLPVTSLSSVSTGDTTPLLVTDASSVSTGHATPLPVTDTSSASTGDTTRLPVTDTSSASTGQATPLPVTSLSSVSTGDTTPLLVTDASSVSTGHATPLPVTDTSSASTGDTTRLPVTDTSSASTGQATPLPVTIPSSSSSGHTTPLPVTSTSSVSTGHVTPLHVTSPSSASTGHVTPLPVTSTSSASTGHATPLLVTDASSVSTGHATPLPVTDASSASTGDTTPLPVTDTSSASTGQATPLPVTSLSSVSTGDTTPLPVTDASSASTGHATPLPVTIPSSVSTGDTMPLPVTSPSSASTGHATPLPVTGLSSASTGDTTPLPVTDTSSASTRHATPLPVTDTSSASTDDTTRLPVTDVSSASTGHATPLPVTSTSSASTGDTTPLPVTDTSSVSTGHATSLPVTSRSSASTGHATPLPVTDTSSVSTGHATPLPVTSTSSVSTGHATPLPVTSPSSASTGHATPVPVTSTSSASTGDTTPLPVTNASSLSTGHATPLHVTSPSSASRGDTSTLPVTDASSASTGHATPLPLTSLSSVSTGDTTPLPVTDTSSASTGQATPLPVTSLSSVSTGDTTPLPVTIPSSASSGHTTSLPVTDASSVSTGHGTPLPVTSTSSASTGDTTPLPVTDTSSASTGHATPLPVTDTSSASTGHATPLPVTSLSSVSTGHATPLAVSSATSASTVSSDSPLKMETPGMTTPSLKTDGGRRTATSPPPTTSQTIISTIPSTAMHTRSTAAPIPILPERGVSLFPYGAGAGDLEFVRRTVDFTSPLFKPATGFPLGSSLRDSLYFTDNGQIIFPESDYQIFSYPNPLPTGFTGRDPVALVAPFWDDADFSTGRGTTFYQEYETFYGEHSLLVQQAESWIRKMTNNGGYKARWALKVTWVNAHAYPAQWTLGSNTYQAILSTDGSRSYALFLYQSGGMQWDVAQRSGNPVLMGFSSGDGYFENSPLMSQPVWERYRPDRFLNSNSGLQGLQFYRLHREERPNYRLECLQWLKSQPRWPSWGWNQVSCPCSWQQGRRDLRFQPVSIGRWGLGSRQLCSFTSWRGGVCCSYGPWGEFREGWHVQRPWQLAQELEPQSWCCRWNDKPYLCALYQQRRPHVGCATYRPPQPAWMFGDPHITTLDGVSYTFNGLGDFLLVGAQDGNSSFLLQGRTAQTGSAQATNFIAFAAQYRSSSLGPVTVQWLLEPHDAIRVLLDNQTVTFQPDHEDGGGQETFNATGVLLSRNGSEVSASFDGWATVSVIALSNILHASASLPPEYQNRTEGLLGVWNNNPEDDFRMPNGSTIPPGSPEEMLFHFGMTWQINGTGLLGKRNDQLPSNFTPVFYSQLQKNSSWAEHLISNCDGDSSCIYDTLALRNASIGLHTREVSKNYEQANATLNQYPPSINGGRVIEAYKGQTTLIQYTSNAEDANFTLRDSCTDLELFENGTLLWTPKSLEPFTLEILARSAKIGLASALQPRTVVCHCNAESQCLYNQTSRVGNSSLELWGALSCVRTSPAL

SEQ ID NO: 14371 - protein, 169 aa, Homo sapiens
MVLVGTQDAISAANPRVIDDSRARKLSTDLKRCTYYETCATYGLNVERVFQDVAQKVVALRKKQQLAIGPCKSLPNSPSHSAVSAASIPAVHINQATNGGGSAFSDYSSSVPSTPSISQRELRIETIAASSTPTPIRKQSKRRSNIFTLMNRRPEGCLPKATQRVSWPS

SEQ ID NO: 14372 - protein, 165 aa, Homo sapiens
MSRYLRPPNTSLFVRNVADDTRSEDLRREFGRYGPIVDVYVPLDFYTRRPRGFAYVQFEDVRDAEDALHNLDRKWICGRQIEIQFAQGDRKTPNQMKAKEGRNVYSSSRYDDYDRYRRSRSRSYERRRSRSRSFDYNYRRSYSPRKPNCSWNTQYSSAYYTSRKI

SEQ ID NO: 14373 - protein, 579 aa, Homo sapiens
MTEKQQEEAEWESINVLLMMHGLKPLSLVKRTDLKDLIIFDKQSSQRMRQNLKLLVEETSCQQNMIQELIETNQQLRNELQLEQSRAANQEQRANDLEQIMESVKSKIGELEDESLSRACHQQNKIKDLQKEQKTLQVKCQHYKKKRTEQEETIASLQMEVCRLKKEEEDRIVTQNRVFAYLCKRVPHTVLDRQLLCLIDYYESKIRKIHTQRQYKEDESQSEEENDYRNLDASPTYKGLLMSLQNQLKESKSKIDALSSEKLNLQKDLETRPTQHELRLYKQQVKKLEKALKKNVKLQELINHKKAEDTEKKDEPSKYNQQQALIDQRYFQVLCSINSIIHNPRAPVIIYKQTKGGVQNFNKDLVQDCGFEHLVPVIEMWADQLTSLKDLYKSLKTLSAELVPWLNLKKQDENEGIKVEDLLFIVDTMLEEVENKEKDSNMPHFQTLQAIVSHFQKLFDVPSLNGVYPRMNEVYTRLGEMNNAVRNLQELLELDSSSSLCVLVSTVGKLCRLINEDVNEQVMQVLGPEDLQSIIYKLEEHEEFFPAFQAFTNDLLEILEIDDLDAIVPAVKKLKVLSY

SEQ ID NO: 14374 - protein, 303 aa, Homo sapiens
MRGANAWAPLCLLLAAATQLSRQQSPERPVFTCGGILTGESGFIGSEGFPGVYPPNSKCTWKITVPEGKVVVLNFRFIDLESDNLCRYDFVDVYNGHANGQRIGRFCGTFRPGALVSSGNKMMVQMISDANTAGNGFMAMFSAAEPNERGDQYCGGLLDRPSGSFKTPNWPDRDYPAGVTCVWHIVAPKNQLIELKFEKFDVERDNYCRYDYVAVFNGGEVNDARRIGKYCGDSPPAISRHCYHNHHSRWEFARHSLDHQHLQRGKFGDSAGGQEHECQADCRLQAVPSPQKRSKLHYYGPSR

SEQ ID NO: 14375 - protein, 693 aa, Homo sapiens
MALCNGDSKLENAGGDLKDGHHHYEGAVVILDAGAQYGKVIDRRVRELFVQSEIFPLETPAFAIKEQGFRAIIISGGPNSVYAEDAPWFDPAIFTIGKPVLGICYGMQMMNKVFGGTVHKKSVREDGVFNISVDNTCSLFRGLQKEEVVLLTHGDSVDKVADGFKVVARSGNIVAGIANESKKLYGAQFHPEVGLTENGKVILKNFLYDIAGCSGTFTVQNRELECIREIKERVGTSKVLVLLSGGVDSTVCTALLNRALNQEQVIAVHIDNGFMRKRESQSVEEALKKLGIQVKVINAAHSFYNGTTTLPISDEDRTPRKRISKTLNMTTSPEEKRKIIGDTFVKIANEVIGEMNLKPEEVFLAQGTLRPDLIESASLVASGKAELIKTHHNDTELIRKLREEGKVIEPLKDFHKDEVRILGRELGLPEELVSRHPFPGPGLAIRVICAEEPYICKDFPETNNILKIVADFSASVKKPHTLLQRVKACTTEEDQEKLMQITSLHSLNAFLLPIKTVGVQGDCRSYSYVCGISSKDEPDWESLIFLARLIPRMCHNVNRVVYIFGPPVKEPPTDVTPTFLTTGVLSTLRQADFEAHNILRESGYAGKISQMPVILTPLHFDRDPLQKQPSCQRSVVIRTFITSDFMTGIPATPGNEIPVEVVLKMVTEIKKIPGISRIMYDLTSKPPGTTEWE

SEQ ID NO: 14376 - protein, 163 aa, Homo sapiens
MEWWASSPLRLWLLLFLLPSAQGRQKESGSKWKVFIDQINRSLENYEPCSSQNCSCYHGVIEEDLTPFRGGISRKMMAEVVRRKLGTHYQITKNRLYRENDCMFPSRCSGVEHFILEVIGRLPDMEMVINVRDYPQVPKWMEPAIPVFSFSKARLWKIGKIYL

SEQ ID NO: 14377 - protein, 445 aa, Homo sapiens
MTELRQRVAHEPVAPPEDKESESEAKVDGETASDSESRAESAPLPVSADDTPEVLNRALSNLSSRWKNWWVRGILTLAMIAFFFIIIYLGPMVLMIIVMCVQIKCFHEIITIGYNVYHSYDLPWFRTLSWYFLLCVNYFFYGETVTDYFFTLVQREEPLRILSKYHRFISFTLYLIGFCMFVLSLVKKHYRLQFYMFGWTHVTLLIVVTQSHLVIHNLFEGMIWFIVPISCVICNDIMAYMFGFFFGRTPLIKLSPKKTWEGFIGGFFATVVFGLLLSYVMSGYRCFVCPVEYNNDTNSFTVDCEPSDLFRLQEYNIPGVIQSVIGWKTVRMYPFQIHSIALSTFASLIGPFGGFFASGFKRAFKIKDFANTIPGHGGIMDRFDCQYLMATFVNVYIASFIRGPNPSKLIQQFLTLRPDQQLHIFNTLRSHLIDKGMLTSTTEDE

SEQ ID NO: 14378 - protein, 98 aa, Homo sapiens
MGGCTVKPQLLLLALVLHPWNPCLGADSEKPSSIPTDKLLVITVATKESDGFHRFMQSAKYFNYTVKKEGSVSQVFSTNKRRTRRYLGPWSRRRMERW

SEQ ID NO: 14379 - protein, 425 aa, Homo sapiens
MGSKKLKRVGLSQELCDRLSRHQILTCQDFLCLSPLELMKVTGLSYRGVHELLCMVSRACAPKMQTAYGIKAQRSADFSPAFLSTTLSALDEALHGGVACGSLTEITGPPGCGKTQFCIMMSILATLPTNMGGLEGAVVYIDTESAFSAERLVEIAESRFPRYFNTEEKLLLTSSKVHLYRELTCDEVLQRIESLEEEIISKGIKLVILDSVASVVRKEFDAQLQGNLKERNKFLAREASSLKYLAEEFSIPVILTNQITTHLSGALASQADLVSPADDLSLSEGTSGSSCVIAALGNTWSHSVNTRLILQYLDSERRQILIAKSPLAPFTSFVYTIKEEGLVLQVVRTVARVSPRSECWSAADSHPSPTFLIPDVVLRKTRNPRLLPSVSMCPPQMHSTVLSSALPPTNWATGIRTETLDEHPV

SEQ ID NO: 14380 - protein, 142 aa, Homo sapiens
MNGRSCSMSLHRTSGTPQGPRMVSGHHIPAIRAHSGTPGPSPCGSTSSPTMASLANNLHLKMPSGGGMAPQNNVAESRIHLPALSPRRQMLTNGKPRFQVTQAGGMSGSHTLKPKQQEFGSPFPPNPGKGPLFRVSLWRPRP

SEQ ID NO: 14381 - protein, 41 aa, Homo sapiens
MKWKHVPFLVMISLLSLSPNHLFLAQLIPGLKPTKEPRKIL

SEQ ID NO: 14382 - protein, 21 aa, Homo sapiens
MGFNLTFHLSYKFRLLLLLTL

SEQ ID NO: 14383 - protein, 283 aa, Homo sapiens
MDVLPMCSIFQELQIVHETGYFSALPSLEEYWQQTCLELERYLQSEPCYVSASEIKFDSQEDLWTKIILAREKKEESELKISSSPPEDTLISPSFCYNLETNSLNSDVSSESSDSSEELSPTAKFTSDPIGEVLVSSGKLSSSVTSTPPSSPELSREPSQLWGCVPGELPSPGKVRSGTSGKPGDKGNGDASPDGRRRVHRCHFNGCRKVYTKSSHLKAHQRTHTGEKPYRCSWEGCEWRFARSDELTRHFRKHTGAKPFKCSHCDRCFSRSDHLALHMKRHL

SEQ ID NO: 14384 - protein, 100 aa, Homo sapiens
MTTQLRVVHLLPLLLACFVQTSPKQEKMKMDCHKDEKGTIYDYEAIALNKNEYVSFKQYVGKHILFVNVATYCGLTAQYPGMSVQGEDLYLVSSFLRKGM

SEQ ID NO: 14385 - protein, 538 aa, Homo sapiens
MALPYHIFLFTVLLPSFTLTAPPPCRCMTSSSPYQEFLWRMQRPGNIDAPSYRSLSKGTPTFTAHTHMPRNCYHSATLCMHANTHYWTGKMINPSCPGGLGVTVCWTYFTQTGMSDGGGVQDQAREKHVKEVISQLTRVHGTSSPYKGLDLSKLHETLRTHTRLVSLFNTTLTGLHEVSAQNPTNCWICLPLNFRPYVSIPVPEQWNNFSTEINTTSVLVGPLVSNLEITHTSNLTCVKFSNTTYTTNSQCIRWVTPPTQIVCLPSGIFFVCGTSAYRCLNGSSESMCFLSFLVPPMTIYTEQDLYSYVISKPRNKRVPILPFVIGAGVLGALGTGIGGITTSTQFYYKLSQELNGDMERVADSLVTLQDQLNSLAAVVLQNRRALDLLTAERGGTCLFLGEECCYYVNQSGIVTEKVKEIRDRIQRRAEELRNTGPWGLLSQWMPWILPFLGPLAAIILLLLFGPCIFNLLVNFVSSRIEAVKLQMEPKMQSKTKIYRRPLDRPASPRSDVNDIKGTPPEEISAAQPLLRPNSAGSS

SEQ ID NO: 14386 - protein, 680 aa, Homo sapiens
MINMGDSHVDTSSTVSEAVAEEVSLFSMTDMILFSLIVGLLTYWFLFRKKKEEVPEFTKIQTLTSSVRESSFVEKMKKTGRNIIVFYGSQTGTAEEFANRLSKDAHRYGMRGMSADPEEYDLADLSSLPEIDNALVVFCMATYGEGDPTDNAQDFYDWLQETDVDLSGVKFAVFGLGNKTYEHFNAMGKYVDKRLEQLGAQRIFELGLGDDDGNLEEDFITWREQFWPAVCEHFGVEATGEESSIRQYELVVHTDIDAAKVYMGEMGRLKSYENQKPPFDAKNPFLAAVTTNRKLNQGTERHLMHLELDISDSKIRYESGDHVAVYPANDSALVNQLGKILGADLDVVMSLNNLDEESNKKHPFPCPTSYRTALTYYLDITNPPRTNVLYELAQYASEPSEQELLRKMASSSGEGKELYLSWVVEARRHILAILQDCPSLRPPIDHLCELLPRLQARYYSIASSSKVHPNSVHICAVVVEYETKAGRINKGVATNWLRAKEPAGENGGRALVPMFVRKSQFRLPFKATTPVIMVGPGTGVAPFIGFIQERAWLRQQGKEVGETLLYYGCRRSDEDYLYREELAQFHRDGALTQLNVAFSREQSHKVYVQHLLKQDREHLWKLIEGGAHIYVCGDARNMARDVQNTFYDIVAELGAMEHAQAVDYIKKLMTKGRYSLDVWS

SEQ ID NO: 14387 - protein, 212 aa, Homo sapiens
MASLDRVKVLVLGDSGVGKSSLVHLLCQNQVLGNPSWTVGCSVDVRVHDYKEGTPEEKTYYIELWDVGGSVGSASSVKSTRAVFYNSVNGIIFVHDLTNKKSSQNLRRWSLEALNRDLVPTGVLVTNGDYDQEQFADNQIPLLVIGTKLDQIHETKRHEVLTRTAFLAEDFNPEEINLVIEKRYFLREGNQIPGFPDRKRFGAGTLKSLHYD

SEQ ID NO: 14388 - protein, 4400 aa, Homo sapiens
MKGARWRRVPWVSLSCLCLCLLPHVVPGTTEDTLITGSKTAAPVTSTGSTTATLEGQSTAASSRTSNQDISASSQNHQTKSTETTSKAQTDTLTQMMTSTLFSSPSVHNVMETAPPDEMTTSFPSSVTNTLMMTSKTITMTTSTDSTLGNTEETSTAGTESSTPVTSAVSITAGQEGQSRTTSWRTSIQDTSASSQNHWTRSTQTTRESQTSTLTHRTTSTPSFSPSVHNVTGTVSQKTSPSGETATSSLCSVTNTSMMTSEKITVTTSTGSTLGNPGETSSVPVTGSLMPVTSAALVTFDPEGQSPATFSRTSTQDTTAFSKNHQTQSVETTRVSQINTLNTLTPVTTSTVLSSPSGFNPSGTVSQETFPSGETTTSSPSSVSNTFLVTSKVFRMPTSRDSTLGNTEETSLSVSGTISAITSKVSTIWWSDTLSTALSPSSLPPKISTAFHTQQSEGAETTGRPHERSSFSPGVSQEIFTLHETTTWPSSFSSKGHTTWSQTELPSTSTGAATRLVTGNPSTGTAGTIPRVPSKVSAIGEPGEPTTYSSHSTTLPKTTGAGAQTQWTQETGTTGEALLSSPSYSVTQMIKTATSPSSSPMLDRHTSQQITTAPSTNHSTIHSTSTSPQESPAVSQRGHTQAPQTTQESQTTRSVSPMTDTKTVTTPGSSFTASGHSPSEIVPQDAPTISAATTFAPAPTGDGHTTQAPTTALQAAPSSHDATLGPSGGTSLSKTGALTLANSVVSTPGGPEGQWTSASASTSPDTAAAMTHTHQAESTEASGQTQTSEPASSGSRTTSAGTATPSSSGASGTTPSGSEGISTSGETTRFSSNPSRDSHTTQSTTELLSASASHGAIPVSTGMASSIVPGTFHPTLSEASTAGRPTGQSSPTSPSASPQETAAISRMAQTQRTRTSRGSDTISLASQATDTFSTVPPTPPSITSTGLTSPQTETHTLSPSGSGKTFTTALISNATPLPVTYASSASTGHTTPLHVTDASSVSTGHATPLPVTSPSSVSTGHTTPLPVTDTSSESTGHVTPLPVTSFSSASTGDSTPLPVTDTSSASTGHVTPLPVTSLSSASTGDTTPLPVTDTSSASTGHATSLPVTDTSSVSTGHTTPLPVTDTSSASTGHATSLPVTDTSSVSTGHTTPLHVTDASSASTGQATPLPVTSLSSVSTGDTTPLPVTSPSSASTGHATPLLVTDTSSASTGHATPLPVTDASSVSTDHATSLPVTIPSAASTGHTTPLPVTDTSSASTGQATSLLVTDTSSVSTGDTTPLPVTSTSSASTGHVTPLHVTSPSSASTGHATPLPVTSLSSASTGDTMPLPVTSPSSASTGDTTPLPVTDASSVSTGHTTPLHVTDASSASTGQATPLPVTSLSSVSTGDTTPLPVTSPSSASTGHATPLLVTDTSSASTGHATPLPVTDASSVSTDHATSLPVTIPSAASTGHTTPLPVTDTSSASTGQATSLLVTDTSSVSTGDTTPLPVTSTSSASTGHVTPLHVTSPSSASTGHATPLPVTSLSSASTGDTMPLPVTSPSSASTGDTTPLPVTDASSVSTGHTTPLPVTSPSSASTGHTTPLPVTDTSSASKGDTTPLPVTSPSSASTGHTTPLPVTDTSSASTGDTTPLPVTNASSLSTGHATPLHVTSPSSASTGHATPLPVTSTSSASTGHATPLPVTGLSSATTDDTTRLPVTDVSSASTGQATPLPVTSLSSVSTGDTTPLPVTSPSSASTGHASPLLVTDASSASTGQATPLPVTDTSSVSTAHATPLPVTGLSSASTDDTTRLPVTDVSSASTGQAIPLPVTSPSSASTGDTTPLPVTDASSASTGDTTSLPVTIPSSASSGHTTSLPVTDASSVSTGHATSLLVTDASSVSTGDTTPLPVTDTNSASTGDTTPLHVTDASSVSTGHATSLPVTSLSSASTGDTTPLPVTSPSSASSGHTTPLPVTDASSVPTGHATSLPVTDASSVSTGHATPLPVTDASSVSTGHATPLPVTDTSSVSTGQATPLPVTSLSSASTGDTTPLPVTDTSSASTGQDTPLPVTSLSSVSTGDTTPLPVTNPSSASTGHATPLLVTDASSISTGHATSLLVTDASSVSTGHATALHDTDASSLSTGDTTPLPVTSPSSTSTGDTTPLPVTETSSVSTGHATSLPVTDTSSASTGHATSLPVTDTSSASTGHATPLPVTDTSSASTGQATPLPVTSPSSASTGHAIPLLVTDTSSASTGQATPLPVTSLSSASTGDTTPLPVTDASSVSTGHATSLPVTSLSSVSTGDTTPLPVTSPSSASTGHATPLHVTDASSASTGHATPLPVTSLSSASTGDTTPLPVTSPSSASTGHATPLHVTDASSVSTGDTTPLPVTSSSSASSGHTTPLPVTDASSASTGDTTPLPVTDTSSASTGHATHLPVTGLSSASTGDTTRLPVTNVSSASTGHATPLPVTSTSSASTGDTTPLPGTDTSSVSTGHTTPLLVTDASSVSTGDTTRLPVTSPSSASTGHTTPLPVTDTPSASTGDTTPLPVTNASSLSTRHATSLHVTSPSSASTGHATSLPVTDTSAASTGHATPLPVTSTSSASTGDTTPLPVTDTYSASTGQATPLPVTSLSSVSTGDTTPLPVTSPSSASTGHATPLLVTDASSASTGQATPLPVTSLSSVSTGDTTPLPVTSPSSASTGHATSLPVTDTSSASTGDTTSLPVTDTSSAYTGDTTSLPVTDTSSSSTGDTTPLLVTETSSVSTGDTTPLPVTDTSSASTGHATPLPVTNTSSVSTGHATPLHVTSPSSASTGHTTPLPVTDASSVSTGHATSLPVTDASSVFTGHATSLPVTIPSSASSGHTTPLPVTDASSVSTGHATSLPVTDASSVSTGHATPLPVTDASSVSTGHATPLPLTSLSSVSTGDTTPLPVTDTSSASTGQATPLPVTSLSSVSTGDTTPLPVTDTSSASTGHATSLPVTDTSSASTGHATPLPDTDTSSASTGHATLLPVTDTSSASIGHATSLPVTDTSSISTGHATPLHVTSPSSASTGHATPLPVTDTSSASTGHANPLHVTSPSSASTGHATPLPVTDTSSASTGHATPLPVTSLSSVSTGDTTPLPVTSPSSASTGHTTPLPVTDTSSASTGQATALPVTSTSSASTGDTTPLPVTDTSSASTGQATPLPVTSLSSVSTGDTTPLPVTSPSSASTGHATPLLVTDASSASTGQATPLPVTSLSSVSTGDTTPLPVTSPSSASTGHATSLPVTDTSSASTGDTTSLPVTDTSSAYTGDTTSLPVTDTSSSSTGDTTPLLVTETSSVSTGHATPLLVTDASSASTGHATPLHVTSPSSASTGDTTPVPVTDTSSVSTGHATPLPVTGLSSASTGDTTRLPVTDISSASTGQATPLPVTNTSSVSTGDTMPLPVTSPSSASTGHATPLPVTSTSSASTGHATPVPVTSTSSASTGHTTPLPVTDTSSASTGDTTPLPVTSPSSASTGHTTPLHVTIPSSASTGDTSTLPVTGASSASTGHATPLPVTDTSSVSTGHATPLPVTSLSSVSTGDTTPLPVTDASSASTGQATPLPVTSLSSVSTGDTTPLLVTDASSVSTGHATPLPVTDTSSASTGDTTRLPVTDTSSASTGQATPLPVTSLSSVSTGDTTPLLVTDASSVSTGHATPLPVTDTSSASTGDTTRLPVTDTSSASTGQATPLPVTIPSSSSSGHTTPLPVTSTSSVSTGHVTPLHVTSPSSASTGHVTPLPVTSTSSASTGHATPLLVTDASSVSTGHATPLPVTDASSASTGDTTPLPVTDTSSASTGQATPLPVTSLSSVSTGDTTPLPVTDASSASTGHATPLPVTIPSSVSTGDTMPLPVTSPSSASTGHATPLPVTGLSSASTGDTTPLPVTDTSSASTRHATPLPVTDTSSASTDDTTRLPVTDVSSASTGHATPLPVTSTSSASTGDTTPLPVTDTSSVSTGHATSLPVTSRSSASTGHATPLPVTDTSSVSTGHATPLPVTSTSSVSTGHATPLPVTSPSSASTGHATPVPVTSTSSASTGDTTPLPVTNASSLSTGHATPLHVTSPSSASRGDTSTLPVTDASSASTGHATPLPLTSLSSVSTGDTTPLPVTDTSSASTGQATPLPVTSLSSVSTGDTTPLPVTIPSSASSGHTTSLPVTDASSVSTGHGTPLPVTSTSSASTGDTTPLPVTDTSSASTGHATPLPVTDTSSASTGHATPLPVTSLSSVSTGHATPLAVSSATSASTVSSDSPLKMETPGMTTPSLKTDGGRRTATSPPPTTSQTIISTIPSTAMHTRSTAAPIPILPERGVSLFPYGAGAGDLEFVRRTVDFTSPLFKPATGFPLGSSLRDSLYASQAGTLWPWWLRSGTMLTSPLVGGPHFIRNTRRSMVNTAC

SEQ ID NO: 14389 - protein, 431 aa, Homo sapiens
MAANLSRNGPALQEAYVRVVTEKSPTDWALFTYEGNSNDIRVAGTGEGGLEEMVEELNSGKVMYAFCRVKDPNSGLPKFVLINWTGEGVNDVRKGACASHVSTMASFLKGAHVTINARAEEDVEPECIMEKVAKASGANYSFHKESGRFQDVGPQAPVGSVYQKTNAVSEIKRVGKDSFWAKAEKEEENRRLEEKRRAEEAQRQLEQERRERELREAARREQRYQEQGGEASPQSRTWEQQQEVVSRNRNEQESAVHPREIFKQKERAMSTTSISSPQPGKLRSPFLQKQLTQPETHFGREPAAAISRPRADLPAEEPAPSTPPCLVQAEEEAVYEEPPEQETFYEQPPLVQQQGAGSEHIDHHIQGQGLSGQGLCARALYDYQAADDTEISFDPENLITGIEVIDEGWWRGYGPDGHFGMFPANYVELIE

SEQ ID NO: 14390 - protein, 352 aa, Homo sapiens
MKMASFLAFLLLNFRVCLLLLQLLMPHSAQFSVLGPSGPILAMVGEDADLPCHLFPTMSAETMELKWVSSSLRQVVNVYADGKEVEDRQSAPYRGRTSILRDGITAGKAALRIHNVTASDSGKYLCYFQDGDFYEKALVELKVAALGSDLHVDVKGYKDGGIHLECRSTGWYPQPQIQWSNNKGENIPTVEAPVVADGVGLYAVAASVIMRGSSGEGVSCTIRSSLLGLEKTASISIADPFFRSAQRWIAALAGTLPVLLLLLGGAGYFLWQQQEEKKTQFRKKKREQELREMAWSTMKQEQSTRVKLLEELRWRSIQYASRGERHSAYNEWKKALFKPGEEMLQMRLHFVK

SEQ ID NO: 14391 - protein, 117 aa, Homo sapiens; identical to SEQ ID NO: 10725

SEQ ID NO: 14392 - protein, 63 aa, Homo sapiens
MAPKDRKPKRSTWRFNLDLTHPVEDGIFDSGNFGTFPSEYLGFSSLVLHFFCFKIGAISTGEG

SEQ ID NO: 14393 - protein, 366 aa, Homo sapiens
MGSKKLKRVGLSQELCDRLSRHQILTCQDFLCLSPLELMKVTGLSYRGVHELLCMVSRACAPKMQTAYGIKAQRSADFSPAFLSTTLSALDEALHGGVACGSLTEITGPPGCGKTQFCIMMSILATLPTNMGGLEGAVVYIDTESAFSAERLVEIAESRFPRYFNTEEKLLLTSSKVHLYRELTCDEVLQRIESLEEEIISKGIKLVILDSVASVVRKEFDAQLQGNLKERNKFLAREASSLKYLAEEFSIPVILTNQITTHLSGALASQADLVSPADDLSLSEGTSGSSCVIAALGNTWSHSVNTRLILQYLDSERRQILIAKSPLAPFTSFVYTIKEEGLVLQEFWHICISGFSIQNRLKENES

SEQ ID NO: 14394 - protein, 68 aa, Homo sapiens
MVDFPGYNLSGAVASFLFILLTMKQSEDFRVIGPAHPILAGVGEDALLTCQLLPKRTTMHVEVRETPD

SEQ ID NO: 14395 - protein, 857 aa, Homo sapiens
MKMKIQTSFYELPTDSHASLRDSLLTHIQNLKDLSPVIVTQLALAIADLALQMPSWKGCVQTLVEKYSNDVTSLPFLLEILTVLPEEVHSRSLRIGANRRTEIIEDLAFYSSTVVSLLMTCVEKAGTDEKMLMKVFRCLGSWFNLGVLDSNFMANNKLLALLFEVLQQDKTSSNLHEAASDCVCSALYAIENVETNLPLAMQLFQGVLTLETAYHMAVAREDLDKVLNYCRIFTELCETFLEKIVCTPGQGLGDLRTLELLLICAGHPQYEVVEISFNFWYRLGEHLYKTNDEVIHGIFKAYIQRLLHALARHCQLEPDHEGVPEETDDFGEFRMRVSDLVKDLIFLIGSMECFAQLYSTLKEGNPPWEVTEAVLFIMAAIAKSVDPENNPTLVEVLEGVVRLPETVHTAVRYTSIELVGEMSEVVDRNPQFLDPVLGYLMKGLCEKPLASAAAKAIHNICSVCRDHMAQHFNGLLEIARSLDSFLLSPEAAVGLLKGTALVLARLPLDKITECLSELCSVQVMALKKLLSQEPSNGISSDPTVFLDRLAVIFRHTNPIVENGQTHPCQKVIQEIWPVLSETLNKHRADNRIVERCCRCLRFAVRCVGKGSAALLQPLVTQMVNVYHVHQHSCFLYLGSILVDEYGMEEGCRQGLLDMLQALCIPTFQLLEQQNGLQNHPDTVDDLFRLATRFIQRSPVTLLRSQVVIPILQWAIASTTLDHRDANCSVMRFLRDLIHTGVANDHEEDFELRKELIGQVMNQLGQQLVSQLLHTCCFCLPPYTLPDVAEVLWEIMQVDRPTFCRWLENSLKGLPKETTVGAVTVTHKQLTDFHKQVTSAEECKQVCWALRDFTRLFR

SEQ ID NO: 14396 - protein, 144 aa, Homo sapiens
MGSNLSPQLCLMPFILGLLSGGVTTTPWSLARPQGSCSLEGVEIKGGSFRLLQEGQALEYVCPSGFYPYPVQTRTCRSTGSWSTLKTQDQKTVRKAECRAIHCPRPHDFENGEYWPRSPYYNVSDEISFHCYDGYTLRGSANRT

SEQ ID NO: 14397 - protein, 222 aa, Homo sapiens
LGASGVSGLTALILLLVEATSVLLPTDIKFGIVFDAGSSHTSLFLYQWLANKENGTGVVSQALACQVEGPGISSYTSNAAQAGESLQGCLEEALVLIPEAQHRKTPTFLGATAGMRLLSSHPGPGPVSRGLLGCRAPGRAGRRCLWLDHCQLRLGDAGQVLLHWRMDPASGGDAGGCPGHGRGLHPDHVRAWGPHLGQEHPGRFSPLRLRLQRLHSQLPVLW

SEQ ID NO: 14398 - protein, 365 aa, Homo sapiens
MAGSAMSSKFFLVALAIFFSFAQVVIEANSWWSLGMNNPVQMSEVYIIGAQPLCSQLAGLSQGQKKLCHLYQDHMQYIGEGAKTGIKECQYQFRHRRWNCSTVDNTSVFGRVMQIGSRETAFTYAVSAAGVVNAMSRACREGELSTCGCSRAARPKDLPRDWLWGGCGDNIDYGYRFAKEFVDARERERIHAKGSYESARILMNLHNNEAGRRTVYNLADVACKCHGVSGSCSLKTCWLQLADFRKVGDALKEKYDSAAAMRLNSRGKLVQVNSRFNSPTTQDLVYIDPSPDYCVRNESTGSLGTQGRLCNKTSEGMDGCELMCCGRGYDQFKTVQTERCHCKFHWCCYVKCKKCTEIVDQFVCK

SEQ ID NO: 14399 - protein, 115 aa, Homo sapiens
MEAPAQLLFLLLLWLPDTTGEIVLTQSPATLSLSPGERATLSCRASQSVSSYLAWYQQKPGQAPRLLIYDASNRATGIPARFSGSGSGTDFTLTISSLEPEDFAVYYCQQRSNWP

SEQ ID NO: 14400 - protein, 140 aa, Homo sapiens
MLLSIGMLMLSATQVYTILTVQLFAFLNLLPVEADILAYNFENASQTFDDLPARFGYRLPAEGLKGFLINSKPENACEPIVPPPVKDNSSGTFIVLIRRLDCNFDIKVLNAQRAGYKAAIVHNVDSDDLISMGSNDSKYS

SEQ ID NO: 14401 - protein, 160 aa, Homo sapiens
MAFLGLFSLLVLQSMATGATFPEEAIADLSVNMYNRLRATGEDENILFSPLSIALAMGMMELGAQGSTQKEIRHSMGYDSLKNGEEFSFLKEFSNMVTAKESQYVMKIANSLFVQNGFHVNEEFLQMMKKYFNAAVNHVDFSQNVAVANYINKWVENNTN

SEQ ID NO: 14402 - protein, 15 aa, Homo sapiens
LRGAAGRLGGGLLVL

SEQ ID NO: 14403 - protein, 237 aa, Homo sapiens
MKMASSLAFLLLNFHVSLFLVQLLTPCSAQFSVLGPSGPILAMVGEDADLPCHLFPTMSAETMELRWVSSSLRQVVNVYADGKEVEDRQSAPYRGRTSILRDGITAGKAALRIHNVTASDSGKYLCYFQDGDFYEKALVELKVAALGSDLHIEVKGYEDGGIHLECRSTGWYPQPQIKWSDTKGENIPAVEAPVVADGVGLYAVAASVIMRGSSGGGVSCIIRNSLLGLEKTASISI

SEQ ID NO: 14404 - protein, 208 aa, Homo sapiens
MARHGCLGLGLFCCVLFAATVGPQPTPSIPGAPATTLTPVPQSEASMLSLNLGLNFKFHLRGPAAVWGSPVTETQPLSLGPGQEPGEEVASGLRTDPLWELLVGSSGNSLTEWGSTEGGSKPRASSLLPESTSRRSGPSDGPTAPYQPRRSTVTWDTALMVTALPSSAPRPHQSELELKFDMALRAGAAPTLGHRTLPLLPSLRASLA

SEQ ID NO: 14405 - protein, 559 aa, Homo sapiens
MAAALRVAAVGARLSVLASGLRAAVRSLCSQATSVNERIENKRRTALLGGGQRRIDAQHKRGKLTARERISLLLDPGSFVESDMFVEHRCADFGMAADKNKFPGDSVVTGRGRINGRLVYVFSQDFTVFGGSLSGAHAQKICKIMDQAITVGAPVIGLNDSGGARIQEGVESLAGYADIFLRNVTASGVIPQISLIMGPCAGGAVYSPALTDFTFMVKDTSYLFITGPDVVKSVTNEDVTQEELGGAKTHTTMSGVAHRAFENDVDALCNLRDFFNYLPLSSQDPAPVRECHDPSDRLVPELDTIVPLESTKAYNMVDIIHSVVDEREFFEIMPNYAKNIIVGFARMNGRTVGIVGNQPKVASDSISFTPWNYARRQYRPYFAGCLDINSSVKGARFVRFCDAFNIPLITFVDVPGFLPGTAQEYGGIIRHGAKLLYAFAEATVPKVTVITRKAYGGAYDVMSSKHLCGDTNYAWPTAEIAVMGAKGAVEIIFKGHENVEAAQAEYIEKFANPFPAAVRGFVDDIIQPSSTRARICCDLDVLASKKVQRPWRKHANIPL

SEQ ID NO: 14406 - protein, 139 aa, Homo sapiens
SLSMLSTRLTLLLMVATPALMGVGTLMGSGLRKLSRQCQEQIARAMGVADEALGNVRTVRAFAMEQREEERYGAELEACRCRAEELGRGIALFQGLSNIAFNCMVLGTLFIGGSLVAGQQLTGGDLMSFLVASQTVQRL

SEQ ID NO: 14407 - protein, 158 aa, Homo sapiens
MVLLWEPAGAWLALGLALALGPSVAAAAPRQDCTGVECPPLENCIEEALEPGACCATCVQQGCACEGYQYYDCLQGGFVRGRVPAGQSYFVDFGSTECSCPPGGGKISCQFMLCPELPPNCIEAVVVADSCPQCGQVGCVHAGHKYAAGHTVHLPPCR

SEQ ID NO: 14408 - protein, 538 aa, Homo sapiens
MGLLLLVLILTPSLAAYRHPDFPLLEKAQQLLQSTGSPYSTNCWLCTSSSTETPGTAYPASPREWTSIEAELHISYRWDPNLKGLMRPANSLLSTVKQDFPDIRQKPPIFGPIFTNINLMGIAPICVMAKRKNGTNVGTLPSTVCNVTFTVDSNQQTYQTYTHNQFRHQPRFPKPPNITFPQGTLLDKSSRFCQGRPSSCSTRNFWFRPADYNQCLQISNLSSTAEWVLLDQTRNSLFWENKTKGANQSQTPCVQVLAGMTIATSYLGISAVSEFFGTSLTPLFHFHISTCLKTQGAFYICGQSIHQCLPSNWTGTCTIGYVTPDIFIAPGNLSLPIPIYGNSPLPRVRRAIHFIPLLAGLGILAGTGTGIAGITKASLTYSQLSKEIANNIDTMAKALTTMQEQIDSLAAVVLQNRRGLDMLTAAQGGICLALDEKCCFWVNQSGKVQDNIRQLLNQASSLRERATQGWLNWEGTWKWFSWVLPLTGPLVSLLLLLLFGPCLLNLITQFVSSRLQAIKLQTNLSAGRHPRNIQESPF

SEQ ID NO: 14409 - protein, 117 aa, Homo sapiens
MAAAAAAGSGTPREEEGPAGEAAASQPQAPTSVPGARLSRLPLARVKALVKADPDVTLAGQEAIFILARAAELFVETIAKDAYCCAQQGKRKTLQRRDLDNAIEAVDEFAFLEGTLD

SEQ ID NO: 14410 - protein, 257 aa, Homo sapiens
MVARVSGLIVTLLSSSFPGGPLQNGQPSAEIQEEVALTSLGSGPAATNKRHSTSDKMHFPRSSLQPITTLGKSEFGEVFLAKAQGLEEGVAETLVLVKSLQSKDEQQQLDFRRELEMFGKLNHANVVRLLGLCREAEPHYMVLEYVDLGDLKQFLRISKSKDEKLKSQPLSTKQKVALCTQVALGMEHLSNNRFVHKDLAARNCLVSAQRQVKVSALGLSKDVYNSEYYHFRQAWVPLRWMSPEAILEGDFSTKSDV

SEQ ID NO: 14411 - protein, 1088 aa, Homo sapiens
MAFYSCCWVLLALTWHTSAYGPDQRAQKKGDIILGGLFPIHFGVAAKDQDLKSRPESVECIRYNFRGFRWLQAMIFAIEEINSSPALLPNLTLGYRIFDTCNTVSKALEATLSFVAQNKIDSLNLDEFCNCSEHIPSTIAVVGATGSGVSTAVANLLGLFYIPQVSYASSSRLLSNKNQFKSFLRTIPNDEHQATAMADIIEYFRWNWVGTIAADDDYGRPGIEKFREEAEERDICIDFSELISQYSDEEEIQHVVEVIQNSTAKVIVVFSSGPDLEPLIKEIVRRNITGKIWLASEAWASSSLIAMPQYFHVVGGTIGFALKAGQIPGFREFLKKVHPRKSVHNGFAKEFWEETFNCHLQEGAKGPLPVDTFLRGHEESGDRFSNSSTAFRPLCTGDENISSVETPYIDYTHLRISYNVYLAVYSIAHALQDIYTCLPGRGLFTNGSCADIKKVEAWQVLKHLRHLNFTNNMGEQVTFDECGDLVGNYSIINWHLSPEDGSIVFKEVGYYNVYAKKGERLFINEEKILWSGFSREPLTFVLSVLQVPFSNCSRDCLAGTRKGIIEGEPTCCFECVECPDGEYSDETDASACNKCPDDFWSNENHTSCIAKEIEFLSWTEPFGIALTLFAVLGIFLTAFVLGVFIKFRNTPIVKATNRELSYLLLFSLLCCFSSSLFFIGEPQDWTCRLRQPAFGISFVLCISCILVKTNRVLLVFEAKIPTSFHRKWWGLNLQFLLVFLCTFMQIVICVIWLYTAPPSSYRNQELEDEIIFITCHEGSLMALGFLIGYTCLLAAICFFFAFKSRKLPENFNEAKFITFSMLIFFIVWISFIPAYASTYGKFVSAVEVIAILAASFGLLACIFFNKIYIILFKPSRNTIEEVRCSTAAHAFKVAARATLRRSNVSRKRSSSLGGSTGSTPSSSISSKSNSEDPFPQPERQKQQQPLALTQQEQQQQPLTLPQQQRSQQQPRCKQKVIFGSGTVTFSLSFDEPQKNAMAHRNSTHQNSLEAQKSSDTLTRHEPLLPLQCGETDLDLTVQETGLQGPVGGDQRPEVEDPEELSPALVVSSSQSFVISGGGSTVTENVVNS

SEQ ID NO: 14412 - protein, 262 aa, Homo sapiens
MSRYLRPPNTSLFVRNVADDTRSEDLRREFGRYGPIVDVYVPLDFYTRRPRGFAYVQFEDVRDAEDALHNLDRKWICGRQIEIQFAQGDRKTPNQMKAKEGRNVYSSSRYDDYDRYRRSRSRSYERRRSRSRSFDYNYRRSYSPRNSRPTGRPRRSRSHSDNDRFKHRNRSFSRSKSNSRSRSKSQPKKEMKAKSRSRSASHTKTRGTSKTDSKTHYKSGSRYEKESRKKEPPRSKSQSRSQSRSRSKSRSRSWTSPKSSGH

SEQ ID NO: 14413 - protein, 777 aa, Homo sapiens
MLPRPLRLLLDTSPPGGVVLSSFRSRDPEEGGGPGGLVVGGGQEEEEEEEEEAPVSVWDEEEDGAVFTVTSRQYRPLDPLVPMPPPRSSRRLRAGTLEALVRHLLDTRTSGTDVSFMSAFLATHRAFTSTPALLGLMADRLEALESHPTDELERTTEVAISVLSTWLASHPEDFGSEAKGQLDRLESFLLQTGYAAGKGVGGGSADLIRNLRSRVDPQAPDLPKPLALPGDPPADPTDVLVFLADHLAEQLTLLDAELFLNLIPSQCLGGLWGHRDRPGHSHLCPSVRATVTQFNKVAGAVVSSVLGATSTGEGPGEVTIRPLRPPQRARLLEKWIRVAEECRLLRNFSSVYAVVSALQSSPIHRLRAAWGEATRDSLRVFSSLCQIFSEEDNYSQSRELLVQEVKLQSPLEPHSKKAPRSGSRGGGVVPYLGTFLKDLVMLDAASKDELENGYINFDKRRKEFAVLSELRRLQNECRGYNLQPDHDIQRWLQGLRPLTEAQSHRVSCEVEPPGSSDPPAPRVLRPTLVISQWTEVLGSVGVPTPLVSCDRPSTGGDEAPTTPAPLLTRLAQHMKWPSVSSLDSALESSPSLHSPADPSHLSPPASSPRPSRGHRRSASCGSPLSGGAEEASGGTGYGGEGSGPGASDCRIIRVQMELGEDGSVYKSILVTSQDKAPSVISRVLKKNNRDSAVASEYELVQLLPGERELTIPASANVFYAMDGASHDFLLRQRRRSSTATPGVTSGPSASGTPPSEGGGGSFPRIKATGRKIARALF

SEQ ID NO: 14414 - protein, 1698 aa, Homo sapiens
MRLLWGLIWASSFFTLSLQKPRLLLFSPSVVHLGVPLSVGVQLQDVPRGQVVKGSVFLRNPSRNNVPCSPKVDFTLSSERDFALLSLQVPLKDAKSCGLHQLLRGPEVQLVAHSPWLKDSLSRTTNIQGINLLFSSRRGHLFLQTDQPIYNPGQRVRYRVFALDQKMRPSTDTITVMVENSHGLRVRKKEVYMPSSIFQDDFVIPDISEPGTWKISARFSDGLESNSSTQFEVKKYVLPNFEVKITPGKPYILTVPGHLDEMQLDIQARYIYGKPVQGVAYVRFGLLDEDGKKTFFRGLESQTKLVNGQSHISLSKAEFQDALEKLNMGITDLQGLRLYVAAAIIESPGGEMEEAELTSWYFVSSPFSLDLSKTKRHLVPGAPFLLQALVREMSGSPASGIPVKVSATVSSPGSVPEVQDIQQNTDGSGQVSIPIIIPQTISELQLSVSAGSPHPAIARLTVAAPPSGGPGFLSIERPDSRPPRVGDTLNLNLRAVGSGATFSHYYYMILSRGQIVFMNREPKRTLTSVSVFVDHHLAPSFYFVAFYYHGDHPVANSLRVDVQAGACEGKLELSVDGAKQYRNGESVKLHLETDSLALVALGALDTALYAAGSKSHKPLNMGKVFEAMNSYDLGCGPGGGDSALQVFQAAGLAFSDGDQWTLSRKRLSCPKEKTTRKKRNVNFQKAINEKLGQYASPTAKRCCQDGVTRLPMMRSCEQRAARVQQPDCREPFLSCCQFAESLRKKSRDKGQAGLQRALEILQEEDLIDEDDIPVRSFFPENWLWRVETVDRFQILTLWLPDSLTTWEIHGLSLSKTKGLCVATPVQLRVFREFHLHLRLPMSVRRFEQLELRPVLYNYLDKNLTVSVHVSPVEGLCLAGGGGLAQQVLVPAGSARPVAFSVVPTAAAAVSLKVVARGSFEFPVGDAVSKVLQIEKEGAIHREELVYELNPLDHRGRTLEIPGNSDPNMIPDGDFNSYVRVTASDPLDTLGSEGALSPGGVASLLRLPRGCGEQTMIYLAPTLAASRYLDKTEQWSTLPPETKDHAVDLIQKGYMRIQQFRKADGSYAAWLSRDSSTWLTAFVLKVLSLAQEQVGGSPEKLQETSNWLLSQQQADGSFQDPCPVLDRSMQGGLVGNDETVALTAFVTIALHHGLAVFQDEGAEPLKQRVEASISKANSFLGEKASAGLLGAHAAAITAYALTLTKAPVDLLGVAHNNLMAMAQETGDNLYWGSVTGSQSNAVSPTPAPRNPSDPMPQAPALWIETTAYALLHLLLHEGKAEMADQASAWLTRQGSFQGGFRSTQDTVIALDALSAYWIASHTTEERGLNVTLSSTGRNGFKSHALQLNNRQIRGLEEELQFSLGSKINVKVGGNSKGTLKVLRTYNVLDMKNTTCQDLQIEVTVKGHVEYTMEANEDYEDYEYDELPAKDDPDAPLQPVTPLQLFEGRRNRRRREAPKLTSLSDRYVSHFETEGPHVLLYFDSVPTSRECVGFEAVQEVPVGLVQPASATLYDYYNPERRCSVFYGAPSKSRLLATLCSAEVCQCAEGKCPRQRRALERGLQDEDGYRMKFACYYPRVEYGFQVKVLREDSRAAFRLFETKITQVLHFTKDVKAAANQMRNFLVRASCRLRLEPGKEYLIMGLDGATYDLEGHPQYLLDSNSWIEEMPSERLCRSTRQRAACAQLNDFLQEYGTQGCQV

SEQ ID NO: 14415 - protein, 217 aa, Homo sapiens
MDPQCTMGLSNILFVMAFLLSANFSQPEIVPISNITENVYINLTCSSIHGYPEPKKMSVLLRTKNSTIEYDGVMQKSQDNVTELYDVSISLSVSFPDVTSNMTIFCILETDKTRLLSSPFSIELEDPQPPPDHIPWITAVLPTVIICVMVFCLILWKWKKKKRPRNSYKCGTNTMEREESEQTKKREKIHIPERSDEAQRVFKSSKTSSCDKSDTCF

SEQ ID NO: 14416 - protein, 5360 aa, Homo sapiens
MKGARWRRVPWVSLSCLCLCLLPHVVPGTTEDTLITGSKTAAPVTSTGSTTATLEGQSTAASSRTSNQDISASSQNHQTKSTETTSKAQTDTLTQMMTSTLFSSPSVHNVMETAPPDEMTTSFPSSVTNTLMMTSKTITMTTSTDSTLGNTEETSTAGTESSTPVTSAVSITAGQEGQSRTTSWRTSIQDTSASSQNHWTRSTQTTRESQTSTLTHRTTSTPSFSPSVHNVTGTVSQKTSPSGETATSSLCSVTNTSMMTSEKITVTTSTGSTLGNPGETSSVPVTGSLMPVTSAALVTFDPEGQSPATFSRTSTQDTTAFSKNHQTQSVETTRVSQINTLNTLTPVTTSTVLSSPSGFNPSGTVSQETFPSGETTTSSPSSVSNTFLVTSKVFRMPTSRDSTLGNTEETSLSVSGTISAITSKVSTIWWSDTLSTALSPSSLPPKISTAFHTQQSEGAETTGRPHERSSFSPGVSQEIFTLHETTTWPSSFSSKGHTTWSQTELPSTSTGAATRLVTGNPSTGTAGTIPRVPSKVSAIGEPGEPTTYSSHSTTLPKTTGAGAQTQWTQETGTTGEALLSSPSYSVTQMIKTATSPSSSPMLDRHTSQQITTAPSTNHSTIHSTSTSPQESPAVSQRGHTQAPQTTQESQTTRSVSPMTDTKTVTTPGSSFTASGHSPSEIVPQDAPTISAATTFAPAPTGDGHTTQAPTTALQAAPSSHDATLGPSGGTSLSKTGALTLANSVVSTPGGPEGQWTSASASTSPDTAAAMTHTHQAESTEASGQTQTSEPASSGSRTTSAGTATPSSSGASGTTPSGSEGISTSGETTRFSSNPSRDSHTTQSTTELLSASASHGAIPVSTGMASSIVPGTFHPTLSEASTAGRPTGQSSPTSPSASPQETAAISRMAQTQRTRTSRGSDTISLASQATDTFSTVPPTPPSITSTGLTSPQTETHTLSPSGSGKTFTTALISNATPLPVTYASSASTGHTTPLHVTDASSVSTGHATPLPVTSPSSVSTGHTTPLPVTDTSSESTGHVTPLPVTSFSSASTGDSTPLPVTDTSSASTGHVTPLPVTSLSSASTGDTTPLPVTDTSSASTGHATSLPVTDTSSVSTGHTTPLPVTDTSSASTGHATSLPVTDTSSVSTGHTTPLHVTDASSASTGQATPLPVTSLSSVSTGDTTPLPVTSPSSASTGHATPLLVTDTSSASTGHATPLPVTDASSVSTDHATSLPVTIPSAASTGHTTPLPVTDTSSASTGQATSLLVTDTSSVSTGDTTPLPVTSTSSASTGHVTPLHVTSPSSASTGHATPLPVTSLSSASTGDTMPLPVTSPSSASTGDTTPLPVTDASSVSTGHTTPLHVTDASSASTGQATPLPVTSLSSVSTGDTTPLPVTSPSSASTGHATPLLVTDTSSASTGHATPLPVTDASSVSTDHATSLPVTIPSAASTGHTTPLPVTDTSSASTGQATSLLVTDTSSVSTGDTTPLPVTSTSSASTGHVTPLHVTSPSSASTGHATPLPVTSLSSASTGDTMPLPVTSPSSASTGDTTPLPVTDASSVSTGHTTPLPVTSPSSASTGHTTPLPVTDTSSASKGDTTPLPVTSPSSASTGHTTPLPVTDTSSASTGDTTPLPVTNASSLSTGHATPLHVTSPSSASTGHATPLPVTSTSSASTGHATPLPVTGLSSATTDDTTRLPVTDVSSASTGQATPLPVTSLSSVSTGDTTPLPVTSPSSASTGHASPLLVTDASSASTGQATPLPVTDTSSVSTAHATPLPVTGLSSASTDDTTRLPVTDVSSASTGQAIPLPVTSPSSASTGDTTPLPVTDASSASTGDTTSLPVTIPSSASSGHTTSLPVTDASSVSTGHATSLLVTDASSVSTGDTTPLPVTDTNSASTGDTTPLHVTDASSVSTGHATSLPVTSLSSASTGDTTPLPVTSPSSASSGHTTPLPVTDASSVPTGHATSLPVTDASSVSTGHATPLPVTDASSVSTGHATPLPVTDTSSVSTGQATPLPVTSLSSASTGDTTPLPVTDTSSASTGQDTPLPVTSLSSVSTGDTTPLPVTNPSSASTGHATPLLVTDASSISTGHATSLLVTDASSVSTGHATALHDTDASSLSTGDTTPLPVTSPSSTSTGDTTPLPVTETSSVSTGHATSLPVTDTSSASTGHATSLPVTDTSSASTGHATPLPVTDTSSASTGQATPLPVTSPSSASTGHAIPLLVTDTSSASTGQATPLPVTSLSSASTGDTTPLPVTDASSVSTGHATSLPVTSLSSVSTGDTTPLPVTSPSSASTGHATPLHVTDASSASTGHATPLPVTSLSSASTGDTTPLPVTSPSSASTGHATPLHVTDASSVSTGDTTPLPVTSSSSASSGHTTPLPVTDASSASTGDTTPLPVTDTSSASTGHATHLPVTGLSSASTGDTTRLPVTNVSSASTGHATPLPVTSTSSASTGDTTPLPGTDTSSVSTGHTTPLLVTDASSVSTGDTTRLPVTSPSSASTGHTTPLPVTDTPSASTGDTTPLPVTNASSLSTRHATSLHVTSPSSASTGHATSLPVTDTSAASTGHATPLPVTSTSSASTGDTTPLPVTDTYSASTGQATPLPVTSLSSVSTGDTTPLPVTSPSSASTGHATPLLVTDASSASTGQATPLPVTSLSSVSTGDTTPLPVTSPSSASTGHATSLPVTDTSSASTGDTTSLPVTDTSSAYTGDTTSLPVTDTSSSSTGDTTPLLVTETSSVSTGDTTPLPVTDTSSASTGHATPLPVTNTSSVSTGHATPLHVTSPSSASTGHTTPLPVTDASSVSTGHATSLPVTDASSVFTGHATSLPVTIPSSASSGHTTPLPVTDASSVSTGHATSLPVTDASSVSTGHATPLPVTDASSVSTGHATPLPLTSLSSVSTGDTTPLPVTDTSSASTGQATPLPVTSLSSVSTGDTTPLPVTDTSSASTGHATSLPVTDTSSASTGHATPLPDTDTSSASTGHATLLPVTDTSSASIGHATSLPVTDTSSISTGHATPLHVTSPSSASTGHATPLPVTDTSSASTGHANPLHVTSPSSASTGHATPLPVTDTSSASTGHATPLPVTSLSSVSTGDTTPLPVTSPSSASTGHTTPLPVTDTSSASTGQATALPVTSTSSASTGDTTPLPVTDTSSASTGQATPLPVTSLSSVSTGDTTPLPVTSPSSASTGHATPLLVTDASSASTGQATPLPVTSLSSVSTGDTTPLPVTSPSSASTGHATSLPVTDTSSASTGDTTSLPVTDTSSAYTGDTTSLPVTDTSSSSTGDTTPLLVTETSSVSTGHATPLLVTDASSASTGHATPLHVTSPSSASTGDTTPVPVTDTSSVSTGHATPLPVTGLSSASTGDTTRLPVTDISSASTGQATPLPVTNTSSVSTGDTMPLPVTSPSSASTGHATPLPVTSTSSASTGHATPVPVTSTSSASTGHTTPLPVTDTSSASTGDTTPLPVTSPSSASTGHTTPLHVTIPSSASTGDTSTLPVTGASSASTGHATPLPVTDTSSVSTGHATPLPVTSLSSVSTGDTTPLPVTDASSASTGQATPLPVTSLSSVSTGDTTPLLVTDASSVSTGHATPLPVTDTSSASTGDTTRLPVTDTSSASTGQATPLPVTSLSSVSTGDTTPLLVTDASSVSTGHATPLPVTDTSSASTGDTTRLPVTDTSSASTGQATPLPVTIPSSSSSGHTTPLPVTSTSSVSTGHVTPLHVTSPSSASTGHVTPLPVTSTSSASTGHATPLLVTDASSVSTGHATPLPVTDASSASTGDTTPLPVTDTSSASTGQATPLPVTSLSSVSTGDTTPLPVTDASSASTGHATPLPVTIPSSVSTGDTMPLPVTSPSSASTGHATPLPVTGLSSASTGDTTPLPVTDTSSASTRHATPLPVTDTSSASTDDTTRLPVTDVSSASTGHATPLPVTSTSSASTGDTTPLPVTDTSSVSTGHATSLPVTSRSSASTGHATPLPVTDTSSVSTGHATPLPVTSTSSVSTGHATPLPVTSPSSASTGHATPVPVTSTSSASTGDTTPLPVTNASSLSTGHATPLHVTSPSSASRGDTSTLPVTDASSASTGHATPLPLTSLSSVSTGDTTPLPVTDTSSASTGQATPLPVTSLSSVSTGDTTPLPVTIPSSASSGHTTSLPVTDASSVSTGHGTPLPVTSTSSASTGDTTPLPVTDTSSASTGHATPLPVTDTSSASTGHATPLPVTSLSSVSTGHATPLAVSSATSASTVSSDSPLKMETPGMTTPSLKTDGGRRTATSPPPTTSQTIISTIPSTAMHTRSTAAPIPILPERGVSLFPYGAGAGDLEFVRRTVDFTSPLFKPATGFPLGSSLRDSLYFTDNGQIIFPESDYQIFSYPNPLPTGFTGRDPVALVAPFWDDADFSTGRGTTFYQSNTYQAILSTDGSRSYALFLYQSGGMQWDVAQRSGNPVLMGFSSGDGYFENSPLMSQPVWERYRPDRFLNSNSGLQGLQFYRLHREERPNYRLECLQWLKSQPRWPSWGWNQVSCPCSWQQGRRDLRFQPVSIGRWGLGSRQLCSFTSWRGGVCCSYGPWGEFREGWHVQRPWQLAQELEPQSWCCRWNDKPYLCALYQQRRPHVGCATYRPPQPAWMFGDPHITTLDGVSYTFNGLGDFLLVGAQDGNSSFLLQGRTAQTGSAQATNFIAFAAQYRSSSLGPVTVQWLLEPHDAIRVLLDNQTVTFQPDHEDGGGQETFNATGVLLSRNGSEVSASFDGWATVSVIALSNILHASASLPPEYQNRTEGLLGVWNNNPEDDFRMPNGSTIPPGSPEEMLFHFGMTWQINGTGLLGKRNDQLPSNFTPVFYSQLQKNSSWAEHLISNCDGDSSCIYDTLALRNASIGLHTREVSKNYEQANATLNQYPPSINGGRVIEAYKGQTTLIQYTSNAEDANFTLRDSCTDLELFENGTLLWTPKSLEPFTLEILARSAKIGLASALQPRTVVCHCNAESQCLYNQTSRVGNSSLEVAGCKCDGGTFGRYCEGSEDACEEPCFPSVHCVPGKGCEACPPNLTGDGRHCAALGSSFLCQNQSCPVNYCYNQGHCYISQTLGCQPMCTCPPAFTDSRCFLAGNNFSPTVNLELPLRVIQLLLSEEENASMAEVNASVAYRLGTLDMRAFLRNSQVERIDSAAPASGSPIQHWMVISEFQYRPRGPVIDFLNNQLLAAVVEAFLYHVPRRSEEPRNDVVFQPISGEDVRDVTALNVSTLKAYFRCDGYKGYDLVYSPQSGFTCVSPCSRGYCDHGGQCQHLPSGPRCSCVSFSIYTAWGEHCEHLSMKLDAFFGIFFGALGGLLLLGVGTFVVLRFWGCSGARFSYFLNSAEALP

SEQ ID NO: 14417 - protein, 147 aa, Homo sapiens
MGSGARFPSGTLRVRWLLLLGLVGPVLGAARPGFQQTSHLSSYEIITPWRLTRERREAPRPYSKQVSYVIQAEGKEHIIHLERNKDLLPEDFVVYTYNKEGTLITDHPNIQRCGPLCIREQSTPGDRAGQNTQNNWQMSNLAFCVYY

SEQ ID NO: 14418 - protein, 419 aa, Homo sapiens
MAGSGCAWGAEPPRFLEAFGRLWQVQSRLGSGSSASVYRVRCCGNPGSPPGALKQFLPPGTTGAAASAAEYGFRKERAALEQLQGHRNIVTLYGVFTIHFSPNVPSRCLLLELLDVSVSELLLYSSHQGCSMWMIQHCARDVLEALAFLHHEGYVHADLKPRNILWSAENECFKLIDFGLSFKEGNQDVKYIQTDGYRAPEAELQNCLAQAGLQSDTECTSAVDLWSLGIILLEMFSGMKLKHTVRSQEWKANSSAIIDHIFASKAVVNAAIPAYHLRDLIKSMLHDDPSRRIPAEMALCSPFFSIPFAPHIEDLVMLPTPVLRLLNVLDDDYLENEEEYEDVVEDVKEECQKYGPVVSLLVPKENPGRGQVFVEYANAGDSKAAQKLLTGRMFDGKFVVATFYPLSAYKRGYLYQTLL

SEQ ID NO: 14419 - protein, 983 aa, Homo sapiens
MDTEPNPGTSSVSTTTSSTTTTTITTSSSRMQQPQISVYSGSDRHAVQVIQQALHRPPSSAAQYLQQMYAAQQQHLMLHTAALQQQHLSSSQLQSLAAVQASLSSGRPSTSPTGSVTQQSSMSQTSINLSTSPTPAQLISRSQASSSTSGSITQQTMLLGSTSPTLTASQAQMYLRAQMLIFTPATTVAAVQSDIPVVSSSSSSSCQSAATQVQNLTLRSQKLGVLSSSQNGPPKSTSQTQSLTICHNKTTVTSSKISQRDPSPESNKKGESPSLESRSTAVTRTSSIHQLIAPASYSPIQPHSLIKHQQIPLHSPPSKVSHHQLILQQQQQQIQPITLQNSTQDPPPSQHCIPLQNHGLPPAPSNAQSQHCSPIQSHPSPLTVSPNQSQSAQQSVVVSPPPPHSPSQSPTIIIHPQALIQPHPLVSSALQPGPNLQQSTANQVQATAQLNLPSHLPLPASPVVHIGPVQQSALVSPGQQIVSPSHQQYSSLQSSPIPIASPPQMSTSPPAQIPPLPLQSMQSLQVQPEILSQGQVLVQNALVSEEELPAAEALVQLPFQTLPPPQTVAVNLQVQPPAPVDPPVVYQVEDVCEEEMPEESDECVRMDRTPPPPTLSPAAITVGRGEDLTSEHPLLEQVELPAVASVSASVIKSPSDPSHVSVPPPPLLLPAATTRSNSTSMHSSIPSIENKPPQAIVKPQILTHVIEGFVIQEGLEPFPVSRSSLLIEQPVKKRPLLDNQVINSVCVQPELQNNTKHADNSSDTEMEDMIAEETLEEMDSELLKCEFCGKMGYANEFLRSKRFCTMSCAKRYNVSCSKKFALSRWNRKPDNQSLGHRGRRPSGPDGAAREHILRQLPITYPSAEEDLASHEDSVPSAMTTRLRRQSERERERELRDVRIRKMPENSDLLPVAQTEPSIWTVDDVWAFIHSLPGCQDIADEFRAQEIDGQALLLLKEDHLMSAMNIKLGPALKICARINSLKES

SEQ ID NO: 14420 - protein, 428 aa, Homo sapiens
MASGPHSTATAAAAASSAAPSAGGSSSGTTTTTTTTTGGILIGDRLYSEVSLTIDHSLIPEERLSPTPSMQDGLDLPSETDLRILGCELIQAAGILLRLPQVAMATGQVLFHRFFYSKSFVKHSFEIVAMACINLASKIEEAPRRIRDVINVFHHLRQLRGKRTPSPLILDQNYINTKNQVIKAERRVLKELGFCVHVKHPHKIIVMYLQVLECERNQTLVQTAWNYMNDSLRTNVFVRFQPETIACACIYLAARALQIPLPTRPHWFLLFGTTEEEIQEICIETLRLYTRKKPNYELLEKEVEKRKVALQEAKLKAKGLNPDGTPALSTLGGFSPASKPSSPREVKAEEKSPISINVKTVKKEPEDRQQASKSPYNGVRKDSKRSRNSRSASRSRSRTRSRSRSHTPRRQDEVLLRCPGRSRTPGLK

SEQ ID NO: 14421 - protein, 117 aa, Homo sapiens
MDMRVPAQLLGLLLLWLPGARCAIWMTQSPSLLSASTGDRVTISCRMSQGISSYLAWYQQKPGKAPELLIYAASTLQSGVPSRFSGSGSGTDFTLTISCLQSEDFATYYCQQYYSFP

SEQ ID NO: 14422 - protein, 1651 aa, Homo sapiens
MKWKHVPFLVMISLLSLSPNHLFLAQLIPDPEDVERGNDHGTPIPTSDNDDNSLGYTGSRLRQEDFPPRIVEHPSDLIVSKGEPATLNCKAEGRPTPTIEWYKGGERVETDKDDPRSHRMLLPSGSLFFLRIVHGRKSRPDEGVYVCVARNYLGEAVSHNASLEVAILRDDFRQNPSDVMVAVGEPAVMECQPPRGHPEPTISWKKDGSPLDDKDERITIRGGKLMITYTRKSDAGKYVCVGTNMVGERESEVAELTVLERPSFVKRPSNLAVTVDDSAEFKCEARGDPVPTVRWRKDDGELPKSRYEIRDDHTLKIRKVTAGDMGSYTCVAENMVGKAEASATLTVQEPPHFVVKPRDQVVALGRTVTFQCEATGNPQPAIFWRREGSQNLLFSYQPPQSSSRFSVSQTGDLTITNVQRSDVGYYICQTLNVAGSIITKAYLEVTDVIADRPPPVIRQGPVNQTVAVDGTFVLSCVATGSPVPTILWRKDGVLVSTQDSRIKQLENGVLQIRYAKLGDTGRYTCIASTPSGEATWSAYIEVQEFGVPVQPPRPTDPNLIPSAPSKPEVTDVSRNTVTLSWQPNLNSGATPTSYIIEAFSHASGSSWQTVAENVKTETSAIKGLKPNAIYLFLVRAANAYGISDPSQISDPVKTQDVLPTSQGVDHKQVQRELGNAVLHLHNPTVLSSSSIEVHWTVDQQSQYIQGYKILYRPSGANHGESDWLVFEVRTPAKNSVVIPDLRKGVNYEIKARPFFNEFQGADSEIKFAKTLEEAPSAPPQGVTVSKNDGNGTAILVSWQPPPEDTQNGMVQEYKVWCLGNETRYHINKTVDGSTFSVVIPFLVPGIRYSVEVAASTGAGSGVKSEPQFIQLDAHGNPVSPEDQVSLAQQISDVVKQPAFIAGIGAACWIILMVFSIWLYRHRKKRNGLTSTYAGIRKVPSFTFTPTVTYQRGGEAVSSGGRPGLLNISEPAAQPWLADTWPNTGNNHNDCSISCCTAGNGNSDSNLTTYSRPADCIANYNNQLDNKQTNLMLPESTVYGDVDLSNKINEMKTFNSPNLKDGRFVNPSGQPTPYATTQLIQSNLSNNMNNGSGDSGEKHWKPLGQQKQEVAPVQYNIVEQNKLNKDYRANDTVPPTIPYNQSYDQNTGGSYNSSDRGSSTSGSQGHKKGARTPKVPKQGGMNWADLLPPPPAHPPPHSNSEEYNISVDESYDQEMPCPVPPARMYLQQDELEEEEDERGPTPPVRGAASSPAAVSYSHQSTATLTPSPQEELQPMLQDCPEETGHMQHQPDRRRQPVSPPPPPRPISPPHTYGYISGPLVSDMDTDAPEEEEDEADMEVAKMQTRRLLLRGLEQTPASSVGDLESSVTGSMINGWGSASEEDNISSGRSSVSSSDGSFFTDADFAQAVAAAAEYAGLKVARRQMQDAAGRRHFHASQCPRPTSPVSTDSNMSAAVMQKTRPAKKLKHQPGHLRRETYTDDLPPPPVPPPAIKSPTAQSKTQLEVRPVVVPKLPSMDARTDRSSDRKGSSYKGREVLDGRQVVDMRTNPGDPREAQEQQNDGKGRGNKAAKRDLPPAKTHLIQEDILPYCRPTFPTSNNPRDPSSSSSMSSRGSGSRQREQANVGRRNIAEMQVLGGYERGEDNNEELEETES

SEQ ID NO: 14423 - protein, 157 aa, Homo sapiens
MGAARGSPARPRRLPLLSVLLLPLLGGTQTAIVFIKQPSSQDALQGRRALLRCEVEAPGPVHVYWLLDGAPVQDTERRFAQGSSLSFAAVDRLQDSGTFQCVARDDVTGEEARSANASFNIKWIEAGPVVLKHPASEAEIQPQTQVTLRCHIDGHPR

SEQ ID NO: 14424 - protein, 1256 aa, Homo sapiens
MSKVIQKKNHWTSRVHECTVKRGPQGELGVTVLGGAEHGEFPYVGAVAAVEAAGLPGGGEGPRLGEGELLLEVQGVRVSGLPRYDVLGVIDSCKEAVTFKAVRQGGRLNKDLRHFLNQRFQKGSPDHELQQTIRDNLYRHAVPCTTRSPREGEVPGVDYNFLTVKEFLDLEQSGTLLEVGTYEGNYYGTPKPPSQPVSGKVITTDALHSLQSGSKQSTPKRTKSYNDMQNAGIVHAENEEEDDVPEMNSSFTADSGEQEEHTLQETALPPVNSSIIAAPITDPSQKFPQYLPLSAEDNLGPLPENWEMAYTENGEVYFIDHNTKTTSWLDPRCLNKQQKPLEECEDDEGVHTEELDSELELPAGWEKIEDPVYGIYYVDHINRKTQYENPVLEAKRKKQLEQQQQQQQQQQQQQQQQQQQQTEEWTEDHSALVPPVIPNHPPSNPEPAREVPLQGKPFFTRNPSELKGKFIHTKLRKSSRGFGFTVVGGDEPDEFLQIKSLVLDGPAALDGKMETGDVIVSVNDTCVLGHTHAQVVKIFQSIPIGASVDLELCRGYPLPFDPDDPNTSLVTSVAILDKEPIIVNGQETYDSPASHSSKTGKVNGMKDARPSSPADVASNSSHGYPNDTVSLASSIATQPELITVHIVKGPMGFGFTIADSPGGGGQRVKQIVDSPRCRGLKEGDLIVEVNKKNVQALTHNQVVDMLVECPKGSEVTLLVQRGGLPVPKKSPKSQPLERKDSQNSSQHSVSSHRSLHTASPSHSTQVLPEFPPAEAQAPDQTDSSGQKKPDPFKIWAQSRSMYENRPMSPSPASGLSKGEREREINSTNFGECPIPDYQEQDIFLWRKETGFGFRILGGNEPGEPIYIGHIVPLGAADTDGRLRSGDELICVDGTPVIGKSHQLVVQLMQQAAKQGHVNLTVRRKVVFAVPKTENEVPSPASSHHSSNQPASLTEEKRTPQGSQNSLNTVSSGSGSTSGIGSGGGGGSGVVSTVVQPYDVEIRRGENEGFGFVIVSSVSRPEAGTTFAGNACVAMPHKIGRIIEGSPADRCGKLKVGDRILAVNGCSITNKSHSDIVNLIKEAGNTVTLRIIPGDESSNATLLTNAEKIATITTTHTPSQQGTQETRNTTKPKQESQFEFKAPQATQEQDFYTVELERGAKGFGFSLRGGREYNMDLYVLRLAEDGPAERCGKMRIGDEILEINGETTKNMKHSRAIELIKNGGRRVRLFLKRGDGSVPEYGGSNYENIPSFPGMTP

SEQ ID NO: 14425 - protein, 348 aa, Homo sapiens
MAVSVTPIRDTKWLTLEVCREFQRGTCSRPDTECKFAHPSKSCQVENGRVIACFDSLKGRCSRENCKYLHPPPHLKTQLEINGRNNLIQQKNMAMLAQQMQLANAMMPGAPLQPVPMFSVAPSLATNASAAAFNPYLGPVSPSLVPAEILPTAPMLVTGNPGVPVPAAAAAAAQKLMRTDRLEVCREYQRGNCNRGENDCRFAHPADSTMIDTNDNTVTVCMDYIKGRCSREKCKYFHPPAHLQAKIKAAQYQVNQAAAAQAAATAAAMTQSAVKSLKRPLEATFDLGIPQAVLPPLPKRPALEKTNGATAVFNTGIFQYQQALANMQLQQHTAFLPPDTHNICRTSD

SEQ ID NO: 14426 - protein, 659 aa, Homo sapiens
MEVTASSRHYVDRLFDPDPQKVLQGVIDMKNAVIGNNKQKANLIVLGAVPRLLYLLQQETSSTELKTECAVVLGSLAMGTENNVKSLLDCHIIPALLQGLLSPDLKFIEACLRCLRTIFTSPVTPEELLYTDATVIPHLMALLSRSRYTQEYICQIFSHCCKGPDHQTILFNHGAVQNIAHLLTSLSYKVRMQALKCFSVLAFENPQVSMTLVNVLVDGELLPQIFVKMLQRDKPIEMQLTSAKCLTYMCRAGAIRTDDNCIVLKTLPCLVRMCSKERLLEERVEGAETLAYLIEPDVELQRIASITDHLIAMLADYFKYPSSVSAITDIKRLDHDLKHAHELRQAAFKLYASLGANDEDIRKKIIETENMMDRIVTGLSESSVKVRLAAVRCLHSLSRSVQQLRTSFQDHAVWKPLMKVLQNAPDEILVVASSMLCNLLLEFSPSKEPILESGAVELLCGLTQSENPALRVNGIWALMNMAFQAEQKIKADILRSLSTEQLFRLLSDSDLNVLMKTLGLLRNLLSTRPHIDKIMSTHGKQIMQAVTLILEGEHNIEVKEQTLCILANIADGTTAKDLIMTNDDILQKIKYYMGHSHVKLQLAAMFCISNLIWNEEEGSQERQDKLRDMGIVDILHKLSQSPDSNLCDKAKMALQQYLA

SEQ ID NO: 14427 - protein, 281 aa, Homo sapiens
MALDYLLLLLLASAVAAMEETLMDTRTATAELGWTANPASGWEEVSGYDENLNTIRTYQVCNVFEPNQNNWLLTTFINRRGAHRIYTEMRFTVRDCSSLPNVPGSCKETFNLYYYETDSVIATKKSAFWSEAPYLKVDTIAADESFSQVDFGGRLMKVNTEVRSFGPLTRNGFYLAFQDYGACMSLLSVRVFFKKCPSIVQNFAVFPETMTGAESTSLVIARGTCIPNAEEVDVPIKLYCNGDGEWMVPIGRCTCKPGYEPENSVACKVSRPFWRILRQQD

SEQ ID NO: 14428 - protein, 194 aa, Homo sapiens
MVSRMVSTMLSGLLFWLASGWTPAFAYSPRTPDRVSEADIQRLLHGVMEQLGIARPRVEYPAHQAMNLVGPQSIEGGAHEGLQHLGPFGNIPNIVAELTGDNIPKDFSEDQGYPDPPNPCPVGKTADDGCLENTPDTAEFSREFQLHQHLFDPEHDYPGLGKWSVNPYLQGQRLDNVVAKKSVPHFSDEDKDPE

SEQ ID NO: 14429 - protein, 125 aa, Homo sapiens
MAVFLQLLPLLLSRAQGNPGASLDGRPGDRVNLSCGGVSHPIRWVWAPSFPACKGLSKGRRPILWASSSGTPTVPPLQPFVGRLRSLDSAPDPAAGRWVGARTGSFGPGLVAAQAPAPATDSTTP

SEQ ID NO: 14430 - protein, 243 aa, Homo sapiens
MTDYGEEQRNELEALESIYPDSFTVLSENPPSFTITVTSEAGENDETVQTTLKFTYSEKYPDEAPLYEIFSQENLEDNDVSDILKLLALQAEENLGMVMIFTLVTAVQEKLNEIVDQIKTRREEEKKQKEKEAEEAEKQLFHGTPVTIENFLNWKAKFDAELLEIKKKRMKEEEQAGKNKLSGKQLFETDHNLDTSDIQFLEDAGNNVEVDESLFQEMDDLELEDDEDDPDYNPADPESDSAD

SEQ ID NO: 14431 - protein, 117 aa, Homo sapiens
MDMRVPAQLLGLLLLWLPGARCAIQMTQSPSSLSASVGDRVTITCRASQGIRNDLGWYQQKPGKAPKLLIYAASSLQSGVPSRFSGSGSGTDFTLTISSLQPEDFATYYCLQDYNYP

SEQ ID NO: 14432 - protein, 323 aa, Homo sapiens
MKETDLIIMDLRQFLMCLSLCTAFALSKPTEKKDRVHHEPQLSDKVHNDAQSFDYDHDAFLGAEEAKTFDQLTPEESKERLGKIVSKIDGDKDGFVTVDELKDWIKFAQKRWIYEDVERQWKGHDLNEDGLVSWEEYKNATYGYVLDDPDPDDGFNYKQMMVRDERRFKMADKDGDLIATKEEFTAFLHPEEYDYMKDIVVQETMEDIDKNADGFIDLEEYIGDMYSHDGNTDEPEWVKTEREQFVEFRDKNRDGKMDKEETKDWILPSDYDHAEAEARHLVYESDQNKDGKLTKEEIVDKYDLFVGSQATDFGEALVRHDEF

SEQ ID NO: 14433 - protein, 55 aa, Homo sapiens
MCMVIFAPLFAIFAFATCGGYSGGLRLSVDCVNKTESNLSIDIAFAYPFRTSLSL

SEQ ID NO: 14434 - protein, 145 aa, Homo sapiens
MRAAGTLLAFCCLVLSTTGGPSPDTCSQDLNSRVKPGFPKTIKTNDPGVLQAARYSVEKFNNCTNDMFLFKESRITRALVQIVKGLKYMLEVEIGRTTCKKNQHLRLDDCDFQTNHTLKQTLSCYSEVWVVPWLQHFEVPVLRCH

SEQ ID NO: 14435 - protein, 299 aa, Homo sapiens
MVGKARSSNFTLSEKLDLLKLVKPYVKILEEHTNKHSVIVEKNRCWDIIAVNYNAIGVDRPPRTAQGLRTLYKRLKEYAKQELLQQKETQSDFKSNISEPTKKVMEMIPQISSFCLVRDRNHIQSANLDEEAQAGTSSLQVMLDHHPVAITVEVKQEEDIKPPPPLVLNSQQSDTLEQREEHELVHVMERSLSPSLSSVDMRMTSSPSSIPRRDDFFRHESGEHFRSLLGYDPQILQMLKEEHQIILENQKNFGLYVQEKRDGLKRRQQLEEELLRAKIEVEKLKAIRLRHDLPEYNSL

SEQ ID NO: 14436 - protein, 642 aa, Homo sapiens
MAEAAPAPTSEWDSECLTSLQPLPLPTPPAANEAHLQTAAISLWTVVAAVQAIERKVEIHSRRLLHLEGRTGTAEKKLASCEKTVTELGNQLEGKWAVLGTLLQEYGLLQRRLENLENLLRNRNFWILRLPPGIKGDIPKVPVAFDDVSIYFSTPEWEKLEEWQKELYKNIMKGNYESLISMDYAINQPDVLSQIQPEGEHNTEDQAGPEESEIPTDPSEEPGISTSDILSWIKQEEEPQVGAPPESKESDVYKSTYADEELVIKAEGLARSSLCPEVPVPFSSPPAAAKDAFSDVAFKSQQSTSMTPFGRPATDLPEASEGQVTFTQLGSYPLPPPVGEQVFSCHHCGKNLSQDMLLTHQCSHATEHPLPCAQCPKHFTPQADLSSTSQDHASETPPTCPHCARTFTHPSRLTYHLRVHNSTERPFPCPDCPKRFADQARLTSHRRAHASERPFRCAQCGRSFSLKISLLLHQRGHAQERPFSCPQCGIDFNGHSALIRHQMIHTGERPYPCTDCSKSFMRKEHLLNHRRLHTGERPFSCPHCGKSFIRKHHLMKHQRIHTGERPYPCSYCGRSFRYKQTLKDHLRSGHNGGCGGDSDPSGQPPNPPGPLITGLETSGLGVNTEGLETNQWYGEGSGGGVL

SEQ ID NO: 14437 - protein, 298 aa, Homo sapiens
MARRSRHRLLLLLLRYLVVALGYHKAYGFSAPKDQQVVTAVEYQEAILACKTPKKTVSSRLEWKKLGRSVSFVYYQQTLQGDFKNRAEMIDFNIRIKNVTRSDAGKYRCEVSAPSEQGQNLEEDTVTLEVLVAPAVPSCEVPSSALSGTVVELRCQDKEGNPAPEYTWFKDGIRLLENPRLGSQSTNSSYTMNTKTGTLQFNTVSKLDTGEYSCEARNSVGYRRCPGKRMQVDDLNISGIIAAVVVVALVISVCGLGVCYAQRKGYFSKETSFQKSNSSSKATTMSENDFKHTKSFII

SEQ ID NO: 14438 - protein, 117 aa, Homo sapiens
MDMRVPAQLLGLLLLWLPGAKCDIQMTQSPSTLSASVGDRVTITCRASQSISSWLAWYQQKPGKAPKLLIYKASSLESGVPSRFSGSGSGTEFTLTISSLQPDDFATYYCQQYNSYS

SEQ ID NO: 14439 - protein, 4444 aa, Homo sapiens
MKGARWRRVPWVSLSCLCLCLLPHVVPGTTEDTLITGSKTAAPVTSTGSTTATLEGQSTAASSRTSNQDISASSQNHQTKSTETTSKAQTDTLTQMMTSTLFSSPSVHNVMETAPPDEMTTSFPSSVTNTLMMTSKTITMTTSTDSTLGNTEETSTAGTESSTPVTSAVSITAGQEGQSRTTSWRTSIQDTSASSQNHWTRSTQTTRESQTSTLTHRTTSTPSFSPSVHNVTGTVSQKTSPSGETATSSLCSVTNTSMMTSEKITVTTSTGSTLGNPGETSSVPVTGSLMPVTSAALVTFDPEGQSPATFSRTSTQDTTAFSKNHQTQSVETTRVSQINTLNTLTPVTTSTVLSSPSGFNPSGTVSQETFPSGETTTSSPSSVSNTFLVTSKVFRMPTSRDSTLGNTEETSLSVSGTISAITSKVSTIWWSDTLSTALSPSSLPPKISTAFHTQQSEGAETTGRPHERSSFSPGVSQEIFTLHETTTWPSSFSSKGHTTWSQTELPSTSTGAATRLVTGNPSTGTAGTIPRVPSKVSAIGEPGEPTTYSSHSTTLPKTTGAGAQTQWTQETGTTGEALLSSPSYSVTQMIKTATSPSSSPMLDRHTSQQITTAPSTNHSTIHSTSTSPQESPAVSQRGHTQAPQTTQESQTTRSVSPMTDTKTVTTPGSSFTASGHSPSEIVPQDAPTISAATTFAPAPTGDGHTTQAPTTALQAAPSSHDATLGPSGGTSLSKTGALTLANSVVSTPGGPEGQWTSASASTSPDTAAAMTHTHQAESTEASGQTQTSEPASSGSRTTSAGTATPSSSGASGTTPSGSEGISTSGETTRFSSNPSRDSHTTQSTTELLSASASHGAIPVSTGMASSIVPGTFHPTLSEASTAGRPTGQSSPTSPSASPQETAAISRMAQTQRTRTSRGSDTISLASQATDTFSTVPPTPPSITSTGLTSPQTETHTLSPSGSGKTFTTALISNATPLPVTYASSASTGHTTPLHVTDASSVSTGHATPLPVTSPSSVSTGHTTPLPVTDTSSESTGHVTPLPVTSFSSASTGDSTPLPVTDTSSASTGHVTPLPVTSLSSASTGDTTPLPVTDTSSASTGHATSLPVTDTSSVSTGHTTPLPVTDTSSASTGHATSLPVTDTSSVSTGHTTPLHVTDASSASTGQATPLPVTSLSSVSTGDTTPLPVTSPSSASTGHATPLLVTDTSSASTGHATPLPVTDASSVSTDHATSLPVTIPSAASTGHTTPLPVTDTSSASTGQATSLLVTDTSSVSTGDTTPLPVTSTSSASTGHVTPLHVTSPSSASTGHATPLPVTSLSSASTGDTMPLPVTSPSSASTGDTTPLPVTDASSVSTGHTTPLHVTDASSASTGQATPLPVTSLSSVSTGDTTPLPVTSPSSASTGHATPLLVTDTSSASTGHATPLPVTDASSVSTDHATSLPVTIPSAASTGHTTPLPVTDTSSASTGQATSLLVTDTSSVSTGDTTPLPVTSTSSASTGHVTPLHVTSPSSASTGHATPLPVTSLSSASTGDTMPLPVTSPSSASTGDTTPLPVTDASSVSTGHTTPLPVTSPSSASTGHTTPLPVTDTSSASKGDTTPLPVTSPSSASTGHTTPLPVTDTSSASTGDTTPLPVTNASSLSTGHATPLHVTSPSSASTGHATPLPVTSTSSASTGHATPLPVTGLSSATTDDTTRLPVTDVSSASTGQATPLPVTSLSSVSTGDTTPLPVTSPSSASTGHASPLLVTDASSASTGQATPLPVTDTSSVSTAHATPLPVTGLSSASTDDTTRLPVTDVSSASTGQAIPLPVTSPSSASTGDTTPLPVTDASSASTGDTTSLPVTIPSSASSGHTTSLPVTDASSVSTGHATSLLVTDASSVSTGDTTPLPVTDTNSASTGDTTPLHVTDASSVSTGHATSLPVTSLSSASTGDTTPLPVTSPSSASSGHTTPLPVTDASSVPTGHATSLPVTDASSVSTGHATPLPVTDASSVSTGHATPLPVTDTSSVSTGQATPLPVTSLSSASTGDTTPLPVTDTSSASTGQDTPLPVTSLSSVSTGDTTPLPVTNPSSASTGHATPLLVTDASSISTGHATSLLVTDASSVSTGHATALHDTDASSLSTGDTTPLPVTSPSSTSTGDTTPLPVTETSSVSTGHATSLPVTDTSSASTGHATSLPVTDTSSASTGHATPLPVTDTSSASTGQATPLPVTSPSSASTGHAIPLLVTDTSSASTGQATPLPVTSLSSASTGDTTPLPVTDASSVSTGHATSLPVTSLSSVSTGDTTPLPVTSPSSASTGHATPLHVTDASSASTGHATPLPVTSLSSASTGDTTPLPVTSPSSASTGHATPLHVTDASSVSTGDTTPLPVTSSSSASSGHTTPLPVTDASSASTGDTTPLPVTDTSSASTGHATHLPVTGLSSASTGDTTRLPVTNVSSASTGHATPLPVTSTSSASTGDTTPLPGTDTSSVSTGHTTPLLVTDASSVSTGDTTRLPVTSPSSASTGHTTPLPVTDTPSASTGDTTPLPVTNASSLSTRHATSLHVTSPSSASTGHATSLPVTDTSAASTGHATPLPVTSTSSASTGDTTPLPVTDTYSASTGQATPLPVTSLSSVSTGDTTPLPVTSPSSASTGHATPLLVTDASSASTGQATPLPVTSLSSVSTGDTTPLPVTSPSSASTGHATSLPVTDTSSASTGDTTSLPVTDTSSAYTGDTTSLPVTDTSSSSTGDTTPLLVTETSSVSTGDTTPLPVTDTSSASTGHATPLPVTNTSSVSTGHATPLHVTSPSSASTGHTTPLPVTDASSVSTGHATSLPVTDASSVFTGHATSLPVTIPSSASSGHTTPLPVTDASSVSTGHATSLPVTDASSVSTGHATPLPVTDASSVSTGHATPLPLTSLSSVSTGDTTPLPVTDTSSASTGQATPLPVTSLSSVSTGDTTPLPVTDTSSASTGHATSLPVTDTSSASTGHATPLPDTDTSSASTGHATLLPVTDTSSASIGHATSLPVTDTSSISTGHATPLHVTSPSSASTGHATPLPVTDTSSASTGHANPLHVTSPSSASTGHATPLPVTDTSSASTGHATPLPVTSLSSVSTGDTTPLPVTSPSSASTGHTTPLPVTDTSSASTGQATALPVTSTSSASTGDTTPLPVTDTSSASTGQATPLPVTSLSSVSTGDTTPLPVTSPSSASTGHATPLLVTDASSASTGQATPLPVTSLSSVSTGDTTPLPVTSPSSASTGHATSLPVTDTSSASTGDTTSLPVTDTSSAYTGDTTSLPVTDTSSSSTGDTTPLLVTETSSVSTGHATPLLVTDASSASTGHATPLHVTSPSSASTGDTTPVPVTDTSSVSTGHATPLPVTGLSSASTGDTTRLPVTDISSASTGQATPLPVTNTSSVSTGDTMPLPVTSPSSASTGHATPLPVTSTSSASTGHATPVPVTSTSSASTGHTTPLPVTDTSSASTGDTTPLPVTSPSSASTGHTTPLHVTIPSSASTGDTSTLPVTGASSASTGHATPLPVTDTSSVSTGHATPLPVTSLSSVSTGDTTPLPVTDASSASTGQATPLPVTSLSSVSTGDTTPLLVTDASSVSTGHATPLPVTDTSSASTGDTTRLPVTDTSSASTGQATPLPVTSLSSVSTGDTTPLLVTDASSVSTGHATPLPVTDTSSASTGDTTRLPVTDTSSASTGQATPLPVTIPSSSSSGHTTPLPVTSTSSVSTGHVTPLHVTSPSSASTGHVTPLPVTSTSSASTGHATPLLVTDASSVSTGHATPLPVTDASSASTGDTTPLPVTDTSSASTGQATPLPVTSLSSVSTGDTTPLPVTDASSASTGHATPLPVTIPSSVSTGDTMPLPVTSPSSASTGHATPLPVTGLSSASTGDTTPLPVTDTSSASTRHATPLPVTDTSSASTDDTTRLPVTDVSSASTGHATPLPVTSTSSASTGDTTPLPVTDTSSVSTGHATSLPVTSRSSASTGHATPLPVTDTSSVSTGHATPLPVTSTSSVSTGHATPLPVTSPSSASTGHATPVPVTSTSSASTGDTTPLPVTNASSLSTGHATPLHVTSPSSASRGDTSTLPVTDASSASTGHATPLPLTSLSSVSTGDTTPLPVTDTSSASTGQATPLPVTSLSSVSTGDTTPLPVTIPSSASSGHTTSLPVTDASSVSTGHGTPLPVTSTSSASTGDTTPLPVTDTSSASTGHATPLPVTDTSSASTGHATPLPVTSLSSVSTGHATPLAVSSATSASTVSSDSPLKMETPGMTTPSLKTDGGRRTATSPPPTTSQTIISTIPSTAMHTRSTAAPIPILPERGVSLFPYGAGAGDLEFVRRTVDFTSPLFKPATGFPLGSSLRDSLYASQAGTLWPWWLRSGTMLTSPLVGGPHFIRATPTKPSSPRTGAGPMPCFSTRAVGCSGTWPSAQWRWLFRKQPTDVPASVGEVSP

SEQ ID NO: 14440 - protein, 139 aa, Homo sapiens
MEAVVFVFSLLDCCALIFLSVYFIITLSDLECDYINARSCCSKLNKWVIPELIGHTIVTVLLLMSLHWFIFLLNLPVATWNIYRYIMVPSGNMGVFDPTEIHNRGQLKSHMKEAMIKLGFHLLCFFMYLYSMILALIND

SEQ ID NO: 14441 - protein, 292 aa, Homo sapiens
MRALRDRAGLLLCVLLLAALLEAALGLPVKKPRLRGPRPGSLTRLAEVSASPDPRPLKEEEEAPLLPRTHLQAEPHQHGCWTVTEPAAMTPGNATPPRTPEVTPLRLELQKLPGLANTTLSTPNPDTQASASPDPRPLREEEEARLLPRTHLQAELHQHGCWTVTEPAALTPGNATPPRTQEVTPLLLELQKLPELVHATLSTPNPDNQTMSLRRSGVPGLPAVGTAALASSRGLGPVAMAALPPRPVPVTCPPVLALRTRTPWASPVRSGSSWPAMLRTCMIKMWTAVRSG

SEQ ID NO: 14442 - protein, 55 aa, Homo sapiens
MSAPRLLISIIIMVSGCTGSMAEEASKNLQSWWKCEGEASMSSNGQQKPQIIIPV

SEQ ID NO: 14443 - protein, 1562 aa, Homo sapiens
MPGEAARAELLLPEADRPGPRTDLSCDAAAATTILGGDRREPCALTPGPSHLALTFLPSKPGARPQPEGASWDAGPGGAPSAWADPGEGGPSPMLLPEGLSSQALSTEAPLPATLEPRIVMGEETCQALLSPRAARTALRDQEGGHASPDPPPELCSQGDLSVPSPPPDPDSFFTPPSTPTKTTYALLPACGPHGDARDSEAELRDELLDSPPASPSGSYITADGDSWASSPSCSLSLLAPAEGLDFPSGWGLSPQGSMVDERELHPAGTPEPPSSESSLSADSSSSWGQEGHFFDLDFLANDPMIPAALLPFQGSLIFQVEAVEVTPLSPEEEEEEAVADPDPGGDLAGEGEEDSTSASFLQSLSDLSITEGMDEAFAFRDDTSAASSDSDSASYAEADDERLYSGEPHAQATLLQDSVQKTEEESGGGAKGLQAQDGTVSWAVEAAPQTSDRGAYLSQRQELISEVTEEGLALGQESTATVTPHTLQVAPGLQVEVATRVTPQAGEEETDSTAGQESAAMAMPQPSQEGISEILGQESVTAEKLPTPQEETSLTLCPDSPQNLKEEGGLDLPSGRKPVAAATIVPRQAKEDLTLPQDSAMTPPLPLQDTDLSSAPKPVAAATIVSQQAEEGLTLPQDSVMTPPLPLQDTELSSAPKPVAAATLVSQQAEEGLTLPQDSAMTPPLPLQDTDLSSAPKPVAAATLVSQQAEEGLTLPQDSAMTPPLPLQDTDLSSAPKPVAAATLVSQQAEEGLTLPQDSAMTPPLPLQDTDLSSAPKPVAAATIVSQQAEEGLTLPQDSAMTPPLPLQDTDLSSAPKPVAAATIVSQQAEEGLTLPQDSAMTPPLPLQDTDLSSAPKPVAAATPVSQQAEEGLTLPQDSAMTPPLPLQDTDLSSAPKPVAAATPVSQQAEEGLTLPQDSAMTAPLPLQDTGPTSGPEPLAVATPQTLQAEAGCAPGTEPVATMAQQEVGEALGPRPAPEEKNAALPTVPEPAALDQVQQDDPQPAAEAGTPWAAQEDADSTLGMEALSLPEPASGAGEEIAEALSRPGREACLEARAHTGDGAKPDSPQKETLEVENQQEGGLKPLAQEHGPRSALGGAREVPDAPPAACPEVSQARLLSPAREERGLSGKSTPEPTLPSAVATEASLDSCPESSVGAVSSLDRGCPDAPAPTSAPTSQQPEPVLGLGSVEQPHEVPSVLGTPLLQPPENLAKGQPSTPVDRPLGPDPSAPGTLAGAALPPLEPPAPCLCQDPQEDSVEDEEPPGSLGLPPPQAGVQPAAAAVSGTTQPLGTGPRVSLSPHSPLLSPKVASMDAKDLALQILPPCQVPPPSGPQSPAGPQGLSAPEQQEDEDSLEEDSPRALGSGQHSDSHGESSAELDEQDILAPQTVQCPAQAPAGGSEETIAKAKQSRSEKKARKAMSKLGLRQIQGVTRITIQKSKNILFVIAKPDVFKSPASDTYVVFGEAKIEDLSQQVHKAAAEKFKVPSEPSALVPESAPRPRVRLECKEEEEEEEEEVDEAGLELRDIELVMAQANVSRAKAVRALRDNHSDIVNAIMELTM

SEQ ID NO: 14444 - protein, 407 aa, Homo sapiens
MTSQRSPLAPLLLLSLHGVAASLEVSESPGSIQVARGQPAVLPCTFTTSAALINLNVIWMVTPLSNANQPEQVILYQGGQMFDGAPRFHGRVGFTGTMPATNVSIFINNTQLSDTGTYQCLVNNLPDIGGRNIGVTGLTVLVPPSAPHCQIQGSQDIGSDVILLCSSEEGIPRPTYLWEKLDNTLKLPPTATQDQVQGTVTIRNISALSSAQPRNIGLIAGAIGTGAVIIIFCIALILGAFFYWRSKNKEEEEEEIPNEIREDDLPPKCSSAKAFHTEISSSDNNTLTSSNAYNSRYWSNNPKVHRNTESVSHFSDLGQSFSFHSGNANIPSIYANGTHLVPGQHKTLVVTANRGSSPQVMSRSNGSVSRKPRPPHTHSYTISHATLERIGAVPVMVPAQSRAGSLV

SEQ ID NO: 14445 - protein, 317 aa, Homo sapiens
MLRPAGLWRLCRRPWAARVPAENLGRREVTSGVSPRGSTSPRTLNIFDRDLKRKQKNWAARQPEPTKFDYLKEEVGSRIADRVYDIPRNFPLALDLGCGRGYIAQYLNKLQLFHCRKLLESFSKLTLQKMLCLHWVNDLPRALEQIHYILKPDGVFIGAMFGGDTLYELRCSLQLAETEREGGFSPHISPFTAVNDLGHLLGRAGFNTLTVDTDEIQVNYPGMFELMEDLQGMGESNCAWNRKALLHRDTMLAAAAVYREMYRNEDGSVPATYQIYYMIGWKYHESQARPAERGSATVSFGELGKINNLMPPGKKSQ

SEQ ID NO: 14446 - protein, 1777 aa, Homo sapiens
MRGGKCNMLSSLGCLLLCGSITLALGNAQKLPKGKRPNLKVHINTTSDSILLKFLRPSPNVKLEGLLLGYGSNVSPNQYFPLPAEGKFTEAIVDAEPKYLIVVRPAPPPSQKKSCSGKTRSRKPLQLVVGTLTPSSVFLSWGFLINPHHDWTLPSHCPNDRFYTIRYREKDKEKKWIFQICPATETIVENLKPNTVYEFGVKDNVEGGIWSKIFNHKTVVGSKKVNGKIQSTYDQDHTVPAYVPRKLIPITIIKQVIQNVTHKDSAKSPEKAPLGGVILVHLIIPGLNETTVKLPASLMFEISDALKTQLAKNETLALPAESKTPEVEKISARPTTVTPETVPRSTKPTTSSALDVSETTLVLSKRTPETLQTILIPQFELPLSTLAPKSLPEFPEAKTPFPFEKPRGTLASSEKPWIVPTAKISEDSKVLQPQTATYDVFSSPTTSDEPEISDSYTATSDRILDSIPPKTSRTLEQPRATLAPSETPFVPQKLEIFTSPEMQPTTPAPQQTTSIPSTPKRRPRPKPPRTKPERTTSAGTITPKISKSPEPTWTTPAPGKTQFISLKPKIPLSPEVTHTKPAPEPQTLLPSQSTIGPETPGTKPSTTLAPRKTKRPGRRPRPRPRPKTTPSPEVPKSKPALEPATIQPEPLVPTTASKPSERPKTTHRPDAPQIQPGSKPPKQLLPKPQTTAEPDMPPTKSVSEPVPFETEAPSMTIVPTTDIEPVTVRTEATVTTLAPKTSQRTRTRRPRPKHKTTPRPETLQTKLDFGPITPGTSSAPTTTTKRTRRPHPKPKTTPHPEVPQTKLVPATILEPVLRTEASGTTAAPKVPQRTHRPHPKPKTTLSPEELQTELVPATIFEPVSPIKEAPGTTFVPVTDLEPVTFRTEIPATTLATKTSKRTRPPRPRPKTTPSPQAPETKPVPATVLEPVTLRPEASTTLASKTSQRTRRPRLRTKTTPRPEAPESKPVPTAELKPVTLRTETWVTTQAPKTSQRTRRPRPKTKTTPSPEVPQTKLVPSTDLEPGTLRTEAPKTMVVTTVLEPDTFRTKFPETTLAPKTQRTRRPRPRPKTTSSPEVPQNKSVSVTGFEPVVHSTDAPGTTFALTELQTLILKPVTSPSLEMTESQPVSDVLESVTLSTESPKETIAPAKTDYVYPTAKAPLWPEEPKTEVVESITYVSEPPETTLETSPLPSQSITLPSPDEPQTEPAPKQTPRAPPKPKTSPRPRIPQTQPVPKVPQRVTAKPKTSPSPEVSYTTPAPKDVLLPHKPYPEVSQSEPAPLETRGIPFIPMISPSPSQEELQTTLEETDQSTQEPFTTKIPRTTELAKTTQAPHRFYTTVRPRTSDKPHIRPVLNRTTTRPTRPKPSGMPSGNGVGTGVKQAPRPSGADRNVSVDSTHPTKKPGTRRPPLPPRPTHPRRKPLPPNNVTGKPGSAGIISSGPITTPPLRSTPRPTGTPLERIETDIKQPTVPASGEELENITDFSSSPTRETDPLGKPRFKGPHVRYIQKPDNSPCSITDSVKRFPKEEATEGNATSPPQNPPTNLTVVTVEGCPSFVILDWEKPLNDTVTEYEVISRENGSFSGKNKSIQMTNQTFSTVENLKPNTSYEFQVKPKNPLGEGPVSNTVAFSTESADPRVSEPVSAGRDAIWTERPFNSDSYSECKGKQYVKRTWYKKFVGVQLCNSLRYKIYLSDSLTGKFYNIGDQRGHGEDHCQFVDSFLDGRTGQQLTSDQLPIKEGYFRAVRQEPVQFGEIGGHTQINYVQWYECGTTIPGKW

SEQ ID NO: 14447 - protein, 792 aa, Homo sapiens
MGAPACALALCVAVAIVAGASSESLGTEQRVVGRAAEVPGPEPGQQEQLVFGSGDAVELSCPPPGGGPMGPTVWVKDGTGLVPSERVLVGPQRLQVLNASHEDSGAYSCRQRLTQRVLCHFSVRVTDAPSSGDDEDGEDEAEDTGVDTGAPYWTRPERMDKKLLAVPAANTVRFRCPAAGNPTPSISWLKNGREFRGEHRIGGIKLRHQQWSLVMESVVPSDRGNYTCVVENKFGSIRQTYTLDVLERSPHRPILQAGLPANQTAVLGSDVEFHCKVYSDAQPHIQWLKHVEVNGSKVGPDGTPYVTVLKTAGANTTDKELEVLSLHNVTFEDAGEYTCLAGNSIGFSHHSAWLVVLPAEEELVEADEAGSVYAGILSYGVGFFLFILVVAAVTLCRLRSPPKKGLGSPTVHKISRFPLKRQQVSLESNASMSSNTPLVRIARLSSGEGPTLANVSELELPADPKWELSRARLTLGKPLGEGCFGQVVMAEAIGIDKDRAAKPVTVAVKMLKDDATDKDLSDLVSEMEMMKMIGKHKNIINLLGACTQGGPLYVLVEYAAKGNLREFLRARRPPGLDYSFDTCKPPEEQLTFKDLVSCAYQVARGMEYLASQKCIHRDLAARNVLVTEDNVMKIADFGLARDVHNLDYYKKTTNLVLWGPALGDLHAGGLPVPRHPCGGALQAAEGGPPHGQARQLHTRPVHDHAGVLACRALPEAHLQAAGGGPGPCPYRDVHRRVPGPVGAFRAVLPGWPGHPQLQLLRGRLRVCPRPAAPGPTQQWGLADVKGHWSPTM

SEQ ID NO: 14448 - protein, 560 aa, Homo sapiens
MAPSTPLLTVRGSEGLYMVNGPPHFTESTVFPRVNIISVTNKGLLHSFDLLKAVCLEFSPKNTVLATWQPYTTSKDGTAGIPNLQLYDVKTGTCLKSFIQKKMQNWCPSWSEDETLCARNVNNEVHFFENNNFNTIANKLHLQKINDFVLSPGPQPYKVAVYVPGSKGAPSFVRLYQYPNFAGPHAALANKSFFKADKVTMLWNKKATAVLVIASTDVDKTGASYYGEQTLHYIATNGESAVVQLPKNGPIYDVVWNSSSTEFCAVYGFMPAKATIFNLKCDPVFDFGTGPRNAAYYSPHGHILVLAGFGNLRGQMEVWDVKNYKLISKPVASDSTYFAWCPDGEHILTATCAPRLRVNNGYKIWHYTGSILHKYDVPSNAELWQVSWQPFLDGIFPAKTITYQAVPSEVPNEEPKVATAYRPPALRNKPITNSKLHEEEPPQNMKPQSGNDKPLSKTALKNQRKHEAKKAAKQEARSDKSPDLAPTPAPQSTPRNTVSQSISGDPEIDKKIKNLKKKLKAIEQLKEQAATGKQLEKNQLEKIQKETALLQELEDLELGI

SEQ ID NO: 14449 - protein, 594 aa, Homo sapiens
MPYKLKKEKEPPKVAKCTAKPSSSGKDGGGENTEEPQPQAQSQPPSSNKRPSNSTPPPTQLSKIKYSGGPQIVKKERRQSSSRFNLSKNRELQKLPALKDSPTQEREELFIQKLRQCCVLFDFVSDPLSDLKFKEVKRAGLNEMVEYITHSRDVVTEAIYPEAVTMFSVNLFRTLPPSSNPTGAEFDPEEDEPTLEAAWPHLQLVYEFFLRFLESPDFQPNIAKKYIDQKFVLALLDLFDSEDPRERDFLKTILHRIYGKFLGLRAYIRRQINHIFYRFIYETEHHNGIAELLEILGSIINGFALPLKEEHKMFLIRVLLPLHKVKSLSVYHPQLAYCVVQFLEKESSLTEPVIVGLLKFWPKTHSPKEVMFLNELEEILDVIEPSEFSKVMEPLFRQLAKCVSSPHFQVAERALYYWNNEYIMSLISDNAARVLPIMFPALYRNSKSHWNKTIHGLIYNALKLFMEMNQKLFDDCTQQYKAEKQKGRFRMKEREEMWQKIEELARLNPQYPMFRAPPPLPPVYSMETETPTAEDIQLLKRTVETEAVQMLKDIKKEKVLLRRKSELPQDVYTIKALEAHKRAEEFLTASQEAL

SEQ ID NO: 14450 - protein, 1139 aa, Homo sapiens
MQTPEVPAERSPRRRSISGTSTSEKPNSMDTANTSPFKVPGFFSKRLKGSIKRTKSQSKLDRNTSFRLPSLRSTDDRSRGLPKLKESRSHESLLSPCSTVECLDLGRGEPVSVKPLHSSILGQDFCFEVTYLSGSKCFSCNSASERDKWMENLRRTVQPNKDNCRRAENVLRLWIIEAKDLAPKKKYFCELCLDDTLFARTTSKTKADNIFWGEHFEFFSLPPLHSITVHIYKDVEKKKKKDKNNYVGLVNIPTASVTGRQFVEKWYPVSTPTPNKGKTGGPSIRIKSRFQTITILPMEQYKEFAEFVTSNYTMLCSVLEPVISVRNKEELACALVHILQSTGRAKDFLTDLVMSEVDRCGEHDVLIFRENTIATKSIEEYLKLVGQQYLHDALGEFIKALYESDENCEVDPSKCSSSELIDHQSNLKMCCELAFCKIINSYCVFPRELKEVFASWKQQCLNRGKQDISERLISASLFLRFLCPAIMSPSLFNLMQEYPDDRTSRTLTLIAKVIQNLANFAKFGNKEEYMAFMNDFLEHEWGGMKRFLLEISNPDTISNTPGFDGYIDLGRELSVLHSLLWEVVSQLDKGENSFLQATVAKLGPLPRVLADITKSLTNPTPIQQQLRRFTEHNSSPNVSGSLSSGLQKIFEDPTDSDLHKLKSPSQDNTDSYFRGKTLLLVQQASSQSMTYSEKDERESSLPNGRSVSLMDLQDTHAAQVEHASVMLDVPIRLTGSQLSITQVASIKQLRETQSTPQSAPQVRRPLHPALNQPGGLQPLSFQNPVYHLNNPIPAMPKASIDSSLENLSTASSRSQSNSEDFKLSGPSNSSMEDFTKRSTQSEDFSRRHTVPDRHIPLALPRQNSTGQAQIRKVDQGGLGARAKAPPSLPHSASLRSTGSMSVVSAALVAEPVQNGSRSRQQSSSSRESPVPKVRAIQRQQTQQVQSPVDSATMSPVERTAAWVLNNGQYEEDVEETEQNLDEAKHAEKYEQEITKLKERLRVSSRRLEEYERRLLVQEQQMQKLLLEYKARLEDSEERLRRQQEEKDSQMKSIISRLMAVEEELKKDHAEMQAVIDAKQKIIDAQEKRIVSLDSANTRLMSALTQVKERYSMQVRNGISPTNPTKLSITENGEFKNSSC

SEQ ID NO: 14451 - protein, 246 aa, Homo sapiens
MGPRARPALLLLMLLQTAVLQGRLLQSHTLQVILGCEMQEDNSTEGYWKYGYDGQDHLEFCPDTLDWRAAEPRAWPTKLEWERHKIRARQNRAYLERDCPAQLQQLLELGRGVLDQQVTTLRCRALNYYPQNITMKWLKDKQPMDAKEFEPKDVLPNGDGTYQGWITLAVPPGEEQRYTCQVEHPGLDQPLIVIWEPSPSGTLVIGVISGIAVFVVILFIGILFIILRKRQGSRGAMGHYVLAERE

SEQ ID NO: 14452 - protein, 245 aa, Homo sapiens
MAFLGLFSLLVLQSMATGATFPEEAIADLSVNMYNRLRATGEDENILFSPLSIALAMGMMELGAQGSTQKEIRHSMGYDSLKNGEEFSFLKEFSNMVTAKESQYVMKIANSLFVQNGFHVNEEFLQMMKKYFNAAVNHVDFSQNVAVANYINKWVENNTNNLVKDLVSPRDFDAATYLALINAVYFKGNWKSQFRPENTRTFSFTKDDESEVQIPMMYQQGEFYYGEFSDGSNEAGGIYQVLEIP

SEQ ID NO: 14453 - protein, 361 aa, Homo sapiens
MASLGLLLLLLLTALPPLWSSSLPGLDTAESKATIADLILSALERATVFLEQRLPEINLDGMVGVRVLEEQLKSVREKWAQEPLLQPLSLRVGMLGEKLEAAIQRSLHYLKLSDPKYLREFQLTLQPGFWKLPHAWIHTDASLVYPTFGPQDSFSEERSDVCLVQLLGTGTDSSEPCGLSDLCRSLMTKPGCSGYCLSHQLLFFLWARMRGCTQGPLQQSQDYINLFCANMMDLNRRAEAIGYAYPTRDIFMENIMFCGMGGFSDFYKLRWLEAILSWQKQQEGCFGEPDAEDEELSKAIQYQQHFSRRVKRREKQFPDGCSSHNTATAVAALGGFLYILAEYPPANREPHPSTPPPPSSR

SEQ ID NO: 14454 - protein, 117 aa, Homo sapiens
MDMRVPAQLLGLLLLWFPGSRCDIQMTQSPSSVSASVGDRVTITCRASQGISSWLAWYQQKPGKAPKLLIYAASSLQSGVPSRFSGSGSGTDFTLTISSLQPEDFATYYCQQANSFP

SEQ ID NO: 14455 - protein, 111 aa, Homo sapiens
MEWWASSPLRLWLLLFLLPSAQGRQKESGGLRAVPSLPLGLGVWPESRGAPPRGRLPGRCRGRCSSELGRRHRGALRRRVQNGKYLLTKLTGLWRITNHVQVKTAAATMVS

SEQ ID NO: 14456 - protein, 193 aa, Homo sapiens
MLLLLLLAPLFLRPPGAGGAQTPNATSEGCQIIHPPWEGGIRYRGLTRDQVKAINFLPVDYEIEYVCRGEREVVGPKVRKCLANGSWTDMDTPSRCVRICSKSYLTLENGKVFLTGGDLPALDGARVDFRCDPDFHLVGSSRSICSQGQWSTPKPHCQGTLPSETQASALPGLQHGQVWEGAGDQAREAGRQW

SEQ ID NO: 14457 - protein, 993 aa, Homo sapiens
MAAEWASRFWLWATLLIPAAAVYEDQVGKFDWRQQYVGKVKFASLEFSPGSKKLVVATEKNVIAALNSRTGEILWRHVDKGTAEGAVDAMLLHGQDVITVSNGGRIMRSWETNIGGLNWEITLDSGSFQALGLVGLQESVRYIAVLKKTTLALHHLSSGHLKWVEHLPESDSIHYQMVYSYGSGVVWALGVVPFSHVNIVKFNVEDGEIVQQVRVSTPWLQHLSGACGVVDEAVLVCPDPSSRSLQTLALETEWELRQIPLQSLDLEFGSGFQPRVLPTQPNPVDASRAQFFLHLSPSHYALLQYHYGTLSLLKNFPQTALVSFATTGEKTVAAVMACRNEVQKSSSSEDGSMGSFSEKSSSKDSLACFNQTYTINLYLVETGRRLLDTTITFSLEQSGTRPERLYIQVFLKKDDSVGYRALVQTEDHLLLFLQQLAGKVVLWSREESLAEVVCLEMVDLPLTGAQAELEGEFGKKADGLLGMFLKRLSSQLILLQAWTSHLWKMFYDARKPRSQIKNEINIDTLARDEFNLQKMMVMVTASGKLFGIESSSGTILWKQYLPNVKPDSSFKLMVQRTTAHFPHPPQCTLLVKDKESGMSSLYVFNPIFGKWSQVAPPVLKRPILQSLLLPVMDQDYAKVLLLIDDEYKVTAFPATRNVLRQLHELAPSIFFYLVDAEQGRLCGYRLRKDLTTELSWELTIPPEVQRIVKVKGKRSSEHVHSQGRVMGDRSVLYKSLNPNLLAVVTESTDAHHERTFIGIFLIDGVTGRIIHSSVQKKAKGPVHIVHSENWVVYQYWNTKARRNEFTVLELYEGTEQYNATAFSSLDRPQLPQVLQQSYIFPSSISAMEATITERGITSRHLLIGLPSGAILSLPKALLDPRRPEIPTEQSREENLIPYSPDVQIHAERFINYNQTVSRMRGIYTAPSGLESTCLVVAYGLDIYQTRVYPSKQFDVLKDDYDYVLISSVLFGLVFATMITKRLAQVKLLNRAWR

SEQ ID NO: 14458 - protein, 446 aa, Homo sapiens
MTAKNVGLTSTNAEVRGFIDQNLSPTKGNISFVAFPVSNTNSPTKILPKTLGPINVNVGPQMIISTPQRLTSSGSVLIGSPYTPAPAMVTQTHIAEATGWVPGDRKRARKFIDSDFSESKRSKKGDKNGKGLRHFSMKVCEKVQRKGTTSYNEVADELVSEFTNSNNHLAADSAYDQKNIRRRVYDALNVLMAMNIISKEKKEIKWIGLPTNSAQECQNLEIEKQRRIERIKQKRAQLQELLLQQIAFKNLVQRNRQNEQQNQGPPALNSTIQLPFIIINTSRKTVIDCSISSDKFEYLFNFDNTFEIHDDIEVLKRMGMSFGLESGKCSLEDLKLAKSLVPKALEGYITDISTGPSWLNQGLLLNSTQSVSNLDLTTGATLPQSSVNQGLCLDAEVALATGQFLAPNSHQSSSAASHCSESRGETPCSFNDEDEEDDEEDSSSPE

SEQ ID NO: 14459 - protein, 141 aa, Homo sapiens
MGFQKFSPFLALSILVLLQAGSLHAAPFRSALESSPADPATLSEDEARLLLAALVQDYVQMKASELEQEQEREGSSLDSPRSKRCGNLSTCMLGTYTQDFNKFHTFPQTAIGVGAPGKKRDMSSDLERDHRPHNHCPEESL

SEQ ID NO: 14460 - protein, 1606 aa, Homo sapiens
MIAEPAHFYLFGLICLCSGSRLRQEDFPPRIVEHPSDLIVSKGEPATLNCKAEGRPTPTIEWYKGGERVETDKDDPRSHRMLLPSGSLFFLRIVHGRKSRPDEGVYVCVARNYLGEAVSHNASLEVAILRDDFRQNPSDVMVAVGEPAVMECQPPRGHPEPTISWKKDGSPLDDKDERITIRGGKLMITYTRKSDAGKYVCVGTNMVGERESEVAELTVLERPSFVKRPSNLAVTVDDSAEFKCEARGDPVPTVRWRKDDGELPKSRYEIRDDHTLKIRKVTAGDMGSYTCVAENMVGKAEASATLTVQVGSEPPHFVVKPRDQVVALGRTVTFQCEATGNPQPAIFWRREGSQNLLFSYQPPQSSSRFSVSQTGDLTITNVQRSDVGYYICQTLNVAGSIITKAYLEVTDVIADRPPPVIRQGPVNQTVAVDGTFVLSCVATGSPVPTILWRKDGVLVSTQDSRIKQLENGVLQIRYAKLGDTGRYTCIASTPSGEATWSAYIEVQEFGVPVQPPRPTDPNLIPSAPSKPEVTDVSRNTVTLSWQPNLNSGATPTSYIIEAFSHASGSSWQTVAENVKTETSAIKGLKPNAIYLFLVRAANAYGISDPSQISDPVKTQDVLPTSQGVDHKQVQRELGNAVLHLHNPTVLSSSSIEVHWTVDQQSQYIQGYKILYRPSGANHGESDWLVFEVRTPAKNSVVIPDLRKGVNYEIKARPFFNEFQGADSEIKFAKTLEEAPSAPPQGVTVSKNDGNGTAILVSWQPPPEDTQNGMVQEYKVWCLGNETRYHINKTVDGSTFSVVIPFLVPGIRYSVEVAASTGAGSGVKSEPQFIQLDAHGNPVSPEDQVSLAQQISDVVKQPAFIAGIGAACWIILMVFSIWLYRHRKKRNGLTSTYAGIRKVTYQRGGEAVSSGGRPGLLNISEPAAQPWLADTWPNTGNNHNDCSISCCTAGNGNSDSNLTTYSRPADCIANYNNQLDNKQTNLMLPESTVYGDVDLSNKINEMKTFNSPNLKDGRFVNPSGQPTPYATTQLIQSNLSNNMNNGSGDSGEKHWKPLGQQKQEVAPVQYNIVEQNKLNKDYRANDTVPPTIPYNQSYDQNTGGSYNSSDRGSSTSGSQGHKKGARTPKVPKQGGMNWADLLPPPPAHPPPHSNSEEYNISVDESYDQEMPCPVPPARMYLQQDELEEEEDERGPTPPVRGAASSPAAVSYSHQSTATLTPSPQEELQPMLQDCPEETGHMQHQPDRRRQPVSPPPPPRPISPPHTYGYISGPLVSDMDTDAPEEEEDEADMEVAKMQTRRLLLRGLEQTPASSVGDLESSVTGSMINGWGSASEEDNISSGRSSVSSSDGSFFTDADFAQAVAAAAEYAGLKVARRQMQDAAGRRHFHASQCPRPTSPVSTDSNMSAAVMQKTRPAKKLKHQPGHLRRETYTDDLPPPPVPPPAIKSPTAQSKTQLEVRPVVVPKLPSMDARTDRSSDRKGSSYKGREVLDGRQVVDMRTNPGDPREAQEQQNDGKGRGNKAAKRDLPPAKTHLIQEDILPYCRPTFPTSNNPRDPSSSSSMSSRGSGSRQREQANVGRRNIAEMQVLGGYERGEDNNEELEETES

SEQ ID NO: 14461 - protein, 267 aa, Homo sapiens
MAQKKYLQAKLTQFLREDRIQLWKPPYTDENKKVGLALKDLAKQYSDRLECCENEVEKVIEEIRCKAIERGTGNDNYRTTGIATIEVFLPPRLKKDRKNLLETRLHITGRELRSKIAETFGLQENYIKIVINKKQLQLGKTLEEQGVAHNVKAMVLELKQSEEDARKNFQLEEEEQNEAKLKEKQIQRTKRGLEILAKRAAETVVDPEMTPYLDIANQTGRSIRIPPSERKALMLAMGYHEKGRAFLKRKEYGIALPCLLDADKYFW

SEQ ID NO: 14462 - protein, 198 aa, Homo sapiens
MAPKGSSKQQSEEDLLLQDFSRNLSAKSSALFFGNAFIVSAIPIWLYWRIWHMDLIQSAVLYSVMTLVSTYLVAFAYKNVKFVLKHKVAQKREDAVSKEVTRKLSEADNRKMSRKEKDERFDSCLKYGHHKRGILWKKNEVADYEATTFSIFYNNTLFLVVVIVASFFILKNFNPTVNYILSISASSGLIALLSTGSK

SEQ ID NO: 14463 - protein, 875 aa, Homo sapiens
MSRHHSRFERDYRVGWDRREWSVNGTHGTTSICSVTSGAGGGTASSLSVRPGLLPLPVVPSRLPTPATAPAPCTTGSSEAITSLVASSASAVTTKAPGISKGDSQSQGLATSIRWGQTPINQSTPWDTDEPPSKQMRESDNPGTGPWVTTVAAGNQPTLIAHSYGVAQPPTFSPAVNVQAPVIGVTPSLPPHVGPQLPLMPGHYSLPQPPSQPLSSVVVNMPAQALYASPQPLAVSTLPGVGQVARPGPTAVGNGHMAGPLLPPPPPAQPSATLPSGAPATNGPPTTDSAHGLQMLRTIGVGKYEFTDPGHPREMLKELNQQRRAKAFTDLKIVVEGREFEVHQNVLASCSLYFKDLIQRSVQDSGQGGREKLELVLSNLQADVLELLLEFVYTGSLVIDSANAKTLLEAASKFQFHTFCKVCVSFLEKQLTASNCLGVLAMAEAMQCSELYHMAKAFALQIFPEVAAQEEILSISKDDFIAYVSNDSLNTKAEELVYETVIKWIKKDPATRTQYAAELLAVVRLPFIHPSYLLNVVDNEELIKSSEACRDLVNEAKRYHMLPHARQEMQTPRTRPRLSAGVAEVIVLVGGRQMVGMTQRSLVAVTCWNPQNNKWYPLASLPFYDREFFSVVSAGDNIYLSGGMESGVTLADVWCYMSLLDNWNLVSRMTVPRCRHNSLVYDGKIYTLGGLGVAGNVDHVERYDTITNQWEAVAPLPKAVHSAAATVCGGKIYVFGGVNEAGRAAGVLQSYVPQTNTWSFIESPMIDNKYAPAVTLNGFVFILGGAYARATTIYDPEKGNIKAGPNMNHSRQFCSAVVLDGKIYATGGIVSSEGPALGNMEAYEPTTNTWTLLPHMPCPVFRHGCVVIKKYIQSG

SEQ ID NO: 14464 - protein, 370 aa, Homo sapiens
MEEGVPCPAPAAKLTPPVKKSQDMHDERSKLVNEYACRVLELLGMGHRLFVPRLLATSKEDLLQADFEGALKFFRVQLPKRYRAEENARRLMEQACNIKVPTKKLKKYEKEYQTMRESQLQQEDPMDRYKRENRRLQEASMRLEQENDDLAHELVTSKIALRNDLDQAEDKADVLNKELLLTKQRLVETEEEKRKQEEETAQLKEVFRKQLEKAEYEIKKTTAIIAEYKQICSQLSTRLEKQQAASKEELEVVKGKMMACKHCSDIFSKEGALKLAATGREDQGIETDDEKDSLKKQLREMELELAQTKLQLVEAKCKIQELEHQRGALMNEIQAAKNSWFSKTLNSIKTATGTQPLQPAPVTQPPKEST

SEQ ID NO: 14465 - protein, 246 aa, Homo sapiens
MGFNLTFHLSYKFRLLLLLTLCLTVVGWATSNYFVGAIQEIPKAKEFMANFHKTLILGKGKTLTNEASTKKVELDNCPSVSPYLRGQSKLIFKPDLTLEEVQAENPKVSRGRYRPQECKALQRVAILVPHRNREKHLMYLLEHLHPFLQRQQLDYGIYVIHQAEGKKFNRAKLLNVGYLEALKEENWDCFIFHDVDLVPENDFNLYKCEEHPKHLVVGRNSTGYRLRYSGYFGGVTALSREQFFKG

SEQ ID NO: 14466 - protein, 75 aa, Homo sapiens
MAEYLASIFGTEKDKVNCSFYFKIGACRHGDRCSRLHNKPTFSQTILIQNIYRNPQNSAQTADGSHYHCPLEHLP

SEQ ID NO: 14467 - protein, 184 aa, Homo sapiens
MVLLRLLVFLFAPVVSDLCSLPCFINVSESQGPGTVLQFLSFNCSSYTPTPTLELLNVQPPTTFFNPPSLARWQGTYVGKLTLSSSAQLDALMVNHYKVQLKFTCGNHVMEGSLSVDVQRDLSHIQCAGQFASPAGEMIQVPETVTPGARLYTLLLPGLELHGAQVSPEHGTVGDRMGVGGWRE

SEQ ID NO: 14468 - protein, 674 aa, Homo sapiens
MAAAGVVSGKIIYEQEGVYIHSSCGKTNDQDGLISGILRVLEKDAEVIVDWRPLDDALDSSSILYARKDSSSVVEWTQAPKERGHRGSEHLNSYEAEWDMVNTVSFKRKPHTNGDAPSHRNGKSKWSFLFSLTDLKSIKQNKEGMGWSYLVFCLKDDVVLPALHFHQGDSKLLIESLEKYVVLCESPQDKRTLLVNCQNKSLSQSFENLLDEPAYGLIQKIKKDPYTATMIGFSKVTNYIFDSLRGSDPSTHQRPPSEMADFLSDAIPGLKINQQEEPGFEVITRIDLGERPVVQRREPVSLEEWTKNIDSEGRILNVDNMKQMIFRGGLSHALRKQAWKFLLGYFPWDSTKEERTQLQKQKTDEYFRMKLQWKSISQEQEKRNSRLRDYRSLIEKDVNRTDRTNKFYEGQDNPGLILLHDILMTYCMYDFDLGYVQGMSDLLSPLLYVMENEVDAFWCFASYMDQMHQNFEEQMQGMKTQLIQLSTLLRLLDSGFCSYLESQDSGYLYFCFRWLLIRFKREFSFLDILRLWEVMWTELPCTNFHLLLCCAILESEKQQIMEKHYGFNEILKHINELSMKIDVEDILCKAEAISLQMVKCKELPQAVCEILGLQGSEVTTPDSDVGEDENVVMTPCPTSAFQSNALPTLSASGARNDSPTQIPVSSDVCRLTPA

SEQ ID NO: 14469 - protein, 427 aa, Homo sapiens
MVCWQDLEESLRMKLSLTKVVNGCRLGKIKNLGKTGDHTMDIPGCLLYTKTGSAPHLTHHTLHNIHGVPAMAQLTLSSLAEHHEVLTEYKEGVGKFIGMPESLLYCSLHDPVSPCPAGYVTNKSVSVWSVAGRVEMTVSKFMAIQKALQPDWFQCLSDGEVSCKEATSIKRVRKSVDRSLLFLDNCLRLQEESEVLQKSVIIGVIEGGDVMEERLRSARETAKRPVGGFLLDGFQGNPTTLEARLRLLSSVTAELPEDKPRLISGVSRPDEVLECIERGVDLFESFFPYQVTERGCALTFSFDYQPNPEETLLQQNGTQEEIKCMDQIKKIETTGCNQEITSFEINLKEKKYQEDFNPLVRGCSCYCCKNHTRAYIHHLLVTNELLAGVLLMMHNFEHYFGFFHYIREALKSDKLAQLKELIHRQAS

SEQ ID NO: 14470 - protein, 279 aa, Homo sapiens
MTDQAFVTLTTNDAYAKGALVLGSSLKQHRTTRRLVVLATPQVSDSMRKVLETVFDEVIMVDVLDSGDSAHLTLMKRPELGVTLTKLHCWSLTQYSKCVFMDADTLVLANIDDLFDREELSAAPDPGWPDCFNSGVFVYQPSVETYNQLLHLASEQGSFDGGDQGILNTFFSSWATTDIRKHLPFIYNLSSISIYSYLPAFKVKMSQEPYHICPLGRSQLWHSRLYPRKNGRNDGNRARLIIWEQIPLTTSRGNLTLTSSRNTAFFCEHIHFTSLVSDT

SEQ ID NO: 14471 - protein, 606 aa, Homo sapiens
MACLLETPIRMSVLSEVTASSRHYVDRLFDPDPQKVLQGVIDMKNAVIGNNKQKANLIVLGAVPRLLYLLQQETSSTELKTECAVVLGSLAMGTENNVKSLLDCHIIPALLQGLLSPDLKFIEACLRCLRTIFTSPVTPEELLYTDATVIPHLMALLSRSRYTQEYICQIFSHCCKGPDHQTILFNHGAVQNIAHLLTSLSYKVRMQALKCFSVLAFENPQVSMTLVNVLVDGELLPQIFVKMLQRDKPIEMQLTSAKCLTYMCRAGAIRTDDNCIVLKLDHDLKHAHELRQAAFKLYASLGANDEDIRKKIIETENMMDRIVTGLSESSVKVRLAAVRCLHSLSRSVQQLRTSFQDHAVWKPLMKVLQNAPDEILVVASSMLCNLLLEFSPSKEPILESGAVELLCGLTQSENPALRVNGIWALMNMAFQAEQKIKADILRSLSTEQLFRLLSDSDLNVLMKTLGLLRNLLSTRPHIDKIMSTHGKQIMQAVTLILEGEHNIEVKEQTLCILANIADGTTAKDLIMTNDDILQKIKYYMGHSHVKLQLAAMFCISNLIWNEEEGSQERQDKLRDMGIVDILHKLSQSPDSNLCDKAKMALQQYLA

SEQ ID NO: 14472 - protein, 96 aa, Homo sapiens
MSRLSARLFGEVTRPTNSKSMKVVKLFSELPLAKKKETYDWYPNHHTYAELMQTLRFLGLYRDEHQDFMDEQKRLKKLRGKEKPKKGEGKRAAKRK

SEQ ID NO: 14473 - protein, 724 aa, Homo sapiens
MTSGSVFFYILIFGKYFSHGGGQDVKCSLGYFPCGNITKCLPQLLHCNGVDDCGNQADEDNCVVGSVPVQCLCQGLELDCDETNLRAVPSVSSNVTAMSLQWNLIRKLPPDCFKNYHDLQKLYLQNNKITSISIYAFRGLNSLTKLYLSHNRITFLKPGVFEDLHRLEWLIIEDNHLSRISPPTFYGLNSLILLVLMNNVLTRLPDKPLCQHMPRLHWLDLEGNHIHNLRNLTFISCSNLTVLVMRKNKINHLNENTFAPLQKLDELDLGSNKIENLPPLIFKDLKELSQLNLSYNPIQKIQANQFDYLVKLKSLSLEGIEISNIQQRMFRPLMNLSHIYFKKFQYCGYAPHVRSCKPNTDGISSLENLLASIIQRVFVWVVSAVTCFGNIFVICMRPYIRSENKLYAMSIISLCCADCLMGIYLFVIGGFDLKFRGEYNKHAQLWMESTHCQLVGSLAILSTEVSVLLLTFLTLEKYICIVYPFRCVRPGKCRTITVLILIWITGFIVAFIPLSNKEFFKNYYGTNGVCFPLHSEDTESIGAQIYSVAIFLGINLAAFIIIVFSYGSMFYSVHQSAITATEIRNQVKKEMILAKRFFFIVFTDALCWIPIFVVKFLSLLQVEIPGTITSWVVIFILPINSALNPILYTLTTRPFKEMIHRFWYNYRQRKSMDSKGQKTYAPSFIWVEMWPLQEMPPELMKPDLFTYPCEMSLISQSTRLNSYS

SEQ ID NO: 14474 - protein, 128 aa, Homo sapiens
MAAFMLGSLLRTFKQMVPSSASGQVRSHYVDWRMWRDVKRRKMAYEYADERLRINSLRKNTILPKILQDVADEEIAALPRDSCPVRIRNRCVMTSRPRGVKRRWRLSRIVFRHLADHGQLSGIQRATW

SEQ ID NO: 14475 - protein, 218 aa, Homo sapiens
MRLLPRLLLLLLLVFPATVLFRGGPRGLLAVAQDLTEDEETVEDSIIEDEDDEAEVEEDEPTDLVEDKEEEDVSGEPEASPSADTTILFVKGEEPMGGRPFGLVINLNYKDLNGNVFQDAVFNQTVTVIEREDGLDGETIFMYMFLAGLGLLVIVGLHQLLESRKRKRPIQKVEMGTSSQNDVDMSWIPQETLNQINKASPRRLPRKRAQKRSVGSDE

SEQ ID NO: 14476 - protein, 1008 aa, Homo sapiens
MSWMFKRDPVWKYLQTVQYGVHGNFPRLSYPTFFPRFEFQDVIPPDDFLTSDEEVDSVLFGSLRGHVVGLRYYTGVVNNNEMVALQRDPNNPYDKNAIKVNNVNGNQVGHLKKELAGALAYIMDNKLAQIEGVVPFGANNAFTMPLHMTFWGKEENRKAVSDQLKKHGFKLGPAPKTLGFNLESGWGSGRAGPSYSMPVHAAVQMTTEQLKTEFDKLFEDLKEDDKTHEMEPAEAIETPLLPHQKQALAWMVSRENSKELPPFWEQRNDLYYNTITNFSEKDRPENVHGGILADDMGLGKTLTAIAVILTNFHDGRPLPIERVKKNLLKKEYNVNDDSMKLGGNNTSEKADGLSKDASRCSEQPSISDIKEKSKFRMSELSSSRPKRRKTAVQYIESSDSEEIETSELPQKMKGKLKNVQSETKGRAKGSSKVIEDVAFACALTSSVPTTKKKMLKKGACAVEGSKKTDVEERPRTTLIICPLSVLSNWIDQFGQHIKSDVHLNFYVYYGPDRIREPALLSKQDIVLTTYNILTHDYGTKGDSPLHSIRWLRVILDEGHAIRNPNAQQTKAVLDLESERRWVLTGTPIQNSLKDLWSLLSFLKLKPFIDREWWHRTIQRPVTMGDEGGLRRLQSLIKNITLRRTKTSKIKGKPVLELPERKVFIQHITLSDEERKIYQSVKNEGRATIGRYFNEGTVLAHYADVLGLLLRLRQICCHTYLLTNAVSSNGPSGNDTPEELRKKLIRKMKLILSSGSDEECAICLDSLTVPVITHCAHVFCKPCICQVIQNEQPHAKCPLCRNDIHEDNLLECPPEELARDSEKKSDMEWTSSSKINALMHALTDLRKKNPNIKSLVVSQFTTFLSLIEIPLKASGFVFTRLDGSMAQKKRVESIQCFQNTEAGSPTIMLLSLKAGGVGLNLSAASRVFLMDPAWNPAAEDQCFDRCHRLGQKQEVIITKFIVKDSVEENMLKIQNKKRELAAGAFGTKKPNADEMKQAKINEIRTLIDL

SEQ ID NO: 14477 - protein, 467 aa, Homo sapiens
MVLAFQLVSFTYIWIILKPNVCAASNIKMTHQRCSSSMKQTCKQETRMKKDDSTKARPQKYEQLLHIEDNDFAMRPGFGGSPVPVGIDVHVESIDSISETNMDFTMTFYLRHYWKDERLSFPSTANKSMTFDHRLTRKIWVPDIFFVHSKRSFIHDTTMENIMLRVHPDGNVLLSLRITVSAMCFMDFSRFPLDTQNCSLELESYAYNEDDLMLYWKHGNKSLNTEEHMSLSQFFIEDFSASSGLAFYSSTGWYNRLFINFVLRRHVFFFVLQTYFPAILMVMLSWVSFWIDRRAVPARVSLGITTVLTMSTIITAVSASMPQVSYLKAVDVYLWVSSLFVFLSVIEYAAVNYLTTVEERKQFKKTGKISRMYNIDAVQAMAFDGCYHDSEIDMDQTSLSLNSEDFMRRKSICSPSTDSSRIKRRKSLGGHVGRIILENNHVIDTYSRILFPIVYILFNLFYWGVYV

SEQ ID NO: 14478 - protein, 334 aa, Homo sapiens
MGPRARPALLLLMLLQTAVLQGRLLRSHSLHYLFMGASEQDLGLSLFEALGYVDDQLFVFYDHESRRVEPRTPWVSSRISSQMWLQLSQSLKGWDHMFTVDFWTIMENHNHSKESHTLQVILGCEMQEDNSTEGYWKYGYDGQDHLEFCPDTLDWRAAEPRAWPTKLEWERHKIRARQNRAYLERDCPAQLQQLLELGRGVLDQQVTTLRCRALNYYPQNITMKWLKDKQPMDAKEFEPKDVLPNGDGTYQGWITLAVPPGEEQRYTCQVEHPGLDQPLIVIWEPSPSGTLVIGVISGIAVFVVILFIGILFIILRKRQGSRGAMGHYVLAERE

SEQ ID NO: 14479 - protein, 25 aa, Homo sapiens [sequence omitted]

SEQ ID NO: 14480 - protein, 198 aa, Homo sapiens
MLLILLSVALLALSSAQNLNEDVSQEESPSLIAGNPQGPSPQGGNKPQGPPPPPGKPQGPPPQGGNKPQGPPPPGKPQGPPPQGDKSRSPRSPPGKPQGPPPQGGKPQGPPPQGGNKPQGPPPPGKPQGPPAQGGSKSQSARSPPGKPQGPPQQEGNNPQGPPPPAGGNPQQPQAPPAGQPQGPPRPPQGGRPSRPPQ

SEQ ID NO: 14481 - protein, 276 aa, Homo sapiens
MGARGAPSRRRQAGRRLRYLPTGSFPFLLLLLLLCIQLGGGQKKKENLLAEKVEQLMEWSSRRSIFRMNGDKFRKFIKAPPRNYSMIVMFTALQPQRQCSVCRQANEEYQILANSWRYSSAFCNKLFFSMVDYDEGTDVFQQLNMNSAPTFMHFPPKGRPKRADTFDLQRIGFAAEQLAKWIADRTDVHIRVFRPPNYSGTIALALLVSLVGGLLYLRRNNLEFIYNKTGWAMVSLCIVFAMTSGQMWNHIRGPPYAHKNPHNGQVMPLSPWGWFF

SEQ ID NO: 14482 - protein, 100 aa, Homo sapiens
MGPEALSSLLLLLLVASGDADMKGHFDPAKCRYALGMQDRTIPDSDISASSSWSDSTAARHSRLESSDGDGAWCPAGSVFPKEEEYLQVDLQRLHLVALV

SEQ ID NO: 14483 - protein, 950 aa, Homo sapiens
MVFSRRGGLGARDLLLWLLLLAAWEVGSGQLHYSIPEEAKHGTFVGRVAQDLGLELAELVPRLFRVASKTHRDLLEVNLQNGILFVNSRIDREELCQWSAECSIHLELIADRPLQVFHVEVKVKDINDNPPVFRGREQIIFIPESRLLNSRFPIEGAADADIGANALLTYTLSPSDYFSLDVEASDELSKSLWLELRKYLDREETPELHLLLTATDGGKPELQGTVELLITVLDVNDNAPLFDQAVYRVHLLETTANGTLVTTLNASDADEGVNGEVVFSFDSGISRDIQEKFKVDSSSGEIRLIDKLDYEETKSYEIQVKAVDKGSPPMSNHCKVLVKVLDVNDNAPELAVTSLYLPIREDAPLSTVIALITVSDRDSGANGQVTCSLMPHVPFKLVSTFKNYYSLVLDSALDRESLSVYELVVTARDGGSPSLWATARVSVEVADVNDNAPAFAQPEYTVFVKENNPPGCHIFTVSARDADAQENALVSYSLVERRVGERALSNYVSVHAESGKVYALQPLDHEELELLQFQVSARDAGVPPLGSNVTLQVFVLDENDNAPALLAPRVGGTIGAVSELVPRLVGAGHVVAKVRAVDADSGYNAWLSYELQPAAGGARIPFRVGLYTGEISTTRVLDEADLSRYRLLVLVKDHGEPALTATATVLVSLVESGQAPKASSRASVGVAGPEAALVDVNVYLIIAICAVSSLLVLTLLLYTALRCSVPPTEGAYVPGKPTLVCSSALGSWSNSQQRRQRVCSSEGPPKTDLMAFSPGLSPSLNTSERNEQPEANLDLSGNPRQPNPDWRYSASLRAGMHSSVHLEEAGILRAGPGGPDQQWPTVSSATPEPEAGEVSPPVGAGVNSNSWTFKYGPGNPKQSGPGELPDKFIIPGSPAIISIRQEPTNSQIDKSDFITFGKKEETKKKKKKKKGNKTQEKKEKGNSTTDNSDQ

SEQ ID NO: 14484 - protein, 25 aa, Homo sapiens
MAGRVPSLLVLLVFPSSCLAFRSPL

SEQ ID NO: 14485 - protein, 138 aa, Homo sapiens
MAGQRVLLLVGFLLPGVLLSEAAKILTISTVGGSHYLLMDRVSQILQDHGHNVTMLNHKRGPFMPDFKKEEKSYQVISWLAPEDHQREFKKSFDFFLEETLGGRGKFENLLNVLEYLALQCSHFLNRKDIMDSLKNEN

SEQ ID NO: 14486 - protein, 407 aa, Homo sapiens
MRWVWALLKNASLAGAPKYIEHFSKFSPSPLSMKQFLDFGSSNACEKTSFTFLRQELPVRLANIMKEINLLPDRVLSTPSVQLVQSWYVQSLLDIMEFLDKDPEDHRTLSQFTDALVTIRNRHNDVVPTMAQGVLEYKDTYGDDPVSNQNIQYFLDRFYLSRISIRMLINQHTLIFDGSTNPAHPKHIGSIDPNCNVSEVVKDAYDMAKLLCDKYYMASPDLEIQEINAANSKQPIHMVYVPSHLYHMLFELFKNAMRATVESHESSLILPPIKVMVALGEEDLSIKMSDRGGGVPLRKIERLFSYMYSTAPTPQPGTGGTPLAGFGYGLPISRLYAKYFQGDLQLFSMEGFGTDAVIYLKALSTDSVERLPVYNKSAWRHYQTIQEAGDWCVPSTEPKNTSTYRVS

SEQ ID NO: 14487 - protein, 122 aa, Homo sapiens
MLKVSAVLCVCAAAWCSQSLAAAAAVAAAGGRSDGGNFLDDKQWLTTISQYDKEVGQWNKFRDEVEDDYFRTWSPGKPFDQALDPAKDPCLKMKCSRHKVCIAQDSQTAVCISHRRLTHSAN

SEQ ID NO: 14488 - protein, 1580 aa, Homo sapiens
MWPSQLLIFMMLLAPIIHGGKHSERHPALAAPLRHAERSPGGALPPRHLLQQPAAERTAAHRGQGPRGATRGVRGPGAQGAQIAAQAFSRAPIPMAVVRRELSCESYPIELRCPGTDVIMIESANYGRTDDKICDSDPAQMENIRCYLPDAYKIMSQRCNNRTQCAVVAGPDVFPDPCPGTYKYLEVQYECVPYKVEQKVFLCPGLLKGVYQSEHLFESDHQSGAWCKDPLQASDKIYYMPWTPYRTDTLTEYSSKDDFIAGRPTTTYKLPHRVDGTGFVVYDGALFFNKERTRNIVKFDLRTRIKSGEAIIANANYHDTSPYRWGGKSDIDLAVDENGLWVIYATEQNNGKIVISQLNPYTLRIEGTWDTAYDKRSASNAFMICGILYVVKSVYEDDDNEATGNKIDYIYNTDQSKDSLVDVPFPNSYQYIAAVDYNPRDNLLYVWNNYHVVKYSLDFGPLDSRSGQAHHGQVSYISPPIHLDSELERPSVKDISTTGPLGMGSTTTSTTLRTTTLSPGRSTTPSVSGRRNRSTSTPSPAVEVLDDMTTHLPSASSQIPALEESCEAVEAREIMWFKTRQGQIAKQPCPAGTIGVSTYLCLAPDGIWDPQGPDLSNCSSPWVNHITQKLKSGETAANIARELAEQTRNHLNAGDITYSVRAMDQLVGLLDVQLRNLTPGGKDSAARSLNKLQKRERSCRAYVQAMVETVNNLLQPQALNAWRDLTTSDQLRAATMLLHTVEESAFVLADNLLKTDIVRENTDNIKLEVARLSTEGNLEDLKFPENMGHGSTIQLSANTLKQNGRNGEIRVAFVLYNNLGPYLSTENASMKLGTEALSTNHSVIVNSPVITAAINKEFSNKVYLADPVVFTVKHIKQSEENFNPNCSFWSYSKRTMTGYWSTQGCRLLTTNKTHTTCSCNHLTNFAVLMAHVEVKHSDAVHDLLLDVITWVGILLSLVCLLICIFTFCFFRGLQSDRNTIHKNLCISLFVAELLFLIGINRTDQPIACAVFAALLHFFFLAAFTWMFLEGVQLYIMLVEVFESEHSRRKYFYLVGYGMPALIVAVSAAVDYRSYGTDKVCWLRLDTYFIWSFIGPATLIIMLNVIFLGIALYKMFHHTAILKPESGCLDNINYEDNRPFIKSWVIGAIALLCLLGLTWAFGLMYINESTVIMAYLFTIFNSLQGMFIFIFHCVLQKKVRKEYGKCLRTHCCSGKSTESSIGSGKTSGSRTPGRYSTGSQSRIRRMWNDTVRKQSESSFITGDINSSASLNRGAMANHLISNALLRPHGTNNPYNTLLGEPAVCNNPSVSMYNAQEGLLNNARDTSVMDTLPLNGNHGNSYSIASGEYLSNCVQIIDRGYNHNETALEKKILKELTSNYIPSYLNNHERSSEQNRNLMNKLVNNLGSGREDDAIVLDDATSFNHEESLGLELIHEESDAPLLPPRVYSTENHQPHHYTRRRIPQDHSESFFPLLTNEHTEDLQSPHRDSLYTSMPTLAGVAATESVTTSTQTEPPPAKCGDAEDVYYKSMPNLGSRNHVHQLHTYYQLGRGSSDGFIVPPNKDGTPPEGSSKGPAHLVTSL

SEQ ID NO: 14489 - protein, 381 aa, Homo sapiens
MWRSLGLALALCLLPSGGTESQDQSSLCKQPPAWSIRDQDPMLNSNGSVTVVALLQASUYLCILQASKLEDLRVKLKKEGYSNISYIVVNHQGISSRLKYTHLKNKVSEHIPVYQQEENQTDVWTLLNGSKDDFLIYDRCGRLVYHLGLPFSFLTFPYVEEAIKIAYCEKKCGNCSLTTLKDEDFCKRVSLATVDKTVETPSPHYHHEHHHNHGHQHLGSSELSENQQPGAPNAPTHPAPPGLHHHHKHKGQHRQGHPENRDMPASEDLQDLQKKLCRKRCINQLLCKLPTDSELAPRSUCCHCRHLIFEKTGSAITUQCKENLPSLCSUQGLRAEENITESCQURLPPAAUQISQQLIPTEASASURUKNQAKKUEUPSN

SEQ ID NO: 14490 - protein, 103 aa, Homo sapiens
MLGIWTLLPLVLTSVARLSSKSVNAQVTDINSKGLELRKTVTTVETQNLEGLHHDGQFCHKPCPPDVNMESSRNAHSPATPSAKRKDPDLTWGGFVFFFCQFH

SEQ ID NO: 14491 - protein, 181 aa, Homo sapiens
MNALLLSAWFGHLRILQILVNSGAKIHCESKDGLTLLHCAAQKGHVPVLAFIMEDLEDVALDHVDKLGRTAFHRAAEHGQLDALDFLVGSGCDHNVKDKEGNTALHLAAGRGHMAVLQRLVDIGLDLEEQNAEGLTALHSAAGGSHPDCVQLLLRAGSTVNALTQVARPSQDCGRLLAAEP

SEQ ID NO: 14492 - protein, 616 aa, Homo sapiens
MEPPGRRRGRAQPPLLLPLSLLALLALLGGGGGGGAAALPAGCKHDGRPRGAGRAAGAAEGKVVCSSLELAQVLPPDTLPNRTVTLILSNNKISELKNGSFSGLSLLERLDLRNNLISSIDPGAFWGLSSLKRLDLTNNRIGCLNADIFRGLTNLVRLNLSGNLFSSLSQGTFDYLASLRSLEFQTEYLLCDCNILWMHRWVKEKNITVRDTRCVYPKSLQAQPVTGVKQELLTCDPPLELPSFYMTPSHRQVVFEGDSLPFQCMASYIDQDMQVLWYQDGRIVETDESQGIFVEKNMIHNCSLIASALTISNIQAGSTGNWGCHVQTKRGNNTRTVDIVVLESSAQYCPPERVVNNKGDFRWPRTLAGITAYLQCTRNTHGSGIYPGNPQDERKAWRRCDRGGFWADDDYSRCQYANDVTRVLYMFNQMPLNLTNAVATARQLLAYTVEAANFSDKMDVIFVAEMIEKFGRFTKEEKSKELGDVMVDIASNIMLADERVLWLAQREAKACSRIVQCLQRIATYRLAGGAHVYSTYSPNIALEAYVIKSTGFTGMTCTVFQKVAASDRTGLSDYGRRDPEGNLDKQLSFKCNVSNTFSSLALKVCYILQSFKTIYS

SEQ ID NO: 14493 - protein, 685 aa, Homo sapiens
MVSRCSCLGVQCLLLSLLLLAAWEVGSGQLHYSVYEEARHGTFVGRIAQDLGLELAELVQRLFRVASKRHGDLLEVNLQNGILFVNSRIDREELCGRSVECSIHLEVIVDRPLQVFHVDVEVKDINDNPPRFSVTEQKLSIPESRLLDSRFPLEGASDADVGENALLTYKLSPNEYFVLDIINKKDKDKFPVLVLRKLLDREENPQLKLLLTATDGGKPEFTGSVSLLILVLDANDNAPIFDRPVYEVKMYENQVNQTLVIRLNASDSDEGINKEMMYSFSSLVPPTIRRKFWINERTGEIKVNDAIDFEDSNTYEIHVDVTDKGNPPMVGHCTVLVELLDENDNSPEVIVTSLSLPVKEDAQVGTVIALISVSDHDSGANGQVTCSLTPHVPFKLVSTYKNYYSLVLDSALDRERVSAYELVVTARDGGSPPLWATASVSVEVADVNDNAPAFAQSEYTVFVKENNPPGCHIFTVSAWDADAQENALVSYSLVERRLGERSLSSYVSVHAESGKVYALQPLDHEELELLQFQPRQPNPDWRYSASLRAGMHSSVHLEEAGILRAGPGGPDQQWPTVSSATPEPEAGEVSPPVGAGVNSNSWTFKYGPGNPKQSGPGELPDKFIIPGSPAIISIRQEPTNSQIDKSDFITFGKKEETKKKKKKKKGNKTQEKKEKGNSTTDNSDQ

SEQ ID NO: 14494 - protein, 1817 aa, Homo sapiens
MRTGWATPRRPAGLLMLLFWFFDLAEPSGRAANDPFTIVHGNTGKCIKPVYGWIVADDCDETEDKLWKWVSQHRLFHLHSQKCLGLDITKSVNELRMFSCDSSAMLWWKCEHHSLYGAARYRLALKDGHGTAISNASDVWKKGGSEESLCDQPYHEIYTRDGNSYGRPCEFPFLIDGTWHHDCILDEDHSGPWCATTLNYEYDRKWGICLKPENGCEDNWEKNEQFGSCYQFNTQTALSWKEAYVSCQNQGADLLSINSAAELTYLKEKEGIAKIFWIGLNQLYSARGWEWSDHKPLNFLNWDPDRPSAPTIGGSSCARMDAESGLWQSFSCEAQLPYVCRKPLNNTVELTDVWTYSDTRCDAGWLPNNGFCYLLVNESNSWDKAHAKCKAFSSDLISIHSLADVEVVVTKLHNEDIKEEVWIGLKNINIPTLFQWSDGTEVTLTYWDENEPNVPYNKTPNCVSYLGELGQWKVQSCEEKLKYVCKRKGEKLNDASSDKMCPPDEGWKRHGETCYKIYEDEVPFGTNCNLTITSRFEQEYLNDLMKKYDKSLRKYFWTGLRDVDSCGEYNWATVGGRRRAVTFSNWNFLEPASPGGCVAMSTGKSVGKWEVKDCRSFKALSICKKMSGPLGPEEASPKPDDPCPEGWQSFPASLSCYKVFHAERIVRKRNWEEAERFCQALGAHLSSFSHVDEIKEFLHFLTDQFSGQHWLWIGLNKRSPDLQGSWQWSDRTPVSTIIMPNEFQQDYDIRDCAAVKVFHRPWRRGWHFYDDREFIYLRPFACDTKLEWVCQIPKGRTPKTPDWYNPDRAGIHGPPLIIEGSEYWFVADLHLNYEEAVLYCASNHSFLATITSFVGLKAIKNKIANISGDGQKWWIRISEWPIDDHFTYSRYPWHRFPVTFGEECLYMSAKTWLIDLGKPTDCSTKLPFICEKYNVSSLEKYSPDSAAKVQCSEQWIPFQNKCFLKIKPVSLTFSQASDTCHSYGGTLPSVLSQIEQDFITSLLPDMEATLWIGLRWTAYEKINKWTDNRELTYSNFHPLLVSGRLRIPENFFEEESRYHCALILNLQKSPFTGTWNFTSCSERHFVSLCQKYSEVKSRQTLQNASETVKYLNNLYKIIPKTLTWHSAKRECLKSNMQLVSITDPYQQAFLSVQALLHNSSLWIGLFSQDDELNFGWSDGKRLHFSRWAETNGQLEDCVVLDTDGFWKTVDCNDNQPGAICYYSGNETEKEVKPVDSVKCPSPVLNTPWIPFQNCCYNFIITKNRHMATTQDEVHTKCQKLNPKSHILSIRDEKENNFVLEQLLYFNYMASWVMLGITYRNKSLMWFDKTPLSYTHWRAGRPTIKNEKFLAGLSTDGFWDIQTFKVIEEAVYFHQHSILACKIEMVDYKEEYNTTLPQFMPYEDGIYSVIQKKVTWYEALNMCSQSGGHLASVHNQNGQLFLEDIVKRDGFPLWVGLSSHDGSESSFEWSDGSTFDYIPWKGQTSPGNCVLLDPKGTWKHEKCNSVKDGAICYKPTKSKKLSRLTYSSRCPAAKENGSRWIQYKGHCYKSDQALHSFSEAKKLCSKHDHSATIVSIKDEDENKFVSRLMRENNNITMRVWLGLSQHSVDCPSSTWIQFQDSCYIFLQEAIKVESIEDVRNQCTDHGADMISIHNEEENAFILDTLKKQWKGPDDILLGMFYDTDDASFKWFDNSNMTFDKWTDQDDDEDLVDTCAFLHIKTGEWKKGNCEVSSVEGTLCKTAIPYKRKYLSDNHILISALVIASTVILTVLGAIIWFLYKKHSDSRFTTVFSTAPQSPYNEDCVLVVGEENEYPVQFD

SEQ ID NO: 14495 - protein, 380 aa, Homo sapiens
MLLRSKPALPPPLMLLLLGPLGPLSPGALPRPAQAQDVVDLDFFTQEPLHLVSPSFLSVTIDANLATDPRFLILLGSPKLRTLARGLSPAYLRFGGTKTDFLIFDPKKESTFEERSYWQSQVNQDICKYGSIPPDVEEKLRLEWPYQEQLLLREHYQKKFKNSTYSRSSVDVLYTFANCSGLDLIFGLNALLRTADLQWNSSNAQLLLDYCSSKGYNISWELGNEPNSFLKKADIFINGSQLGEDFIQLHKLLRKSTFKNAKLYGPDVGQPRRKTAKMLKSFLKAGGEVIDSVTWHHYYLNGRTATKEDFLNPDVLDIFISSVQKVFQVVESTRPGKKVWLGETSSAYGGGAPLLSDTFAAGFMIIGYLFCSRNWWAPRC

SEQ ID NO: 14496 - protein, 46 aa, Homo sapiens
MKFLLTTAFLILISLWVEEAYSKEKSSKKGKGKKKQYLCPSERLYH

SEQ ID NO: 14497 - protein, 755 aa, Homo sapiens
MIRGRNSATSADEQPHIGNYRLLKTIGKGNFAKVKLARHILTGKEVAVKIIDKTQLNSSSLQKLFREVRIMKVLNHPNIVKLFEVIETEKTLYLVMEYASGGEVFDYLVAHGRMKEKEARAKFRQIVSAVQYCHQKFIVHRDLKAENLLLDADMNIKIADFGFSNEFTFGNKLDTFCGSPPYAAPELFQGKKYDGPEVDVWSLGVILYTLVSGSLPFDGQNLKELRERVLRGKYRIPFYMSTDCENLLKKFLILNPSKRGTLEQIMKDRWMNVGHEDDELKPYVEPLPDYKDPRRTELMVSMGYTREEIQDSLVGQRYNEVMATYLLLGYKSSELEGDTITLKPRPSADLTNSSAPSPSHKVQRSVSANPKQRRFSDQAAGPAIPTSNSYSKKTQSNNAENKRPEEDRESGRKASSTAKVPASPLPGLERKKTTPTPSTNSVLSTSTNRSRNSPLLERASLGQASIQNGKDSLTMPGSRASTASASAAVSAARPRQHQKSMSASVHPNKASGLPPTESNCEVPRPSTAPQRVPVASPSAHNISSSGGAPDRTNFPRGVSSRSTFHAGQLRQVRDQQNLPYGVTPASPSGHSQGRRGASGSIFSKFTSKFVRRNLSFRFARRNLNEPESKDRVETLRPHVVGSGGNDKEKEEFREAKPRSLRFTWSMKTTSSMEPNEMMREIRKVLDANSCQSELHEKYMLLCMHGTPGHEDFVQWEMEVCKLPRLSLNGVRFKRISGTSMAFKNIASKIANELKL

SEQ ID NO: 14498 - protein, 252 aa, Homo sapiens
MAATAREDGASGQERGQRGCEHYDRGCLLKAPCCDKLYTCRLCHDNNEDHQLDRFKVKEVQCINCEKIQHAQQTCEECSTLFGEYYCDICHLFDKDKKQYHCENCGICRIGPKEDFFHCLKCNLCLAMNLQGRHKCIENVSRQNCPICLEDIHTSRVVAHVLPCGHLLHRGYRCPLCMHSALDMTRYWRQLDDEVAQTPMPSEYQNMTVDILCNDCNGRSTVQFHILGMKCKICESYNTAQAGGRRISLDQQ

SEQ ID NO: 14499 - protein, 308 aa, Homo sapiens
MEGKWLLCMLLVLGTAIVEAHDGHDDDVIDIEDDLDDVIEEVEEMKESKLPGDKGLVLMSRAKHHAISAKLNKPFLFDTKPLIVQYEVNFQNGIECGGAYVKLLSKTPELNLDQFHDKTPYTIMFGPDKCGEDYKLHFIFRHKNPKTGIYEEKHAKRPDADLKTYFTDKKTHLYTLILNPDNSFEILVDQSVVNSGNLLNDMTPPVNPSREIEDPEDRKPEDWDERPKIPDPEAVKPDDWDEDAPAKIPDEEATKPEGWLDDEPEYVPDPDAEKPEDWDEDMDGEWEAPQIANPRCESAPGCGVWQRP

SEQ ID NO: 14500 - protein, 54 aa, Homo sapiens
MSMKWTSALLLIQLSCYFSSGSCGKVLVWPTEFSHWMNIKTILDELVQRGHEVT

SEQ ID NO: 14501 - protein, 41 aa, Homo sapiens
MKLSGMFLLLSLALFCFLTGVFSQGGQVDCGEFQDPKVYCT

SEQ ID NO: 14502 - protein, 111 aa, Homo sapiens
MFSTKALLLAGLISTALAGPWANICAGKSSNEIRTCDRHGCGQYSAQRSQRPHQGVDILCSAGSTVYAPFTGMIVGQEKPYQNKNAINNGVRISGRGKRGGVYTWGASWRC

SEQ ID NO: 14503 - protein, 63 aa, Homo sapiens
MHSDAAAVSFTGSMVLASAWLLESLTIVEEGEWRAGTPHGESRSEREKGFSAELSSLNTGKYS

SEQ ID NO: 14504 - protein, 693 aa, Homo sapiens
MEGPHLPNKKKHKKQAVKTEPEKKSQSTKLSVVHEKKSQEGKPKEHTEPKSLPKQASDTGSNDAHNKKAVSRSAEQQPSEKSTEPKTKPQDMISAGGESVAGITAISGKPGDKKKEKKSLTPAVPVESKPDKPSGKSGMDAALDDLIDTLGGPEETEEENTTYTGPEVSDPMSSTYIEELGKREVTIPPKYRELLAKKEGITGPPADSSKPIGPDDAIDALSSDFTCGSPTAAGKKTEKEESTEVLKAQSAGTVRSAAPPQEKKRKVEKDTMSDQALEALSASLGTRQAEPELDLRSIKEVDEAKAKEEKLEKCGEDDETIPSEYRLKPATDKDGKPLLPEPEEKPKPRSESELIDELSEDFDRSECKEKPSKPTEKTEESKAAAPAPVSEAVCRTSMCSIQSAPPEPATLKGTVPDDAVEALADSLGKKEADPEDGKPVMDKVKEKAKEEDREKLGEKEETIPPDYRLEEVKDKDGKPLLPKESKEQLPPMSEDFLLDALSEDFSGPQNASSLKFEDAKLAAAISEVVSQTPASTTQAGAPPRDTSSDKDLDDALDKLSDSLGQRQPDPDENKPMEDKVKEKAKAEHRDKLGERDDTIPPEYRHLLDDNGQDKPVKPPTKKSEDSKKPADDQDPIDALSGDLDSCPSTTETSQNTAKDKCKKAASSSKAPKNGGKAKDSAKTTEETSKPKDD

SEQ ID NO: 14505 - protein, 644 aa, Homo sapiens
MEVQLGLGRVYPRPPSKTYRGAFQNLFQSVREVIQNPGPRHPEAASAAPPGASLLLLQQQQQQQQQQQQQQQQQQQQQQQETSPRQQQQQQGEDGSPQAHRRGPTGYLVLDEEQQPSQPQSALECHPERGCVPEPGAAVAASKGLPQQLPAPPDEDDSAAPSTLSLLGPTFPGLSSCSADLKDILSEASTMQLLQQQQQEAVSEGSSSGRAREASGAPTSSKDNYLGGTSTISDNAKELCKAVSVSMGLGVEALEHLSPGEQLRGDCMYAPLLGVPPAVRPTPCAPLAECKGSLLDDSAGKSTEDTAEYSPFKGGYTKGLEGESLGCSGSAAAGSSGTLELPSTLSLYKSGALDEAAAYQSRDYYNFPLALAGPPPPPPPPHPHARIKLENPLDYGSAWAAAAAQCRYGDLASLHGAGAAGPGSGSPSAAASSSWHTLFTAEEGQLYGPCGGGGGGGGGGGGGGGGGGGGGGGEAGAVAPYGYTRPPQGLAGQESDFTAPDVWYPGGMVSRVPYPSPTCVKSEMGPWMDSYSGPYGDMRLETARDHVLPIDYYFPPQKTCLICGDEASGCHYGALTCGSCKVFFKRAAEGKQKYLCASRNDCTIDKFRRKNCPSCRLRKCYEAGMTLGEKFRVGNCKHLKMTRP

SEQ ID NO: 14506 - protein, 354 aa, Homo sapiens
MQLTRCCFVFLVQGSLYLVICGQDDGPPGSEDPERDDHEGQPRPRVPRKRGHISPKSRPMANSTLLGLLAPPGEAWGILGQPPNRPNHSPPPSAKVKKIFGWGDFYSNIKTVALNLLVTGKIVDHGNGTFSVHFQHNATGQGNISISLVPPSKAVEFHQEQQIFIEAKASKIFNCRMEWEKVERGRRTSLCTHDPAKICSRDHAQSSATWSCSQPFKVVCVYIAFYSTDYRLVQKGPSLLSGDVRHTPLLQTTLRSPPWRLETAGTGAAHQWTPTVCRSASHSAVETAGRRRKQWGQRPWAPSPPPLAELSAGTGGTLTPLLLLSSCGEPDAGDSWRARPSWHTVLPAPGMDSF

SEQ ID NO: 14507 - protein, 544 aa, Homo sapiens
MNTSIPYQQNPYNPRGSSNVIQCYRCGDTCKGEVVRVHNNHFHIRCFTCQVCGCGLAQSGFFFKNQEYICTQDYQQLYGTRCDSCRDFITGEVISALGRTYHPKCFVCSLCRKPFPIGDKVTFSGKECVCQTCSQSMASSKPIKIRGPSHCAGCKEEIKHGQSLLALDKQWHVSCFKCQTCSVILTGEYISKDGVPYCESDYHAQFGIKCETCDRYISGRVLEAGGKHYHPTCARCVRCHQMFTEGEEMYLTGSEVWHPICKQAARAEKKLKHRRTSETSISPPGSSIGSPNRVICDIYENLDLRQRRASSPGYIDSPTYSRQGMSPTFSRSPHHYYRSGDLSTATKSKTSEDISQTSKYSPIYSPDPYYASESEYWTYHGSPKVPRARRFSSGGEEDDFDRSMHKLQSGIGRLILKEEMKARSSSYADPWTPPRSSTSSREALHTAGYEMSLNGSPRSHYLADSDPLISKSASLPAYRRNGLHRTPSADLFHYDSMNAVNWGMREYKIYPYELLLVTTRGRNRLPKDVDRTRLEGNFWKSGCL

SEQ ID NO: 14508 - protein, 132 aa, Homo sapiens
MGPEALSSLLLLLLVASGDADMKGHFDPAKCRYALGMQDRTIPDSDISASSSWSDSTAARHSRLESSDGDGAWCPAGSVFPKEEEYLQVDLQRLHLVALVGTQGRHAGGLGKEFSRSYRLRYSRDGRRWMGW

SEQ ID NO: 14509 - protein, 516 aa, Homo sapiens
MAENLKRLVSNETLRTLQEKLDFWLKEYNTNTCDQNLNHCLELIEQVAKVQGQLFGILTAAAQEGGRNDGVETIKSRLLPWLEASFTAASLGKSVDSKVPSLQDTFDRERHKDPSPRDRDMQQLDSNLNSTRSQCNQVQDDLVETEKNLEESKNRSAISLLAAEEEINQLKKQLKSLQAQEDARHRNTDQRSSENRRSEPWSLEERKREQWNSLKQNADQQDTEAMSDYKKQLRNLKEEIAVLSAEKSALQGRSSRSRSPSPAPRSRSCSRSRSASPSTAVKVRRPSPNRSKLSNVARKAALLSRFSDSYSQARLDAQCLLRRCIDKAETVQRIIYIATVEAFHVAKMAFRHFKIHVRKSLTPSYVGSNDFENAVLDYVICHLDLYDSQSSVNDVIRAMNVNPKISFPPVVDFCLLSDFIQEICCIAFAMQALEPPLDIAYGADGEVFNDCKYRRSYDSDFTAPLVLYHVWPALMENDCVIMKGEAVTRRGAFVRWPCIVTIHPKCLIHNGIRCDL

SEQ ID NO: 14510 - protein, 261 aa, Homo sapiens
MTILGTTFGMVFSLLQVVSGESGYAQNGDLEDAELDDYSFSCYSQLEVNGSQHSLTCAFEDPDVNITNLEFEICGALVEVKCLNFRKLQEIYFIETKKFLLIGKSNICVKVGEKSLTCKKIDLTTIVKPEAPFDLSVVYREGANDFVVTFNTSHLQKKYVKVLMHDVAYRQEKDENKWTHVNLSSTKLTLLQRKLQPAAMYEIKVRSIPDHYFKGFWSEWSPSYYFRTPEINNSSGLSLSYGPVSPIIRRLWNIFVRNQEK

SEQ ID NO: 14511 - protein, 3062 aa, Homo sapiens
MRSRLPPALAALGAALLLSSIEAEVDPPSDLNFKIIDENTVHMSWAKPVDPIVGYRITVDPTTDGPTKEFTLSASTTETLLSELVPETEYVVTITSYDEVEESVPVIGQLTIQTGSSTKPVEKKPGKTEIQKCSVSAWTDLVFLVDGSWSVGRNNFKYILDFIAALVSAFDIGEEKTRVGVVQYSSDTRTEFNLNQYYQRDELLAAIKKIPYKGGNTMTGDAIDYLVKNTFTESAGARVGFPKVAIIITDGKSQDEVEIPARELRNVGVEVFSLGIKAADAKELKQIASTPSLNHVFNVANFDAIVDIQNEIISQVCSGVDEQLGELVSGEEVVEPPSNLIAMEVSSKYVKLNWNPSPSPVTGYKVILTPMTAGSRQHALSVGPQTTTLSVRDLSADTEYQISVSAMKGMTSSEPISIMEKTQPMKVQVECSRGVDIKADIVFLVDGSYSIGIANFVKVRAFLEVLVKSFEISPNRVQISLVQYSRDPHTEFTLKKFTKVEDIIEAINTFPYRGGSTNTGKAMTYVREKIFVPSKGSRSNVPKVMILITDGKSSDAFRDPAIKLRNSDVEIFAVGVKDAVRSELEAIASPPAETHVFTVEDFDAFQRISFELTQSICLRIEQELAAIKKKAYVPPKDLSFSEVTSYGFKTNWSPAGENVFSYHITYKEAAGDDEVTVVEPASSTSVVLSSLKPETLYLVNVTAEYEDGFSIPLAGEETTEEVKGAPRNLKVTDETTDSFKITWTQAPGRVLRYRIIYRPVAGGESREVTTPPNQRRRTLENLIPDTKYEVSVIPEYFSGPGTPLTGNAATEEVRGNPRDLRVSDPTTSTMKLSWSGAPGKVKQYLVTYTPVAGGETQEVTVRGDTTNTVLQGLKEGTQYALSVTALYASGAGDALFGEGTTLEERGSPQDLVTKDITDTSIGAYWTSAPGMVRGYRVSWKSLYDDVDTGEKNLPEDAIHTMIENLQPETKYRISVFATYSSGEGEPLTGDATTELSQDSKTLKVDEETENTMRVTWKPAPGKVVNYRVVYRPHGRGKQMVAKVPPTVTSTVLKRLQPQTTYDITVLPIYKMGEGKLRQGSGTTASRFKSPRNLKTSDPTMSSFRVTWEPAPGEVKGYKVTFHPTGDDRRLGELVVGPYDNTVVLEELRAGTTYKVNVFGMFDGGESSPLVGQEMTTLSDTTVMPILSSGMECLTRAEADIVLLVDGSWSIGRANFRTVRSFISRIVEVFDIGPKRVQIALAQYSGDPRTEWQLNAHRDKKSLLQAVANLPYKGGNTLTGMALNFIRQQNFRTQAGMRPRARKIGVLITDGKSQDDVEAPSKKLKDEGVELFAIGIKNADEVELKMIATDPDDTHAYNVADFESLSRIVDDLTINLCNSVKGPGDLEAPSNLVISERTHRSFRVSWTPPSDSVDRYKVEYYPVSGGKRQEFYVSRMETSTVLKDLKPETEYVVNVYSVVEDEYSEPLKGTEKTLPVPVVSLNIYDVGPTTMHVQWQPVGGATGYILSYKPVKDTEPTRPKEVRLGPTVNDMQLTDLVPNTEYAVTVQAVLHDLTSEPVTVREVTLPLPRPQDLKLRDVTHSTMNVFWEPVPGKVRKYIVRYKTPEEDVKEVEVDRSETSTSLKDLFSQTLYTVSVSAVHDEGESPPVTAQETTRPVPAPTNLKITEVTSEGFRGTWDHGASDVSLYRITWAPFGSSDKMETILNGDENTLVFENLNPNTIYEVSITAIYPDESESDDLIGSERTLPILTTQAPKSGPRNLQVYNATSNSLTVKWDPASGRVQKYRITYQPSTGEGNEQTTTIGGRQNSVVLQKLKPDTPYTITVSSLYPDGEGGRMTGRGKTKPLNTVRNLRVYDPSTSTLNVRWDHAEGNPRQYKLFYAPAAGGPEELVPIPGNTNYAILRNLQPDTSYTVTVVPVYTEGDGGRTSDTGRTLMRGLARNVQVYNPTPNSLDVRWDPAPGPVLQYRVVYSPVDGTRPSESIVVPGNTRMVHLERLIPDTLYSVNLVALYSDGEGNPSPAQGRTLPRSGPRNLRVFGETTNSLSVAWDHADGPVQQYRIIYSPTVGDPIDEYTTVPGRRNNVILQPLQPDTPYKITVIAVYEDGDGGHLTGNGRTVGLLPPQNIHISDEWYTRFRVSWDPSPSPVLGYKIVYKPVGSNEPMEAFVGEMTSYTLHNLNPSTTYDVNVYAQYDSGLSVPLTDQGTTLYLNVTDLKTYQIGWDTFCVKWSPHRAATSYRLKLSPADGTRGQEITVRGSETSHCFTGLSPDTDYGVTVFVQTPNLEGPGVSVKEHTTVKPTEAPTEPPTPPPPPTIPPARDVCKGAKADIVFLTDASWSIGDDNFNKVVKFIFNTVGGFDEISPAGIQVSFVQYSDEVKSEFKLNTYNDKALALGALQNIRYRGGNTRTGKALTFIKEKVLTWESGMRKNVPKVLVVVTDGRSQDEVKKAALVIQQSGFSVFVVGVADVDYNELANIASKPSERHVFIVDDFESFEKIEDNLITFVCETATSSCPLIYLDGYTSPGFKMLEAYNLTEKNFASVQGVSLESGSFPSYSAYRIQKNAFVNQPTADLHPNGLPPSYTIILLFRLLPETPSDPFAIWQITDRDYKPQVGVIADPSSKTLSFFNKDTRGEVQTVTFDTEEVKTLFYGSFHKVHIVVTSKSVKIYIDCYEIIEKDIKEAGNITTDGYEILGKLLKGERKSAAFQIQSFDIVCSPVWTSRDRCCDIPSRRDEGKCPAFPNSCTCTQDSVGPPGPPGPAGGPGAKGPRGERGISGAIGPPGPRGDIGPPGPQGPPGPQGPNGLSIPGEQGRQGMKGDAGEPGLPGRTGTPGLPGPPGPMGPPGDRGFTGKDGAMGPRGPPGPGSPGVTGPSGKPGKPGDHGRPGPSGLKGEKGDRGDIASQNMMRAVARQVCEQLISGQMNRFNQMLNQIPNDYQSSRNQPGPPGPPGPPGSAGARGEPGPGGRPGFPGTPGMQGPPGERGLPGEKGERGTGSSGPRGLPGPPGPQGESRTGPPGSTGSRGPPGPPGRPGNSGIRGPPGPPGYCDSSQCASIPYNGQGYPGTLLPL

SEQ ID NO: 14512 - protein, 382 aa, Homo sapiens
MAVLFLLLFLCGTPQAADNMQAIYVALGEAVELPCPSPPTLHGDEHLSWFCSPAAGSFTTLVAQVQVGRPAPDPGKPGRESRLRLLGNYSLWLEGSKEEDAGRYWCAVLGQHHNYQNWRVYDVLVLKGSQLSARAADGSPCNVLLCSVVPSRRMDSVTWQEGKGPVRGRVQSFWGSEAALLLVCPGEGLSEPRSRRPRIIRCLMTHNKGVSFSLAASIDASPALCAPSTGWDMPWILMLLLTMGQGVVILALSIVLWRQRVRGAPGRGNRMRCYNCGGSPSSSCKEAVTTCGEGRPQPGLEQIKLPGNPPVTLIHQHPACVAAHHCNQVETESVGDVTYPAHRDCYLGDLCNSAVASHVAPAGILAAAATALTCLLPGLWSG

SEQ ID NO: 14513 - protein, 897 aa, Homo sapiens
MRKDTDDIESPKRSIRDSGYIDCWDSERSDSLSPPRHGRDDSFDSLDSFGSRSRQTPSPDVVLRGSSDGRGSDSESDLPHRKLPDVKKDDMSARRTSHGEPKSAVPFNQYLPNKSNQTAYVPAPLRKKKAEREEYRKSWSTATSPLGGERPFRYGPRTPVSDDAESTSMFDMRCEEEAAVQPHSRARQEQLQLINNQLREEDDKWQDDLARWKSRRRSVSQDLIKKEEERKKMEKLLAGEDGTSERRKSIKTYREIVQEKERRERELHEAYKNARSQEEAEGILQQYIERFTISEAVLERLEMPKILERSHSTEPNLSSFLNDPNPMKYLRQQSLPPPKFTATVETTIARASVLDTSMSAGSGSPSKTVTPKAVPMLTPKPYSQPKNSQDVLKTFKVDGKVSVNGETVHREEEKERECPTVAPAHSLTKSQMFEGVARVHGSPLELKQDNGSIEINIKKPNSVPQELAATTEKTEPNSQEDKNDGGKSRKGNIELASSEPQHFTTTVTRCSPTVAFVEFPSSPQLKNDVSEEKDQKKPENEMSGKVELVLSQKVVKPKSPEPEATLTFPFLDKMPEANQLHLPNLNSQVDSPSSEKSPVMTPFKFWAWDPEEERRRQEKWQQEQERLLQERYQKEQDKLKEEWEKAQKEVEEEERRYYEEERKIIEDTVVPFTVSSSSADQLSTSSSMTEGSGTMNKIDLGNCQDEKQDRRWKKSFQGDDSDLLLKTRESDRLEEKGSLTEGALAHSGNPVSKGVHEDHQLDTEAGAPHCGTNPQLAQDPSQNQQTSNPTHSSEDVKPKTLPLDKSINHQIESPSERRKSISGKKLCSSCGLPLGKGAAMIIETLNLYFHIQCFRCGICKGQLGDAVSGTDVRIRNGLLNCNDCYMRSRSAGQPTTL

SEQ ID NO: 14514 - protein, 912 aa, Homo sapiens
MEVFPFLLVLSVWWSRTWDSANADSIIHIGAIFDESAKKDDEVFRTAVGDLNQNEEILQTEKITFSVTFVDGNNPFQAVQEDIRGIQEFLDKVSQQGMDVALQKVENNINKMITTLFDTMRIEELNRYRDTLRRAILVMNPATAKSFITEVVETNLVAFDCHWIIINEEINDVDVQELVRRSIGRLTIIRQTFPVPQNISQRCFRGNHRISSTLCDPKDPFAQNMEISNLYIYDTVLLLANAFHKKLEDRKWHSMASLSCIRKNSKPWQGGRSMLETIKKGGVSGLTGELEFGENGGNPNVHFEILGTNYGEELGRGVRKLGCWNPVTGLNGSLTDKKLENNMRGVVLRVVTVLEEPFVMVSENVLGKPKKYQGFSIDVLDALSNYLGFNYEIYVAPDHKYGSPQEDGTWNGLVGELVFKRADIGISALTITPDRENVVDFTTRYMDYSVGVLLRRAEKTVDMFACLAPFDLSLWACIAGTVLLVGLLVYLLNWLNPPRLQMGSMTSTTLYNSMWFVYGSFVQQGGEVPYTTLATRMMMGAWWLFALIVISSYTANLAAFLTITRIESSIQSLQDLSKQTEIPYGTVLDSAVYEHVRMKGLNPFERDSMYSQMWRMINRSNGSENNVLESQAGIQKVKYGNYAFVWDAAVLEYVAINDPDCSFYTIGNTVADRGYGIALQHGSPYRDVFSQRILELQQNGDMDILKHKWWPKNGQCDLYSSVDTKQKGGALDIKSFAGVFCILAAGIVLSCFIAMLETWWNKRKGSRVPSKEDDKEIDLEHLHRRVNSLCTDDDSPHKQFSTSSIDLTPLDIDTLPTRQALEQISDFRNTHITTTTFIPEQIQTLSRTLSAKAASGFTFGNVPEHRTGPFRHRAPNGGFFRSPIKTMSSIPYQPTPTLGLNLGNDPDRGTSI

SEQ ID NO: 14515 - protein, 2058 aa, Homo sapiens
MDNFFTEGTRVWLRENGQHFPSTVNSCAEGIVVFRTDYGQVFTYKQSTITHQKVTAMHPTNEEGVDDMASLTELHGGSIMYNLFQRYKRNQIYTYIGSILASVNPYQPIAGLYEPATMEQYSRRHLGELPPHIFAIANECYRCLWKRHDNQCILISGESGAGKTESTKLILKFLSVISQQSLELSLKEKTSCVERAILESSPIMEAFGNAKTVYNNNSSRFGKFVQLNICQKGNIQGGRIVDYLLEKNRVVRQNPGERNYHIFYALLAGLEHEEREEFYLSTPENYHYLNQSGCVEDKTISDQESFREVITAMDVMQFSKEEVREVSRLLAGILHLGNIEFITAGGAQVSFKTALGRSAELLGLDPTQLTDALTQRSMFLRGEEILTPLNVQQAVDSRDSLAMALYACCFEWVIKKINSRIKGNEDFKSIGILDIFGFENFEVNHFEQFNINYANEKLQEYFNKHIFSLEQLEYSREGLVWEDIDWIDNGECLDLIEKKLGLLALINEESHFPQATDSTLLEKLHSQHANNHFYVKPRVAVNNFGVKHYAGEVQYDVRGILEKNRDTFRDDLLNLLRESRFDFIYDLFEHVSSRNNQDTLKCGSKHRRPTVSSQFKDSLHSLMATLSSSNPFFVRCIKPNMQKMPDQFDQAVVLNQLRYSGMLETVRIRKAGYAVRRPFQDFYKRYKVLMRNLALPEDVRGKCTSLLQLYDASNSEWQLGKTKVFLRESLEQKLEKRREEEVSHAAMVIRAHVLGFLARKQYRKVLYCVVIIQKNYRAFLLRRRFLHLKKAAIVFQKQLRGQIARRVYRQLLAEKREQEEKKKQEEEEKKKREEEERERERERREAELRAQQEEETRKQQELEALQKSQKEAELTRELEKQKENKQVEEILRLEKEIEDLQRMKEQQELSLTEASLQKLQERRDQELRRLEEEACRAAQEFLESLNFDEIDECVRNIERSLSVGSEFSSELAESACEEKPNFNFSQPYPEEEVDEGFEADDDAFKDSPNPSEHGHSDQRTSGIRTSDDSSEEDPYMNDTVVPTSPSADSTVLLAPSVQDSGSLHNSSSGESTYCMPQNAGDLPSPDGDYDYDQDDYEDGAITSGSSVTFSNSYGSQWSPDYRCSVGTYNSSGAYRFSSEGAQSSFEDSEEDFDSRFDTDDELSYRRDSVYSCVTLPYFHSFLYMKGGLMNSWKRRWCVLKDETFLWFRSKQEALKQGWLHKKGGGSSTLSRRNWKKRWFVLRQSKLMYFENDSEEKLKGTVEVRTAKEIIDNTTKENGIDIIMADRTFHLIAESPEDASQWFSVLSQVHASTDQEIQEMHDEQANPQNAVGTLDVGLIDSVCASDSPDRPNSFVIITANRVLHCNADTPEEMHHWITLLQRSKGDTRVEGQEFIVRGWLHKEVKNSPKMSSLKLKKRWFVLTHNSLDYYKSSEKNALKLGTLVLNSLCSVVPPDEKIFKETGYWNVTVYGRKHCYRLYTKLLNEATRWSSAIQNVTDTKAPIDTPTQQLIQDIKENCLNSDVVEQIYKRNPILRYTHHPLHSPLLPLPYGDINLNLLKDKGYTTLQDEAIKIFNSLQQLESMSDPIPIIQGILQTGHDLRPLRDELYCQLIKQTNKVPHPGSVGNLYSWQILTCLSCTFLPSRGILKYLKFHLKRIREQFPGSEMEKYALFTYESLKKTKCREFVPSRDEIEALIHRQEMTSTVYCHGGGSCKITINSHTTAGEVVEKLIRGLAMEDSRNMFALFEYNGHVDKAIESRTVVADVLAKFEKLAATSEVGDLPWKFYFKLYCFLDTDNVPKDSVEFAFMFEQAHEAVIHGHHPAPEENLQVLAALRLQYLQGDYTLHAAIPPLEEVYSLQRLKARISQSTKTFTPCERLEKRRTSFLEGTLRRSFRTGSVVRQKVEEEQMLDMWIKEEVSSARASIIDKWRKFQGMNQEQAMAKYMALIKEWPGYGSTLFDVECKEGGFPQELWLGVSADAVSVYKRGEGRPLEVFQYEHILSFGAPLANTYKIVVDERELLFETSEVVDVAKLMKAYISMIVKKRYSTTRSASSQGSSR

SEQ ID NO: 14516 - protein, 404 aa, Homo sapiens
MISLIIPPKDQISRVAKMLADEFGTASNIKSRVNRLSVLGAITSVQQRLKLYNKVPPNGLVVYCGTIVTEEGKEKKVNIDFEPFKPINTSLYLCDNKFHTEALTALLSDDSKFGFIVIDGSGALFGTLQGNTREVLHKFTVDLPKKHGRGGQSALRFARLRMEKRHNYVRKVAETAVQLFISGDKVNVAGLVLAGSADFKTELSQSDMFDQRLQSKVLKLVDISYGGENGFNQAIELSTEVLSNVKFIQEKKLIGRYFDEISQDTGKYCFGVEDTLKALEMGAVEILIVYENLDIMRYVLHCQGTEEEKILYLTPEQEKDKSHFTDKETGQEHELIESMPLLEWFANNYKKFGATLEIVTDKSQEGSQFVKGFGGIGGILRYRVDFQGMEYQGGDDEFFDLDDY

SEQ ID NO: 14517 - protein, 369 aa, Homo sapiens
MSMKWTSALLLIQLSCYFSSGSCGKVLVWPTEFSHWMNIKTILDELVQRGHEVTVLASSASISFDPNSPSTLKFEVYPVSLTKTEFEDIIKQLVKRWAELPKDTFWSYFSQVQEIMWTFNDILRKFCKDIVSNKKLMKKLQESRFDVVLADAVFPFGELLAELLKIPFVYSLRFSPGYAIEKHSGGLLFPPSYVPVVMSELSDQMTFIERVKNMIYVLYFEFWFQIFDMKKWDQFYSEVLGRPTTLSETMAKADIWLIRNYWDFQFPHPLLPNVEFVGGLHCKPAKPLPKEMEEFVQSSGENGVVVFSLGSMVSNTSEERANVIASALAKIPQKVLWRFDGNKPDTLGLNTRLYKWIPQNDLLDIKRML

SEQ ID NO: 14518 - protein, 459 aa, Homo sapiens
MAFNFGAPSGTSGTAAATAAPAGGFGGFGTTSTTAGSAFSFSAPTNTGTTALGGLFSQPTQAPTQSNQLINTASALSAPTLLGDERDAILAKWNQLQAFWGTGKGYFNNNIPPVEFTQENPFCRFKAVGYSCMPSNKDEDGLVVLVFNKKETEIRSQQQQLVESLHKVLGGNQTLTVNVEGTKTLPDDQTEVVIYVVERSPNGTSRRVPATTLYAHFEQANIKTQLQQLGVTLSMTRTELSPAQIKQLLQNPPAGVDPIIWEQAKVDNPDSEKLIPVPMVGFKELLRRLKVQDQMTKQHQTRLDIISEDISELQKNQTTSVAKIAQYKRKLMDLSHRTLQVLIKQEIQRKSGYAIQADEEQLRVQLDTIQGELNAPTQFKGRLNELMSQIRMQNHFGAVRSEERYYIDADLLREIKQHLKQQQEGLSHLISIIKDDLEDIKLVEHGLNETIHIRGGVFS

SEQ ID NO: 14519 - protein, 199 aa, Homo sapiens
MKSLLLLVLISICWADHLSDNYTLDHDRAIHIQAENGPHLLVEAEQAKVFSHRGGNVTLPCKFYRDPTAFGSGIHKIRIKWTKLTSDYLKEVDVFVSMGYHKKTYGGYQGRVFLKGGSDSDASLVITDLTLEDYGRYKCEVIEGLEDDTVVVALDLQGVVFPYFPRLGRYNLNFHEAQQACLDQDAVIASFDQLYDAWR

SEQ ID NO: 14520 - protein, 107 aa, Homo sapiens
MKTGHFEIVTMLLATMILVDIFQVKAEVLDMADNAFDDEYLKCTDRMEIKYVPQLLKEEKASHQQLDTVWENAKAKWAARKTQIFLPMNFKDNHGIALMAYISEAQE

SEQ ID NO: 14521 - protein, 1091 aa, Homo sapiens
MSLQSAQYLRQAEVLKADMTDSKLGPAEVWTSRQALQDLYQKMLVTDLEYALDKKVEQDLWNHAFKNQITTLQGQAKNRANPNRSEVQANLSLFLEAASGFYTQLLQELCTVFNVDLPCRVKSSQLGIISNKQTHTSAIVKPQSSSCSYICQHCLVHLGDIARYRNQTSQAESYYRHAAQLVPSNGQPYNQLAILASSKGDHLTTIFYYCRSIAVKFPFPAASTNLQKALSKALESRDEVKTKWGVSDFIKAFIKFHGHVYLSKSLEKLSPLREKLEEQFKRLLFQKAFNSQQLVHVTVINLFQLHHLRDFSNETEQHTYSQDEQLCWTQLLALFMSFLGILCKCPLQNESQEESYNAYPLPAVKVSMDWLRLRPRVFQEAVVDERQYIWPWLISLLNSFHPHEEDLSSISATPLPEEFELQGFLALRPSFRNLDFSKGHQGITGDKEGQQRRIRQQRLISIGKWIADNQPRLIQCENEVGKLLFITEIPELILEDPSEAKENLILQETSVIESLAADGSPGLKSVLSTSRNLSNNCDTGEKPVVTFKENIKTREVNRDQGRSFPPKEVKSQTELRKTPVSEARKTPVTQTPTQASNSQFIPIHHPGAFPPLPSRPGFPPPTYVIPPPVAFSMGSGYTFPAGVSVPGTFLQPTAHSPAGNQVQAGKQSHIPYSQQRPSGPGPMNQGPQQSQPPSQQPLTSLPAQPTAQSTSQLQVQALTQQQQSPTKAVPALGKSPPHHSGFQQYQQADASKQLWNPPQVQGPLGKIMPVKQPYYLQTQDPIKLFEPSLQPPVMQQQPLEKKMKPFPMEPYNHNPSEVKVPEFYWDSSYSMADNRSVMAQQANIDRRGKRSPGVFRPEQDPVPRMPFEKSLLEKPSELMSHSSSFLSLTGFSLNQERYPNNSMFNEVYGKNLTSSSKAELSPSMAPQETSLYSLFEGTPWSPSLPASSDHSTPASQSPHSSNPSSLPSSPPTHNHNSVPFSNFGPIGTPDNRDRRTADRWKTDKPAMGGFGIDYLSATSSSESSWHQASTPSGTWTGHGPSMEDSSAVLMESLKSIWSSSMMHPGPSALEQLLMQQKQKQQRGQGTMNPPH

SEQ ID NO: 14522 - protein, 655 aa, Homo sapiens
MFINIKSILWMCSTLIVTHALHKVKVGKSPPVRGSLSGKVSLPCHFSTMPTLPPSYNTSEFLRIKWSKIEVDKNGKDLKETTVLVAQNGNIKIGQDYKGRVSVPTHPEAVGDASLTVVKLLASDAGLYRCDVMYGIEDTQDTVSLTVDGVVFHYRAATSRYTLNFEAAQKACLDVGAVIATPEQLFAAYEDGFEQCDAGWLADQTVRYPIRAPRVGCYGDKMGKAGVRTYGFRSPQETYDVYCYVDHLDGDVFHLTVPSKFTFEEAAKECENQDARLATVGELQAAWRNGFDQCDYGWLSDASVRHPVTVARAQCGGGLLGVRTLYRFENQTGFPPPDSRFDAYCFKRPDRCKMNPCLNGGTCYPTETSYVCTCVPGYSGDQCELDFDECHSNPCRNGATCVDGFNTFRCLCLPSYVGALCEQDTETCDYGWHKFQGQCYKYFAHRRTWDAAERECRLQGAHLTSILSHEEQMFVNRVGHDYQWIGLNDKMFEHDFRWTDGSTLQYENWRPNQPDSFFSAGEDCVVIIWHENGQWNDVPCNYHLTYTCKKGTVACGQPPVVENAKTFGKMKPRYEINSLIRYHCKDGFIQRHLPTIRCLGNGRWAIPKITCMNPSAYQRTYSMKYFKNSSSAKDNSINTSKHDHRWSRRWQESRR

SEQ ID NO: 14523 - protein, 205 aa, Homo sapiens
MGTAGAMQLCWVILGFLLFRGHNSQPTMTQTSSSQGGLGGLSLTTEPVSSNPGYIPSSEANRPSHLSSTGTPGAGVPSSGRDGGTSRDTFQTVPPNSTTMSLSMREDATILPSPTSETVLTVAAFGVISFIVILVVVVIILVGVVSLRFKCRKSKESEDPQKPGSSGLSESCSTANGEKDSITLISMKNINMNNGKQSLSAEKVL

SEQ ID NO: 14524 - protein, 485 aa, Homo sapiens
MLLRSKPALPPPLMLLLLGPLGPLSPGALPRPAQAQDVVDLDFFTQEPLHLVSPSFLSVTIDANLATDPRFLILLGSPKLRTLARGLSPAYLRFGGTKTDFLIFDPKKESTFEERSYWQSQVNQDICKYGSIPPDVEEKLRLEWPYQEQLLLREHYQKKFKNSTYSKPNSFLKKADIFINGSQLGEDFIQLHKLLRKSTFKNAKLYGPDVGQPRRKTAKMLKSFLKAGGEVIDSVTWHHYYLNGRTATKEDFLNPDVLDIFISSVQKVFQVVESTRPGKKVWLGETSSAYGGGAPLLSDTFAAGFMWLDKLGLSARMGIEVVMRQVFFGAGNYHLVDENFDPLPDYWLSLLFKKLVGTKVLMASVQGSKRRKLRVYLHCTNTDNPRYKEGDLTLYAINLHNVTKYLRLPYPFSNKQVDKYLLRPLGPHGLLSKSVQLNGLTLKMVDDQTLPPLMEKPLRPGSSLGLPAFSYSFFVIRNAKVAACI

SEQ ID NO: 14525 - protein, 1528 aa, Homo sapiens
MWPSQLLIFMMLLAPIIHGGKHSERHPALAAPLRHAERSPGGALPPRHLLQQPAAERTAAHRGQGPRGATRGVRGPGAQGAQIAAQAFSRAPIPMAVVRRELSCESYPIELRCPGTDVIMIESANYGRTDDKICDSDPAQMENIRCYLPDAYKIMSQRCNNRTQCAVVAGPDVFPDPCPGTYKYLEVQYECVPYKVEQKVFLCPGLLKGVYQSEHLFESDHQSGAWCKDPLQASDKIYYMPWTPYRTDTLTEYSSKDDFIAGRPTTTYKLPHRVDGTGFVVYDGALFFNKERTRNIVKFDLRTRIKSGEAIIANANYHDTSPYRWGGKSDIDLAVDENGLWVIYATEQNNGKIVISQLNPYTLRIEGTWDTAYDKRSASNAFMICGILYVVKSVYEDDDNEATGNKIDYIYNTDQSKDSLVDVPFPNSYQYIAAVDYNPRDNLLYVWNNYHVVKYSLDFGPLDSRSGQAHHGQVSYISPPIHLDSELERPSVKDISTTGPLGMGSTTTSTTLRTTTLSPGRSTTPSVSGRRNRSTSTPSPAVEVLDDMTTHLPSASSQIPALEESCEAVEAREIMWFKTRQGQIAKQPCPAGTIGVSTYLCLAPDGIWDPQGPDLSNCSSPWVNHITQKLKSGETAANIARELAEQTRNHLNAGDITYSVRAMDQLVGLLDVQLRNLTPGGKDSAARSLNKLQKRERSCRAYVQAMVETVNNLLQPQALNAWRDLTTSDQLRAATMLLHTVEESAFVLADNLLKTDIVRENTDNIKLEVARLSTEGNLEDLKFPENMGHGSTIQLSANTLKQNGRNGEIRVAFVLYNNLGPYLSTENASMKLGTEALSTNHSVIVNSPVITAAINKEFSNKVYLADPVVFTVKHIKQSEENFNPNCSFWSYSKRTMTGYWSTQGCRLLTTNKTHTTCSCNHLTNFAVLMAHVEVKHSDAVHDLLLDVITWVGILLSLVCLLICIFTFCFFRGLQSDRNTIHKNLCISLFVAELLFLIGINRTDQPIACAVFAALLHFFFLAAFTWMFLEGVQLYIMLVEVFESEHSRRKYFYLVGYGMPALIVAVSAAVDYRSYGTDKVCWLRLDTYFIWSFIGPATLIIMLNVIFLGIALYKMFHHTAILKPESGCLDNIKSWVIGAIALLCLLGLTWAFGLMYINESTVIMAYLFTIFNSLQGMFIFIFHCVLQKKVRKEYGKCLRTHCCSGKSTESSIGSGKTSGSRTPGRYSTGSQSRIRRMWNDTVRKQSESSFITGDINSSASLNREGLLNNARDTSVMDTLPLNGNHGNSYSIASGEYLSNCVQIIDRGYNHNETALEKKILKELTSNYIPSYLNNHERSSEQNRNLMNKLVNNLGSGREDDAIVLDDATSFNHEESLGLELIHEESDAPLLPPRVYSTENHQPHHYTRRRIPQDHSESFFPLLTNEHTEDLQSPHRDSLYTSMPTLAGVAATESVTTSTQTEPPPAKCGDAEDVYYKSMPNLGSRNHVHQLHTYYQLGRGSSDGFIVPPNKDGTPPEGSSKGPAHLVTSL

SEQ ID NO: 14526 - protein, 419 aa, Homo sapiens
MWLKPEEVLLKNALKLWLMERSNDYFVLQRRRGYGEEGGGGLTGLLVGTLDSVLDSTAKVAPFRILHQTPDSQVYLSIACGANREEITKHWDWLEQNIMKTLSVFDSNEDITNFVQGKIRGLIAEEGKHCFAKEDDPEKFREALLKFEKCFGLPEKEKLVTYYSCSYWKGRVPCQGWLYLSTNFLSFYSFLLGSEIKLIISWDEVSKLEKTSNVILTESIHVCSQGENHYFSMFLHINQTYLLMEQLANYAIRRLFDKETFDNDPVLYNPLQITKRGLENRAHSEQFNAFFRLPKGESLKEVHECFLWVPFSHFNTHGKMCISENYICFASQDGNQCSVIIPLREVLAIDKTNDSSKSVIISIKGKTAFRFHEVKDFEQLVAKLRLRCGAASTQYHDISTEVINYTAIKSFGKKGVCLV

SEQ ID NO: 14527 - protein, 258 aa, Homo sapiens
MHRRGVGAGAIAKKKLAEAKYKERGTVLAEDQLAQMSKQLDMFKTNLEEFASKHKQEIRKNPEFRVQFQDMCATIGVDPLASGKGFWSEMLGVGDFYYELGVQIIEVCLALKHRNGGLITLEELHQQVLKGRGKFAQDVSQDDLIRAIKKLKALGTGFGIIPVGGTYLIQSVPAELNMDHTVVLQLAEKNGYVTVSEIKASLKWETERARQVLEHLLKEGLAWLDLQAPGEAHYWLPALFTDLYSQEITAEEAREALP

SEQ ID NO: 14528 - protein, 1166 aa, Homo sapiens
MLLTLIILLPVVSKFSFVSLSAPQHWSCPEGTLAGNGNSTCVGPAPFLIFSHGNSIFRIDTEGTNYEQLVVDAGVSVIMDFHYNEKRIYWVDLERQLLQRVFLNGSRQERVCNIEKNVSGMAINWINEEVIWSNQQEGIITVTDMKGNNSHILLSALKYPANVAVDPVERFIFWSSEVAGSLYRADLDGVGVKALLETSEKITAVSLDVLDKRLFWIQYNREGSNSLICSCDYDGGSVHISKHPTQHNLFAMSLFGDRIFYSTWKMKTIWIANKHTGKDMVRINLHSSFVPLGELKVVHPLAQPKAEDDTWEPEQKLCKLRKGNCSSTVCGQDLQSHLCMCAEGYALSRDRKYCEDVNECAFWNHGCTLGCKNTPGSYYCTCPVGFVLLPDGKRCHQLVSCPRNVSECSHDCVLTSEGPLCFCPEGSVLERDGKTCSGCSSPDNGGCSQLCVPLSPVSWECDCFPGYDLQLDEKSCAASGPQPFLLFANSQDIRHMHFDGTDYGTLLSQQMGMVYALDHDPVENKIYFAHTALKWIERANMDGSQRERLIEEGVDVPEGLAVDWIGRRFYWTDRGKSLIGRSDLNGKRSKIITKENISQPRGIAVHPMAKRLFWTDTGINPRIESSSLQGLGRLVIASSDLIWPSGITIDFLTDKLYWCDAKQSVIEMANLDGSKRRRLTQNDVGHPFAVAVFEDYVWFSDWAMPSVMRVNKRTGKDRVRLQGSMLKPSSLVVVHPLAKPGADPCLYQNGGCEHICKKRLGTAWCSCREGFMKASDGKTCLALDGHQLLAGGEVDLKNQVTPLDILSKTRVSEDNITESQHMLVAEIMVSDQDDCAPVGCSMYARCISEGEDATCQCLKGFAGDGKLCSDIDECEMGVPVCPPASSKCINTEGGYVCRCSEGYQGDGIHCLDSTPPPHLREDDHHYSVRNSDSECPLSHDGYCLHDGVCMYIEALDKYACNCVVGYIGERCQYRDLKWWELRHAGHGQQQKVIVVAVCVVVLVMLLLLSLWGAHYYRTQKLLSKNPKNPYEESSRDVRSRRPADTEDGMSSCPQPWFVVIKEHQDLKNGGQPVAGEDGQAADGSMQPTSWRQEPQLCGMGTEQGCWIPVSSDKGSCPQVMERSFHMPSYGTQTLEGGVEKPHSLLSANPLWQQRALDPPHQMELTQ

SEQ ID NO: 14529 - protein, 40 aa, Homo sapiens
MARRHCFSYWLLVCWLVVTVAEVETGFHHVSQDGLDLLTS

SEQ ID NO: 14530 - protein, 96 aa, Homo sapiens
MRVFCVGLLLFSVTWAAPTFQPQTEKTKQSCVEEQRAPQASLLQNSGSQNLPDPHPMPRPTSRSASGPVAAGVILMDLSRKKKTKTILVFTIWARE

SEQ ID NO: 14531 - protein, 129 aa, Homo sapiens
MKTGHFEIVTMLLATMILVDIFQVKAEVLDMADNAFDDEYLKCTDRMEIKYVPQLLKEEKASHQQLDTVWENAKAKWAARKTQIFLPMNFKDNHGIALMAYISEAQEQTPFYHLFSEAVKMAGQSREDY

SEQ ID NO: 14532 - protein, 32 aa, Homo sapiens
MEGKWLLCMLLVLGTAIVEAHDGHDDDVIDIE

SEQ ID NO: 14533 - protein, 1067 aa, Homo sapiens
MKLKEVDRTAMQAWSPAQNHPIYLATGTSAQQLDATFSTNASLEIFELDLSDPSLDMKSCATFSSSHRYHKLIWGPYKMDSKGDVSGVLIAGGENGNIILYDPSKIIAGDKEVVIAQNDKHTGPVRALDVNIFQTNLVASGANESEIYIWDLNNFATPMTPGAKTQPPEDISCIAWNRQVQHILASASPSGRATVWDLRKNEPIIKVSDHSNRMHCSGLAWHPDVATQMVLASEDDRLPVIQMWDLRFASSPLRVLENHARGILAIAWSMADPELLLSCGKDAKILCSNPNTGEVLYELPTNTQWCFDIQWCPRNPAVLSAASFDGRISVYSIMGGSTDGLRQKQVDKLSSSFGNLDPFGTGQPLPPLQIPQQTAQHSIVLPLKKPPKWIRRPVGASFSFGGKLVTFENVRMPSHQGAEQQQQQHHVFISQVVTEKEFLSRSDQLQQAVQSQGFINYCQKKIDASQTEFEKNVWSFLKVNFEDDSRGKYLELLGYRKEDLGKKHIKEEKEESEFLPSSGGTFNISVSGDIDGLITQALLTGNFESAVDLCLHDNRMADAIILAIAGGQELLARTQKKYFAKSQSKITRLITAVVMKNWKEIVESCDLKNWREALAAVLTYAKPDEFSALCDLLGTRLENEGDSLLQTQACLCYICAGNVEKLVACWTKAQDGSHPLSLQDLIEKVVILRKAVQLTQAMDTSTVGVLLAAKMSQYANLLAAQGSIAAALAFLPDNTNQPNIMQLRDRLCRAQGEPVAGHESPKIPYEKQQLPKGRPGPVAGHHQMPRVQTQQYYPHGENPPPPGFIMHGNVNPNAAGQLPTSPGHMHTQVPPYPQPQRPQNGWNDPPALNRVPKKKKMPENFMPPVPITSPIMNPLGDPQSQMLQQQPSAPVPLSSQSSFPQPHLPGGQPFHGVQQPLGQTGMPPSFSKPNIEGAPGAPIGNTFQHVQSLPTKKITKKPIPDEHLILKTTFEDLIQRCLSSATDPQTKRKLDDASKRLEFLYDKLREQTLSPTITSGLHNIARSIETRNYSEGLTMHTHIVSTSNFSETSAFMPVLKVVLTQANKLGV

SEQ ID NO: 14534 - protein, 1342 aa, Homo sapiens
MWPSQLLIFMMLLAPIIHGGKHSERHPALAAPLRHAERSPGGALPPRHLLQQPAAERTAAHRGQGPRGATRGVRGPGAQGAQIAAQAFSRAPIPMAVVRRELSCESYPIELRCPGTDVIMIESANYGRTDDKICDSDPAQMENIRCYLPDAYKIMSQRCNNRTQCAVVAGPDVFPDPCPGTYKYLEVQYECVPYKVEQKVFLCPGLLKGVYQSEHLFESDHQSGAWCKDPLQASDKIYYMPWTPYRTDTLTEYSSKDDFIAGRPTTTYKLPHRVDGTGFVVYDGALFFNKERTRNIVKFDLRTRIKSGEAIIANANYHDTSPYRWGGKSDIDLAVDENGLWVIYATEQNNGKIVISQLNPYTLRIEGTWDTAYDKRSASNAFMICGILYVVKSVYEDDDNEATGNKIDYIYNTDQSKDSLVDVPFPNSYQYIAAVDYNPRDNLLYVWNNYHVVKYSLDFGPLDSRSGQAHHGQVSYISPPIHLDSELERPSVKDISTTGPLGMGSTTTSTTLRTTTLSPGRSTTPSVSGRRNRSTSTPSPAVEVLDDMTTHLPSASSQIPALEESCEAVEAREIMWFKTRQGQIAKQPCPAGTIGVSTYLCLAPDGIWDPQGPDLSNCSSPWVNHITQKLKSGETAANIARELAEQTRNHLNAGDITYSVRAMDQLVGLLDVQLRNLTPGGKDSAARSLNKLQKRERSCRAYVQAMVETVNNLLQPQALNAWRDLTTSDQLRAATMLLHTVEESAFVLADNLLKTDIVRENTDNIKLEVARLSTEGNLEDLKFPENMGHGSTIQLSANTLKQNGRNGEIRVAFVLYNNLGPYLSTENASMKLGTEALSTNHSVIVNSPVITAAINKEFSNKVYLADPVVFTVKHIKQSEENFNPNCSFWSYSKRTMTGYWSTQGCRLLTTNKTHTTCSCNHLTNFAVLMAHVEVKHSDAVHDLLLDVITWVGILLSLVCLLICIFTFCFFRGLQSDRNTIHKNLCISLFVAELLFLIGINRTDQPIACAVFAALLHFFFLAAFTWMFLEGVQLYIMLVEVFESEHSRRKYFYLVGYGMPALIVAVSAAVDYRSYGTDKVCWLRLDTYFIWSFIGPATLIIMLNVIFLGIALYKMFHHTAILKPESGCLDNIKSWVIGAIALLCLLGLTWAFGLMYINESTVIMAYLFTIFNSLQGMFIFIFHCVLQKKVRKEYGKCLRTHCCSGKSTESSIGSGKTSGSRTPGRYSTGSQSRIRRMWNDTVRKQSESSFITGDINSSASLNRGAMANHLISNALLRPHGTNNPYNTLLGEPAVCNNPSVSMYNAQEPYRETSMGVKLNIAYQIGASEQCQGYKCHGYSTTEW

SEQ ID NO: 14535 - protein, 153 aa, Homo sapiens
MKRSLQALYCQLLSFLLILALTEALAFAIQEPSPRESLQVLPSGTPPGTMVTAPHSSTRHTSVVMLTPNPDGPPSQAAAPMATPTPRAEGHPPTHTISTIAATVTAPHSESSLSTGPAPAAMATTSSKPEGRPRGQAAPTILLTKPPGATSRP

SEQ ID NO: 14536 - protein, 642 aa, Homo sapiens
MYPAGPPAGPVPRRGRRPLPGPPAPAPAPVPAARPPPPAPGPRPRVAVKMAFRKAYSIKDKLQAIERVKGGERQASVCRDFGVPGGTLRGWLKDEPKLRWFLEQLGGEVGTQRKKMRLANEEEIDRAVYAWFLALRQHGVPLSGPLIQAQAEAFARQIYGPECTFKASHGWFWRWQKRHGISSQRFYGEAGPPAPSPAPGPPVKEEPALPSGAGPLPDRAPAPPPPAEGGYGDEQIYSASVTGLYWKLLPEQAAPPGAGDPGAGGCGRRWRGDRVTVLLAANLTGSHKLKPLVIGRLPDPPSLRHHNQDKFPASYRYSPDAWLSRPLLRGWFFEEFVPGVKRYLRRSCLQQKAVLLVAHPPCPSPAASMPALDSEDAPVRCRPEPLGPPEELQTPDGAVRVLFLSKGSSRAHIPAPLEQGVVAAFKQLYKRELLRLAVSCASGSPLDFMRSFMLKDMLYLAGLSWDLVQAGSIERCWLLGLRAAFEPRPGEDSAGQPAQAEEAAEHSRVLSDLTHLAALAYKCLAPEEVAEWLHLDDDGGPPEGCREEVGPALPPAAPPAPASLPSAMGGGEDEEEATDYGGTSVPTAGEAVRGLETALRWLENQDPREVGPLRLVQLRSLISMARRLGGIGHTPAGPYDGV

SEQ ID NO: 14537 - protein, 108 aa, Homo sapiens
MQISSEKEEDDNEKRQDPGDNWEEGGGGGGGMEKSSGPWNKTAPVQAPPAPVIVTETPEPAMTSGVYRPPGARLTTTRKTPQGPPEIYSDTQFPSLQSTAKHVESRKY

SEQ ID NO: 14538 - protein, 869 aa, Homo sapiens
MKIATVSVLLPLALCLIQDAASKNEDQDKKFFQSLDGIMFINKCATCKMILEKEAKSQKRARHLARAPKATAPTELNCDDFKKGERDGDFICPDYYEAVCGTDGKTYDNRCALCAENAKTGSQIGVKSEGECKSSNPEQDVCSAFRPFVRDGRLGCTRENDPVLGPDGKTHGNKCAMCAELFLKEAENAKREGETRIRRNAEKDFCKEYEKQVRNGRLFCTRESDPVRGPDGRMHGNKCALCAEIFKQRFSEENSKTDQNLGKAEEKTKVKREIVKLCSQYQNQAKNGILFCTRENDPIRGPDGKMHGNLCSMCQAYFQAENEEKKKAEARARNKRESGKATSYAELCSEYRKLVRNGKLACTRENDPIQGPDGKVHGNTCSMCEVFFQAEEEEKKKKEGKSRNKRQSKSTASFEELCSEYRKSRKNGRLFCTRENDPIQGPDGKMHGNTCSMCEAFFQQEERARAKAKREAAKEICSEFRDQVRNGTLICTREHNPVRGPDGKMHGNKCAMCASVFKLEEEEKKNDKEEKGKVEAEKVKREAVQELCSEYRHYVRNGRLPCTRENDPIEGLDGKIHGNTCSMCEAFFQQEAKEKERAEPRAKVKREAEKETCDEFRRLLQNGKLFCTRENDPVRGPDGKTHGNKCAMCKAVFQKENEERKRKEEEDQRNAAGHGSSGGGGGNTQDECAEYREQMKNGRLSCTRESDPVRDADGKSYNNQCTMCKAKLEREAERKNEYSRSRSNGTGSESGKDTCDEFRSQMKNGKLICTRESDPVRGPDGKTHGNKCTMCKEKLEREAAEKKKKEDEDRSNTGERSNTGERSNDKEDLCREFRSMQRNGKLICTRENNPVRGPYGKMHINKCAMCQSI

SEQ ID NO: 14539 - protein, 737 aa, Homo sapiens
MSEVLPADSGVDTLAVFMASSGTTDVTNRNSPATPPNTLNLRSSHNELLNAEIKHTETKNSTPPKCRKKYALTNIQAAMGLSDPAAQPLLGNGSANIKLVKNGENQLRKAAEQGQQDPNKNLSPTAVINITSEKLEGKEPHPQDSSSCEILPSQPRRTKSFLNYYADLETSARELEQNRGNHHGTAEEKSQPVQGQASTIIGNGDLLLQKPNRPQSSPEDGQVATVSSSPETKKDHPKTGAKTDCALHRIQNLAPSDEESSWTTLSQDSASPSSPDETDIWSDHSFQTDPDLPPGWKRVSDIAGTYYWHIPTGTTQWERPVSIPADLQGSRKGSLSSVTPSPTPENEDLHAATVNPDPSLKEFEGATLRYASLKLRNAPHPDDDDSCSINSDPEAKCFAVRSLGWVEMAEEDLAPGKSSVAVNNCIRQLSYCKNDIRDTVGIWGEGKDMYLILENDMLSLVDPMDRSVLHSQPIVSIRVWGVGRDNGRDFAYVARDKDTRILKCHVFRCDTPAKAIATSLHEICSKIMAERKNAKALACSSLQERANVNLDVPLQVDFPTPKTELVQKFHVQYLGMLPVDKPVGMDILNSAIENLMTSSNKEDWLSVNMNVADATVTVISEKNEEEVLVECRVRFLSFMGVGKDVHTFAFIMDTGNQRFECHVFWCEPNAGNVSEAVQAACMLRYQKCLVARPPSQKVRPPPPPADSVTRRVTTNVKRGVLSLIDTLKQKRPVTEMP

SEQ ID NO: 14540 - protein, 666 aa, Homo sapiens
MAASRKPPRVRVNHQDFQLRNLRIIEPNEVTHSGDTGVETDGRMPPKVTSELLRQLRQAMRNSEYVTEPIQAYIIPSGDAHQSEYIAPCDCRRAFVSGFDGSAGTAIITEEHAAMWTDGRYFLQAAKQMDSNWTLMKMGLKDTPTQEDWLVSVLPEGSRVGVDPLIIPTDYWKKMAKVLRSAGHHLIPVKENLVDKIWTDRPERPCKPLLTLGLDYTGISWKDKVADLRLKMAERNVMWFVVTALDEIAWLFNLRGSDVEHNPVFFSYAIIGLETIMLFIDGDRIDAPSVKEHLLLDLGLEAEYRIQVHPYKSILSELKALCADLSPREKVWVSDKASYAVSETIPKDHRCCMPYTPICIAKAVKNSAESEGMRRAHIKDAVALCELFNWLEKEVPKGGVTEISAADKAEEFRRQQADFVDLSFPTISSTGPNGAIIHYAPVPETNRTLSLDEVYLIDSGAQYKDGTTDVTRTMHFGTPTAYEKECFTYVLKGHIAVSAAVFPTGTKGHLLDSFARSALWDSGLDYLHGTGHGVGSFLNVHEGPCGISYKTFSDEPLEAGMIVTDEPGYYEDGAFGIRIENVVLVVPVKTKYNFNNRGSLTFEPLTLVPIQTKMIDVDSLTDKECDWLNNYHLTCRDVIGKELQKQGRQEALEWLIRETQPISKQH

SEQ ID NO: 14541 - protein, 29 aa, Homo sapiens
MAGRVPSLLVLLVFPSSCLAFRSPLSVFK

SEQ ID NO: 14542 - protein, 85 aa, Homo sapiens
MRLLERMRKDWFMVGIVLAIAGAKLEPSIGVNGGPLKPEITVSYIAVATIFFNSGLSLKTEFADSRLHASACVFCSDFNQGSWWK

SEQ ID NO: 14543 - protein, 310 aa, Homo sapiens
MWRSLGLALALCLLPSGGTESQDQSSLCKQPPAWSIRDQDPMLNSNGSVTVVALLQASUYLCILQASKLEDLRVKLKKEGYSNISYIVVNHQGISSRLKYTHLKNKVSEHIPVYQQEENQTDVWTLLNGSKDDFLIYDRCGRLVYHLGLPFSFLTFPYVEEAIKIAYCEKKCGNCSLTTLKDEDFCKRVSLATVDKTVETPSPHYHHEHHHNHGHQHLGSSELSENQQPGAPNAPTHPAPPGLHHHHKHKGQHRQGHPENRDMPASEDLQDLQKKLCRKRCINQLLCKLPTDSELAPRSUCCHCRHLIFE

SEQ ID NO: 14544 - protein, 1512 aa, Homo sapiens
MWPSQLLIFMMLLAPIIHAFSRAPIPMAVVRRELSCESYPIELRCPGTDVIMIESANYGRTDDKICDSDPAQMENIRCYLPDAYKIMSQRCNNRTQCAVVAGPDVFPDPCPGTYKYLEVQYECVPYKVEQKVFLCPGLLKGVYQSEHLFESDHQSGAWCKDPLQASDKIYYMPWTPYRTDTLTEYSSKDDFIAGRPTTTYKLPHRVDGTGFVVYDGALFFNKERTRNIVKFDLRTRIKSGEAIIANANYHDTSPYRWGGKSDIDLAVDENGLWVIYATEQNNGKIVISQLNPYTLRIEGTWDTAYDKRSASNAFMICGILYVVKSVYEDDDNEATGNKIDYIYNTDQSKDSLVDVPFPNSYQYIAAVDYNPRDNLLYVWNNYHVVKYSLDFGPLDSRSGQAHHGQVSYISPPIHLDSELERPSVKDISTTGPLGMGSTTTSTTLRTTTLSPGRSTTPSVSGRRNRSTSTPSPAVEVLDDMTTHLPSASSQIPALEESCEAVEAREIMWFKTRQGQIAKQPCPAGTIGVSTYLCLAPDGIWDPQGPDLSNCSSPWVNHITQKLKSGETAANIARELAEQTRNHLNAGDITYSVRAMDQLVGLLDVQLRNLTPGGKDSAARSLNKLQKRERSCRAYVQAMVETVNNLLQPQALNAWRDLTTSDQLRAATMLLHTVEESAFVLADNLLKTDIVRENTDNIKLEVARLSTEGNLEDLKFPENMGHGSTIQLSANTLKQNGRNGEIRVAFVLYNNLGPYLSTENASMKLGTEALSTNHSVIVNSPVITAAINKEFSNKVYLADPVVFTVKHIKQSEENFNPNCSFWSYSKRTMTGYWSTQGCRLLTTNKTHTTCSCNHLTNFAVLMAHVEVKHSDAVHDLLLDVITWVGILLSLVCLLICIFTFCFFRGLQSDRNTIHKNLCISLFVAELLFLIGINRTDQPIACAVFAALLHFFFLAAFTWMFLEGVQLYIMLVEVFESEHSRRKYFYLVGYGMPALIVAVSAAVDYRSYGTDKVCWLRLDTYFIWSFIGPATLIIMLNVIFLGIALYKMFHHTAILKPESGCLDNINYEDNRPFIKSWVIGAIALLCLLGLTWAFGLMYINESTVIMAYLFTIFNSLQGMFIFIFHCVLQKKVRKEYGKCLRTHCCSGKSTESSIGSGKTSGSRTPGRYSTGSQSRIRRMWNDTVRKQSESSFITGDINSSASLNRGAMANHLISNALLRPHGTNNPYNTLLGEPAVCNNPSVSMYNAQEGLLNNARDTSVMDTLPLNGNHGNSYSIASGEYLSNCVQIIDRGYNHNETALEKKILKELTSNYIPSYLNNHERSSEQNRNLMNKLVNNLGSGREDDAIVLDDATSFNHEESLGLELIHEESDAPLLPPRVYSTENHQPHHYTRRRIPQDHSESFFPLLTNEHTEDLQSPHRDSLYTSMPTLAGVAATESVTTSTQTEPPPAKCGDAEDVYYKSMPNLGSRNHVHQLHTYYQLGRGSSDGFIVPPNKDGTPPEGSSKGPAHLVTSL

SEQ ID NO: 14545 - protein, 570 aa, Homo sapiens
MKPRARGWRGLAALWMLLAQVAEQAPACAMGPAAAAPGSPSVPRPPPPAERPGWMEKGEYDLVSAYEVDHRGDYVSHEIMHHQRRRRAVPVSEVESLHLRLKGSRHDFHMDLRTSSSLVAPGFIVQTLGKTGTKSVQTLPPEDFCFYQGSLRSHRNSSVALSTCQGLSGMIRTEEADYFLRPLPSHLSWKLGRAAQGSSPSHVLYKRSTEPHAPGASEVLVTSRTWELAHQPLHSSDLRLGLPQKQHFCGRRKKYMPQPPKEDLFILPDEYKSCLRHKRSLLRSHRNEELNVETLVVVDKKMMQNHGHENITTYVLTILNMVSALFKDGTIGGNINIAIVGLILLEDEQPGLVISHHADHTLSSFCQWQSGLMGKDGTRHDHAILLTGLDICSWKNEPCDTLGFAPISGMCSKYRSCTINEDTGLGLAFTIAHESGHNFGMIHDGEGNMCKKSEGNIMSPTLAGRNGVFSWSPCSRQYLHKFLSTAQAICLADQPKPVKEYKYPEKLPGELYDANTQCKWQFGEKAKLCMLDFKKDICKALWCHRIGRKCETKFMPAAEGTICGHDMVRS

SEQ ID NO: 14546 - protein, 1251 aa, Homo sapiens
MKLKEVDRTAMQAWSPAQNHPIYLATGTSAQQLDATFSTNASLEIFELDLSDPSLDMKSCATFSSSHRYHKLIWGPYKMDSKGDVSGVLIAGGENGNIILYDPSKIIAGDKEVVIAQNDKHTGPVRALDVNIFQTNLVASGANESEIYIWDLNNFATPMTPGAKTQPPEDISCIAWNRQVQHILASASPSGRATVWDLRKNEPIIKVSDHSNRMHCSGLAWHPDVATQMVLASEDDRLPVIQMWDLRFASSPLRVLENHARGILAIAWSMADPELLLSCGKDAKILCSNPNTGEVLYELPTNTQWCFDIQWCPRNPAVLSAASFDGRISVYSIMGGSTDGLRQKQVDKLSSSFGNLDPFGTGQPLPPLQIPQQTAQHSIVLPLKKPPKWIRRPVGASFSFGGKLVTFENVRMPSHQGAEQQQQQHHVFISQVVTEKEFLSRSDQLQQAVQSQGFINYCQKKIDASQTEFEKNVWSFLKVNFEDDSRGKYLELLGYRKEDLGKKIALALNKVDGANVALKDSDQVAQSDGEESPAAEEQLLGEHIKEEKEESEFLPSSGGTFNISVSGDIDGLITQALLTGNFESAVDLCLHDNRMADAIILAIAGGQELLARTQKKYFAKSQSKITRLITAVVMKNWKEIVESCDLKNWREALAAVLTYAKPDEFSALCDLLGTRLENEGDSLLQTQACLCYICAGNVEKLVACWTKAQDGSHPLSLQDLIEKVVILRKAVQLTQAMDTSTVGVLLAAKMSQYANLLAAQGSIAAALAFLPDNTNQPNIMQLRDRLCRAQGEPVAGHESPKIPYEKQQLPKGRPGPVAGHHQMPRVQTQQYYPHVRIAPTVTTWSNKTPTALPSHPPAASPSDTQGENPPPPGFIMHGNVNPNAAGQLPTSPGHMHTQVPPYPQPQPYQPAQPYPFGTGGSAMYRPQQPVAPPTSNAYPNTPYISSASSYTGQSQLYAAQHQASSPTSSPATSFPPPPSSGASFQHGGPGAPPSSSAYALPPGTTGTLPAASELPASQRTGPQNGWNDPPALNRVPKKKKMPENFMPPVPITSPIMNPLGDPQSQMLQQQPSAPVPLSSQSSFPQPHLPGGQPFHGVQQPLGQTGMPPSFSKPNIEGAPGAPIGNTFQHVQSLPTKKITKKPIPDEHLILKTTFEDLIQRCLSSATDPQTKRKLDDASKRLEFLYDKLREQTLSPTITSGLHNIARSIETRNYSEGLTMHTHIVSTSNFSETSAFMPVLKVVLTQANKLGV

SEQ ID NO: 14547 - protein, 66 aa, Homo sapiens
MKTKLNIYNMQFLLFVFLVWDPARLVLANIQEDEAKNNITIFTRILDRLLDGYDNRLRPGLGGIYN

SEQ ID NO: 14548 - protein, 155 aa, Homo sapiens
MMHPVASSNPAFCGPGKPSCLNEDAMRAADQFDIYSSQQSKYSHTVNHKPMVCQRQDPLNETHLQTTSGRSIEIKDELKKKKNLNRSGKRGRPSGTTKSAGYRTSTGRPLGTTKAAGFKTSPGRPLGTTKAAGYKVSPGRPPGKKQQAFRCSSDA

SEQ ID NO: 14549 - protein, 84 aa, Homo sapiens
MELENIVANSLLLKARQVLCIPPQKHQLVQPFSGRPPQSSVQSSVSDLMSPLPASQESWRQSLGPQVPVLATVVLHTPSLLRNC

SEQ ID NO: 14550 - protein, 417 aa, Homo sapiens
MSAQCCAGQLACCCGSAGCSLCCDCCPRIRQSLSTRFMYALYFILVVVLCCIMMSTTVAHKMKEHIPFFEDMCKGIKAGDTCEKLVGYSAVYRVCFGMACFFFIFCLLTLKINNSKSCRAHIHNGFWFFKLLLLGAMCSGAFFIPDQDTFLNAWRYVGAVGGFLFIGIQLLLLVEFAHKWNKNWTAGTASNKLWYASLALVTLIMYSIATGGLVLMAVFYTQKDSCMENKILLGVNGGLCLLISLVAISPWVQNRQPHSGLLQSGVISCYVTYLTFSALSSKPAEVVLDEHGKNVTICVPDFGQDLYRDENLVTILGTSLLIGCILYSCLTSTTRSSSDALQGRYAAPELEIARCCFCFSPGGEDTEEQQPGKEGPRVIYDEKKGTVYIYSYFHFVFFLASLYVMMTVTNWFKNYQC

SEQ ID NO: 14551 - protein, 1601 aa, Homo sapiens
MNSPVDPGARQALRKKPPERTPEDLNTIYSYLHGMEILSNLREHQLRLMSARARYERYSGNQVLFCSETIARCWYILLSGSVLVKGSMVLPPCSFGKQFGGKRGCDCLVLEPSEMIVVENAKDNEDSILQREIPARQSRRRFRKINYKGERQTITDDVEVNSYLSLPADLTKMHLTENPHPQVTHVSSSQSGCSIASDSGSSSLSDIYQATESEVGDVDLTRLPEGPVDSEDDEEEDEEIDRTDPLQGRDLVRECLEKEPADKTDDDIEQLLEFMHQLPAFANMTMSVRRELCSVMIFEVVEQAGAIILEDGQELDSWYVILNGTVEISHPDGKVENLFMGNSFGITPTLDKQYMHGIVRTKVDDCQFVCIAQQDYWRILNHVEKNTHKVEEEGEIVMVHEHRELDRSGTRKGHIVIKATPERLIMHLIEEHSIVDPTYIEDFLLTYRTFLESPLDVGIKLLEWFKIDSLRDKVTRIVLLWVNNHFNDFEGDPAMTRFLEEFEKNLEDTKMNGHLRLLNIACAAKAKWRQVVLQKASRESPLQFSLNGGSEKGFGIFVEGVEPGSKAADSGLKRGDQIMEVNGQNFENITFMKAVEILRNNTHLALTVKTNIFVFKELLFRTEQEKSGVPHIPKIAEKKSNRHSIQHVPGDIEQTSQEKGSKKVKANTVSGGRNKIRKILDKTRFSILPPKLFSDGGLSQSQDDSIVGTRHCRHSLAIMPIPGTLSSSSPDLLQPTTSMLDFSNPSDIPDQVIRVFKVDQQSCYIIISKDTTAKEVVFHAVHEFGLTGASDTYSLCEVSVTPEGVIKQRRLPDQFSKLADRIQLNGRYYLKNNMETETLCSDEDAQELVKESQLSMLQLSTIEVATQLSMRDFDLFRNIEPTEYIDDLFKLNSKTGNTHLKRFEDIVNQETFWVASEILTEANQLKRMKIIKHFIKIALHCRECKNFNSMFAIISGLNLASVARLRGTWEKLPSKYEKHLQDLQDIFDPSRNMAKYRNILSSQSMQPPIIPLFPVVKKDMTFLHEGNDSKVDGLVNFEKLRMISKEIRQVVRMTSANMDPAMMFRQRSLSQGSTNSNMLDVQGGAHKKRARRSSLLNAKKLYEDAQMARKVKQYLSSLDVETDEEKFQMMSLQWEPAYGTLTKNLSEKRSAKSSEMSPVPMRSAGQTTKAHLHQPHRVSQVLQVPAVNLHPIRKKGQTKDPALNTSLPQKVLGTTEEISGKKHTEDTISVASSLHSSPPASPQGSPHKGYTLIPSAKSDNLSDSSHSEISSRSSIVSNCSVDSMSAALQDERCSSQALAVPESTGALEKTEHASGIGDHSQHGPGWTLLKPSLIKCLAVSSSVSNEEISQEHIIIEAADSGRGSWTSCSSSSHDNFQSLPNPKSWDFLNSYRHTHLDDPIAEVEPTDSEPYSCSKSCSRTCGQCKGSLERKSWTSSSSLSDTYEPNYGTVKQRVLESTPAESSEGLDPKDATDPVYKTVTSSTEKGLIVYCVTSPKKDDRYREPPPTPPGYLGISLADLKEGPHTHLKPPDYSVAVQRSKMMHNSLSRLPPASLSSNLVACVPSKIVTQPQRHNLQPFHPKLGDVTDADSEADENEQVSAV

SEQ ID NO: 14552 - protein, 353 aa, Homo sapiens
MASSSGSKAEFIVGGKYKLVRKIGSGSFGDIYLAINITNGEEVAVKLESQKARHPQLLYESKLYKILQGGVGIPHIRWYGQEKDYNVLVMDLLGPSLEDLFNFCSRRFTMKTVLMLADQMISRIEYVHTKNFIHRDIKPDNFLMGIGRHCNKCLESPVGKRKRSMTVSTSQDPSFSGLNQLFLIDFGLAKKYRDNRTRQHIPYREDKNLTGTARYASINAHLGIEQSRRDDMESLGYVLMYFNRTSLPWQGLKAATKKQKYEKISEKKMSTPVEVLCKGFPAEFAMYLNYCRGLRFEEAPDYMYLRQLFRILFRTLNHQYDYTFDWTMLKQKAAQQAASSSGQGQQAQTPTGF

SEQ ID NO: 14553 - protein, 129 aa, Homo sapiens
MVFLPLKWSLATMSFLLSSLLALLTVSTPSWCQSTEASPKRSDGTPFPWNKIRLPEYVIPVHYDLLIHANLTTLTFWGTTKVEITASQPTSTIILHSHHLQISRATLRKGAGERLSEEPLQVLEHPRQE

SEQ ID NO: 14554 - protein, 302 aa, Homo sapiens
MLVIKKGNTKDLQLSGFPVVGNLPSQPVKNGTGPSVYKGLVPKPAAPPTKPTQWKSQTKENKVGTSFPHESTFGVGNFNAFKSTAKNFSPSTNSVKECNRSNSSSPVDKLNQQPRLTKLTRMRTDKKSEFLKALKRDRVEEEHEDESRAGSEKDDDSFNLHNSNSTHQERDINRNFDENEIPQENGNASVISQQIIRSSTFPQTDVLSSSLEAEHRLLKEMGWQEDSENDETCAPLTEDEMREFQVISEQLQKNGLRKNGILKNGLICDFKFGPWKNSTFKPTTENDDTETSSSDTSDDDDV

SEQ ID NO: 14555 - protein, 112 aa, Homo sapiens
MGPEALSSLLLLLLVASGDADMKGHFDPAKCRYALGMQDRTIPDSDISASSSWSDSTAARHSRLESSDGDGAWCPAGSVFPKEEEYLQVDLQRLHLVALVGTQGRHAGGLGK

SEQ ID NO: 14556 - protein, 161 aa, Homo sapiens
MKSLLLLVLISICWADHLSDNYTLDHDRAIHIQAENGPHLLVEAEQAKVFSHRGGNVTLPCKFYRDPTAFGSGIHKIRIKWTKLTSDYLKEVDVFVSMGYHKKTYGGYQGRVFLKGGSDSDASLVITDLTLEDYGRYKCEVIEGLEDDTVVVALDLQGMYL

SEQ ID NO: 14557 - protein, 57 aa, Homo sapiens
MGLGTLSPRMLVWLVASGIVFYGELWVCAGLDYDYTFDGNEEDKTETIDYKDPCKAD

SEQ ID NO: 14558 - protein, 569 aa, Homo sapiens
MAPPVRLERPFPSRRFPGLLLAALVLLLSSFSDQCNVPEWLPFARPTNLTDDFEFPIGTYLNYECRPGYSGRPFSIICLKNSVWTSAKDKCKRKSCRNPPDPVNGMAHVIKDIQFRSQIKYSCPKGYRLIGSSSATCIISGNTVIWDNKTPVCDRIICGLPPTIANGDFTSISREYFHYGSVVTYHCNLGSRGKKVFELVGEPSIYCTSKDDQVGIWSGPAPQCIIPNKCTPPNVENGILVSDNRSLFSLNEVVEFRCQPGFGMKGPSHVKCQALNKWEPELPSCSRVCQPPPDVLHAERTQRDKDNFSPGQEVFYSCEPGYDLRGSTYLHCTPQGDWSPAAPRCEVKSCDDFLGQLPNGHVLFPLNLQLGAKVDFVCDEGFQLKGSSASYCVLAGMESLWNSSVPVCERKSCETPPVPVNGMVHVITDIHVGSRINYSCTTGHRLIGHSSAECILSGNTAHWSMKPPICQQIFCPNPPAILNGRHTGTPLGDIPYGKEVSYTCDPHPDRGMTFNLIGESTIRRTSEPHGNGVWSSPAPRCELPVGAGSHDALIVGKFYEVFAEEFCHL

SEQ ID NO: 14559 - protein, 91 aa, Homo sapiens
TPGPLPVLLLLLAGAPAARPTPPTCYSRMRALSQEITRDFNLLQVSEPSEPCVRYLPRLYLDIHDLVFLLDDCNALEYPIPVTTVLPDRQR

SEQ ID NO: 14560 - protein, 35 aa, Homo sapiens
MGPEALSSLLLLLLVASGDADMKGHFDPGPDHPRQ

SEQ ID NO: 14561 - protein, 662 aa, Homo sapiens
MKKFSRMPKSEGGSGGGAAGGGAGGAGAGAGCGSGGSSVGVRVFAVGRHQVTLEESLAEGGFSTVFLVRTHGGIRCALKRMYVNNMPDLNVCKREITIMKELSGHKNIVGYLDCAVNSISDNVWEVLILMEYCRAGQVVNQMNKKLQTGFTEPEVLQIFCDTCEAVARLHQCKTPIIHRDLKVENILLNDGGNYVLCDFGSATNKFLNPQKDGVNVVEEEIKKYTTLSYRAPEMINLYGGKPITTKADIWALGCLLYKLCFFTLPFGESQVAICDGNFTIPDNSRYSRNIHCLIRFMLEPDPEHRPDIFQVSYFAFKFAKKDCPVSNINNSSIPSALPEPMTASEAAARKSQIKARITDTIGPTETSIAPRQRPKANSATTATPSVLTIQSSATPVKVLAPGEFGNHRPKGALRPGNGPEILLGQGPPQQPPQQHRVLQQLQQGDWRLQQLHLQHRHPHQQQQQQQQQQQQQQQQQQQQQQQQQQQHHHHHHHHLLQDAYMQQYQHATQQQQMLQQQFLMHSVYQPQPSASQYPTMMPQYQQAFFQQQMLAQHQPSQQQASPEYLTSPQEFSPALVSYTSSLPAQVGTIMDSSYSANRSVADKEAIANFTNQKNISNPPDMSGWNPFGEDNFSKLTEEELLDREFDLLRSSKGHLKAYFASQ

SEQ ID NO: 14562 - protein, 53 aa, Homo sapiens
MLPCLALLLLMELSVCTVAGDGGEEQTLSTEAETWVIVALEVLLGRGSDEGRG

SEQ ID NO: 14563 - protein, 898 aa, Homo sapiens
MAVRPGLWPALLGIVLAAWLRGSGAQQSATVANPVPGANPDLLPHFLVEPEDVYIVKNKPVLLVCKAVPATQIFFKCNGEWVRQVDHVIERSTDGSSGLPTMEVRINVSRQQVEKVFGLEEYWCQCVAWSSSGTTKSQKAYIRIAYLRKNFEQEPLAKEVSLEQGIVLPCRPPEGIPPAEVEWLRNEDLVDPSLDPNVYITREHSLVVRQARLADTANYTCVAKNIVARRRSASAAVIVYVNGGWSTWTEWSVCSASCGRGWQKRSRSCTNPAPLNGGAFCEGQNVQKTACATLCPVDGSWSPWSKWSACGLDCTHWRSRECSDPAPRNGGEECQGTDLDTRNCTSDLCVHTASGPEDVALYVGLIAVAVCLVLLLLVLILVYCRKKEGLDSDVADSSILTSGFQPVSIKPSKADNPHLLTIQPDLSTTTTTYQGSLCPRQDGPSPKFQLTNGHLLSPLGGGRHTLHHSSPTSEAEEFVSRLSTQNYFRSLPRGTSNMTYGTFNFLGGRLMIPNTGISLLIPPDAIPRGKIYEIYLTLHKPEDVRLPLAGCQTLLSPIVSCGPPGVLLTRPVILAMDHCGEPSPDSWSLRLKKQSCEGSWEDVLHLGEEAPSHLYYCQLEASACYVFTEQLGRFALVGEALSVAAAKRLKLLLFAPVACTSLEYNIRVYCLHDTHDALKEVVQLEKQLGGQLIQEPRVLHFKDSYHNLRLSIHDVPSSLWKSKLLVSYQEIPFYHIWNGTQRYLHCTFTLERVSPSTSDLACKLWVWQVEGDGQSFSINFNITKDTRFAELLALESEAGVPALVGPSAFKIPFLIRQKIISSLDPPCRRGADWRTLAQKLHLDSHLSFFASKPSPTAMILNLWEARHFPNGNLSQLAAAVAGLGQPDAGLFTVSEAEC

SEQ ID NO: 14564 - protein, 608 aa, Homo sapiens
MALITLRKNLYRLSDFQMHRALAALKNKPLNHVHKVVKERLCPWLCSRQPEPFGVKFHHAHCKKFHSKNGNDLHPLGGPVFSQVSDCDRLEQNVKNEESQMFYRRLSNLTSSEEVLSFISTMETLPDTMAAGALQRICEVEKKDGDQGLPKEILENSIFQALCFQFEKEPSQLSNTSLVTALQALILLHVDPQSSLLLNLVAECQNRLRKGGMEVRNLCILGESLITLHSSGCVTLELIINQLQGEKLETFTPEDIVALYRILQACTEKVDEHQTFLNKINNFSLSIVSNLSPKLISQMLTALVVLDQSQAFPLIIKLGKYVVRHVPHFTNEELRRVLEAFIYFGHHDTFFTKALEHRVAAVCLTLDPEVVCRVMEYCSRELILSKPILNAVAETFVCQTEKFSPRQISALMEPFGKLNYLPPNASALFRKLENVLFTHFNYFPPKSLLKLLHSCSLNECHPVNFLAKIFKPLFLQRLQGKESHLDTLSRAQLTQLFLASVLECPFYKGPKLLPKYQVKSFLTPCCSLETPVDSQLYRYVKIGLTNLLGARLYFAPKVLTPYCYTIAFSPIDQCKVEGIKAKQRNEYRKIVFVRVSHEEFFLSSLTRC

SEQ ID NO: 14565 - protein, 123 aa, Homo sapiens
MAADQRPKADTLALRQRLISSSCRLFFPEDPVKIVRAQGQYMYDEQGAEYIDCISNVAHVGHCHPLVVQAAHEQNQVLNTNSRYLHDNIVDYAQRLSETLPEQLCVFYFLNSGWGNSSSKKGT

SEQ ID NO: 14566 - protein, 107 aa, Homo sapiens
MEGKWLLCMLLVLGTAIVEAHDGHDDDVIDIEDDLDDVIEEVEDSKPDTTAPPSSPKVTYKAPVPTGEVYFADSFDRGTLSGWILSKAKKDDTDDEIAKYDGKWEVE

SEQ ID NO: 14567 - protein, 42 aa, Homo sapiens
MAGRVPSLLVLLVFPSSCLAFRSPLSVFKRFKETTRPFSNEC

SEQ ID NO: 14568 - protein, 168 aa, Homo sapiens
MLLRSKPALPPPLMLLLLGPLGPLSPGALPRPAQAQDVVDLDFFTQEPLHLVSPSFLSVTIDANLATDPRFLILLGSPKLRTLARGLSPAYLRFGGTKTDFLIFDPKKESTFEERSYWQSQVNQDICKYGSIPPDVEEKLRLEWPYQEQLLLREHYQKKFKNSTYSTS

SEQ ID NO: 14569 - protein, 198 aa, Homo sapiens
MHSEAEESKEVATDVFNSKNLAVQAQKKILGKMVSKSIATTLIDDTSSEVLDELYRVTREYTQNKKEAEKIIKNLIKTVIKLAILYRNNQFNQDELALMEKFKKKVHQLAMTVVSFHQVDYTFDRNVLSRLLNECREMLHQIIQRHLTAKSHGRVNNVFDHFSDCEFLAALYNPFGNFKPHLQKLCDGINKMLDEENI

SEQ ID NO: 14570 - protein, 161 aa, Homo sapiens
MTSIFHFAIIFMLILQIRIQLSEESEFLVDRSKNGLIHVPKDLSQKTTILNISQNYISELWTSDILSLSKLRILIISHNRIQYLDISVFKFNQELEYLDLSHNKLVKISCHPTVNLKHLDLSFNAFDALPICKEFGNMSQLKFLGLSTTHLEKSSVLPIAH

SEQ ID NO: 14571 - protein, 1081 aa, Homo sapiens
MPRRKQEQPKRLPSHVSRQEEAEGELSEGEHWYGNSSETPSEASYGEVQENYKLSLEDRIQEQSTSPDTSLGSTTPSSHTLELVALDSEVLRDSLQCQDHLSPGVSSLCDDDPGSNKPLSSNLRRLLEAGSLKLDAAATANGRVESPVNVGSNLSFSPPSHHAQQLSVLARKLAEKQEQNDQYTPSNRFIWNQGKWLPNSTTTCSLSPDSAILKLKAAANAVLQDKSLTRTEETMRFESFSSPFSSQSASSTLAALSKKVSERSLTPGQEHPPPASSFLSLASMTSSAALLKEVAARAAGSLLAEKSSLLPEDPLPPPPSEKKPEKVTPPPPPPPPPPPPPPPQSLELLLLPVPKGRVSKPSNSASEEESGKPFQCPICGLVIKRKSYWKRHMVIHTGLKSHQCPLCPFRCARKDNLKSHMKVHQHQDRGETFQCQLCPFTSSRHFSLKLHMRCHQHFLRTEAKVKEEIPDPDVKGSPHLSDSACLGQQREGGGTELVGTMMTSNTPERTSQGGAGVSPLLVKEEPKEDNGLPTSFTLNAADRPANHTKLKDPSEYVANSASALFSQDISVKMASDFLMKLSAANQKEPMNLNFKVKEEPKEGESLSTTLPRSSYVFSPESEVSAPGVSEDALKPQEGKGSVLRRDVSVKAASELLMKLSAESYKETQMVKIKEEPMEVDIQDSHVSISPSRNVGYSTLIGREKTEPLQKMPEGRVPPERNLFSQDISVKMASELLFQLSEKVSKEHNHTKENTIRTTTSPFFSEDTFRQSPFTSNSKELLPSDSVLHGRISAPETEKIVLEAGNGLPSWKFNDQLFPCDVCGKVFGRQQTLSRHLSLHTEERKYKCHLCPYAAKCRANLNQHLTVHSVKLVSTDTEDIVSAVTSEGSDGKKHPYYYSCHVCGFETELNVQFVSHMSLHVDKEQWMFSICCTACDFVTMEEAEIKTHIGTKHTGEDRKTPSESNSPSSSSLSALSDSANSKDDSDGSQKNKGGNNLLVISVMPGSQPSLNSEEKPEKGFECVFCNFVCKTKNMFERHLQIHLITRMFECDVCHKFMKTPEQLLEHKKCHTVPTGGLNSGQW

SEQ ID NO: 14572 - protein, 34 aa, Homo sapiens
MKENVASATVFTLLLFLNTCLLNGQLPPGKPEIF

SEQ ID NO: 14573 - protein, 452 aa, Homo sapiens
MFATSGAVAAGKPYSCSECGKSFCYSSVLLRHERAHGGDGRFRCLECGERCARAADLRAHRRTHAGQTLYICSECGQSFRHSGRLDLHLGAHRQRCRTCPCRTCGRRFPHLPALLLHRRRQHLPERPRRCPLCARTFRQSALLFHQARAHPLGTTSDPAAPPHRCAQCPRAFRSGAGLRSHARIHVSRSPTRPRVSDAHQCGVCGKCFGKSSTLTRHLQTHSGEKPFKCPECGKGFLESATLVRHQRTHTGEKPYACGDCGRCFSESSTLLRHRRSHQGERPHACATCGKGFGQRSDLVVHQRIHTGEKPFACPECGRRFSDRSDLTKHRRTHTGEKPYRCELCGKRFTCVSNLNVHRRNHAGHKPHKCPECSKAFSVASKLALHRKTHLGERPAECAECGKCFSHSRSLSQHQRAHTRARTAAAVAIQSAVGTALVFEGPAEQEKPGFSVS

SEQ ID NO: 14574 - protein, 159 aa, Homo sapiens
MRSEALLLYFTLLHFAGAGFPEDSEPISISHGNYTKQYPVFVGHKPGRNTTQRHRLDIQMIMIMNGTLYIAARDHIYTVDIDTSHTEEIYCSKKLTWKSRQADVDTCRMKGKHKDECHNFIKVLLKKNDDALFVCGTNAFNPSCRNYKMDTLEPFGDEF

SEQ ID NO: 14575 - protein, 55 aa, Homo sapiens
MRVLLAALGLLFLGALRAFPQGCSRHSSAHRGLLTAGSSVSLTTTWMRPTAVQPA

SEQ ID NO: 14576 - protein, 254 aa, Homo sapiens
MKGTCVIAWLFSSLGLWRLAHPEAQGTTQCQRTEHPVISYKEIGPWLREFRAKNAVDFSQLTFDPGQKELVVGARNYLFRLQLEDLSLIQAVEWECDEATKKACYSKGKSKEECQNYIRVLLVGGDRLFTCGTNAFTPVCTNRSLSNLTEIHDQISGMARCPYSPQHNSTALLTAGGELYAATAMDFPGRDPAIYRSLGILPPLRTAQYNSKWLNEPNFVSSYDIGNFTYFFFRENAVEHDCGKTVFSRAARVC

SEQ ID NO: 14577 - protein, 32 aa, Homo sapiens
MAELGEADEAELQRLVAAEQQKAQFTAQATCP

SEQ ID NO: 14578 - protein, 45 aa, Homo sapiens
MYGKIIFVLLLSGNFEHSAEGPSWLPLRRSPSTSTPLHLGAIPLI

SEQ ID NO: 14579 - protein, 126 aa, Homo sapiens
MEQRPRGCAAVAAALLLVLLGARAQGGTRSPRCDCAGDFHKKIGLFCCRGCPAASQVALENCSAVADTRCGCKPGWFVECQVSQCVSSSPFYCQPCLDCGALHRHTRLLCHPSVTLGQRPHPSSTS

SEQ ID NO: 14580 - protein, 311 aa, Homo sapiens
MHQKLLKSAHYIELGSYQYWPVLVPRGIRLYTYEQIPGSLKDNPYITDGYRAYLPSRLCIKSLFILSNETVNIWSHLLGFFLFFTLGIYDMTSVLPSASASREDFVICSICLFCFQVCMLCSVGYHLFSCHRSEKTCRRWMALDYAGISIGILGCYVSGVFYAFYCNNYWRQVYLITVLAMILAVFFAQIHPNYLTQQWQRLRSIIFCSVSGYGVIPTLHWVWLNGGIGAPIVQDFAPRVIVMYMIALLAFLFYISKVPERYFPGQLNYLGSSHQIWHILAVVMLYWWHQSTVYVMQYRHSKPCPDYVSHL

SEQ ID NO: 14581 - protein, 396 aa, Homo sapiens
MMQQKAQITSQQLRKAQLQVDRFAMELEQSRNLSNTIVHIDMDAFYAAVEMRDNPELKDKPIAVGSMSMLSTSNYHARRFGVRAAMPGFIAKRLCPQLIIVPPNFDKYRAVSKEVKEILADYDPNFMAMSLDEAYLNITKHLEERQNWPEDKRRYFIKMGSSVENDNPGKEVNKLSEHERSISPLLFEESPSDVQPPGDPFQVNFEEQNNPQILQNSVVFGTSAQEVVKEIRFRIEQKTTLTASAGIAPNTMLAKVCSDKNKPNGQYQILPNRQAVMDFIKDLPIRKVSGIGKVTEKMLKALGIITCTELYQQRALLSLLFSETSWHYFLHISLGLGSTHLTRDGERKSMSVERTFSEINKAEEQYSLCQELCSELAQDLQKERLKKKYLPLLRNC

SEQ ID NO: 14582 - protein, 68 aa, Homo sapiens
MRLHLLLLLALCGAGTTAAELSYSLRGNWSICNGNGSLELPGAVPGCVHSALFQQGLIQSLTLSPRLE

SEQ ID NO: 14583 - protein, 161 aa, Homo sapiens
MKLLHVFLLFLCFHLRFCKVTYTSQEDLVEKKCLAKKYTHLSCDKVFCQPWQRCIEGTCVCKLPYQCPKNGTAVCATNRRSFPTYCQQKSLECLHPGTKFLNNGTCTAEGKFSVSLKHGNTDSEGIVEVKLVDQDKTMFICKSSWSMREANVACLDLGFQQ

SEQ ID NO: 14584 - protein, 1028 aa, Homo sapiens
MADKTPGGSQKASSKTRSSDVHSSGSSDAHMDASGPSDSDMPSRTRPKSPRKHNYRNESARESLCDSPHQNLSRPLLENKLKAFSIGKMSTAKRTLSKKEQEELKKKEDEKAAAEIYEEFLAAFEGSDGNKVKTFVRGGVVNAAKEEHETDEKRGKIYKPSSRFADQKNPPNQSSNERPPSLLVIETKKPPLKKGEKEKKKSNLELFKEELKQIQEERDERHKTKGRLSRFEPPQSDSDGQRRSMDAPSRRNRSSVLDDYAPGSHDVGDPSTTNLYLGNINPQMNEEMLCQEFGRFGPLASVKIMWPRTDEERARERNCGFVAFMNRRDAERALKNLNGKMIMSFEMKLGWGKAVPIPPHPIYIPPSMMEHTLPPPPSGLPFNAQPRERLKNPNAPMLPPPKNKEDFEKTLSQAIVKVVIPTERNLLALIHRMIEFVVREGPMFEAMIMNREINNPMFRFLFENQTPAHVYYRWKLYSILQANSPTKWRTEDFRMFKNGSFWRPPPLNPYLHGMSEEQETEAFVEEPSKKGALKEEQRDKLEEILRGLTPRKNDIGDAMVFCLNNAEAAEEIVDCITESLSILKTPLPKKIARLYLVSDVLYNSSAKVANASYYRKFFETKLCQIFSDLNATYRTIQGHLQSENFKQRVMTCFRAWEDWAIYPEPFLIKLQNIFLGLVNIIEEKETEDVPDDLDGAPIEEELDGAPLEDVDGIPIDATPIDDLDGVPIKSLDDDLDGVPLDATEDSKKNEPIFKVAPSKWEAVDESELEAQAVTTSKWELFDQHEESEEEENQNQEEESEDEEDTQSSKSEEHHLYSNPIKEEMTESKFSKYSEMSEEKRAKLREIELKVMKFQDELESGKRPKKPGQSFQEQVEHYRDKLLQREKEKELERERERDKKDKEKLESRSKDKKEKDECTPTRKERKRRHSTSPSPSRSSSGRRVKSPSPKSERSERSERSHKESSRSRSSHKDSPRDVSKKAKRSPSGSRTPKRSRRSRSRSPKKSGKKSRSQSRSPHRSHKKSKKNKH

SEQ ID NO: 14585 - protein, 342 aa, Homo sapiens
MALFAVFQTTFFLTLLSLRTYQSEVLAERLPLTPVSLKVSTNSTRQSLHLQWTVHNLPYHQELKMVFQIQISRIETSNVIWVGNYSTTVKWNQVLHWSWESELPLECATHFVRIKSLVDDAKFPEPNFWSNWSSWEEVSVQDSTGQDILFVFPKDKLVEEGTNVTICYVSRNIQNNVSCYLEGKQIHGEQLDPHVTAFNLNSVPFIRNKGTNIYCEASQGNVSEGMKGIVLFVSKVLEEPKDFSCETEDFKTLHCTWDPGTDTALGWSKQPSQSYTLFESFSGEKKLCTHKNWCNWQITQDSQETYNFTLIAENYLRKRSVNILFNLTHRGETRVVTAHRGH

SEQ ID NO: 14586 - protein, 973 aa, Homo sapiens
MEVTCLLLLALIPFHCRGQGVYAPAQAQIVHAGQACVVKEDNISERVYTIREGDTLMLQCLVTGHPRPQVRWTKTAGSASDKFQETSVFNETLRIERIARTQGGRYYCKAENGVGVPAIKSIRVDVQYLDEPMLTVHQTVSDVRGNFYQEKTVFLRCTVNSNPPARFIWKRGSDTLSHSQDNGVDIYEPLYTQGETKVLKLKNLRPQDYASYTCQVSVRNVCGIPDKAITFRLTNTTAPPALKLSVNETLVVNPGENVTVQCLLTGGDPLPQLQWSHGPGPLPLGALAQGGTLSIPSVQARDSGYYNCTATNNVGNPAKKTVNLLVRSMKNATFQITPDVIKESENIQLGQDLKLSCHVDAVPQEKVTYQWFKNGKPARMSKRLLVTRNDPELPAVTSSLELIDLHFSDYGTYLCMASFPGAPVPDLSVEVNISSETVPPTISVPKGRAVVTVREGSPAELQCEVRGKPRPPVLWSRVDKEAALLPSGLPLEETPDGKLRLERVSRDMSGTYRCQTARYNGFNVRPREAQVQLNVQFPPEVEPSSQDVRQALGRPVLLRCSLLRGSPQRIASAVWRFKGQLLPPPPVVPAAAEAPDHAELRLDAVTRDSSGSYECSVSNDVGSAACLFQVSAKAYSPEFYFDTPNPTRSHKLSKNYSYVLQWTQREPDAVDPVLNYRLSIRQLNQHNAVVKAIPVRRVEKGQLLEYILTDLRVPHSYEVRLTPYTTFGAGDMASRIIHYTEPINSPNLSDNTCHFEDEKICGYTQDLTDNFDWTRQNALTQNPKRSPNTGPPTDISGTPEGYYMFIETSRPRELGDRARLVSPLYNASAKFYCVSFFYHMYGKHIGSLNLLVRSRNKGALDTHAWSLSGNKGNVWQQAHVPISPSGPFQIIFEGVRGPGYLGDIAIDDVTLKKGECPRKQTDPNKGARREGGGGAESGGSCAWRGFLSVEGGCLGLNRGSECLSDGNHVALTV

SEQ ID NO: 14587 - protein, 536 aa, Homo sapiens
MDFLLALVLVSSLYLQAAAEFDGRWPRQIVSSIGLCRYGGRIDCCWGWARQSWGQCQPVCQPRCKHGECIGPNKCKCHPGYAGKTCNQDLNECGLKPRPCKHRCMNTYGSYKCYCLNGYMLMPDGSCSSALTCSMANCQYGCDVVKGQIRCQCPSPGLQLAPDGRTCVDVDECATGRASCPRFRQCVNTFGSYICKCHKGFDLMYIGGKYQCHDIDECSLGQYQCSSFARCYNIRGSYKCKCKEGYQGDGLTCVYIPKVMIEPSGPIHVPKGNGTILKGDTGNNNWIPDVGSTWWPPKTPYIPPIITNRPTSKPTTRPTPKPTPIPTPPPPPPLPTELRTPLPPTTPERPTTGLTTIAPAASTPPGGITVDNRVQTDPQKPRGDVFSVLVHSCNFDHGLCGWIREKDNDLHWEPIRDPAGGQYLTVSAAKAPGGKAARLVLPLGRLMHSGDLCLSFRHKVTGLHSGTLQVFVRKHGAHGAALWGRNGGHGWRQTQITLRGADIKSVVFKGEKRRGHTGEIGLDDVSLKKGHCSEER

SEQ ID NO: 14588 - protein, 329 aa, Homo sapiens
MPGKHQHFQEPEVGCCGKYFLFGFNIVFWVLGALFLAIGLWAWGEKGVLSNISALTDLGGLDPVWLFVVVGGVMSVLGFAGCIGALRENTFLLKFFSVFLGLIFFLELATGILAFVFKDWIRDQLNLFINNNVKAYRDDIDLQNLIDFAQEYWSCCGARGPNDWNLNIYFNCTDLNPSRERCGVPFSCCVRDPAEDVLNTQCGYDVRLKLELEQQGFIHTKGCVGQFEKWLQDNLIVVAGVFMGIALLQIFGICLAQNLVSDIKAVKANWSKWNDDFENHWLTPTISEVLSTAGPQQNSLTGAPGPAPPSRHVFFGLGGLYPEPTFKNW

SEQ ID NO: 14589 - protein, 111 aa, Homo sapiens
MARAAPLLAALTALLAAAAAGGDAPPGKIAVVGAGIGGSAVAHFLQQHFGPRVQIDVYEKGTVGGRLATISVNKQHYESGAASFHSLSLHMQDFVKLLDGATETREGKELA

SEQ ID NO: 14590 - protein, 123 aa, Homo sapiens
MGKCRGLRTARKLRSHRRDQKWHDKQYKKAHLGTALKANPFGGASHAKGIVLEKVGVEAKQPNSAIRKCVRVQLIKNGKKITAFVPNDGCLNFIEVSISTLSYLLFLGWPPSHFYLMQGSFLT

SEQ ID NO: 14591 - protein, 99 aa, Homo sapiens
MQTAGALFISPALIRCCTRGLIRPVSASFLNSPVNSSKQPSYSNFPLQVARREFQTSVVSRDIDTAAKFIGAGAATVGVAGSGAGIGTVFGSLIIGYAR

SEQ ID NO: 14592 - protein, 54 aa, Homo sapiens
MGPERTGAAPLPLLLVLALSQGYWLVHPGVAFLRTEWEMCINVLLTYPLPHVKN

SEQ ID NO: 14593 - protein, 138 aa, Homo sapiens
MGPEALSSLLLLLLVASGDADMKGHFDPAKCRYALGMQDRTIPDSDISASSSWSDSTAARHSRLESSDGDGAWCPAGSVFPKEEEYLQVDLQRLHLVALVGTQGRHAGGLGKEFSRSYRLRYSRDGRRWMGWKDRWGQ

SEQ ID NO: 14594 - protein, 253 aa, Homo sapiens
METDLEVIIKDNSLVLTPSHIKAYMLMTLQGLEYLHQHWILHRDLKPNNLLLDENGVLKLADFGLAKSFGSPNRAYTHQVVTRWYRAPELLFGARMYGVGVDMWAVGCILAELLLRVPFLPGDSDLDQLTRIFETLGTPTEEQWPDMCSLPDYVTFKSFPGIPLHHIFSAAGDDLLDLIQGLFLFNPCARITATQALKMKYFSNRPGPTPGCQLPRPNCPVETLKEQSNPALAIKRKRTEALEQGGLPKKLIF

SEQ ID NO: 14595 - protein, 83 aa, Homo sapiens
MAELGEADEAELQRLVAAEQQKAQFTAQVHHFMELCWDKCVEKPGNRLDSRTENCLSSCVDRFIDTTLAITSRFAQIVQKGGQ

SEQ ID NO: 14596 - protein, 46 aa, Homo sapiens
MLLLWVSVVAALALAVLAPGAGEQRRRAAKAPNVVLVVSDSFIPDD

SEQ ID NO: 14597 - protein, 822 aa, Homo sapiens
MTRRRSRPSGGAGRRERARAAGPQKPQAPEPPPPPSLEAGAGAGPPEAPAEPDHDGPREDDEPNLVPGPQVPPASSQPVQTCCLLCHRERKGWEEGPSQNGLVLQGEKLPPDFMPKLVKNLLGEMPLWVCQSCRKSMEEDERQTGREHAVAISLSHTSCKSQSCGDDSHSSSSSSSSSSSSSSSSCPGNSGDWDPSSFLSAHKLSGLWNSPHSSGAMPGSSLGSPPTIPGEAFPVSEHHQHSDLTAPPNSPTGHHPQPASLIPSHPSSFGSPPHPHLLPTTPAAPFPAQASECPVAAATAPHTPGPCQSSHLPSTSMPLLKMPPPFSGCSHPCSGHCGGHCSGPLLPPPSSQPLPSTHRDPGCKGHKFAHSGLACQLPQPCEADEGLGEEEDSSSERSSCTSSSTHQRDGKFCDCCYCEFFGHNAEKEKAQLAAEALKQANRVSGSREPRPARERLLEWPDRELDRVNSFLSSRLQEIKNTVKDSIRASFSVCELSMDSNGFSKEGAAEPEPQSLPPSNLSGSSEQQPDINLDLSPLTLGSPQNHTLQAPGEPAPPWAEMRGPHPPWTEVRGPPPGIVPENGLVRRLNTVPNLSRVIWVKTPKPGYPSSEEPSSKEVPSCKQELPEPVSSGGKPQKGKRQGSQAKKSEASPAPRPPASLEVPSAKGQVAGPKQPGRVLELPKVGSCAEAGEGSRGSRPGPGWAGSPKTEKEKGSSWRNWPGEAKARPQEQESVQPSGPARPQSLPQGKGRSRRSRNKQEKPASSLDDVFLPKDMDGVEMDETDREVEYFKRFCLDSAKQTRQKVAVNWTNFSLKKTTPSTAQ

SEQ ID NO: 14598 - protein, 574 aa, Homo sapiens
MKITSTSCICPVLVCLCFVQRCYGTAHHSSIKVMRNQTKHIEGETEVHHRPKRGWVWNQFFVLEEHMGPDPQYVGKLHSNSDKGDGSVKYILTGEGAGTIFIIDDTTGDIHSTKSLDREQKTHYVLHAQAIDRRTNKPLEPESEFIIKVQDINDNAPKFTDGPYIVTVPEMSDMGTSVLQVTATDADDPTYGNSARVVYSILQGQPYFSVDPKTGVIRTALHNMDREAREHYSVVIQAKDMAGQVGGLSGSTTVNITLTDVNDNPPRFPQKHYQLYVPESAQVGSAVGKIKANDADTGSNADMTYSIINGDGMGIFSISTDKETREGILSLKKPLNYEKKKSYTLNIEGANTHLDFRFSHLGPFKDATMLKIIVGDVDEPPLFSMPSYLMEVYENAKIGTVVGTVLAQDPDSTNSLVRYFINYNVEDDRFFNIDANTGTIRTTKVLDREETPWYNITVTASEIDNPDLLSHVTVGIRVLDVNDNPPELAREYDIIVCENSKPGQVIHTISATDKDDFANGPRFNFFLDERLPVNPNFTLKDNEAAAPSPSGFVHAREMGVCGPAMQKPSCPRLV

SEQ ID NO: 14599 - protein, 942 aa, Homo sapiens
MGPERTGAAPLPLLLVLALSQGILNCCLAYNVGLPEAKIFSGPSSEQFGYAVQQFINPKGNWLLVGSPWSGFPENRMGDVYKCPVDLSTATCEKLNLQTSTSIPNVTEMKTNMSLGLILTRNMGTGGFLTCGPLWAQQCGNQYYTTGVCSDISPDFQLSASFSPATQPCPSLIDVVVVCDESNSIYPWDAVKNFLEKFVQGLDIGPTKTQVGLIQYANNPRVVFNLNTYKTKEEMIVATSQTSQYGGDLTNTFGAIQYARKYAYSAASGGRRSATKVMVVVTDGESHDGSMLKAVIDQCNHDNILRFGIAVLGYLNRNALDTKNLIKEIKAIASIPTERYFFNVSDEAALLEKAGTLGEQIFSIEGTVQGGDNFQMEMSQVGFSADYSSQNDILMLGAVGAFGWSGTIVQKTSHGHLIFPKQAFDQILQDRNHSSYLGYSVAAISTGESTHFVAGAPRANYTGQIVLYSVNENGNITVIQAHRGDQIGSYFGSVLCSVDVDKDTITDVLLVGAPMYMSDLKKEEGRVYLFTIKEGILGQHQFLEGPEGIENTRFGSAIAALSDINMDGFNDVIVGSPLENQNSGAVYIYNGHQGTIRTKYSQKILGSDGAFRSHLQYFGRSLDGYGDLNGDSITDVSIGAFGQVVQLWSQSIADVAIEASFTPEKITLVNKNAQIILKLCFSAKFRPTKQNNQVAIVYNITLDADGFSSRVTSRGLFKENNERCLQKNMVVNQAQSCPEHIIYIQEPSDVVNSLDLRVDISLENPGTSPALEAYSETAKVFSIPFHKDCGEDGLCISDLVLDVRQIPAAQEQPFIVSNQNKRLTFSVTLKNKRESAYNTGIVVDFSENLFFASFSLPVDGTEVTCQVAASQKSVACDVGYPALKREQQVTFTINFDFNLQNLQNQASLSFQALSESQEENKADNLVNLKIPLLYDAEIHLTR

SEQ ID NO: 14600 - protein, 64 aa, Homo sapiens
MLKVSAVLCVCAAAWCSQSLAAAAAVAAAGGRSDGGNFLDDKQWLTTISQYDKEVGQWNKFRDL

SEQ ID NO: 14601 - protein, 769 aa, Homo sapiens
MSQPGQKPAASPRPRRAAAARRTHEHVSEKTSESPSKPGEKKGSDEKKAASLGSSQSSRTYAGGTASATKVSASSGATSKSSSMNPTETKAVKTEPEKKSQSTKLSVVHEKKSQEGKPKEHTEPKSLPKQASDTGSNDAHNKKAVSRSAEQQPSEKSTEPKTKPQDMISAGGESVAGITAISGKPGDKKKEKKSLTPAVPVESKPDKPSGKSGMDAALDDLIDTLGGPEETEEENTTYTGPEVSDPMSSTYIEELGKREVTIPPKYRELLAKKEGITGPPADSSKPIGPDDAIDALSSDFTCGSPTAAGKKTEKEESTEVLKAQSAGTVRSAAPPQEKKRKVEKDTMSDQALEALSASLGTRQAEPELDLRSIKEVDEAKAKEEKLEKCGEDDETIPSEYRLKPATDKDGKPLLPEPEEKPKPRSESELIDELSEDFDRSECKEKPSKPTEKTEESKAAAPAPVSEAVCRTSMCSIQSAPPEPATLKGTVPDDAVEALADSLGKKEADPEDGKPVMDKVKEKAKEEDREKLGEKEETIPPDYRLEEVKDKDGKPLLPKESKEQLPPMSEDFLLDALSEDFSGPQNASSLKFEDAKLAAAISEVVSQTPASTTQAGAPPRDTSQSDKDLDDALDKLSDSLGQRQPDPDENKPMEDKVKEKAKAEHRDKLGERDDTIPPEYRHLLDDNGQDKPVKPPTKKSEDSKKPADDQDPIDALSGDLDSCPSTTETSQNTAKDKCKKAASSSKAPKNGGKAKDSAKTTEETSKPKDD

SEQ ID NO: 14602 - protein, 202 aa, Homo sapiens
MAAKVFESIGKFGLALAVAGGVVNSALYNVDAGHRAVIFDRFRGVQDIVVGEGTHFLIPWVQKPIIFDCRSRPRNVPVITGSKDLQNVNITLRILFRPVASQLPRIFTSIGEDYDERVLPSITTEILKSVVARFDAGELITQRELVSRQVSDDLTERAATFGLILDDVSLTHLTFGKEFTEAVEAKQVAQQEAERARFVVEK

SEQ ID NO: 14603 - protein, 1159 aa, Homo sapiens
MAHRGPSRASKGPGPTARAPSPGAPPPPRSPRSRPLLLLLLLLGACGAAGRSPEPGRLGPHAQLTRVPRSPPAGRAEPGGGEDRQARGTEPGAPGPSPGPAPGPGEDGAPAAGYRRWERAAPLAGVASRAQVSLISTSFVLKGDATHNQAMVHWTGENSSVILILTKYYHADMGKVLESSLWRSSDFGTSYTKLTLQPGVTTVIDNFYICPTNKRKVILVSSSLSDRDQSLFLSADEGATFQKQPIPFFVETLIFHPKEEDKVLAYTKESKLYVSSDLGKKWTLLQERVTKDHVFWSVSGVDADPDLVHVEAQDLGGDFRYVTCAIHNCSEKMLTAPFAGPIDHGSLTVQDDYIFFKATSANQTKYYVSYRRNEFVLMKLPKYALPKDLQIISTDESQVFVAVQEWYQMDTYNLYQSDPRGVRYALVLQDVRSSRQAEESVLIDILEVRGVKGVFLANQKIDGKVMTLITYNKGRDWDYLRPPSMDMNGKPTNCKPPDCHLHLHLRWADNPYVSGTVHTKDTAPGLIMGAGNLGSQLVEYKEEMYITSDCGHTWRQVFEEEHHILYLDHGGVIVAIKDTSIPLKILKFSVDEGLTWSTHNFTSTSVFVDGLLSEPGDETLVMTVFGHISFRSDWELVKVDFRPSFSRQCGEEDYSSWELSNLQGDRCIMGQQRSFRKRKSTSWCIKGRSFTSALTSRVCECRDSDFLCDYGFERSSSSESSTNKCSANFWFNPLSPPDDCALGQTYTSSLGYRKVVSNVCEGGVDMQQSQVQLQCPLTPPRGLQVSIQGEAVAVRPGEDVLFVVRQEQGDVLTTKYQVDLGDGFKAMYVNLTLTGEPIRHRYESPGIYRVSVRAENTAGHDEAVLFVQVNSPLQALYLEVVPVIGLNQEVNLTAVLLPLNPNLTVFYWWIGHSLQPLLSLDNSVTTRFSDTGDVRVTVQAACGNSVLQDSRVLRVLDQFQVMPLQFSKELDAYNPNTPEWREDVGLVVTRLLSKETSVPQELLVTVVKPGLPTLADLYVLLPPPRPTRKRSLSSDKRLAAIQQVLNAQKISFLLRGGVRVLVALRDTGTGAEQLGGGGGYWAVVVLFVIGLFAAGAFILYKFKRKRPGRTVYAQMHNEKEQEMTSPVSHSEDVQGAVQGNHSGVVLSINSREMHSYLVS

SEQ ID NO: 14604 - protein, 71 aa, Homo sapiens
MKRSLQALYCQLLSFLLILALTEALAFAIQEPSPRESLQVLPSGTPPGTMVTAPHSSTRHTSVVMLTPNPD

SEQ ID NO: 14605 - protein, 1308 aa, Homo sapiens
MGSKDHAVFFREMTQLILNEMPKAGYSSILNDFVESNFFVIDGDSLLVTCLGVKSFKWGQNLHFFYLVECYLVDLLSNGGQFTIVFFKDAEYAYFDFPELLSLRTALILHLQHNTNIDVQTEFSGCLSQDWKLFLEQHYPYFLIVSEEGLSDLQTYLFNFLIIHSWGMKVNVVLSSGHESDTLRFYAYTMESTDRNQTFSKENETVIQSAYKSLIQHLEEIRVLVLATHFEHLKWNDMMEEAYQTLFLLQHLWSEGSDIQRVLCVTSCSLSLRMYHRVLVHSNCLSLQEVEDFCRLRCLCVAFQLHLPLSQRACSRVITCSWIRNSDSFLKMNKWCEYFILSNLNVFGCWNLNLNHVSDLYDEQLLKNIAFYYEFESTQEPHLNLGDSIRRDYEDLWNVVSHLVKEFNVGKSFPLRTTRRHFLRQEKSVIQEISLEKMPSVGFIPMTSAVIDEFVGDMMKDLPILKSDDPVVPSLFKQKTSDELLHWHAQRLLSDDYDRIKCHVDEQSRDPHVLDFLKKIQDYQQFYGKSLESISTKVIVTQTTRPKEDSSGASGEILQNTKPHQITKKSKKKSFLKEDQNKAQQNDDLLFSIEEEMKNNLHSGIRKLEDYLTSCASNSVKFGVEMLGLIACFKAWKKHCRGEGKISKDLSIAVQMMKRIHSLLERYPEILEAEHHQYIAKCLKYLGFNDLANSLDPTLIGDDKNKKKYSIDIGPARFQLQYMGHYLIRDERKDRDPRVQDFIPNAWQQELLDVVDKNESAVIVAPTSSGKTYASYYCMEKVLRESDVGVVVYVAPAKSLVGQVAATVENRFTKTLPAGRTLCGAFTRDYCHNVLNCQVLITVPECFEILLLAPHRQKWVERIRYVIFDEVHYLGREVGAKFWELLLVIIRCPFLVLSATINNPNLLTKWLQSVKQYWKQADKIMEEKCISEKQADKCLNFLQDHSYKNQSYEVRLVLCGERYNDLEKHICSVKHDDVYFDHFHPCAALTTDIIEKYGFPPDLTLTPQESIQLYDTMAQVWETWPRAQELCPEEFILFKNKIVIKKLDARKYEENLKAELTNWIKNGQVKKVKRVLKNLSPDSLSSSKDMVKMFPLLVEKLRQMDKLPAIFFLFKNDDVGKRAGSVCTFLEKTETKSHPHTECHSYVFAIDEVLEKVRKTQKRISTKKNPKKAEKLERKKVYRAEYINFLENLKILEISEDCTYADVKALHTEITRNKDSTLERVLPRVRFTRHGKELKALAQRGIGYHHSSMYFKEKEFVEILFVKGLIRVVTATETLALGIHMPCKSVVFAQDSVYLDALNYRQIM

SEQ ID NO: 14606 - protein, 671 aa, Homo sapiens
MGPGVLLLLLVATAWHGQGIPVIEPSVPELVVKPGATVTLRCVGNGSVEWDGPPSPHWTLYSDGSSSILSTNNATFQNTGTYRCTEPGDPLGGSAAIHLYVKDPARPWNVLAQEVVVFEDQDALLPCLLTDPVLEAGVSLVRVRGRPLMRHTNYSFSPWHGFTIHRAKFIQSQDYQCSALMGGRKVMSISIRLKVQKVIPGPPALTLVPAELVRIRGEAAQIVCSASSVDVNFDVFLQHNNTKLAIPQQSDFHNNRYQKVLTLNLDQVDFQHAGNYSCVASNVQGKHSTSMFFRVVESAYLNLSSEQNLIQEVTVGEGLNLKVMVEAYPGLQGFNWTYLGPFSDHQPEPKLANATTKDTYRHTFTLSLPRLKPSEAGRYSFLARNPGGWRALTFELTLRYPPEVSVIWTFINGSGTLLCAASGYPQPNVTWLQCSGHTDRCDEAQVLQVWDDPYPEVLSQEPFHKVTVQSLLTVETLEHNQTYECRAHNSVGSGSWAFIPISAGAHTHPPDEFLFTPVVVACMSIMALLLLLLLLLLYKYKQKPKYQVRWKIIESYEGNSYTFIDPTQLPYNEKWEFPRNNLQFGKTLGAGAFGKVVEATAFGLGKEDAVLKVAVKMLKSTAHADEKEALMSELKIMSHLGQHENIVNLLGACTHGGTVASPARVWTPMWR

SEQ ID NO: 14607 - protein, 77 aa, Homo sapiens
MAGRLLGKALAAVSLSLALASVTIRSSRCRGIQAFRNPAGRTGLVGRGLLGRWGPNHAADPIITRGWWIQERRLVPH

SEQ ID NO: 14608 - protein, 301 aa, Homo sapiens
MLLAASKVLDRLKPVIGVNTDPERSEGHLCLPVRYTHSFPEALQKFYRGEFRWLWRQRIRLYLEGTGINPVPVDLHEQQLSLNQHNRALNIERAHDERSEASGPQLLPVRALNEVFIGESLSSRMSYSWAVAVDNLRRSIPTLKGLASYYEISVDDGPWEKQKSSGLNLCTGTGSKAWSFNINRVATQAVEDVLNIAKRQGNLSLPLNRELVEKVTNEYNESLLYSPEEPKILFSIREPIANRVFSSSRQRCFSSKVCVRSRCWDACMVVDGGTSFEFNDGAIASMMINKEDELRTVLLEQ

SEQ ID NO: 14609 - protein, 1525 aa, Homo sapiens
MRGVGWQMLSLSLGLVLAILNKVAPQACPAQCSCSGSTVDCHGLALRSVPRNIPRNTERLDLNGNNITRITKTDFAGLRHLRVLQLMENKISTIERGAFQDLKELERLRLNRNHLQLFPELLFLGTAKLYRLDLSENQIQAIPRKAFRGAVDIKNLQLDYNQISCIEDGAFRALRDLEVLTLNNNNITRLSVASFNHMPKLRTFRLHSNNLYCDCHLAWLSDWLRQRPRVGLYTQCMGPSHLRGHNVAEVQKREFVCSDEEEGHQSFMAPSCSVLHCPAACTCSNNIVDCRGKGLTEIPTNLPETITEIRLEQNTIKVIPPGAFSPYKKLRRIDLSNNQISELAPDAFQGLRSLNSLVLYGNKITELPKSLFEGLFSLQLLLLNANKINCLRVDAFQDLHNLNLLSLYDNKLQTIAKGTFSPLRAIQTMHLAQNPFICDCHLKWLADYLHTNPIETSGARCTSPRRLANKRIGQIKSKKFRCSGTEDYRSKLSGDCFADLACPEKCRCEGTTVDCSNQKLNKIPEHIPQYTAELRLNNNEFTVLEATGIFKKLPQLRKINFSNNKITDIEEGAFEGASGVNEILLTSNRLENVQHKMFKGLESLKTLMLRSNRITCVGNDSFIGLSSVRLLSLYDNQITTVAPGAFDTLHSLSTLNLLANPFNCNCYLAWLGEWLRKKRIVTGNPRCQKPYFLKEIPIQDVAIQDFTCDDGNDDNSCSPLSRCPTECTCLDTVVRCSNKGLKVLPKGIPRDVTELYLDGNQFTLVPKELSNYKHLTLIDLSNNRISTLSNQSFSNMTQLLTLILSYNRLRCIPPRTFDGLKSLRLLSLHGNDISVVPEGAFNDLSALSHLAIGANPLYCDCNMQWLSDWVKSEYKEPGIARCAGPGEMADKLLLTTPSKKFTCQGPVDVNILAKCNPCLSNPCKNDGTCNSDPVDFYRCTCPYGFKGQDCDVPIHACISNPCKHGGTCHLKEGEEDGFWCICADGFEGENCEVNVDDCEDNDCENNSTCVDGINNYTCLCPPEYTGELCEEKLDFCAQDLNPCQHDSKCILTPKGFKCDCTPGYVGEHCDIDFDDCQDNKCKNGAHCTDAVNGYTCICPEGYSGLFCEFSPPMVLPRTSPCDNFDCQNGAQCIVRINEPICQCLPGYQGEKCEKLVSVNFINKESYLQIPSAKVRPQTNITLQIATDEDSGILLYKGDKDHIAVELYRGRVRASYDTGSHPASAIYSVETINDGNFHIVELLALDQSLSLSVDGGNPKIITNLSKQSTLNFDSPLYVGGMPGKSNVASLRQAPGQNGTSFHGCIRNLYINSELQDFQKVPMQTGILPGCEPCHKKVCAHGTCQPSSQAGFTCECQEGWMGPLCDQRTNDPCLGNKCVHGTCLPINAFSYSCKCLEGHGGVLCDEEEDLFNPCQAIKCKHGKCRLSGLGQPYCECSSGYTGDSCDREISCRGERIRDYYQKQQGYAACQTTKKVSRLECRGGCAGGQCCGPLRSKRRKYSFECTDGSSFVDEVEKVVKCGCTRCVS

SEQ ID NO: 14610 - protein, 201 aa, Homo sapiens
MKTGHFEIVTMLLATMILVDIFQVKAEVLDMADNAFDDEYLKCTDRMEIKYVPQLLKEEKASHQQLDTVWENAKAKWAARKTQIFLPMNFKDNHGIALMAYISEAQEQTPFYHLFSEAVKMAGQSREDYIYGFQFKAFHFYLTRALQLLRKPCEASSKTVVYRTSQGTSFTFGGLNQARFGHFTLAYSAKPQAANDQLTVL

SEQ ID NO: 14611 - protein, 114 aa, Homo sapiens
MGPEALSSLLLLLLVASGDADMKGHFDPAKCRYALGMQDRTIPDSDISASSSWSDSTAARHSRLESSDGDGAWCPAGSVFPKEEEYLQVDLQRLHLVALVGTQGRHAGGLGKEF

SEQ ID NO: 14612 - protein, 85 aa, Homo sapiens
MDLWQLLLTLALAGSSDAFSGSEATAAILSRAPWSLQSVNPGLKTRTLKNGLKNGKNALIMFLLGKTAVTLIHRLPPSGYLIVSS

SEQ ID NO: 14613 - protein, 122 aa, Homo sapiens; identical to SEQ ID NO: 14487

SEQ ID NO: 14614 - protein, 233 aa, Homo sapiens
MEGGGGIPLETLKEESQSRHVLPASFEVNSLQKSNWGFLLTGLVGGTLVAVYAVATPFVTPALRKVCLPFVPATTKQIENVVKMLRCRRGSLVDIGSGDGRIVIAAAKKGFTAVGYELNPWLVWYSRYRAWREGVHGSAKFYISDLWKVTFSQYSNVVIFGVPQMMLQLEKKLERELEDDARVIACRFPFPHWTPDHVTGEGIDTVWAYDASTFRGREKRPCTSMHFQLPIQA

SEQ ID NO: 14615 - protein, 227 aa, Homo sapiens
MAGARRLELGEALALGSGWRHACHALLYAPDPGMLFGRIPLRYAILMQMRFDGRLGFPGGFVDTQDRSLEDGLNRELREELGEAAAAFRVERTDYRSSHVGSGPRVVAHFYAKRLTLEELLAVEAGATRAKDHGLEVGPAWDSVPFPISSSPKAFSPPRKHPWRKVFAPLTLPSPQLSWWSWDRDHLYSELVLPTWAFCKGLSHPLPGEILSRTHSSMSLCCSLLTV

SEQ ID NO: 14616 - protein, 951 aa, Homo sapiens
MKSLKAKFRKSDTNEWNKNDDRLLQAVENGDAEKVASLLGKKGASATKHDSEGKTAFHLAAAKGHVECLRVMITHGVDVTAQDTTGHSALHLAAKNSHHECIRKLLQSKCPAESVDSSGKTALHYAAAQGCLQAVQILCEHKSPINLKDLDGNIPLLLAVQNGHSEICHFLLDHGADVNSRNKSGRTALMLACEIGSSNAVEALIKKGADLNLVDSLGYNALHYSKLSENAGIQSLLLSKISQDADLKTPTKPKQLSDVSSPRSITSTPLSGKESVFFAEPPFKAEISSIRENKDRLSDSTTGADSLLDISSEADQQDLLSLLQAKVASLTLHNKELQDKLQAKSPKEAEADLSFDSYHSTQTDLGPSLGKPGETSPPDSKSSPSVLIHSLGKSTTDNDVRIQQLQEILQDLQKRLESSEAERKQLQVELQSRRAELVCLNNTEISENSSDLSQKLKETQSKYEEAMKEVLSVQKQMKLGLVSPESMDNYSHFHELRVTEEEINVLKQDLQNALEESERNKEKVRELEEKLVEREKGTVIKPPVEEYEEMKSSYCSVIENMNKEKAFLFEKYQEAQEEIMKLKDTLKSQMTQEASDEAEDMKEAMNRMIDELNKQVSELSQLYKEAQAELEDYRKRKSLEDVTAEYIHKAEHEKLMQLTNVSRAKAEDALSEMKSQYSKVLNELTQLKQLVDAQKENSVSITEHLQVITTLRTAAKEMEEKISNLKEHLASKEVEVAKLEKQLLEEKAAMTDAMVPRSSYEKLQSSLESEVSVLASKLKESVKEKEKVHSEVVQIRSEVSQVKREKENIQTLLKSKEQEVNELLQKFQQAQEELAEMKRYAESSSKLEEDKDKKINEMSKEVTKLKEALNSLSQLSYSTSSSKRQSQQLEALQQQVKQLQNQLAECKKQHQEVISVYRMHLLYAVQGQMDEDVQKVLKQILTMCKNQSQKK

SEQ ID NO: 14617 - protein, 167 aa, Homo sapiens
MSAKDLMRMEKIVLEKVCWKVKATTAFQFLQLYYSLLQENLPLERRNSINFERLEAQLKACHCRIIFSKAKPSVLALSIIALEIQAQKCVELTEGIECLQKHSKINGRDLTFWQELVSKCLTEYSSNKCSKPNVQKLKWIVSGRTARQLKHSYYRITHLPTIPEMVP

SEQ ID NO: 14618 - protein, 110 aa, Homo sapiens
MLCWGNASFGQLGLGGIDEEIVLEPRKSDFFINKRVRDVGCGLRHTVFVLDDGTVYTCGCNDLGQLGHEKSRKKPEFRSCFPGRSAMAPSRLTATSASQVQAILLPQPPE

SEQ ID NO: 14619 - protein, 102 aa, Homo sapiens
MKENVASATVFTLLLFLNTCLLNGQLPPGKPEIFKCRSPNKETFTCWWRPGTDGGLPTNYSLTYHREGETLMHECPDYITGGPNSCHFGKQYTSMWRTYIMM

SEQ ID NO: 14620 - protein, 145 aa, Homo sapiens
MSKQNGGEGGIIINMSSLAGLMPVAQQPVYCASKHGIVGFTRSAALAANLMNSGVRLNAICPGFVNTAILESIEKEENMGQYIEYKDHIKDMIKYYGILDPPLIANGLITLIEDDALNGAIMKITTSKGIHFQDYDTTPFQAKTQ

SEQ ID NO: 14621 - protein, 1706 aa, Homo sapiens
MGSKDHAVFFREMTQLILNEMPKAGYSSILNDFVESNFFVIDGDSLLVTCLGVKSFKWGQNLHFFYLVECYLVDLLSNGGQFTIVFFKDAEYAYFDFPELLSLRTALILHLQHNTNIDVQTEFSGCLSQDWKLFLEQHYPYFLIVSEEGLSDLQTYLFNFLIIHSWGMKVNVVLSSGHESDTLRFYAYTMESTDRNQTFSKENETVIQSAYKSLIQHLEEIRVLVLATHFEHLKWNDMMEEAYQTLFLLQHLWSEGSDIQRVLCVTSCSLSLRMYHRVLVHSNCLSLQEVEDFCRLRCLCVAFQLHLPLSQRACSRVITCSWIRNSDSFLKMNKWCEYFILSNLNVFGCWNLNLNHVSDLYDEQLLKNIAFYYEFESTQEPHLNLGDSIRRDYEDLWNVVSHLVKEFNVGKSFPLRTTRRHFLRQEKSVIQEISLEKMPSVGFIPMTSAVIDEFVGDMMKDLPILKSDDPVVPSLFKQKTSDELLHWHAQRLLSDDYDRIKCHVDEQSRDPHVLDFLKKIQDYQQFYGKSLESISTKVIVTQTTRPKEDSSGASGEILQNTKPHQITKKSKKKSFLKEDQNKAQQNDDLLFSIEEEMKNNLHSGIRKLEDYLTSCASNSVKFGVEMLGLIACFKAWKKHCRGEGKISKDLSIAVQMMKRIHSLLERYPEILEAEHHQYIAKCLKYLGFNDLANSLDPTLIGDDKNKKKYSIDIGPARFQLQYMGHYLIRDERKDRDPRVQDFIPNAWQQELLDVVDKNESAVIVAPTSSGKTYASYYCMEKVLRESDVGVVVYVAPAKSLVGQVAATVENRFTKTLPAGRTLCGAFTRDYCHNVLNCQVLITVPECFEILLLAPHRQKWVERIRYVIFDEVHYLGREVGAKFWELLLVIIRCPFLVLSATINNPNLLTKWLQSVKQYWKQADKIMEEKCISEKQADKCLNFLQDHSYKNQSYEVRLVLCGERYNDLEKHICSVKHDDVYFDHFHPCAALTTDIIEKYGFPPDLTLTPQESIQLYDTMAQVWETWPRAQELCPEEFILFKNKIVIKKLDARKYEENLKAELTNWIKNGQVKKVKRVLKNLSPDSLSSSKDMVKMFPLLVEKLRQMDKLPAIFFLFKNDDVGKRAGSVCTFLEKTETKSHPHTECHSYVFAIDEVLEKVRKTQKRITKKNPKKAEKLERKKVYRAEYINFLENLKILEISEDCTYADVKALHTEITRNKDSTLERVLPRVRFTRHGKELKALAQRGIGYHHSSMYFKEKEFVEILFVKGLIRVVTATETLALGIHMPCKSVVFAQDSVYLDALNYRQMSGRAGRRGQDLLGNVYFFDIPLPKIKRLLASSVPELRGQFPLSITLVLRLMLLASKGDDPEDAKAKVLSVLKHSLLSFKRRRAMETLKLYFLFSLQLLIKEDYLNKKGNPKKFAGLASYLHGHEPSNLVFVNFLKRGLFHNLCKPAWKGSQQFSQDVMEKLVLVLANLFGRKYIPAKFQNANLSFSQSKVILAELPEDFKAALYEYNLAVMKDFASFLLIASKSVNMKKEHQLPLSRIKFTGKECEDSQLVSHLMSCKKGRVAISPFVCLSGNTDNDLLRPETINQVILRTVGVSGTQAPLLWPWKLDNRGRRMPLNAYVLNFYKHNCLTRLDQKNGMRMGQLLKCLKDFAFNIQAISDSLSELCENKRDNVVLAFKQLSQTFYEKLQEMQIQMSQNHLE

SEQ ID NO: 14622 - protein, 300 aa, Homo sapiens
MLPLLAALLAAACPLPPVRGGAADAPGLLGVPSNASVNASSADEPIAPRLLASAAPGPPERPGPEEAAAAAAPCNISVQRQMLSSLLVRWGRPRGFQCDLLLFSTNAHGRAFFAAAFHRVGPPLLIEHLGLAAGGAQQDLRLCVGCGWVRGRRTGRLRPAAAPSAAAATAGAPTALPAYPAAEPPGPLWLQGEPLHFCCLDFSLEELQGEPGWRLNRKPIESTLVACFMTLVIVVWSVAALIWPVPIIAGFLPNGMEQRRTTASTTAATPAAVPAGTTAAAAAAAAAAAAAAVTSGVATK

SEQ ID NO: 14623 - protein, 248 aa, Homo sapiens
MELLQVTILFLLPSICSSNSTGVLEAANNSLVVTTTKPSITTPNTESLQKNVVTPTTGTTPKGTITNELLKMSLMSTATFLTSKDEGLKATTTDVRKNDSIISNVTVTSVTLPNAVSTLQSSKPKSSVLQPDASPSKTGTLTSIPVTIPENTSQSQVIGTEGGKNASTSATSRSYSSIILPVVIALIVITLSVFVLVGLYRMCWKADPGTPENGNDQPQSDKESVKLLTVKTISHESGEHSAQGKTKN

SEQ ID NO: 14624 - protein, 208 aa, Homo sapiens
MRSTILLFCLLGSTRSLPLKPALGLPPTKLAPDQGTLPNQQQSNQVFPSLSLIPLTQMLTLGPDLHLLNPAAGMTPGTQTHPLTLGGLNVQQQLHPHVLPIFVTQLGAQGTILSSEELPQIFTSLIIHSLFPGGILPTSQAGANPDVQDGSLPAGGAGVNPATQGTPAGRLPTPSGTDDDFAVTTPAGIQRSTHAIEEATTESANGIQ

SEQ ID NO: 14625 - protein, 132 aa, Homo sapiens
MLGIWTLLPLVLTSVARLSSKSVNAQVTDINSKGLELRKTVTTVETQNLEGLHHDGQFCHKPCPPGERKARDCTVNGDEPDCVPCQEGKEYTDKAHFSSKCRRCRLCDEGHDVNMESSRNAHSPATPSAKRK

SEQ ID NO: 14626 - protein, 345 aa, Homo sapiens
MSLFGLLLLTSALAGQRQGTQAESNLSSKFQFSSNKEQNGVQDPQHERIITVSTNGSIHSPRFPHTYPRNTVLVWRLVAVEENVWIQLTFDERFGLEDPEDDICKYDFVEVEEPSDGTILGRWCGSGTVPGKQISKGNQIRIRFVSDEYFPSEPGFCIHYNIVMPQFTEAVSPSVLPPSALPLDLLNNAITAFSTLEDLIRYLEPERWQLDLEDLYRPTWQLLGKAFVFGRKSRVVDLNLLTEEVRLYSCTPRNFSVSIREELKRTDTIFWPGCLLVKRCGGNCACCLHNCNECQCVPSKVTKKYHEVLQLRPKTGVRGLHKSLTDVALEHHEECDCVCRGSTGG

SEQ ID NO: 14627 - protein, 247 aa, Homo sapiens
MADTTPNGPQGAGAVQFMMTNKLDTAMWLSRLFTVYCSALFVLPLLGLHEAASFYQRALLANALTSALRLHQRLPHFQLSRAFLAQALLEDSCHYLLYSLIFVNSYPVTMSIFPVLLFSLLHAATYTKKVLDARGSNSLPLLRSVLDKLSANQQNILKFIACNEIFLMPATVFMLFSGQGSLLQPFIYYRFLTLRYSSRRNPYCRTLFNELRIVVEHIIMKPACPLFVRRLCLQSIAFISRLAPTVP

SEQ ID NO: 14628 - protein, 566 aa, Homo sapiens
MDFLLALVLVSSLYLQAAAEFDGRWPRQIVSSIGLCRYGGRIDCCWGWARQSWGQCQPVCQPRCKHGECIGPNKCKCHPGYAGKTCNQDEHIPAPLDQGSEQPLFQPLDHQATSLPSRDLNECGLKPRPCKHRCMNTYGSYKCYCLNGYMLMPDGSCSSALTCSMANCQYGCDVVKGQIRCQCPSPGLQLAPDGRTCVDVDECATGRASCPRFRQCVNTFGSYICKCHKGFDLMYIGGKYQCHDIDECSLGQYQCSSFARCYNIRGSYKCKCKEGYQGDGLTCVYIPKVMIEPSGPIHVPKGNGTILKGDTGNNNWIPDVGSTWWPPKTPYIPPIITNRPTSKPTTRPTPKPTPIPTPPPPPPLPTELRTPLPPTTPERPTTGLTTIAPAASTPPGGITVDNRVQTDPQKPRGDVFSVLVHSCNFDHGLCGWIREKDNDLHWEPIRDPAGGQYLTVSAAKAPGGKAARLVLPLGRLMHSGDLCLSFRHKVTGLHSGTLQVFVRKHGAHGAALWGRNGGHGWRQTQITLRGADIKSVVFKGEKRRGHTGEIGLDDVSLKKGHCSEER

SEQ ID NO: 14629 - protein, 215 aa, Homo sapiens
VTVTLALGVMRMVKKRAIVKKLPIVETLGCCNVICSDKTGTLTKNEMTVTHIFTSDGLHAEVTGVGYNQFGEVIVDGDVVHGFYNPAVSRIVEAGCVCNDAVIRNNTLMGKPTEGALIALAMKMGLDGLQQDYIRKAEYPFSSEQKWMAVKCVHRTQQDRPEICFMKGAYEQVIKYCTTYQSKGQTLTLTQQQRDVYQQEKARMGSAGLRVYLVF

SEQ ID NO: 14630 - protein, 93 aa, Homo sapiens
MQKSEGSGGTQLKNRATGNYDQRTSSSTQLKHRNAVQGSKSSLSTSSPESARKLHPRPSDKLNPKTINPFGEQSRVPSAFAAIYSKGGIPCRV

SEQ ID NO: 14631 - protein, 61 aa, Homo sapiens
MENPSPAAALGKALCALLLATLGAAGQPLGGESICSARALAKYSITFTGKWSQTAFPKQYP

SEQ ID NO: 14632 - protein, 169 aa, Homo sapiens
MKSLLLLVLISICWADHLSDNYTLDHDRAIHIQAENGPHLLVEAEQAKVFSHRGGNVTLPCKFYRDPTAFGSGIHKIRIKWTKLTSDYLKEVDVFVSMGYHKKTYGGYQGRVFLKGGSDSDASLVITDLTLEDYGRYKCEVIEGLEDDTVVVALDLQGVVFPYFPRLGR

SEQ ID NO: 14633 - protein, 486 aa, Homo sapiens
MARQPPPPWVHAAFLLCLLSLGGAIEIPMDPSIQNELTQPPTITKQSAKDHIVDPRDNILIECEAKGNPAPSFHWTRNSRFFNIAKDPRVSMRRRSGTLVIDFRSGGRPEEYEGEYQCFARNKFGTALSNRIRLQVSKSPLWPKENLDPVVVQEGAPLTLQCNPPPGLPSPVIFWMSSSMEPITQDKRVSQGHNGDLYFSNVMLQDMQTDYSCNARFHFTHTIQQKNPFTLKVLTNHPYNDSSLRNHPDMYSARGVAERTPSFMYPQGTASSQMVLRGMDLLLECIASGVPTPDIAWYKKGGDLPSDKAKFENFNKALRITNVSEEDSGEYFCLASNKMGSIRHTISVRVKAAPYWLDEPKNLILAPGEDGRLVCRANGNPKPTVQWMVNGEPLQSAPPNPNREVAGDTIIFRDTQISSRAVYQCNTSNEHGYLLANAFVSVLDVPPRMLSPRNQLIRVILYNRTRLDCPFFGSPIPTLRCPHGLS

SEQ ID NO: 14634 - protein, 1469 aa, Homo sapiens
MWPSQLLIFMMLLAPIIHAFSRAPIPMAVVRRELSCESYPIELRCPGTDVIMIESANYGRTDDKICDSDPAQMENIRCYLPDAYKIMSQRCNNRTQCAVVAGPDVFPDPCPGTYKYLEVQYECVPYKVEQKVFLCPGLLKGVYQSEHLFESDHQSGAWCKDPLQASDKIYYMPWTPYRTDTLTEYSSKDDFIAGRPTTTYKLPHRVDGTGFVVYDGALFFNKERTRNIVKFDLRTRIKSGEAIIANANYHDTSPYRWGGKSDIDLAVDENGLWVIYATEQNNGKIVISQLNPYTLRIEGTWDTAYDKRSASNAFMICGILYVVKSVYEDDDNEATGNKIDYIYNTDQSKDSLVDVPFPNSYQYIAAVDYNPRDNLLYVWNNYHVVKYSLDFGPLDSRSGQAHHGQVSYISPPIHLDSELERPSVKDISTTGPLGMGSTTTSTTLRTTTLSPGRSTTPSVSGRRNRSTSTPSPAVEVLDDMTTHLPSASSQIPALEESCEAVEAREIMWFKTRQGQIAKQPCPAGTIGVSTYLCLAPDGIWDPQGPDLSNCSSPWVNHITQKLKSGETAANIARELAEQTRNHLNAGDITYSVRAMDQLVGLLDVQLRNLTPGGKDSAARSLNKLQKRERSCRAYVQAMVETVNNLLQPQALNAWRDLTTSDQLRAATMLLHTVEESAFVLADNLLKTDIVRENTDNIKLEVARLSTEGNLEDLKFPENMGHGSTIQLSANTLKQNGRNGEIRVAFVLYNNLGPYLSTENASMKLGTEALSTNHSVIVNSPVITAAINKEFSNKVYLADPVVFTVKHIKQSEENFNPNCSFWSYSKRTMTGYWSTQGCRLLTTNKTHTTCSCNHLTNFAVLMAHVEVKHSDAVHDLLLDVITWVGILLSLVCLLICIFTFCFFRGLQSDRNTIHKNLCISLFVAELLFLIGINRTDQPIACAVFAALLHFFFLAAFTWMFLEGVQLYIMLVEVFESEHSRRKYFYLVGYGMPALIVAVSAAVDYRSYGTDKVCWLRLDTYFIWSFIGPATLIIMLNVIFLGIALYKMFHHTAILKPESGCLDNINYEDNRPFIKSWVIGAIALLCLLGLTWAFGLMYINESTVIMAYLFTIFNSLQGMFIFIFHCVLQKKVRKEYGKCLRTHCCSGKSTESSIGSGKTSGSRTPGRYSTGSQSRIRRMWNDTVRKQSESSFITGDINSSASLNREGLLNNARDTSVMDTLPLNGNHGNSYSIASGEYLSNCVQIIDRGYNHNETALEKKILKELTSNYIPSYLNNHERSSEQNRNLMNKLVNNLGSGREDDAIVLDDATSFNHEESLGLELIHEESDAPLLPPRVYSTENHQPHHYTRRRIPQDHSESFFPLLTNEHTEDLQSPHRDSLYTSMPTLAGVAATESVTTSTQTEPPPAKCGDAEDVYYKSMPNLGSRNHVHQLHTYYQLGRGSSDGFIVPPNKDGTPPEGSSKGPAHLVTSL

SEQ ID NO: 14635 - protein, 159 aa, Homo sapiens
MEVYIPSFRYEESDLERGYTVFKIEVLMNGRKHFVEKRYSEFHALHKKLKKCIKTPEIPSKHVRNWVPKVLEQRRQGLETYLQAVILENEELPKLFLDFLNVRHLPSLPKAESCGSFDETESEESSKLSHQPVLLFLRDPYVLPAASGNQTCHLLTALY

SEQ ID NO: 14636 - protein, 44 aa, Homo sapiens
MKMLLLLHCLGVFLSCSGHIQDEHPQYHSPPDVVIPVRITGTTR

SEQ ID NO: 14637 - protein, 81 aa, Homo sapiens
MRTYHYIPLFIWTYMFHTVDTILLQEKPNSYLSSKKIAGLTKDDGKMLRRTKRGWMWNQFFLLEEYTGTDTQYVGKLHTDQ

SEQ ID NO: 14638 - protein, 38 aa, Homo sapiens
MFILGFAGCIGALRENTFLLKFLKSPVLTEQAENYTFL

SEQ ID NO: 14639 - protein, 1594 aa, Homo sapiens
MPCAQRSWLANLSVVAQLLNFGALCYGRQPQPGPVRFPDRRQEHFIKGLPEYHVVGPVRVDASGHFLSYGLHYPITSSRRKRDLDGSEDWVYYRISHEEKDLFFNLTVNQGFLSNSYIMEKRYGNLSHVKMMASSAPLCHLSGTVLQQGTRVGTAALSACHGLTGFFQLPHGDFFIEPVKKHPLVEGGYHPHIVYRRQKVPETKEPTCGLKDSVNISQKQELWREKWERHNLPSRSLSRRSISKERWVETLVVADTKMIEYHGSENVESYILTIMNMVTGLFHNPSIGNAIHIVVVRLILLEEEEQGLKIVHHAEKTLSSFCKWQKSINPKSDLNPVHHDVAVLLTRKDICAGFNRPCETLGLSHLSGMCQPHRSCNINEDSGLPLAFTIAHELGHSFGIQHDGKENDCEPVGRHPYIMSRQLQYDPTPLTWSKCSEEYITRFLDRGWGFCLDDIPKKKGLKSKVIAPGVIYDVHHQCQLQYGPNATFCQEVENVCQTLWCSVKGFCRSKLDAAADGTQCGEKKWCMAGKCITVGKKPESIPGGWGRWSPWSHCSRTCGAGVQSAERLCNNPEPKFGGKYCTGERKRYRLCNVHPCRSEAPTFRQMQCSEFDTVPYKNELYHWFPIFNPAHPCELYCRPIDGQFSEKMLDAVIDGTPCFEGGNSRNVCINGICKMVGCDYEIDSNATEDRCGVCLGDGSSCQTVRKMFKQKEGSGYVDIGLIPKGARDIRVMEIEGAGNFLAIRSEDPEKYYLNGGFIIQWNGNYKLAGTVFQYDRKGDLEKLMATGPTNESVWIQLLFQVTNPGIKYEYTIQKDGLDNDVEQQMYFWQYGHWTECSVTCGTGIRRQTAHCIKKGRGMVKATFCDPETQPNGRQKKCHEKACPPRWWAGEWEACSATCGPHGEKKRTVLCIQTMVSDEQALPPTDCQHLLKPKTLLSCNRDILCPSDWTVGNWSECSVSCGGGVRIRSVTCAKNHDEPCDVTRKPNSRALCGLQQCPSSRRVLKPNKGTISNGKNPPTLKPVPPPTSRPRMLTTPTGPESMSTSTPAISSPSPTTASKEGDLGGKQWQDSSTQPELSSRYLISTGSTSQPILTSQSLSIQPSEENVSSSDTGPTSEGGLVATTTSGSGLSSSRNPITWPVTPFYNTLTKGPEMEIHSGSGEEREQPEDKDESNPVIWTKIRVPGNDAPVESTEMPLAPPLTPDLSRESWWPPFSTVMEGLLPSQRPTTSETGTPRVEGMVTEKPANTLLPLGGDHQPEPSGKTANRNHLKLPNNMNQTKSSEPVLTEEDATSLITEGFLLNASNYKQLTNGHGSAHWIVGNWSECSTTCGLGAYWRRVECSTQMDSDCAAIQRPDPAKRCHLRPCAGWKVGNWSKCSRNCSGGFKIREIQCVDSRDHRNLRPFHCQFLAGIPPPLSMSCNPEPCEAWQVEPWSQCSRSCGGGVQERGVFCPGGLCDWTKRPTSTMSCNEHLCCHWATGNWDLCSTSCGGGFQKRTVQCVPSEGNKTEDQDQCLCDHKPRPPEFKKCNQQACKKSADLLCTKDKLSASFCQTLKAMKKCSVPTVRAECCFSCPQTHITHTQRQRRQRLLQKSKEL

SEQ ID NO: 14640 - protein, 521 aa, Homo sapiens
MKENVASATVFTLLLFLNTCLLNVQPDPPLELAVEVKQPEDRKPYLWIKWSPPTLIDLKTGWFTLLYEIRLKPEKAAEWEIHFAGQQTEFKILSLHPGQKYLVQVRCKPDHGYWSAWSPATFIQIPSDFTMNDTTVWISVAVLSAVICLIIVWAVALKGYSMVTCIFPPVPGPKIKGFDAHLLEKGKSEELLSALGCQDFPPTSDYEDLLVEYLEVDDSEDQHLMSVHSKEHPSQGMKPTYLDPDTDSGRGSCDSPSLLSEKCEEPQANPSTFYDPEVIEKPENPETTHTWDPQCISMEGKIPYFHAGGSKCSTWPLPQPSQHNPRSSYHNITDVCELAVGPAGAPATLLNEAGKDALKSSQTIKSREEGKATQQREVESFHSETDQDTPWLLPQEKTPFGSAKPLDYVEIHKVNKDGALSLLPKQRENSGKPKKPGTPENNKEYAKVSGVMDNNILVLVPDPHAKNVACFEESAKEAPPSLEQNQAEKALANFTATSSKCRLQLGGLDYLDPACFTHSFH

SEQ ID NO: 14641 - protein, 64 aa, Homo sapiens
MRLLERMRKDWFMVGIVLAIAGAKLEPSIGVNGGPLKPEITVSYIAVATIFFNSGLSLKTELLT

SEQ ID NO: 14642 - protein, 1529 aa, Homo sapiens
MRGVGWQMLSLSLGLVLAILNKVAPQACPAQCSCSGSTVDCHGLALRSVPRNIPRNTERLDLNGNNITRITKTDFAGLRHLRVLQLMENKISTIERGAFQDLKELERLRLNRNHLQLFPELLFLGTAKLYRLDLSENQIQAIPRKAFRGAVDIKNLQLDYNQISCIEDGAFRALRDLEVLTLNNNNITRLSVASFNHMPKLRTFRLHSNNLYCDCHLAWLSDWLRQRPRVGLYTQCMGPSHLRGHNVAEVQKREFVCSGHQSFMAPSCSVLHCPAACTCSNNIVDCRGKGLTEIPTNLPETITEIRLEQNTIKVIPPGAFSPYKKLRRIDLSNNQISELAPDAFQGLRSLNSLVLYGNKITELPKSLFEGLFSLQLLLLNANKINCLRVDAFQDLHNLNLLSLYDNKLQTIAKGTFSPLRAIQTMHLAQNPFICDCHLKWLADYLHTNPIETSGARCTSPRRLANKRIGQIKSKKFRCSAKEQYFIPGTEDYRSKLSGDCFADLACPEKCRCEGTTVDCSNQKLNKIPEHIPQYTAELRLNNNEFTVLEATGIFKKLPQLRKINFSNNKITDIEEGAFEGASGVNEILLTSNRLENVQHKMFKGLESLKTLMLRSNRITCVGNDSFIGLSSVRLLSLYDNQITTVAPGAFDTLHSLSTLNLLANPFNCNCYLAWLGEWLRKKRIVTGNPRCQKPYFLKEIPIQDVAIQDFTCDDGNDDNSCSPLSRCPTECTCLDTVVRCSNKGLKVLPKGIPRDVTELYLDGNQFTLVPKELSNYKHLTLIDLSNNRISTLSNQSFSNMTQLLTLILSYNRLRCIPPRTFDGLKSLRLLSLHGNDISVVPEGAFNDLSALSHLAIGANPLYCDCNMQWLSDWVKSEYKEPGIARCAGPGEMADKLLLTTPSKKFTCQGPVDVNILAKCNPCLSNPCKNDGTCNSDPVDFYRCTCPYGFKGQDCDVPIHACISNPCKHGGTCHLKEGEEDGFWCICADGFEGENCEVNVDDCEDNDCENNSTCVDGINNYTCLCPPEYTGELCEEKLDFCAQDLNPCQHDSKCILTPKGFKCDCTPGYVGEHCDIDFDDCQDNKCKNGAHCTDAVNGYTCICPEGYSGLFCEFSPPMVLPRTSPCDNFDCQNGAQCIVRINEPICQCLPGYQGEKCEKLVSVNFINKESYLQIPSAKVRPQTNITLQIATDEDSGILLYKGDKDHIAVELYRGRVRASYDTGSHPASAIYSVETINDGNFHIVELLALDQSLSLSVDGGNPKIITNLSKQSTLNFDSPLYVGGMPGKSNVASLRQAPGQNGTSFHGCIRNLYINSELQDFQKVPMQTGILPGCEPCHKKVCAHGTCQPSSQAGFTCECQEGWMGPLCDQRTNDPCLGNKCVHGTCLPINAFSYSCKCLEGHGGVLCDEEEDLFNPCQAIKCKHGKCRLSGLGQPYCECSSGYTGDSCDREISCRGERIRDYYQKQQGYAACQTTKKVSRLECRGGCAGGQCCGPLRSKRRKYSFECTDGSSFVDEVEKVVKCGCTRCVS

SEQ ID NO: 14643 - protein, 258 aa, Homo sapiens
MKSLLLLVLISICWADHLSDNYTLDHDRAIHIQAENGPHLLVEAEQAKVFSHRGGNVTLPCKFYRDPTAFGSGIHKIRIKWTKLTSDYLKEVDVFVSMGYHKKTYGGYQGRVFLKGGSDSDASLVITDLTLEDYGRYKCEVIEGLEDDTVVVALDLQGVVFPYFPRLGRYNLNFHEAQQACLDQDAVIASFDQLYDAWRGGLDWCNAGWLSDGSVQYPITKPREPCGGQNTVPGVRNYGFWDKDKSRYDVFCFTSNFN

SEQ ID NO: 14644 - protein, 153 aa, Homo sapiens
MLLLWVSVVAALALAVLAPGAGEQRRRAAKAPNVVLVVSDSFDGRLTFHPGSQVVKLPFINFMKTRGTSFLNAYTNSPICCPSRAAMWSGLFTHLTESWNNFKGLDPNYTTWMDVMERHGYRTQKFGKLDYTSGHHSIRHSERGSTNQRSEKV

SEQ ID NO: 14645 - protein, 176 aa, Homo sapiens
MRLLILTCLVAVALARPKLPLRYPERLQNPSESSEPIPLESREEYMNGMNRRNILREKQTDEIKDTRNESTQNCVVAEPEKMESSISSSSEEQFCRLNEYNQLQLQAAHAQEQIRRMNENSHVQVPFQQLNQLAAYPYAVWYYPQIMQYVPFPPFSDISNPTAHENYEKNNVMLQW

SEQ ID NO: 14646 - protein, 82 aa, Homo sapiens
MAALLLGAVLLVAQPQLVPSRPAELGQQELLRKAGTLQDDVRDGVAPNGSAQQLPQTIIIGVRKGGTRALLEMLSLHPDVAA

SEQ ID NO: 14647 - protein, 76 aa, Homo sapiens
MAAAAPGNGRASAPRLLLLFLVPLLWAPAAVRAGPDEDLSHRNKEPPAPAQQLQPQPVAVQGPEPARVEGHQFFSW

SEQ ID NO: 14648 - protein, 159 aa, Homo sapiens
MKTKLNIYNMQFLLFVFLVWDPARLVLANIQEDEAKNNITIFTRILDRLLDGYDNRLRPGLGDSITEVFTNIYVTSFGPVSDTDMEYTIDVFFRQKWKDERLKFKGPMNILRLNNLMASKIWTPDTFFHNGKKSVAHNMTMPNKLLRIQDDGTLLYTMR

SEQ ID NO: 14649 - protein, 348 aa, Homo sapiens
MKRVLVLLLAVAFGHALERGRDYEKNKVCKEFSHLGKEDFTSLSLVLYSRKFPSGTFEQVSQLVKEVVSLTEACCAEGADPDCYDTRTSALSAKSCESNSPFPVHPGTAECCTKEGLERKLCMAALKHQPQEFPTYVEPTNDEICEAFRKDPKEYANQFMWEYSTNYGQAPLSLLVSYTKSYLSMVGSCCTSASPTVCFLKERLQLKHLSLLTTLSNRVCSQYAAYGEKKSRLSNLIKLAQKVPTADLEDVLPLAEDITNILSKCCESASEDCMAKELPEHTVKLCDNLSTKNSKFEDCCQEKTAMDVFVCTYFMPAAQLPELPDVELPTNKDVCDPGNTKVMDKALY

SEQ ID NO: 14650 - protein, 754 aa, Homo sapiens
MAFASWWYKTHVSEKTSESPSKPGEKKGSDEKKAASLGSSQSSRTYAGGTASATKVSASSGATSKSSSMNPTETKAVKTEPEKKSQSTKLSVVHEKKSQEGKPKEHTEPKSLPKQASDTGSNDAHNKKAVSRSAEQQPSEKSTEPKTKPQDMISAGGESVAGITAISGKPGDKKKEKKSLTPAVPVESKPDKPSGKSGMDAALDDLIDTLGGPEETEEENTTYTGPEVSDPMSSTYIEELGKREVTIPPKYRELLAKKEGITGPPADSSKPIGPDDAIDALSSDFTCGSPTAAGKKTEKEESTEVLKAQSAGTVRSAAPPQEKKRKVEKDTMSDQALEALSASLGTRQAEPELDLRSIKEVDEAKAKEEKLEKCGEDDETIPSEYRLKPATDKDGKPLLPEPEEKPKPRSESELIDELSEDFDRSECKEKPSKPTEKTEESKAAAPAPVSEAVCRTSMCSIQSAPPEPATLKGTVPDDAVEALADSLGKKEADPEDGKPVMDKVKEKAKEEDREKLGEKEETIPPDYRLEEVKDKDGKPLLPKESKEQLPPMSEDFLLDALSEDFSGPQNASSLKFEDAKLAAAISEVVSQTPASTTQAGAPPRDTSQSDKDLDDALDKLSDSLGQRQPDPDENKPMEDKVKEKAKAEHRDKLGERDDTIPPEYRHLLDDNGQDKPVKPPTKKSEDSKKPADDQDPIDALSGDLDSCPSTTETSQNTAKDKCKKAASSSKAPKNGGKAKDSAKTTEETSKPKDD

SEQ ID NO: 14651 - protein, 130 aa, Homo sapiens
MGLGTLSPRMLVWLVASGIVFYGELWVCAGLDYDYTFDGNEEDKTETIDYKDPCKAAVFWGDIALDDEDLNIFQIDRTIDLTQNPFGNLGHTTGGLGDHAMSKKRGALYQLIDRIRRIGFGISMFKVADA

SEQ ID NO: 14652 - protein, 69 aa, Homo sapiens
MPPPLPLLLLTVLVVAAARPGCEFERNPAGECHRPPAADSGTVPGPPWLLFCRRAAAPTLSEHFRQLNP

SEQ ID NO: 14653 - protein, 40 aa, Homo sapiens
MALVLGSLLLLGLCGNSFSGGQPSSTDAPKAWNYELPATN

SEQ ID NO: 14654 - protein, 1367 aa, Homo sapiens
MTTKRSLFVRLVPCRCLRGEEETVTTLDYSHCSLEQVPKEIFTFEKTLEELYLDANQIEELPKQLFNCQSLHKLSLPDNDLTTLPASIANLINLRELDVSKNGIQEFPENIKNCKVLTIVEASVNPISKLPDGFSQLLNLTQLYLNDAFLEFLPANFGRLTKLQILELRENQLKMLPKTMNRLTQLERLDLGSNEFTEVPEVLEQLSGLKEFWMDANRLTFIPGFIGSLKQLTYLDVSKNNIEMVEEGISTCENLQDLLLSSNSLQQLPETIGSLKNITTLKIDENQLMYLPDSIGGLISVEELDCSFNEVEALPSSIGQLTNLRTFAADHNYLQQLPPEIGSWKNITVLFLHSNKLETLPEEMGDMQKLKVINLSDNRLKNLPFSFTKLQQLTAMWLSDNQSKPLIPLQKETDSETQKMVLTNYMFPQQPRTEDVMFISDNESFNPSLWEEQRKQRAQVAFECDEDKDEREAPPREGNLKRYPTPYPDELKNMVKTVQTIVHRLKDEETNEDSGRDLKPHEDQQDINKDTSESTTTVKSKVDEREKYMIGNSVQKISEPEAEISPGSLPVTANMKASENLKHIVNHDDVFEESEELSSDEEMKMAEMRPPLIETSINQPKVVALSNNKKDDTKETDSLSDEVTHNSNQNNSNCSSPSRMSDSVSLNTDSSQDTSLCSPVKQTHIDINSKIRQEDENFNSLLQNGDILNSSTEEKFKAHDKKDFNLPEYDLNVEERLVLIEKSVDSTATADDTHKLDHINMNLNKLITNDTFQPEIMERSKTQDIVLGTSFLSINSKEETEHLENGNKYPNLESVNKVNGHSEETSQSPNRTEPHDSDCSVDLGISKSTEDLSPQKSGPVGSVVKSHSITNMEIGGLKIYDILSDNGPQQPSTTVKITSAVDGKNIVRSKSATLLYDQPLQVFTGSSSSSDLISGTKAIFKFDSNHNPEEPNIIRGPTSGPQSAPQIYGPPQYNIQYSSSAAVKDTLWHSKQNPQIDHASFPPQLLPRSESTENQSYAKHSANMNFSNHNNVRANTAYHLHQRLGPARHGEMWAISPNDRLIPAVTRSTIQRQSSVSSTASVNLGDPGSTRRAQIPEGDYLSYREFHSAGRTPPMMPGSQRPLSARTYSIDGPNASRPQSARPSINEIPERTMSVSDFNYSRTSPSKRPNARVGSEHSLLDPPGKSKVPRDWREQVLRHIEAKKLEKMPLSNGQMGQPLRPQANYSQIHHPPQASVARHPSREQLIDYLMLKVAHQPPYTQPHCSPRQGHELAKQEIRVRVEKDPELGFSISGGVGGRGNPFRPDDDGIFVTRVQPEGPASKLLQPGDKIIQANGYSFINIEHGQAVSLLKTFQNTVELIIVREVSS

SEQ ID NO: 14655 - protein, 604 aa, Homo sapiens
MKWVTFISLLFLFSSAYSRGVFRRDAHKSEVAHRFKDLGEENFKALVLIAFAQYLQQCPFEDHVKLVNEVTEFAKTCVADESAENCDKSLHTLFGDKLCTVATLRETYGEMADCCAKQEPERNECFLQHKDDNPNLPRLVRPEVDVMCTAFHDNEETFLKKYLYEIARRHPYFYAPELLFFAKRYKAAFTECCQAADKAACLLPKLDELRDEGKASSAKQRLKCASLQKFGERAFKAWAVARLSQRFPKAEFAEVSKLVTDLTKVHTECCHGDLLECADDRADLAKYICENQDSISSKLKECCEKPLLEKSHCIAEVENDEMPADLPSLAADFVESKDVCKNYAEAKDVFLGMFLYEYARRHPDYSVVLLLRLAKTYETTLEKCCAAADPHECYAKVFDEFKPLVEEPQNLIKQNCELFEQLGEYKFQNALLVRYTKKVPQVSTPTLVEVSRNLGKVGSKCCKHPEAKRMPCAEDYLSVVLNQLCVLHEKTPVSDRVTKCCTESLVNRRPCFSALEVDETYVPKEFNAETFTFHADICTLSEKERQIKKQTALVELVKHKPKATKEQLKAVMDDFAAFVEKCCKADDKETCFAEEPTMRIRERK

SEQ ID NO: 14656 - protein, 73 aa, Homo sapiens
MKTKLNIYNMQFLLFVFLVWDPARLVLANIQEDEAKNNITIFTRILDRLLDGYDNRLRPGLGVSRVESPVCVT

SEQ ID NO: 14657 - protein, 61 aa, Homo sapiens
MAETLFWTPLLVVLLAGLGDTEAQQTTLHPLVGRVFVHTLDHETFLSLPEHVGHSLQSGQL

SEQ ID NO: 14658 - protein, 48 aa, Homo sapiens
MIARCLLAVRSLRRWSLALLPRLVCSGVILAHCSLCLPGSSDSPASAT

SEQ ID NO: 14659 - protein, 4012 aa, Homo sapiens
MGVLKVWLGLALALAEFAVLPHHSEGACVYQDSLLADATIWKPDSCQSCRCHGDIVICKPAVCRNPQCAFEKGEVLQIAANQCCPECVLRTPGSCHHEKKIHEHGTEWASSPCSVCSCNHGEVRCTPQPCPPLSCGHQELAFIPEGSCCPVCVGLGKPCSYEGHVFQDGEDWRLSRCAKCLCRNGVAQCFTAQCQPLFCNQDETVVRVPGKCCPQCSARSCSAAGQVYEHGEQWSENACTTCICDRGEVRCHKQACLPLRCGKGQSRARRHGQCCEECVSPAGSCSYDGVVRYQDEMWKGSACEFCMCDHGQVTCQTGECAKVECARDEELIHLDGKCCPECISRNGYCVYEETGEFMSSNASEVKRIPEGEKWEDGPCKVCECRGAQVTCYEPSCPPCPVGTLALEVKGQCCPDCTSVHCHPDCLTCSQSPDHCDLCQDPTKLLQNGWCVHSCGLGFYQAGSLCLACQPQCSTCTSGLECSSCQPPLLMRHGQCVPTCGDGFYQDRHSCAVCHESCAGCWGPTEKHCLACRDPLHVLRDGGCESSCGKGFYNRQGTCSACDQSCDSCGPSSPRCLTCTEKTVLHDGKCMSECPGGYYADATGRCKVCHNSCASCSGPTPSHCTACSPPKALRQGHCLPRCGEGFYSDHGVCKACHSSCLACMGPAPSHCTGCKKPEEGLQVEQLSDVGIPSGECLAQCRAHFYLESTGICEACHQSCFRCAGKSPHNCTDCGPSHVLLDGQCLSQCPDGYFHQEGSCTECHPTCRQCHGPLESDCISCYPHISLTNGNCRTSCREEQFLNLVGYCADCHHLCQHCAADLHNTGSICLRCQNAHYLLLGDHCVPDCPSGYYAERGACKKCHSSCRTCQGRGPFSCSSCDTNLVLSHTGTCSTTCFPGHYLDDNHVCQPCNTHCGSCDSQASCTSCRDPNKVLLFGECQYESCAPQYYLDFSTNTCKECDWSCSACSGPLKTDCLQCMDGYVLQDGACVEQCLSSFYQDSGLCKNCDSYCLQCQGPHECTRCKGPFLLLEAQCVQECGKGYFADHAKHKCTACPQGCLQCSHRDRCHLCDHGFFLKSGLCVYNCVPGFSVHTSNETCSGKIHTPSLHVNGSLILPIGSIKPLDFSLLNVQDQEGRVEDLLFHVVSTPTNGQLVLSRNGKEVQLDKAGRFSWKDVNEKKVRFVHSKEKLRKGYLFLKISDQQFFSEPQLINIQAFSTQAPYVLRNEVLHISRGERATITTQMLDIRDDDNPQDVVIEIIDPPLHGQLLQTLQSPATPIYQFQLDELSRGLLHYAHDGSDSTSDVAVLQANDGHSFHNILFQVKTVPQNDRGLQLVANSMVWVPEGGMLQITNRILQAEAPGASAEEIIYKITQDYPQFGEVVLLVNMPADSPADEGQHLPDGRTATPTSTFTQQDINEGIVWYRHSGAPAQSDSFRFEVSSASNAQTRLESHMFNIAILPQTPEAPKVSLEASLHMTAREDGLTVIQPHSLSFINSEKPSGKIVYNITLPLHPNQGIIEHRDHPHSPIRYFTQEDINQGKVMYRPPPAAPHLQELMAFSFAGLPESVKFHFTVSDGEHTSPEMVLTIHLLPSDQQLPVFQVTAPRLAVSPGGSTSVGLQVVVRDAETAPKELFFELRRPPQHGVLLKHTAEFRRPMATGDTFTYEDVEKNALQYIHDGSSTREDSMEISVTDGLTVTMLEVRVEVSLSEDRGPRLAAGSSLSITVASKSTAIITRSHLAYVDDSSPDPEIWIQLNYLPSYGTLLRISGSEVEELSEVSNFTMEDINNKKIRYSAVFETDGHLVTDSFYFSVSDMDHNHLDNQIFTIMITPAENPPPVIAFADLITVDEGGRAPLSFHHFFATDDDDNLQRDAIIKLSALPKYGCIENTGTGDRFGPETASDLEASFPIQDVLENYIYYFQSVHESIEPTHDIFSFYVSDGTSRSEIHSINITIERKNDEPPRMTLQPLRVQLSSGVVISNSSLSLQDLDTPDNELIFVLTKKPDHGHVLWRQTASEPLENGRVLVQGSTFTYQDILAGLVGYVPSVPGMVVDEFQFSLTDGLHVDTGRMKIYTELPASDTPHLAINQGLQLSAGSVARITEQHLKVTDIDSDDHQVMYIMKEDPGAGRLQMMKHGNLEQISIKGPIRSFTQADISQGHVEYSHGTGEPGGSFAFKFDVVDGEGNRLIDKSFSISILEDKSPPVITTNKGLVLDENSVKKITTLQLSATDQDSGPTELIYRITRQPQLGHLEHAASPGIQISSFTQADLTSRNVQYVHSSEAEKHSDAFSFTLSDGVSEVTQTFHITLHPVDDSLPVVQNLGMRVQEGMRKTITEFELKAVDADTEAESVTFTIVQPPRHGTIERTSNGQHFHLTSTFTMKDIYQNRVSYSHDGSNSLKDRFTFTVSDGTNPFFIIEEGGKEIMTAAPQPFRVDILPVDDGTPRIVTNLGLQWLEYMDGKATNLITKKELLTMDPDTEDAQLVYEITTGPKHGFVENKLQPGRAAATFTQEDVNLGLIRYVLHKEKIREMMDSFQFLVKDSKPNVVSDNVFHIQWSLISFKYTSYNVSEKAGSVSVTVQRTGNLNQYAIVLCRTEQGTASSSSRVSSQPGQQDYVEYAGQVQFDEREDTKSCTIVINDDDVFENVESFTVELSMPAYALLGEFTQAKVIINDTEDEPTLEFDKKIYWVNESAGFLFAPIERKGDASSIVSAICYTVPKSAMGSSLYALESGSDFKSRGMSAASRVIFGPGVTMSTCDVMLIDDSEYEEEEEFEIALADASDNARIGRVATAKVLISGPNDASTVSLGNTAFTVSEDAGTVKIPVIRHGTDLSTFASVWCATRPSDPASATPGVDYVPSSRKVEFGPGVIEQYCTLTILDDTQYPVIEGLETFVVFLSSAQGAELTKPFQAVIAINDTFQDVPSMQFAKDLLLVKEKEGVLHVPITRSGDLSYESSVRCYTQSHSAQVMEDFEERQNADSSRITFLKGDKVKNCTVYIHDDSMFEPEEQFRVYLGLPLGNHWSGARIGKNNMATITISNDEDAPTIEFEEAAYQVREPAGPDAIAILNIKVIRRGDQNRTSKVRCSTRDGSAQSGVDYYPKSRVLKFSPGVDHIFFKVEILSNEDREWHESFSLVLGPDDPVEAVLGDVTTATVTILDQEAAGSLILPAPPIVVTLADYDHVEEVTKEGVKKSPSPGYPLVCVTPCDPHFPRYAVMKERCSEAGINQTSVQFSWEVAAPTDGNGARSPFETITDNTPFTSVNHMVLDSIYFSRRFHVRCVAKAVDKVGHVGTPLRSNIVTIGTDSAICHTPVVAGTSRGFQAQSFIATLKYLDVKHKEHPNRIHISVQIPHQDGMLPLISTMPLHNLHFLLSESIYRHQHVCSNLVTTYDLRGISEAGFLDDVVYDSTALGPGYDRPFQFDPSVREPKTIQLYKHLNLKSCVWTFDAYYDMTELIDVCGGSVTADFQVRDSAQSFLTVHVPLYVSYIYVTAPRGWASLEHHTEMEFSFFYDTVLWRTGIQTDSVLSARLQIIRIYIREDGRLVIEFKTHAKFRGQFVMEHHTLPEVKSFVLTPDHLGGIEFDLQLLWSAQTFDSPHQLWRATSSYNRKDYSGEYTIYLIPCTVQPTQPWVDPGEKPLACTAHAPERFLIPIAFQQTNRPVPVVYSLNTEFQLCNNEKVFLMDPNTSDMSLAEMDYKGAFSKGQILYGRVLWNPEQNLNSAYKLQLEKVYLCTGKDGYVPFFDPTGTIYNEGPQYGCIQPNKHLKHRFLLLDRNQPEVTDKYFHDVPFEAHFASELPDFHVVSNMPGVDGFTLKVDALYKVEAGHQWYLQVIYIIGPDTISGPRVQRSLTAPLRRNRRDLVEPDGQLILDDSLIYDNEGDQVKNGTNMKSLNLEMQELAVAASLSQTGASIGSALAAIMLLLLVFLVACFINRKCQKQRKKKPAEDILEEYPLNTKVEVPKRHPDRVEKNVNRHYCTVRNVNILSEPEAAYTFKGAKVKRLNLEVRVHNNLQDGTEV

SEQ ID NO: 14660 - protein, 256 aa, Homo sapiens
MRPAALRGALLGCLCLALLCLGGADKRLRDNHEWKKLIMVQHWPETVCEKIQNDCRDPPDYWTIHGLWPDKSEGCNRSWPFNLEEIKDLLPEMRAYWPDVIHSFPNRSRFWKHEWEKHGTCAAQVDALNSQKKYFGRSLELYRELDLNSVLLKLGIKPSINYYQVADFKDALARVYGVIPKIQCLPPSQDEEVQTIGQIELCLTKQDQQLQNCTEPGEQPSPKQEVWLANGAAESRGLRVCEDGPVFYPPPKKTKH

SEQ ID NO: 14661 - protein, 156 aa, Homo sapiens
MQISSEKEEDDNEKRQDPGDNWEEGGGGGGGMEKSSGPWNKTAPVQAPPAPVIVTETPEPAMTSGVYRPPGARLTTTRKTPQGPPEIYSDTQFPSLQSTAKHVESRKDKEMEKSFEVVRHKNRGRDEVSKNQALKLQLDNQYAVLENQKSSHSQYN

SEQ ID NO: 14662 - protein, 62 aa, Homo sapiens
MKENVASATVFTLLLFLNTCLLNGQLPPGKPEIFKCRSPNKETFTCWWRPGTDGGLPTNYSL

SEQ ID NO: 14663 - protein, 108 aa, Homo sapiens
MRLLLALLGVLLSVPGPPVLSLEASEEVELEPCLAPSLEQQEQELTVALGQPVRLCCGRAERGGHWYKEGSRLAPAGRVRGWRGRLEIASFLPEDAGRYLCLARGSMI

SEQ ID NO: 14664 - protein, 539 aa, Homo sapiens
MSEPQEKKLSENTDFLAPGVSSFTDSNQQESITKREENQEQPRNYSHHQLNRSSKHSQGLRDQGNQEQDPNISNGEEEEEKEPGEVGTHNDNQERKTELPREHANSKQEEDNTQSDDILEESDQPTQVSKMQEDEFDQGNQEQEDNSNAEMEEENASNVNKHIQETEWQSQEGKTGLEAISNHKETEEKTVSEALLMEPTDDGNTTPRNHGVDDDGDDDGDDGGTDGPRHSASDDYFIPSQAFLEAERAQSIAYHLKIEEQREKVHENENIGTTEPGEHQEAKKAENSSNEEETSSEGNMRVHAVDSCMSFQCKRGHICKADQQGKPHCVCQDPVTCPPTKPLDQVCGTDNQTYASSCHLFATKCRLEGTKKGHQLQLDYFGACKSIPTCTDFEVIQFPLRMRDWLKNILMQLYEANSEHAGYLNEKQRNKVKKIYLDEKRLLAGDHPIDLLLRDFKKNYHMYVYPVHWQFSELDQHPMDRVLTHSELAPLRASLVPMEHCITRFFEECDPNKDKHITLKEWGHCFGIKEEDIDENLLF

SEQ ID NO: 14665 - protein, 640 aa, Homo sapiens
MTHILLLYYLVFLLPTESCRTLYQAASKSKEKVPARPHGVCDGVCTDYSQCTQPCPPDTQGNMGFSCRQKTWHKITDTCQTLNALNIFEEDSRLVQPFEDNIKISVYTGKSETITDMLLQKCPTDLSCVIRNIQQSPWIPGNIAVIVQLLHNISTAIWTGVDEAKMQSYSTIANHILNSKSISNWTFIPDRNSSYILLHSVNSFARRLFIDKHPVDISDVFIHTMGTTISGDNIGKNFTFSMRINDTSNEVTGRVLISRDELRKVPSPSQVISIAFPTIGAILEASLLENVTVNGLVLSAILPKELKRISLIFEKISKSEERRTQCVGWHSVENRWDQQACKMIQENSQQAVCKCRPSKLFTSFSILMSPHILESLILTYITYVGLGISICSLILCLSIEVLVWSQVTKTEITYLRHVCIVNIAATLLMADVWFIVASFLSGPITHHKGCVAATFFVHFFYLSVFFWMLAKALLILYGIMIVFHTLPKSVLVASLFSVGYGCPLAIAAITVAATEPGKGYLRPEICWLNWDMTKALLAFVIPALAIVVVNLITVTLVIVKTQRAAIGNSMFQEVRAIVRISKNIAILTPLLGLTWGFGVATVIDDRSLAFHIIFSLLNAFQVSPDASDQVQSERIHEDVL

SEQ ID NO: 14666 - protein, 392 aa, Homo sapiens
MGLGTLSPRMLVWLVASGIVFYGELWVCAGLDYDYTFDGNEEDKTETIDYKDPCKAAVFWGDIALDDEDLNIFQIDRTIDLTQNPFGNLGHTTGGLGDHAMSKKRGALYQLIDRIRRIGFGLEQNNTVKGKVPLQFSGQNEKNRVPRAATSRTERIWPGGVIPYVIGGNFTGSQRAMFKQAMRHWEKHTCVTFIERSDEESYIVFTYRPCGCCSYVGRRGNGPQAISIGKNCDKFGIVVHELGHVIGFWHEHTRPDRDNHVTIIRENIQPGQEYNFLKMEPGEVNSLGERYDFDSIMHYARNTFSRGMFLDTILPSRDDNGIRPAIGQRTRLSKGDIAQARKLYRCPACGETLQESNGNLSSPGFPNGYPSYTHCIWRVSVTPGEKVVFSLC

SEQ ID NO: 14667 - protein, 372 aa, Homo sapiens
MQGPAGNASRGLPGGPPSTVASGAGRCESGALMHSFGIFLQGLLGVVAFSTLMLKRFREPKHERRPWRIWFLDTSKQAIGMLFIHFANVYLADLTEEDPCSLYLINFLLDATVGMLLIYVGVRAVSVLVEWQQWESLRFGEYGDPLQCGAWVGQCALYIVIMIFEKSVVFIVLLILQWKKVALLNPIENPDLKLAIVMLIVPFFVNALMFWVVDNFLMRKGKTKAKLEERGANQDSRNGSKVRYRRAASHEESESEILISADDEMEESDVEEDLRRLTPLKPVKKKKHRFGLPAGAQEAPIKKKRPPVKDEDLKGARGNLTKNQEIKSKTYQVMRECEQAGSAAPSVFSRTRTGTETVFEKPKAGPTKSVFG

SEQ ID NO: 14668 - protein, 224 aa, Homo sapiens
MRPLRPRAALLALLASLLAAPPVAPAEAPHLVHVDAARALWPLRRFWRSTGFWGSTGRGLSYNFTHLDGYLDLLRENQLLPGFELMGSASGHFTDFEDKQQVFEWKDLVSSLARRYIGRYGLAHVSKWNFETWNEPDHHDFDNVSMTMQGFLNYYDACSEGLRAASPALRLGGPGDSFHTPPRSPLSWGLLRHCHDGTNFFTGEAGVRLDYISLHRKGARSSIS

SEQ ID NO: 14669 - protein, 241 aa, Homo sapiens
MRIAVICFCLLGITCAIPVKQADSGSSEEKQTLPSKSNESHDHMDDMDDEDDDDHVDSQDSIDSNDSDDVDDTDDSHQSDESHHSDESDELVTDFPTDLPATEVFTPVVPTVDTYDGRGDSVVYGLRSKSKKFRRPDIQYPDATDEDITSHMESEELNGAYKAIPVAQDLNAPSDWDSRGKDSYETSQLDDQSAETHSHKQSRLYKRKANDESNEHSDVIDSQELSKVSREFHSHEFHSHE

SEQ ID NO: 14670 - protein, 41 aa, Homo sapiens
MGPEALSSLLLLLLVASGDADMKGHFDPAKCRYALGMQDRT

SEQ ID NO: 14671 - protein, 38 aa, Homo sapiens
MSNYSVSLVGPAPWGFRLQGGKDFNMPLTISSLTFWWR

SEQ ID NO: 14672 - protein, 154 aa, Homo sapiens
MASASARGNQDKDAHFPPPSKQSLLFCPKSKLHIHRAEISKIMRECQEESFWKRALPFSLVSMLVTQGLVYQGYLAANSRFGSLPKVALAGLLGFGLGKVSYIGVCQSKFHFFEDQLRGAGFGPQHNRHCLLTCEECKIKHGLSEKGDSQPSAS

SEQ ID NO: 14673 - protein, 90 aa, Homo sapiens
MTSIFHFAIIFMLILQIRIQLSEESEFLVDRSKNGLIHVPKDLSQKTTILNISQNYISELWTSDILSLSKLRILIISHNRIQYLDISVFK

SEQ ID NO: 14674 - protein, 951 aa, Homo sapiens
MCCTEGSLRKRDSQRAPEAVLCLQLWQRTVPLDTLKGLGTCFPSGPELRGAGIAAAMERASERRTASALFAGFRALGLFSNDIPHVVRFSALKRRFYVTTCVGKSFHTYDVQKLSLVAVSNSVPQDICCMAADGRLVFAAYGNVFSAFARNKEIVHTFKGHKAEIHFLQPFGDHIISVDTDGILIIWHIYSEEEYLQLTFDKSVFKISAILHPSTYLNKILLGSEQGSLQLWNVKSNKLLYTFPGWKVGVTALQQAPAVDVVAIGLMSGQVIIHNIKFNETLMKFRQDWGPITSISFRTDGHPVMAAGSPCGHIGLWDLEDKKLINQMRNAHSTAIAGLTFLHREPLLVTNGADNALRIWIFDGPTGEGRLLRFRMGHSAPLTNIRYYGQNGQQILSASQDGTLQSFSTVHEKFNKSLGHGLINKKRVKRKGLQNTMSVRLPPITKFAAEEARESDWDGIIACHQGKLSCSTWNYQKSTIGAYFLKPKELKKDDITATAVDITSCGNFAVIGLSSGTVDVYNMQSGIHRGSFGKDQAHKGSVRGVAVDGLNQLTVTTGSEGLLKFWNFKNKILIHSVSLSSSPNIMLLHRDSGILGLALDDFSISVLDIETRKIVREFSGHQGQINDMAFSPDGRWLISAAMDCSIRTWDLPSGCLIDCFLLDSAPLNVSMSPTGDFLATSHVDHLGIYLWSNISLYSVVSLRPLPADYVPSIVMLPGTCQTQDVEVSEETVEPSDELIEYDSPEQLNEQLVTLSLLPESRWKNLLNLDVIKKKNKPKEPPKVPKSAPFFIPTIPGLVPRYAAPEQNNDPQQSKVVNLGVLAQKSDFCLKLEEGLVNNKYDTALNLLKESGPSGIETELRSLSPDCGGSIEVMQSFLKMIGMMLDRKRDFELAQAYLALFLKLHLKMLPSEPVLLEEITNLSSQVEENWTHLQSLFNQSMCILNYLKSALL

SEQ ID NO: 14675 - protein, 253 aa, Homo sapiens
MKIIILLGFLGATLSAPLLLNLNNGQLLPLQLQGPLNSWIPPFSGILQQQQQAQIPGLSQFSLSALDQFAGLLPNQIPLTGEASFAQGAQAGQVDPLQLQTPPQTQPGPSHVMPYVFSFKMPQEQGQMFQYYPVYMVLPWEQPQQTVPRSPQQTRQQQYEEQIPFYAQFGYIPQLAEPAISGGQQQLAFDPQLGTAPEIAVMSTGEEIPYLQKEAINFRHDSAGVFMPSTSPKPSTTNVFTSAVDQTITPELP

SEQ ID NO: 14676 - protein, 94 aa, Homo sapiens
MALGVPISVYLLFNAMTALTEEAAVTVTPPITAQQGNWTVNKTEADNIEGPIALKFSHLCLEDHNSYCINGACAFHHELEKAICRCFTGYTGER

SEQ ID NO: 14677 - protein, 136 aa, Homo sapiens
MEQRPRGCAAVAAALLLVLLGARAQGGTRSPRCDCAGDFHKKIGLFCCRGCPAASQVALENCSAVADTRCGCKPGWFVECQVSQCVSSSPFYCQPCLDCGALHRHTRLLCSRRDTDCGTCLPGFYEHGDGCVSCPT

SEQ ID NO: 14678 - protein, 958 aa, Homo sapiens
MGQLCWLPLLAPLLLLRPPGVQSAGPIRAFVVPHSHMDVGWVYTVQESMRAYAANVYTSVVEELARGQQRRFIAVEQEFFRLWWDGVASDQQKYQVRQLLEEGRLEFVIGGQVMHDEAVTHLDDQILQLTEGHGFLYETFGIRPQFSWHVDPFGASATTPTLFALAGFNAHLGSRIDYDLKAAMQEARGLQFVWRGSPSLSERQEIFTHIMDQYSYCTPSHIPFSNRSGFYWNGVAVFPKPPQDGVYPNMSEPVTPANINLYAELGVSVQYATLGDYFRALHALNVTWRVRDHHDFLPYSTEPFQAWTGFYTSRSSLKGLARRASALLYAGESMFTRYLWPAPRGHLDPTWALQQLQQLRWAVSEVQHHDAITGTESPKVRDMYATHLASGMLGMRKLMASIVLDELQPQAPMAASSDAGPAGHFASVYNPLAWTVTTIVTLTVGFPGVRVTDEAGHPVPSQIQNSTETPSAYDLLILTTIPGLSYRHYNIRPTAGAQEGTQEPAATVASTLQFGRRLRRRTSHAGRYLVPVANDCYIVLLDQDTNLMHSIWERQSNRTVRVTQEFLEYHVNGDVKQGPISDNYLFTPGKAAVPAWEAVEMEIVAGQLVTEIRQYFYRNMTAQNYTYAIRSRLTHVPQGHDGELLCHRIEQEYQAGPLELNREAVLRTSTNLNSQQVIYSDNNGYQMQRRPYVSYVNNSIARNYYPMVQSAFMEDGKSRLVLLSERAHGISSQGNGQVEVMLHRRLWNNFDWDLGYNLTLNDTSVVHPVLWLLLGSWSLTTALRQRSALALQHRPVVLFGDLAGTAPKLPGPQQQEAVTLPPNLHLQILSIPGWRYSSNHTEHSQNLRKGHRGEAQADLRRVLLRLYHLYEVGEDPVLSQPVTVNLEAVLQALGSVVAVEERSLTGTWDLSMLHRWSWRTGPGRHRGDTTSPSRPPGGPIITVHPKEIRTFFIHFQQQ

SEQ ID NO: 14679 - protein, 167 aa, Homo sapiens
MRTADREARPGLPSLLLLLLAGAGLSAASPPAAPRFNVSLDSVPELRWLPVLRHYDLDLVRAAMAQVIGDRVPKWVHVLIGKVVLELERFLPQPFTGEIRGMCDFMNLSLADCLLVNLAYESSVFCTSIVAQDSRGHIYHGRNLDYPFGNVLRKLTVDVQFLKNGQV

SEQ ID NO: 14680 - protein, 172 aa, Homo sapiens
MLKVSAVLCVCAAAWCSQSLAAAAAVAAAGGRSDGGNFLDDKQWLTTISQYDKEVGQWNKFRDDDYFRTWSPGKPFDQACSDLEFREVANRLRDWFKALHESGSQNKKTKTLLRPERSRFDTSILPICKDSLGWMFNRLDTNYDLLLDQSELRSIYLDKNEQCTKAFFNSCD

SEQ ID NO: 14681 - protein, 170 aa, Homo sapiens
MLAVGCALLAALLAAPGAALAPRRCPAQEVARGVLTSLPGDSVTLTCPGVEPEDNATVHWVLRKPAAGSHPSRWAGMGRRLLLRSVQLHDSGNYSCYRAGRPAGTVHLLVDVPPEEPQLSCFRKSPLSNVVCEWGPRSTPSLTTKAVLLSEQSGRRLPGAVPVFPGVPEV

SEQ ID NO: 14682 - protein, 329 aa, Homo sapiens
MWAVLRLALRPCARASPAGPRAYHGDSVASLGTQPDLGSALYQENYKQMKALVNQLHERVEHIKLGGGEKARALHISRGKLLPRERIDNLIDPGSPFLELSQFAGYQLYDNEEVPGGGIITGIGRVSGVECMIIANDATVKGGAYYPVTVKKQLRAQEIAMQNRLPCIYLVDSGGAYLPRQADVFPDRDHFGRTFYNQAIMSSKNIAQVKAATGEEVSAEDLGGADLHCRKSGVSDHWALDDHHALHLTRKVVRNLNYQKKLDVTIEPSEEPLFPADELYGIVGANLKRSFDVREVIARIVDGSRFTEFKAFYGDTLVTGIKPLEKHKT

SEQ ID NO: 14683 - protein, 463 aa, Homo sapiens
MAGPTEAETGLAEPRALCAQRGHRTYARRWVFLLAISLLNCSNATLWLSFAPVADVIAEDLVLSMEQINWLSLVYLVVSTPFGVAAIWILDSVGLRAALGVYTIPAGVVCLLSTICLWESVPPTPPSAGAASSTSEKFLDGLKLQLMWNKAYVILAVCLGGMIGISASFSALLEQILCASGHSSGFSGLCGALFITFGILGALALGPYVDRTKHFTEATKIGLCLFSLACVPFALVSQLQGQTLALAATCSLLGLFGFSVGPVAMELAVECSFPVGEGAATGMIFVLGQAEGILIMLAMTALTVRRSEPSLSTCQQGEDPLDWTVSLLLMAGLCTFFSCILAVFFHTPYRRLQAESGEPPSTRNAVGGADSGPGVDRGGAGRAGVLGPSTATPECTARGASLEDPRGPGSPHPACHRATPRAQGPAATDAPSRPGRLAGRVQASRFIDPAGSHSSFSSPWVIT

SEQ ID NO: 14684 - protein, 123 aa, Homo sapiens
MRLSLPLLLLLLGAWAIPGGLGDRAPLTATAPQLDDEEMYSAHMPAHLRCDACRAVAYQSLLVPDVAKSGKGRDQTSYLKLWGAAGAERVGLHGCPGPELLPELAGLRSSRSGPSETSHRPRT

SEQ ID NO: 14685 - protein, 734 aa, Homo sapiens
MKQSPALAPEERCRRAGSPKPVLRADDNNMGNGCSQKLATANLLRFLLLVLIPCICALVLLLVILLSYVGTLQKVYFKSNGSEPLVTDGEIQGSDVILTNTIYNQSTVVSTAHPDQHVPAWTTDASLPGDQSHRNTSACMNITHSQCQMLPYHATLTPLLSVVRNMEMEKFLKFFTYLHRLSCYQHIMLFGCTLAFPECIIDGDDSHGLLPCRSFCEAAKEGCESVLGMVNYSWPDFLRCSQFRNQTESSNVSRICFSPQQENGKQLLCGRGENFLCASGICIPGKLQCNGYNDCDDWSDEAHCNCSENLFHCHTGKCLNYSLVCDGYDDCGDLSDEQNCACHSQGLVECRNGQCIPSTFQCDGDEDCKDGSDEENCSVIQTSCQEGDQRCLYNPCLDSCGGSSLCDPNNSLNNCSQCEPITLELCMNLPYNSTSYPNYFGHRTQKEASISWESSLFPALVQTNCYKYLMFFSCTILVPKCDVNTGEHIPPCRALCEHSKERCESVLGIVGLQWPEDTDCSQFPEENSDNQTCLMPDEYVEECSPSHFKCRSGQCVLASRRCDGQADCDDDSDEENCGCKERDLWECPSNKQCLKHTVICDGFPDCPDYMDEKNCSFCQDDELECANHACVSRDLWCDGEADCSDSSDEWDCGELLVSAICCTLSCLSATEAEWILNYFLDFTDQVHLFCFTVIKADSADLCVLFPTHRKFPHEATSLFEISILYGKTFGFKML

SEQ ID NO: 14686 - protein, 437 aa, Homo sapiens
MGLRAAPSSAAAAAAEVEQRRSPGLCPPPLELLLLLLFSLGLLHAGDCQQPAQCRIQKCTTDFVSLTSHLNSAVDGFDSEFCKALRAYAGCTQRTSKACRGNLVYHSAVLGISDLMSQRNCSKDGPTSSTNPEVTHDPCNYHSHAGAREHRRGDQNPPSYLFCGLFGDPHLRTFKDNFQTCKVEGAWPLIDNNYLSVQVTNVPVVPGSSATATNKITIIFKAHHECTDQKVYQAVTDDLPAAFVDGTTSGGDSDAKSLRIVERESGHYVEMHARYIGTTVFVRQVGRYLTLAIRMPEDLAMSYEESQDLQLCVNGCPLSERIDDGQGQVSAILGHSLPRTSLVQAWPGYTLETANTQCHEKMPVKDIYFQSCVFDLLTTGDANFTAAAHSALEDVEALHPRKERWHIFPSSGNGTPRGGSDLSVSLGLTCLILIVFL

SEQ ID NO: 14687 - protein, 469 aa, Homo sapiens
MLLRSKPALPPPLMLLLLGPLGPLSPGALPRPAQAQDVVDLDFFTQEPLHLVSPSFLSVTIDANLATDPRFLILLGSPKLRTLARGLSPAYLRFGGTKTDFLIFDPKKESTFEERSYWQSQVNQDICKYGSIPPDVEEKLRLEWPYQEQLLLREHYQKKFKNSTYSRSSVDVLYTFANCSGLDLIFGLNALLRTADLQWNSSNAQLLLDYCSSKGYNISWELGNEPNSFLKKADIFINGSQLGEDFIQLHKLLRKSTFKNAKLYGPDVGQPRRKTAKMLKSFLKAGGEVIDSVTWHHYYLNGRTATKEDFLNPDVLDIFISSVQKVFQDYWLSLLFKKLVGTKVLMASVQGSKRRKLRVYLHCTNTDNPRYKEGDLTLYAINLHNVTKYLRLPYPFSNKQVDKYLLRPLGPHGLLSKSVQLNGLTLKMVDDQTLPPLMEKPLRPGSSLGLPAFSYSFFVIRNAKVAACI

SEQ ID NO: 14688 - protein, 192 aa, Homo sapiens
MATPMHRLIARRQAFDTELQPVKTFWILIQPSIVISEANKQHVRCQKCLEFGHWTYECTGKRKYLHRPSRTAELKKALKEKENRLLLQQSIGETNVERKAKKKRSKSVTSSSSSSSDSSASDSSSESEETSTSSSSEDSDTDESSSSSSSSASSTTSSSSSDSDSDSSSSSSSSTSTDSSSDDEPPKKKKKK

SEQ ID NO: 14689 - protein, 248 aa, Homo sapiens
MAAPLELSCWGGGWGLPSVHSESLVVMAYAKFSGAPLKVNVIDNTWRGSRGDVPILTTEDDMVSQPAKILNFLRKQKYNADYELSAKQGADTLAYIALLEEKLLPAVLHTFWVESDNYFTVTKPWFASQIPFPLSLILPGRMSKGALNRILLTRGQPPLYHLREVEAQIYRDAKECLNLLSNRLGTSQFFFGDTPSTLDAYVFGFLAPLYKVRFPKVQLQEHLKQLSNLCRFCDDILSSYFRLSLGDG

SEQ ID NO: 14690 - protein, 849 aa, Homo sapiens
MSAGEVERLVSELSGGTGGDEEEEWLYGGPWDVHVHSDLAKDLDENEVERPEEENASANPPSGIEDETAENGVPKPKVTETEDDSDSDSDDDEDDVHVTIGDIKTGAPQYGSYGTAPVNLNIKTGGRVYGTTGTKVKGVDLDAPGSINGVPLLEVDLDSFEDKPWRKPGADLSDYFNYGFNEDTWKAYCEKQKRIRMGLEVIPVTSTTNKITAEDCTMEVTPGAEIQDGRFNLFKVQQGRTGNSEKETALPSTKAEFTSPPSLFKTGLPPSRNSTSSQSQTSTASRKANSSVGKWQDRYGRAESPDLRRLPGAIDVIGQTITISRVEGRRRANENSNIQLPYDSRWEFPRDGLVLGRVLGSGAFGKVVEGTAYGLSRSQPVMKVAVKMLKPTARSSEKQALMSELKIMTHLGPHLNIVNLLGACTKSGPIYIITEYCFYGDLVNYLHKNRDSFLSHHPEKPKKELDIFGLNPADESTRSYVILSFENNGDYMDMKQADTTQYVPMLERKEVSKYSDIQRSLYDRPASYKKKSMLDSEVKNLLSDDNSEGLTLLDLLSFTYQVARGMEFLASKNCVHRDLAARNVLLAQGKIVKICDFGLARDIMHDSNYVSKGSTFLPVKWMAPESIFDNLYTTLSDVWSYGILLWEIFSLGGTPYPGMMVDSTFYNKIKSGYRMAKPDHATSEVYEIMVKCWNSEPEKRPSFYHLSEIVENLLPGQYKKSYEKIHLDFLKSDHPAVARMRVDSDNAYIGVTYKNEEDKLKDWEGGLDEQRLSADSGYIIPLPDIDPVPEEEDLGKRNRHSSQTSEESAIETGSSSSTFIKREDETIEDIDMMDDIGIDSSDLVEDSFL

SEQ ID NO: 14691 - protein, 903 aa, Homo sapiens
MIPVLTSKKASELPVSEVASILQADLQNGLNKCEVSHRRAFHGWNEFDISEDEPLWKKYISQFKNPLIMLLLASAVISVLMHQFDDAVSITVAILIVVTVAFVQEYRSEKSLEELSKLVPPECHCVREGKLEHTLARDLVPGDTVCLSVGDRVPADLRLFEAVDLSIDESSLTGETTPCSKVTAPQPAATNGDLASRSNIAFMGTLVRCGKAKGVVIGTGENSEFGEVFKMMQAEEAPKTPLQKSMDLLGKQLSFYSFGIIGIIMLVGWLLGKDILEMFTISVSLAVAAIPEGLPIVVTVTLALGVMRMVKKRAIVKKLPIVETLGCCNVICSDKTGTLTKNEMTVTHIFTSDGLHAEVTGVGYNQFGEVIVDGDVVHGFYNPAVSRIVEAGCVCNDAVIRNNTLMGKPTEGALIALAMKMGLDGLQQDYIRKAEYPFSSEQKWMAVKCVHRTQQDRPEICFMKGAYEQVIKYCTTYQSKGQTLTLTQQQRDVYQQEKARMGSAGLRVLALASGPELGQLTFLGLVGIIDPPRTGVKEAVTTLIASGVSIKMITGDSQETAVAIASRLGLYSKTSQSVSGEEIDAMDVQQLSQIVPKVAVFYRASPRHKMKIIKSLQKNGSVVAMTGDGVNDAVALKAADIGVAMGQTGTDVCKEAADMILVDDDFQTIMSAIEEGKGIYNNIKNFVRFQLSTSIAALTLISLATLMNFPNPLNAMQILWINIIMDGPPAQSLGVEPVDKDVIRKPPRNWKDSILTKNLILKILVSSIIIVCGTLFVFWRELRDNVITPRDTTMTFTCFVFFDMFNALSSRSQTKSVFEIGLCSNRMFCYAVLGSIMGQLLVIYFPPLQKVFQTESLSILDLLFLLGLTSSVCIVAEIIKKVERSREKIQKHVSSTSSSFLEV

SEQ ID NO: 14692 - protein, 488 aa, Homo sapiens
MKRSLQALYCQLLSFLLILALTEALAFAIQEPSPRESLQVLPSGTPPGTMVTAPHSSTRHTSVVMLTPNPDGPPSQAAAPMATPTPRAEGHPPTHTISTIAATVTAPHSESSLSTGPAPAAMATTSSKPEGRPRGQAAPTILLTKPPGATSRPTTAPPRTTTRRPPRPPGSSRKGAGNSSRPVPPAPGGHSRSKEGQRGRNPSSTPLGQKRPLGKIFQIYKGNFTGSVEPEPSTLTPRTPLWGYSSSPQPQTVAATTVPSNTSWAPTTTSLGPAKDKPGLRRAAQGGGSTFTSQGGTPDATAASGAPVSPQAAPVPSQRPHHGDPQDGPSHSDSWLTVTPGTSRPLSTSSGVFTAATGPTPAAFDTSVSAPSQGIPQGASTTPQAPTHPSRVSESTISGAKEETVATLTMTDRVPSPLSTVVSTATGNFLNRLVPAGTWKPGTAGNISHVAEGDKPQHRATICLSKMDIAWVILAISVPISSCSDPIT

SEQ ID NO: 14693 - protein, 145 aa, Homo sapiens
MVLLHWCLLWLLFPLSSRTQKLPTRDEELFQMQIRDKAFFHDSSVIPDGAEISSYLFRDTPKRYFFVVEEDNTPLSVTVTPCDAPLEWKLSLQELPEDRSGEGSGDLEPLEQQKQQIINEEGTELFSYKGNDVEYFISSSSPSGL

SEQ ID NO: 14694 - protein, 161 aa, Homo sapiens
MLKVSAVLCVCAAAWCSQSLAAAAAVAAAGGRSDGGNFLDDKQWLTTISQYDKEVGQWNKFRDDDYFRTWSPGKPFDQALDPAKDPCLKMKCSRHKVCIAQDSQTAVCISHRRLTHRMKEAGVDHRQWRGPILSTCKQCPVVYPSPVCGSDGHTYSFQCKL

SEQ ID NO: 14695 - protein, 351 aa, Homo sapiens
MRQTLPCIYFWGGLLPFGMLCASSTTKCTVSHEVADCSHLKLTQVPDDLPTNITVLNLTHNQLRRLPAANFTRYSQLTSLDVGFNTISKLEPELCQKLPMLKVLNLQHNELSQLSDKTFAFCTNLTELHLMSNSIQKIKNNPFVKQKNLITLDLSHNGLSSTKLGTQVQLENLQELLLSNNKIQALKSEELDIFANSSLKKLELSSNQIKEFSPGCFHAIGRLFGLFLNNVQLGPSLTEKLCLELANTSIRNLSLSNSQLSTTSNTTFLGLKWTNLTMLDLSYNNLNVWLKCLEHLNMEDNDIPGIKSNMFTGLINLKYLSLSNSFTSLRTLTNETFVSLAHSPLHILNLT

SEQ ID NO: 14696 - protein, 1240 aa, Homo sapiens
MWPSQLLIFMMLLAPIIHAFSRAPIPMAVVRRELSCESYPIELRCPGTDVIMIESANYGRTDDKICDSDPAQMENIRCYLPDAYKIMSQRCNNRTQCAVVAGPDVFPDPCPGTYKYLEVQYECVPYKVEQKVFLCPGLLKGVYQSEHLFESDHQSGAWCKDPLQASDKIYYMPWTPYRTDTLTEYSSKDDFIAGRPTTTYKLPHRVDGTGFVVYDGALFFNKERTRNIVKFDLRTRIKSGEAIIANANYHDTSPYRWGGKSDIDLAVDENGLWVIYATEQNNGKIVISQLNPYTLRIEGTWDTAYDKRSASNAFMICGILYVVKSVYEDDDNEATGNKIDYIYNTDQSKDSLVDVPFPNSYQYIAAVDYNPRDNLLYVWNNYHVVKYSLDFGPLDSRSGQAHHGQVSYISPPIHLDSELERPSVKDISTTGPLGMGSTTTSTTLRTTTLSPGRSTTPSVSGRRNRSTSTPSPAVEVLDDMTTHLPSASSQIPALEESCEAVEAREIMWFKTRQGQIAKQPCPAGTIGVSTYLCLAPDGIWDPQGPDLSNCSSPWVNHITQKLKSGETAANIARELAEQTRNHLNAGDITYSVRAMDQLVGLLDVQLRNLTPGGKDSAARSLNKLQKRERSCRAYVQAMVETVNNLLQPQALNAWRDLTTSDQLRAATMLLHTVEESAFVLADNLLKTDIVRENTDNIKLEVARLSTEGNLEDLKFPENMGHGSTIQLSANTLKQNGRNGEIRVAFVLYNNLGPYLSTENASMKLGTEALSTNHSVIVNSPVITAAINKEFSNKVYLADPVVFTVKHIKQSEENFNPNCSFWSYSKRTMTGYWSTQGCRLLTTNKTHTTCSCNHLTNFAVLMAHVEVKHSDAVHDLLLDVITWVGILLSLVCLLICIFTFCFFRGLQSDRNTIHKNLCISLFVAELLFLIGINRTDQPIACAVFAALLHFFFLAAFTWMFLEGVQLYIMLVEVFESEHSRRKYFYLVGYGMPALIVAVSAAVDYRSYGTDKVCWLRLDTYFIWSFIGPATLIIMLNVIFLGIALYKMFHHTAILKPESGCLDNINYEDNRPFIKSWVIGAIALLCLLGLTWAFGLMYINESTVIMAYLFTIFNSLQGMFIFIFHCVLQKKVRKEYGKCLRTHCCSGKSTESSIGSGKTSGSRTPGRYSTGSQSRIRRMWNDTVRKQSESSFITGDINSSASLNREPYRETSMGVKLNIAYQIGASEQCQGYKCHGYSTTEW

SEQ ID NO: 14697 - protein, 566 aa, Homo sapiens
MDLGAITKYSALHAKPNGLILQYGTAGFRTKAEHLDHVMFRMGLLAVLRSKQTKSTIGVMVTASHNPEEDNGVKLVDPLGEMLAPSWEEHATCLANAEEQDMQRVLIDISEKEAVNLQQDAFVVIGRDTRPSSEKLSQSVIDGVTVLGGQFHDYGLLTTPQLHYMVYCRNTGGRYGKATIEGYYQKLSKAFVELTKQASCSGDEYRSLKVDCANGIGALKLREMEHYFSQGLSVQLFNDGSKGKLNHLCGADFVKSHQKPPQGMEIKSNERCCSFDGDADRIVYYYHDADGHFHLIDGDKIATLISSFLKELLVEIGESLNIGVVQTAYANGSSTRYLEEVMKVPVYCTKTGVKHLHHKAQEFDIGVYFEANGHGTALFSTAVEMKIKQSAEQLEDKKRKAAKMLENIIDLFNQAAGDAISDMLVIEAILALKGLTVQQWDALYTDLPNRQLKVQVADRRVISTTDAERQAVTPPGLQEAINDLVKKYKLSRAFVRPSGTEDVVRVYAEADSQGSRLVVWIFIIWPLHILLKVCAKPGQSTVSALNRESGGDIWQLSCRSLSHLRV

SEQ ID NO: 14698 - protein, 517 aa, Homo sapiens
MYHALGYSTIVVLQAVLTFEQQDIQNGISAMKDALQTCQKYRKKYTVVESFSSLLSRGSLEQLSEEEMHAEICYAECLLQKAALTFVQDENMINFIKGGLKIRTSYQIYKECLSILHEIQKNKLQQEFFYEFEGGVKLGSGAFNLMLSLLPARIIRLLEFIGFSGNRELGLLQLREGASGRSMRSALCCLTILAFHTYISLILGTGEVNVAEAERLLAPFLQQFPNGSLVLFYHARIELLKGNLEEAQEVFQKCISVQEEWKQFHHLCYWELMWINVFQQNWMQAYYYSDLLCKESKWSKATYVFLKAAILSMLPEEDVVATNENVVTLFRQVDSLKQRIAGKSIPTEKFAVRKARRYSASLPAPVKLILPALEMMYVWNGFSIVSKRKDLSENLLVTVEKAEAALQSQNFNSFSVDDECLVKLLKGCCLKNLQRPLQAELCYNHVVESEKLLKYDHYLVPFTLFELASLYKSQGEIDKAIKFLETARNNYKDYSLESRLHFRIQAALHLWRKPSSD

SEQ ID NO: 14699 - protein, 64 aa, Homo sapiens
MLPWTALGLALSLRLALARSGAERGAQGPGRHRVHCQHRPRQLPGAVSRCLSPCREAPALCGRG

SEQ ID NO: 14700 - protein, 412 aa, Homo sapiens
MEVNPPKQEHLLALKVMRLTKPTLFTNIPVTCEEKDLPGDLFNQLMRDDPSTVNGAEVLMLGEMLTLPQNFGNIFLGETFSSYISVHNDSNQVVKDILVKADLQTSSQRLNLSASNAAVAELKPDCCIDDVIHHEVKEIGTHILVCAVSYTTQAGEKMYFRKFFKFQVLKPLDVKTKFYNAETDEVFLEAQIQNMTTSPMFMEKVSLEPSIMYNVTELNSVSQAGECVSTFGSRAYLQPMDTRQYLYCLKPKNEFAEKAGIIKGVTVIGKLDIVWKTNLGERGRLQTSQLQRMAPGYGDVRLSLEAIPDTVNLEEPFHITCKITNCSSERTMDLVLEMCNTNSIHWCGISGRQLGKLHPSSSLCLALTLLSSVQGLQSISGLRLTDTFLKRTYEYDDIAQVCVVSSAIKVES

SEQ ID NO: 14701 - protein, 1058 aa, Homo sapiens
MGQQVGRVGEAPGLQQPQPRGIRGSSAARPSGRRRDPAGRTTETGFNIFTQHEALHRPYGCDVEPQALNEAIRWSSKENLLGATESDPNLFVALYDFVASGDNTLSITKGEKLRVLGYNQNGEWSEVRSKNGQGWVPSNYITPVNSLEKHSWYHGPVSRSAAEYLLSSLINGSFLVRESESSPGQLSISLRYEGRVYHYRINTTADGKVYVTAESRFSTLAELVHHHSTVADGLVTTLHYPAPKCNKPTVYGVSPIHDKWEMERTDITMKHKLGGGQYGEVYVGVWKKYSLTVAVKTLKEDTMEVEEFLKEAAVMKEIKHPNLVQLLGVCTLEPPFYIVTEYMPYGNLLDYLRECNREEVTAVVLLYMATQISSAMEYLEKKNFIHRDLAARNCLVGENHVVKVADFGLSRLMTGDTYTAHAGAKFPIKWTAPESLAYNTFSIKSDVWAFGVLLWEIATYGMSPYPGIDLSQVYDLLEKGYRMEQPEGCPPKVYELMRACWKWSPADRPSFAETHQAFETMFHDSSISEEVAEELGRAASSSSVVPYLPRLPILPSKTRTLKKQVENKENIEGAQDATENSASSLAPGFIRGAQASSGSPALPRKQRDKSPSSLLEDAKETCFTRDRKGGFFSSFMKKRNAPTPPKRSSSFREMENQPHKKYELTGLPEQDRMAMTLPRNCQRSKLQLERTVSTSSQPEENVDRANDMLPKKSEESAAPSRERPKAKLLPRGATALPLRTPSGDLAITEKDPPGVGVAGVAAAPKGKEKNGGARLGMAGVPEDGEQPGWPSPAKAAPVLPTTHNHKVPVLISPTLKHTPADVQLIGTDSQGNKFKLLSEHQVTSSGDKDRPRRVKPKCAPPPPPVMRLLQHPSICSDPTEEPTALTAGQSTSETQEGGKKAALGAVPISGKAGRPVMPPPQVPLPTSSISPAKMANGTAGTKVALRKTKQAAEKISADKISKEALLECADLLSSALTEPVPNSQLVDTGHQLLDYCSGYVDCIPQTRNKFAFREAVSKLELSLQELQVSSAAAGVPGTNPVLNNLLSCVQEISDVVQR

SEQ ID NO: 14702 - protein, 436 aa, Homo sapiens; identical to SEQ ID NO: 7400

SEQ ID NO: 14703 - protein, 1283 aa, Homo sapiens
MWPSQLLIFMMLLAPIIHAFSRAPIPMAVVRRELSCESYPIELRCPGTDVIMIESANYGRTDDKICDSDPAQMENIRCYLPDAYKIMSQRCNNRTQCAVVAGPDVFPDPCPGTYKYLEVQYECVPYKVEQKVFLCPGLLKGVYQSEHLFESDHQSGAWCKDPLQASDKIYYMPWTPYRTDTLTEYSSKDDFIAGRPTTTYKLPHRVDGTGFVVYDGALFFNKERTRNIVKFDLRTRIKSGEAIIANANYHDTSPYRWGGKSDIDLAVDENGLWVIYATEQNNGKIVISQLNPYTLRIEGTWDTAYDKRSASNAFMICGILYVVKSVYEDDDNEATGNKIDYIYNTDQSKDSLVDVPFPNSYQYIAAVDYNPRDNLLYVWNNYHVVKYSLDFGPLDSRSGQAHHGQVSYISPPIHLDSELERPSVKDISTTGPLGMGSTTTSTTLRTTTLSPGRSTTPSVSGRRNRSTSTPSPAVEVLDDMTTHLPSASSQIPALEESCEAVEAREIMWFKTRQGQIAKQPCPAGTIGVSTYLCLAPDGIWDPQGPDLSNCSSPWVNHITQKLKSGETAANIARELAEQTRNHLNAGDITYSVRAMDQLVGLLDVQLRNLTPGGKDSAARSLNKLQKRERSCRAYVQAMVETVNNLLQPQALNAWRDLTTSDQLRAATMLLHTVEESAFVLADNLLKTDIVRENTDNIKLEVARLSTEGNLEDLKFPENMGHGSTIQLSANTLKQNGRNGEIRVAFVLYNNLGPYLSTENASMKLGTEALSTNHSVIVNSPVITAAINKEFSNKVYLADPVVFTVKHIKQSEENFNPNCSFWSYSKRTMTGYWSTQGCRLLTTNKTHTTCSCNHLTNFAVLMAHVEVKHSDAVHDLLLDVITWVGILLSLVCLLICIFTFCFFRGLQSDRNTIHKNLCISLFVAELLFLIGINRTDQPIACAVFAALLHFFFLAAFTWMFLEGVQLYIMLVEVFESEHSRRKYFYLVGYGMPALIVAVSAAVDYRSYGTDKVCWLRLDTYFIWSFIGPATLIIMLNVIFLGIALYKMFHHTAILKPESGCLDNINYEDNRPFIKSWVIGAIALLCLLGLTWAFGLMYINESTVIMAYLFTIFNSLQGMFIFIFHCVLQKKVRKEYGKCLRTHCCSGKSTESSIGSGKTSGSRTPGRYSTGSQSRIRRMWNDTVRKQSESSFITGDINSSASLNRGAMANHLISNALLRPHGTNNPYNTLLGEPAVCNNPSVSMYNAQEPYRETSMGVKLNIAYQIGASEQCQGYKCHGYSTTEW

SEQ ID NO: 14704 - protein, 234 aa, Homo sapiens
MTDSSKTDTLNSSSSGTTASSLEKIKVQANAPLIKPPAHPSAILTVLRKPNPPPPPPRLTPVKCEDPKRVVPTANPVKTNGTLLRNGGLPGGPNKIPNGDICCIPNSNLDKAPVQLLMHRPEKDRCPQAGPRERVRFNEKVQYHGYCPDCDTRYNIKNREVHLHSEPVHPPGKIPHQGPPLPPTPHLPPFPLENGGMGISHSNSFPPIRPATVPPPTAPKPQKTILRKSTTTTV

SEQ ID NO: 14705 - protein, 120 aa, Homo sapiens
MKTGLFFLCLLGTAAAIPTNARLLSDHSKPTAETVAPDNTAIPSLRAEAEENEKETAVSTEDDSHHKAEKSSVLKSKEESHEQSAEQGKSSSQELGLKDQEDSDGHLSVNLEYAPTEGTL

SEQ ID NO: 14706 - protein, 1873 aa, Homo sapiens
MRTGWATPRRPAGLLMLLFWFFDLAEPSGRAANDPFTIVHGNTGKCIKPVYGWIVADDCDETEDKLWKWVSQHRLFHLHSQKCLGLDITKSVNELRMFSCDSSAMLWWKCEHHSLYGAARYRLALKDGHGTAISNASDVWKKGGSEESLCDQPYHEIYTRDGNSYGRPCEFPFLIDGTWHHDCILDEDHSGPWCATTLNYEYDRKWGICLKPENGCEDNWEKNEQFGSCYQFNTQTALSWKEAYVSCQNQGADLLSINSAAELTYLKEKEGIAKIFWIGLNQLYSARGWEWSDHKPLNFLNWDPDRPSAPTIGGSSCARMDAESGLWQSFSCEAQLPYVCRKPLNNTVELTDVWTYSDTRCDAGWLPNNGFCYLLVNESNSWDKAHAKCKAFSSDLISIHSLADVEVVVTKLHNEDIKEEVWIGLKNINIPTLFQWSDGTEVTLTYWDENEPNVPYNKTPNCVSYLGELGQWKVQSCEEKLKYVCKRKGEKLNDASSDKMCPPDEGWKRHGETCYKIYEDEVPFGTNCNLTITSRFEQEYLNDLMKKYDKSLRKYFWTGLRDVDSCGEYNWATVGGRRRAVTFSNWNFLEPASPGGCVAMSTGKSVGKWEVKDCRSFKALSICKKMSGPLGPEEASPKPDDPCPEGWQSFPASLSCYKVFHAERIVRKRNWEEAERFCQALGAHLSSFSHVDEIKEFLHFLTDQFSGQHWLWIGLNKRSPDLQGSWQWSDRTPVSTIIMPNEFQQDYDIRDCAAVKVFHRPWRRGWHFYDDREFIYLRPFACDTKLEWVCQIPKGRTPKTPDWYNPDRAGIHGPPLIIEGSEYWFVADLHLNYEEAVLYCASNHSFLATITSFVGLKAIKNKIANISGDGQKWWIRISEWPIDDHFTYSRYPWHRFPVTFGEECLYMSAKTWLIDLGKPTDCSTKLPFICEKYNVSSLEKYSPDSAAKVQCSEQWIPFQNKCFLKIKPVSLTFSQASDTCHSYGGTLPSVLSQIEQDFITSLLPDMEATLWIGLRWTAYEKINKWTDNRELTYSNFHPLLVSGRLRIPENFFEEESRYHCALILNLQKSPFTGTWNFTSCSERHFVSLCQKYSEVKSRQTLQNASETVKYLNNLYKIIPKTLTWHSAKRECLKSNMQLVSITDPYQQAFLSVQALLHNSSLWIGLFSQDDELNFGWSDGKRLHFSRWAETNGQLEDCVVLDTDGFWKTVDCNDNQPGAICYYSGNETEKEVKPVDSVKCPSPVLNTPWIPFQNCCYNFIITKNRHMATTQDEVHTKCQKLNPKSHILSIRDEKENNFVLEQLLYFNYMASWVMLGITYRNKSLMWFDKTPLSYTHWRAGRPTIKNEKFLAGLSTDGFWDIQTFKVIEEAVYFHQHSILACKIEMVDYKEEYNTTLPQFMPYEDGIYSVIQKKVTWYEALNMCSQSGGHLASVHNQNGQLFLEDIVKRDGFPLWVGLSSHDGSESSFEWSDGSTFDYIPWKGQTSPGNCVLLDPKGTWKHEKCNSVKDGAICYKPTKSKKLSRLTYSSRCPAAKENGSRWIQYKGHCYKSDQALHSFSEAKKLCSKHDHSATIVSIKDEDENKFVSRLMRENNNITMRVWLGLSQHSVDQSWSWLDGSEVTFVKWENKSKSGVGRCSMLIASNETWKKVECEHGFGRVVCKVPLDCPSSTWIQFQDSCYIFLQEAIKVESIEDVRNQCTDHGADMISIHNEEENAFILDTLKKQWKGPDDILLGMFYDTDDASFKWFDNSNMTFDKWTDQDDDEDLVDTCAFLHIKTGEWKKGNCEVSSVEGTLCKTAIPYKRKYLSDNHILISALVIASTVILTVLGAIIWFLYKKHSDSRFTTVFSTAPQSPYNEDCVLVVGEENEYPVQFD

SEQ ID NO: 14707 - protein, 901 aa, Homo sapiens
MEFSWGSGQESRRLLLLLLLLAAWEAGNGQLHYSVSEEAKHGTFVGRIAQDLGLELAELVPRLFRVASKGRGGLLEVNLQNGILFVNSRIDREELCRRSAECSIHLEVIVDRPLQVFHVDVEVRDINDNPPVFPATQKNLSIAESRPLDSRFPLEGASDADIGENALLTYRLSPNEYFSLEKPPDDELVKGLGLILRKSLDREEAPEIFLVLTATDGGKPELTGTVQLLITVLDANDNAPAFDRTIYKVRLLENVPNGTLVIKLNASDLDEGLNGDIVYSFSNDISPNVKSKFHIDPITGQIIVKGYIDFEESKSYEIIVEGIDKGQLPLSGHCRVIVEVEDNNDNVPDLEFKSLSLPIREDAPLGTVIALISVSDKDMGVNGLVTCSLTSHVPFKLVSTFKNYYSLVLDSALDRESVSAYELVVTARDGGSPSLWATASVSVEVADVNDNAPAFAQPEYTVFVKENNPPGCHIFTVSAWDADAQENALVSYSLVERRVGERALSSYVSVHAESGKVYALQPLDHEELELLQFQVTARDAGVPPLGSNVTLQVFVLDENDNAPALLAPRAGGTGGAVSELVPWSVGVGHVVAKVRAVDADSGYNAWLSYELQPGTGGARIPFRVGLYTGEISTTRALDETDAPRHRLLVLVKDHGEPALTATATVLVSLVESGQAPKASSRALVGAVGPDAALVDVNVYLIIAICAVSSLLVLTLLLYTALRCSALPTEGACAPGKPTLVCSSAVGSWSYSQQRRPRVCSGEGPPKTDLMAFSPSLPDSRDREDQLQTTEESFAKPRQPNPDWRYSASLRAGMHSSVHLEEAGILRAGPGGPDQQWPTVSSATPEPEAGEVSPPVGAGVNSNSWTFKYGPGNPKQSGPEPKKQTQVSFLLRRKGEASQPRQ

SEQ ID NO: 14708 - protein, 143 aa, Homo sapiens
MKTGLFFLCLLGTAAAIPTNARLLSDHSKPTAETVAPDNTAIPSLRAEAEENEKETAVSTEDDSHHKAEKSSVLKSKEESHEQSAEQGKSSSQELGLKDQEDSDGHLSVNLEYAPTEGTLDIKEDMSEPQEKKLSENTDFLAP

SEQ ID NO: 14709 - protein, 85 aa, Homo sapiens
MGPEALSSLLLLLLVASGDADMKGHFDPAKCRYALGMQDRTIPDSDISASSSWSDSTAARHSRLESSDGDGAWCPAGSVFPKEEE

SEQ ID NO: 14710 - protein, 120 aa, Homo sapiens
MKENVASATVFTLLLFLNTCLLNGQLPPGKPEIFKCRSPNKETFTCWWRPGTDGGLPTNYSLTYHREGETLMHECPDYITGGPNSCHFGKQYTSMWRTYIMMVNATNQMGSSFSDELYVD

SEQ ID NO: 14711 - protein, 73 aa, Homo sapiens
MDRLKSHLTVCFLPSVPFLILVSTLATAKSVTNSTLNGTNVVLGSVPVIIARTDHIIVKEGNSALINCSVYGI

SEQ ID NO: 14712 - protein, 61 aa, Homo sapiens
MKLWDVVAVCLVLLHTASAFPLPAANMPEDYPDQFDDVMDFIQATIKRLKRSPDKQMAVLP

SEQ ID NO: 14713 - protein, 372 aa, Homo sapiens
MSSRGGKKKSTKTSRSAKAGVIFPVGRMLRYIKKGHPKYRIGVGAPVYMAAVLEYLTAEILELAGNAARDNKKGRVTPRHILLAVANDEELNQLLKGVTIASGGVLPNIHPELLAKKRGSKGKLEAIITPPPAKKAKSPSQKKPVSKKAGGKKGARKSKKKQGEVSKAASADSTTEGTPADGFTVLSTKSLFLGQKLNLIHSEISNLAGFEVEAIINPTNADIDLKDDLGNTLEKKGGKEFVEAVLELRKKNGPLEVAGAAVSAGHGLPAKFVIHCNSPVWGADKCEELLEKTVKNCLALADDKKLKSIAFPSIGSGRNGFPKQTAAQLILKAISSYFVSTMSSSIKTVYFVLFDSESIGIYVQEMAKLDAN

SEQ ID NO: 14714 - protein, 150 aa, Homo sapiens
MVKLFIGNLPREATEQEIRSLFEQYGKVLECDIIKNYGFVHIEDKTAAEDAIRNLHHYKLHGVNINVEASKNKSKTSTKLHVGNISPTCTNKELRAKFEEYGPVIECDIVKDYAFVHMERAEDAVEAIRGLDNTEFQDIQLCHPSCSVVA

SEQ ID NO: 14715 - protein, 1167 aa, Homo sapiens
MVLGTVLLPPNSYGRDQDTSLCCLCTEASESALPDLTDHFASCVEDGFEGDKTGGSSPEALHRPYGCDVEPQALNEAIRWSSKENLLGATESDPNLFVALYDFVASGDNTLSITKGEKLRVLGYNQNGEWSEVRSKNGQGWVPSNYITPVNSLEKHSWYHGPVSRSAAEYLLSSLINGSFLVRESESSPGQLSISLRYEGRVYHYRINTTADGKVYVTAESRFSTLAELVHHHSTVADGLVTTLHYPAPKCNKPTVYGVSPIHDKWEMERTDITMKHKLGGGQYGEVYVGVWKKYSLTVAVKTLKEDTMEVEEFLKEAAVMKEIKHPNLVQLLGVCTLEPPFYIVTEYMPYGNLLDYLRECNREEVTAVVLLYMATQISSAMEYLEKKNFIHRDLAARNCLVGENHVVKVADFGLSRLMTGDTYTAHAGAKFPIKWTAPESLAYNTFSIKSDVWAFGVLLWEIATYGMSPYPGIDLSQVYDLLEKGYRMEQPEGCPPKVYELMRACWKWSPADRPSFAETHQAFETMFHDSSISEEVAEELGRAASSSSVVPYLPRLPILPSKTRTLKKQVENKENIEGAQDATENSASSLAPGFIRGAQASSGSPALPRKQRDKSPSSLLEDAKETCFTRDRKGGFFSSFMKKRNAPTPPKRSSSFREMENQPHKKYELTGNFSSVASLQHADGFSFTPAQQEANLVPPKCYGGSFAQRNLCNDDGGGGGGSGTAGGGWSGITGFFTPRLIKKTLGLRAGKPTASDDTSKPFPRSNSTSSMSSGLPEQDRMAMTLPRNCQRSKLQLERTVSTSSQPEENVDRANDMLPKKSEESAAPSRERPKAKLLPRGATALPLRTPSGDLAITEKDPPGVGVAGVAAAPKGKEKNGGARLGMAGVPEDGEQPGWPSPAKAAPVLPTTHNHKVPVLISPTLKHTPADVQLIGTDSQGNKFKLLSEHQVTSSGDKDRPRRVKPKCAPPPPPVMRLLQHPSICSDPTEEPTALTAGQSTSETQEGGKKAALGAVPISGKAGRPVMPPPQVPLPTSSISPAKMANGTAGTKVALRKTKQAAEKISADKISKEALLECADLLSSALTEPVPNSQLVDTGHQLLDYCSGYVDCIPQTRNKFAFREAVSKLELSLQELQVSSAAAGVPGTNPVLNNLLSCVQEISDVVQR

SEQ ID NO: 14716 - protein, 559 aa, Homo sapiens
MLGAQWRRNQPSRAAEEWSQHINGASHSRRCQLLLEIYPEWNPDNDTGHTMGDPFMLQQSTNPAPGILGPPPPSFHLGGPAVGPRGNLGAGNGNLQGPRHMQKGRVETSRVVHIMDFQRGKNLRYQLLQLVEPFGVISNHLILNKINEAFIEMATTEDAQAAVDYYTTTPALVFGKPVRVHLSQKYKRIKKPEGKPDQKFDQKQELGRVIHLSNLPHSGYSDSAVLKLAEPYGKIKNYILMRMKSQAFIEMETREDAMAMVDHCLKKALWFQGRCVKVDLSEKYKKLVLRIPNRGIDLLKKDKSRKRSYSPDGKESPSDKKSKTDGSQKTESSTEGKEQEEKSGEDGEKDTKDDQTEQEPNMLLESEDELLVDEEEAAALLESGSSVGDETDLANLGDVASDGKKEPSDKAVKKDGSASAAAKKKLKKVDKIEELDQENEAALENGIKNEENTEPGAESSENADDPNKDTSENADGQSDENKDDYTIPDEYRIGPYQPNVPVGIDYVIPKTGFYCKLCSLFYTNEEVAKNTHCSSLPHYQKLKKFLNKLAEERRQKKET

SEQ ID NO: 14717 - protein, 44 aa, Homo sapiens
MVPAAGRRPPRVMRLLGWWQVLLWVLGLPVRGVEGPYGFSEPKR

SEQ ID NO: 14718 - protein, 28 aa, Homo sapiens
MAGRVPSLLVLLVFPSSCLAFRSPLSVF

SEQ ID NO: 14719 - protein, 241 aa, Homo sapiens
MQLKPMEINPEMLNKVLSRLGVAGQWRFVDVLGLEEESLGSVPAPACALLLLFPLTAQHENFRKKQIEELKGQEVSPKVYFMKQTIGNSCGTIGLIHAVANNQDKLGFEDGSVLKQFLSETEKMSPEDRAKCFEKNEAIQAAHDAVAQEGQCRVDDKVNFHFILFNNVDGHLYELDGRMPFPVNHGASSEDTLLKVIFGMHLFLMTLPRSAENSPSVSKEKSASLPWLSARQPNALWEGLC

SEQ ID NO: 14720 - protein, 672 aa, Homo sapiens
MDLILNRMDYLQVGVTSQKTMKLIPASRHRATQKVVIGDHDGVVMCFGMKKGEAAAVFKTLPGPKIARLELGGVINTPQEKIFIAAASEIRGFTKRGKQFLSFETNLTESIKAMHISGSDLFLSASYIYNHYCDCKDQHYYLSGDKINDVICLPVERLSRITPVLACQDRVLRVLQGSDVMYAVEVPGPPTVLALHNGNGGDSGEDLLFGTSDGKLALIQITTSKPVRKWEIQNEKKRGGILCIDSFDIVGDGVKDLLVGRDDGMVEVYSFDNANEPVLRFDQMLSESVTSIQGGCVGKDSYDEIVVSTYSGWVTGLTTEPIHKESGPGEELKINQEMQNKISSLRNELEHLQYKVLQERENYQQSSQSSKAKSAVPSFGINDKFTLNKDDASYSLILEVQTAIDNVLIQSDVPIDLLDVDKNSAVVSFSSCDSESNDNFLLATYRCQADTTRLELKIRSIEGQYGTLQAYVTPRIQPKTCQVRQYHIKPLSLHQRTHFIDHDRPMNTLTLTGQFSFAEVHSWVVFCLPEVPEKPPAGECVTFYFQNTFLDTQLESTYRKGEGVFKSDNISTISILKDVLSKEATKRKINLNISYEINEVSVKHTLKLIHPKLEYQLLLAKKVQLIDALKELQIHEGNTNFLIPEYHCILEEADHLQEEYKKQPAHLERLYG

SEQ ID NO: 14721 - protein, 395 aa, Homo sapiens
MLLLWVSVVAALALAVLAPGAGEQRRRAAKAPNVVLVVSDSFDGRLTFHPGSQVVKLPFINFMKTRGTSFLNAYTNSPICCPSRAAMWSGLFTHLTESWNNFKGLDPNYTTWMDVMERHGYRTQKFGKLDYTSGHHSISNRVEAWTRDVAFLLRQEGRPMVNLIRNRTKVRVMERDWQNTDKAVNWLRKEAINYTEPFVIYLGLNLPHPYPSPSSGENFGSSTFHTSLYWLEKVSHDAIKIPKWSPLSEMHPVDYYSSYTKNCTGRFTKKEIKNIRAFYYAMCAETDAMLGEIILALHQLDLLQKTIVIYSSDHGELAMEHRQFYKMSMYEASAHVPLLMMGPGIKAGLQVSNVVSLVDIYPTMLDEKTEVEISKLLAEVHMASGILLEFLCLRT

SEQ ID NO: 14722 - protein, 238 aa, Homo sapiens
MLLWVQQALLALLLPTLLAQGEARRSRNTTRPALLRLSDYLLTNYRKGVRPVRDWRKPTTVSIDVIVYAILNVDEKNQVLTTYIWYRQYWTDEFLQWNPEDFDNITKLSIPTDSIWVPDILINEFVDVGKSPNIPYVYIRHQGEVQNYKPLQVVTACSLDIYNFPFDVQNCSLTFTSWLHTSGHPPAAPLLCGQPATAQHLPHGHGHRGLLPAPQQWREGLFQDYTPPGLLGLPDHRF

SEQ ID NO: 14723 - protein, 632 aa, Homo sapiens
MSSKNSESGTATTGTSLSAPDITVRNVVNIARPSSQQSSWTSANNDVIVTGIYSPASSSSRQGTNKHTDTQITEAHKIPIQKTATKNDTEFQLHIPVQRQVAHCKNASLLLGEKTIILSRQTSVLNAGNSVFNHAKKNYGNSSVQASEMTVPQKPSVCHRPCKIEPVGIQRSYKPEHTGPALHNLCGQKPTIRDPYCRTQNLEIREVFSLAVSDYPQRILGGNAPQKPSSAEGNCLSIAMETGDAEDEYAREEELASMRAQIPSYSRFYESGSSLRAENQSTTLPGPGRNMPNSQMVNIRDMSDNVLYQNRNYHLTPRTSLHTASSTMYSNTNPLRSNFSPHFASSNQLRLSQNQNNYQISGNLTVPWITGCSRKRALQDRTQFSDRDLATLKKYWDNGMTSLGSVCREKIEAVATELNVDCEIVRTWIGNRRRKYRLMGIEVPPPRGGPADFSEQPESGSLSALTPGEEAGPEVGEDNDRNDEVSICLSEGSSQEEPNEVVPNDARAHKEEDHHAVTTDNVKIEIIDDEESDMISNSEVEQVNSFLDYKNEEVKFIENELEIQKQKYFKLQTFVRSLILAMKADDKEQQQALLSDLPPELEEMDFNHASLEPDDTSFSVSSLSEKNVSESL

SEQ ID NO: 14724 - protein, 144 aa, Homo sapiens
MAASKVKQDMPPPGGYGPIDYKRNLPRRGLSGYSMLAIGIGTLIYGHWSIMKWNRERRRLQIEDFEARIALLPLLQAETDRRTLQMLRENLEEEAIIMKDVPDWKVGESVFHTTRWVPPLIGELYGLRTTEEALHASHGFMWYT

SEQ ID NO: 14725 - protein, 498 aa, Homo sapiens
MASTTTCTRFTDEYQLFEELGKGAFSVVRRCMKIPTGQEYAAKIINTKKLSARDHQKLEREARICRLLKHPNIVRLHDSISEEGFHYLVFDLVTGGELFEDIVAREYYSEADASHCIQQILESVNHCHLNGIVHRDLKPENLLLASKSKGAAVKLADFGLAIEVQGDQQAWFGFAGTPGYLSPEVLRKDPYGKPVDMWACGVILYILLVGYPPFWDEDQHRLYQQIKAGAYDFPSPEWDTVTPEAKDLINKMLTINPAKRITASEALKHPWICQRSTVASMMHRQETVDCLKKFNARRKLKGAILTTMLATRNFSAKSLLKKPDGVKESTESSNTTIEDEDVKARKQEIIKVTEQLIEAINNGDFEAYTKICDPGLTAFEPEALGNLVEGMDFHRFYFENALSKSNKPIHTIILNPHVHLVGDDAACIAYIRLTQYMDGSGMPKTMQSEETRVWHRRDGKWQNVHFHRSGSPTVPIKPPCIPNGKENFSGGTSLWQNI

SEQ ID NO: 14726 - protein, 251 aa, Homo sapiens
MKIPWGSIPVLMLLLLLGLIDISQAQLSCTGPPAIPGIPGIPGTPGPDGQPGTPGIKGEKGLPGLAGDHGEFGEKGDPGIPGNPGKVGPKGPMGPKGGPGAPGAPGPKGESGDYKATQKIAFSATRTINVPLRRDQTIRFDHVITNMNNNYEPRSGKFTCKVPGLYYFTYHASSRGNLCVNLMRGRERAQKVVTFCDYAYNTFQVTTGGMVLKLEQGENVFLQATDKNSLLGMEGANSIFSGFLLFPDMEA

SEQ ID NO: 14727 - protein, 89 aa, Homo sapiens
MAGASVNRVVSPGPLHCLKVILEKEGPRSLFRGLGPNLVGVAPSRAIYFAAYSNCKEKLNDVFDPDSTQVHMISAAMAGIYCTFLPRKE

SEQ ID NO: 14728 - protein, 48 aa, Homo sapiens
MTSIFHFAIIFMLILQIRIQLSEESEFLVDRSKNGLIHVPKDLSQKTT

SEQ ID NO: 14729 - protein, 105 aa, Homo sapiens
MKWVTFISLLFLFSSAYSRGVFRRDAHTYMKLPEDILTFMPRNSFSLLKGIKLLLQNVAKLLIKLPACCQSSMNFGMKGRLRLPNRDSSVPVSKNLEKELSKHGQ

SEQ ID NO: 14730 - protein, 488 aa, Homo sapiens
MGRHLALLLLLLLLFQHFGDSDGSQRLEQTPLQFTHLEYNVTVQENSAAKTYVGHPVKMGVYITHPAWEVRYKIVSGDSENLFKAEEYILGDFCFLRIRTKGGNTAILNREVKDHYTLIVKALEKNTNVEARTKVRVQVLDTNDLRPLFSPTSYSVSLPENTAIRTSIARVSATDADIGTNGEFYYSFKDRTDMFAIHPTSGVIVLTGRLDYLETKLYEMEILAADRGMKLYGSSGISSMAKLTVHIEQANECAPVITAVTLSPSELDRDPAYAIVTVDDCDQGANGDIASLSIVAGDLLQQFRTVRSFPGSKEYKVKAIGGIDWDSHPFGYNLTLQAKDKGTPPQFSSVKVIHVTSPQFKAGPVKFEKDVYRAEISEFAPPNTPVVMVKAIPAYSHLRYVFKSTPGKAKFSLNYNTGLISILEPVKRQQAAHFELEVTTSDRKASTKVLVKVLGANSNPPEFTQTAYKAAFDENVPIGTTVMSLSAV

SEQ ID NO: 14731 - protein, 72 aa, Homo sapiens
MSQPRTPEQALDTPGDCPPGRRDEDAGEGIQCSQRMLSFSDALLSIIATVMILPVTHTEISPEQWTKAAPWK

SEQ ID NO: 14732 - protein, 149 aa, Homo sapiens
MLGIWTLLPLVLTSVARLSSKSVNAQVTDINSKGLELRKTVTTVETQNLEGLHHDGQFCHKPCPPGERKARDCTVNGDEPDCVPCQEGKEYTDKAHFSSKCRRCRLCDEGHDVNMESSRNAHSPATPSAKRKDPDLTWGGFVFFFCQFH

SEQ ID NO: 14733 - protein, 1065 aa, Homo sapiens
MDLLSGTYIFAVLLACVVFHSGAQEKNYTIREEMPENVLIGDLLKDLNLSLIPNKSLTTAMQFKLVYKTGDVPLIRIEEDTGEIFTTGARIDREKLCAGIPRDEHCFYEVEVAILPDEIFRLVKIRFLIEDINDNAPLFPATVINISIPENSAINSKYTLPAAVDPDVGINGVQNYELIKSQNIFGLDVIETPEGDKMPQLIVQKELDREEKDTYVMKVKVEDGGFPQRSSTAILQVSVTDTNDNHPVFKETEIEVSIPENAPVGTSVTQLHATDADIGENAKIHFSFSNLVSNIARRLFHLNATTGLITIKEPLDREETPNHKLLVLASDGGLMPARAMVLVNVTDVNDNVPSIDIRYIVNPVNDTVVLSENIPLNTKIALITVTDKDADHNGRVTCFTDHEIPFRLRPVFSNQFLLETAAYLDYESTKEYAIKLLAADAGKPPLNQSAMLFIKVKDENDNAPVFTQSFVTVSIPENNSPGIQLTKVSAMDADSGPNAKINYLLGPDAPPEFSLDCRTGMLTVVKKLDREKEDKYLFTILAKDNGVPPLTSNVTVFVSIIDQNDNSPVFTHNEYNFYVPENLPRHGTVGLITVTDPDYGDNSAVTLSILDENDDFTIDSQTGVIRPNISFDREKQESYTFYVKAEDGGRVSRSSSAKVTINVVDVNDNKPVFIVPPSNCSYELVLPSTNPGTVVFQVIAVDNDTGMNAEVRYSIVGGNTRDLFAIDQETGNITLMEKCDVTDLGLHRVLVKANDLGQPDSLFSVVIVNLFVNESVTNATLINELVRKSTEAPVTPNTEIADVSSPTSDYVKILVAAVAGTITVVVVIFITAVVRCRQAPHLKAAQKNKQNSEWATPNPENRQMIMMKKKKKKKKHSPKNLLLNFVTIEETKADDVDSDGNRVTLDLPIDLEEQTMGKYNWVTTPTTFKPDSPDLARHYKSASPQPAFQIQPETPLNSKHHIIQELPLDNTFVACDSISKCSSSSSDPYSVSDCGYPVTTFEVPVSVHTRPPMKEVVRSCTPMKESTTMEIWIHPQPQRKSEGKVAGKTVLTSSSPSAMTLSYLD

SEQ ID NO: 14734 - protein, 53 aa, Homo sapiens
MAGRVPSLLVLLVFPSSCLAFRSPLSVFKRFKETTRPFSNECLGTTRPVVPID

SEQ ID NO: 14735 - protein, 256 aa, Homo sapiens
MKFLLDILLLLPLLIVCSLESFVKLFIPKRRKSVTGEIVLITGAGHGIGRLTAYEFAKLKSKLVLWDINKHGLEETAAKCKGLGAKVHTFVVDCSNREDIYSSAKKTTKAFLPAMTKNNHGHIVTVASAAGHVSVPFLLAYCSSKFAAVGFHKTLTDELAALQITGVKTTCLCPNFVNTGFIKNPSTSLGPTLEPEEVVNRLMHGILTEQKMIFIPSSIAFLTTLERILPERFLAVLKRKISVKFDAVIGYKMKAQ

SEQ ID NO: 14736 - protein, 99 aa, Homo sapiens
MRLLAAALLLLLLALYTARVDGSKCKCSRKGPKIRYSDVKKLEMKPKYPHCEEKMVIITTKSVSRYRGQEHCLHPKLQSTKRFIKWYNAWNEKRRVYEE

SEQ ID NO: 14737 - protein, 1308 aa, Homo sapiens
MWPSQLLIFMMLLAPIIHGGKHSERHPALAAPLRHAERSPGGALPPRHLLQQPAAERTAAHRGQGPRGATRGVRGPGAQGAQIAAQAFSRAPIPMAVVRRELSCESYPIELRCPGTDVIMIESANYGRTDDKICDSDPAQMENIRCYLPDAYKIMSQRCNNRTQCAVVAGPDVFPDPCPGTYKYLEVQYECVPYKVEQKVFLCPGLLKGVYQSEHLFESDHQSGAWCKDPLQASDKIYYMPWTPYRTDTLTEYSSKDDFIAGRPTTTYKLPHRVDGTGFVVYDGALFFNKERTRNIVKFDLRTRIKSGEAIIANANYHDTSPYRWGGKSDIDLAVDENGLWVIYATEQNNGKIVISQLNPYTLRIEGTWDTAYDKRSASNAFMICGILYVVKSVYEDDDNEATGNKIDYIYNTDQSKDSLVDVPFPNSYQYIAAVDYNPRDNLLYVWNNYHVVKYSLDFGPLDSRSGQAHHGQVSYISPPIHLDSELERPSVKDISTTGPLGMGSTTTSTTLRTTTLSPGRSTTPSVSGRRNRSTSTPSPAVEVLDDMTTHLPSASSQIPALEESCEAVEAREIMWFKTRQGQIAKQPCPAGTIGVSTYLCLAPDGIWDPQGPDLSNCSSPWVNHITQKLKSGETAANIARELAEQTRNHLNAGDITYSVRAMDQLVGLLDVQLRNLTPGGKDSAARSLNKLQKRERSCRAYVQAMVETVNNLLQPQALNAWRDLTTSDQLRAATMLLHTVEESAFVLADNLLKTDIVRENTDNIKLEVARLSTEGNLEDLKFPENMGHGSTIQLSANTLKQNGRNGEIRVAFVLYNNLGPYLSTENASMKLGTEALSTNHSVIVNSPVITAAINKEFSNKVYLADPVVFTVKHIKQSEENFNPNCSFWSYSKRTMTGYWSTQGCRLLTTNKTHTTCSCNHLTNFAVLMAHVEVKHSDAVHDLLLDVITWVGILLSLVCLLICIFTFCFFRGLQSDRNTIHKNLCISLFVAELLFLIGINRTDQPIACAVFAALLHFFFLAAFTWMFLEGVQLYIMLVEVFESEHSRRKYFYLVGYGMPALIVAVSAAVDYRSYGTDKVCWLRLDTYFIWSFIGPATLIIMLNVIFLGIALYKMFHHTAILKPESGCLDNINYEDNRPFIKSWVIGAIALLCLLGLTWAFGLMYINESTVIMAYLFTIFNSLQGMFIFIFHCVLQKKVRKEYGKCLRTHCCSGKSTESSIGSGKTSGSRTPGRYSTGSQSRIRRMWNDTVRKQSESSFITGDINSSASLNREPYRETSMGVKLNIAYQIGASEQCQGYKCHGYSTTEW

SEQ ID NO: 14738 - protein, 14 aa, Homo sapiens
MALVLGSLLLLGLC

SEQ ID NO: 14739 - protein, 516 aa, Homo sapiens
MFSGGLKESQDSEVNFDNSIHPEVLELLLDYAYSSRVIINEENAESLLEAGDMLEFQDIRDACAEFLEKNLHPTNCLGMLLLSDAHQCTKLYELSWRMCLSNFQTIRKNEDFLQLPQDMVVQLLSSEELETEDERLVYESAINWISYDLKKRYCYLPELLQTVRLALLPAIYLMENVAMEELITKQRKSKEIVEEAIRCKLKILQNDGVVTSLCARPRKTGHALFLLGGQTFMCDKLYLVDQKAKEIIPKADIPSPRKEFSACAIGCKVYITGGRGSENGVSKDVWVYDTLHEEWSKAAPMLVARFGHGSAELKHCLYVVGGHTAATGCLPASPSVSLKQVEHYDPTINKWTMVAPLREGVSNAAVVSAKLKLFAFGGTSVSHDKLPKVQCYDQCENRWTVPATCPQPWRYTAAAVLGNQIFIMGGDTEFSACSAYKFNSETYQWTKVGDVTAKRMSCHAVASGNKLYVVGGYFGIQRCKTLDCYDPTLDVWNSITTVPYSLIPTAFVSTWKHLPS

SEQ ID NO: 14740 - protein, 189 aa, Homo sapiens
MAAYSYRPGPGAGPGPAAGAALPDQSFLWNVFQRVDKDRSGVISDTELQQALSNGTWTPFNPVTVRSIISMFDRENKAGVNFSEFTGVWKYITDWQNVFRTYDRDNSGMIDKNELKQALSGYRLSDQFHDILIRKFDRQGRGQIAFDDFIQGCIVLQRLTDIFRRYDTDQDGWIQVSYEQYLSMVFSIV

SEQ ID NO: 14741 - protein, 900 aa, Homo sapiens
MSHLKTSTEDEEPTEEYENVGNAASKWPKVEDPMPESKVGDTCVWDSKVENQQKKPVENRMKEDKSSIREAISKAKSTANIKTEQEGEASEKSLHLSPQHITHQTMPIGQRGSEQGKRVENINGTSYPSLQQKTNAVKKLHKCDECGKSFKYNSRLVQHKIMHTGEKRYECDDCGGTFRSSSSLRVHKRIHTGEKPYKCEECGKAYMSYSSLINHKSTHSGEKNCKCDECGKSFNYSSVLDQHKRIHTGEKPYECGECGKAFRNSSGLRVHKRIHTGEKPYECDICGKTFSNSSGLRVHKRIHTGEKPYECDECGKAFITCRTLLNHKSIHFGDKPYKCDECEKSFNYSSLLIQHKVIHTGEKPYECDECGKAFRNSSGLIVHKRIHTGEKPYKCDVCGKAFSYSSGLAVHKSIHPGKKAHECKECGKSFSYNSLLLQHRTIHTGERPYVCDVCGKTFRNNAGLKVHRRLHTGEKPYKCDVCGKAYISRSSLKNHKGIHLGEKPYKCSYCEKSFNYSSALEQHKRIHTREKPFGCDECGKAFRNNSGLKVHKRIHTGERPYKCEECGKAYISLSSLINHKSVHPGEKPFKCDECEKAFITYRTLTNHKKVHLGEKPYKCDVCEKSFNYTSLLSQHRRVHTREKPYECDRCEKVFRNNSSLKVHKRIHTGERPYECDVCGKAYISHSSLINHKSTHPGRTPHTCDECGKAFFSSRTLISHKRVHLGEKPFKCVECGKSFSYSSLLSQHKRIHTGEKPYVCDRCGKAFRNSSGLTVHKRIHTGEKPYECDECGKAYISHSSLINHKSVHQGKQPYNCECGKSFNYRSVLDQHKRIHTGKKPYRCNECGKAFNIRSNLTKHKRTHTGEESLNVIYVGSYSGTSQKRTYEGGNALDGGRMRMPL

SEQ ID NO: 14742 - protein, 209 aa, Homo sapiens
MEPLAAYPLKCSGPRAKVFAVLLSIVLCTVTLFLLQLKFLKPKINSFYAFEVKDAKGRTVSLEKYKGKVSLVVNVASDCQLTDRNYLGLKELHKEFGPSHFSVLAFPCNQFGESEPRPSKEVESFARKNYGVTFPIFHKIKILGSEGEPAFRFLVDSSKKEPRWNFWKYLVNPEGQVVKFWKPEEPIEVIRPDIAALVRQVIIKKKEDL

SEQ ID NO: 14743 - protein, 153 aa, Homo sapiens
MKSLLLLVLISICWADHLSDNYTLDHDRAIHIQAENGPHLLVEAEQAKVFSHRGGNVTLPCKFYRDPTAFGSGIHKIRIKWTKLTSDYLKEVDVFVSMGYHKKTYGGYQGRVFLKGGSDSDASLVITDLTLEDYGRYKCEVIEGLEDDTVVVA

SEQ ID NO: 14744 - protein, 424 aa, Homo sapiens
MENKKKDKDKSDDRMARPSGRSGHNTRGTGSSSSGVLMVGPNFRVGKKIGCGNFGELRLGKNLYTNEYVAIKLEPMKSRAPQLHLEYRFYKQLGSGDGIPQVYYFGPCGKYNAMVLELLGPSLEDLFDLCDRTFSLKTVLMIAIQLISRMEYVHSKNLIYRDVKPENFLIGRPGNKTQQVIHIIDFGLAKEYIDPETKKHIPYREHKSLTGTARYMSINTHLGKEQSRRDDLEALGHMFMYFLRGSLPWQGLKADTLKERYQKIGDTKRATPIEVLCENFPEEMATYLRYVRRLDFFEKPDYDYLRKLFTDLFDRKGYMFDYEYDWIGKQLPTPVGAVQQDPALSSNREAHQHRDKMQQSKNQVVSSTNGELNTDDPTAGRSNAPITAPTEVEVMDETNCQKVLNMWCCCFFKRRKRKTIQRHK

SEQ ID NO: 14745 - protein, 367 aa, Homo sapiens
MKTKLNIYNMQFLLFVFLVWDPARLVLANIQEDEAKNNITIFTRILDRLLDGYDNRLRPGLGDSITEVFTNIYVTSFGPVSDTDMEYTIDVFFRQKWKDERLKFKGPMNILRLNNLMASKIWTPDTFFHNGKKSVAHNMTMPNKLLRIQDDGTLLYTMRLTVQAECPMHLEDFPMDAHSCPLKFGSYAYTTSEVTYIWTYNASDSVQVAPDGSRLNQYDLLGQSIGKETIKSSTGEYTVMTAHFHLKRKIGYFVIQTYLPCIMTVILSQVSFWLNRESVPARTVFGVTTVLTMTTLSISARNSLPKVAYATAMDWFIAVCYAFVFSALIEFATVNYFTKRGWAWDGKSVVNDKVSESFRVIIIKKIP

SEQ ID NO: 14746 - protein, 775 aa, Homo sapiens
MTSDVPSLGPAIASGNSGPGIQGGGAIVQRAIKRRPGLDFDDDGEGNSKFLRCDDDQMSNDKERFARSDDEQSSADKERLARENHSEIERRRRNKMTAYITELSDMVPTCSALARKPDKLTILRMAVSHMKSLRGTGNTSTDGSYKPSFLTDQELKHLILEAADGFLFIVSCETGRVVYVSDSVTPVLNQPQSEWFGSTLYDQVHPDDVDKLREQLSTSENALTGRILDLKTGTVKKEGQQSSMRMCMGSRRSFICRMRCGSSSVDPVSVNRLSFVRNRCRNGLGSVKDGEPHFVVVHCTGYIKAWPPADDDPEAGQGSKFCLVAIGRLQVTSSPNCTDMSNVCQPTEFISRHNIEGIFTFVDHRCVATVGYQPQELLGKNIVEFCHPEDQQLLRDSFQQVVKLKGQVLSVMFRFRSKNQEWLWMRTSSFTFQNPYSDEIEYIICTNTNVKNSSQEPRPTLSNTIQRPQLGPTANLPLEMGSGQLAPRQQQQQTELDMVPGRDGLASYNHSQVVQPVTTTGPEHSKPLEKSDGLFAQDRDPRFSEIYHNINADQSKGISSSTVPATQQLFSQGNTFPPTPRPAENFRNSGLAPPVTIVQPSASAGQMLAQISRHSNPTQGATPTWTPTTRSGFSAQQVATQATAKTRTSQFGVGSFQTPSSFSSMSLPGAPTASPGAAAYPSLTNRGSNFAPETGQTAGQFQTRTAEGVGVWPQWQGQQPHHRSSSSEQHVQQPPAQQPGQPEVFQEMLSMLGDQSNSYNNEEFPDLTMFPPFSE

SEQ ID NO: 14747 - protein, 119 aa, Homo sapiens
MALSVLRLALLLLAVTFAGSARSGPGERGPPEKSGFGSQTGGGPCPAPGGLGDASLIPQFGLFSKYRTPNCSQYRLPGCPRHFNPVCGSDMSTYANECTLCMKIREGGHNIKIIRNGPC

SEQ ID NO: 14748 - protein, 248 aa, Homo sapiens
MQKSEGSGGTQLKNRATGNYDQRTSSSTQLKHRNAVQGSKSSLSTSSPESARKLHPRPSDKLNPKTINPFGEQSRVPSAFAAIYSKGGIPCRLVHGSVKHRLQWECPPESLSFDPLLITLAEGLRETKHPYTFVSKEGFRELLLVKGAPEKAIPLLPRLIPVLKAALVHSDDEVFERGLNALVQLSVVVGPSLNDHLKHLLTSLSKRLMDKKFKEPITSALQKLEQHGGSGSLSIIKSKIPTYCSICC

SEQ ID NO: 14749 - protein, 122 aa, Homo sapiens
MGPEALSSLLLLLLVASGDADMKGHFDPAKCRYALGMQDRTIPDSDISASSSWSDSTAARHSRLESSDGDGAWCPAGSVFPKEEEYLQVDLQRLHLVALVGTQGRHAGGLGKEFSRSYRLRY

SEQ ID NO: 14750 - protein, 197 aa, Homo sapiens
MFILGFAGCIGALRENTFLLKFFSVFLGIIFFLELTAGVLAFVFKDWIKDQLYFFINNNIRAYRDDIDLQNLIDFTQEYWQCCGAFGADDWNLNIYFNCTDSNASRERCGVPFSCCTKDPAEDVINTQCGYDARQKPEVDQQIVIYTKGCVPQFEKWLQDNLTIVAGIFIGIALLQIFGICLAQNLVSDIEAVRASW

SEQ ID NO: 14751 - protein, 51 aa, Homo sapiens
MGPEALSSLLLLLLVASGDADMKGHFDPAKCRYALGMQDRTIPDSDISASS

SEQ ID NO: 14752 - protein, 503 aa, Homo sapiens
MSEARGEPGSGPEAGARFFCTAGRGLEPFVMREVRARLAATQVEYISGKVFFTTCSDLNMLKKLKSAERLFLLIKKQFPLIISSVSKGKIFNEMQRLINEDPGSWLNAISIWKNLLELDAKKEKLSQRDDNQLKRKVGENEIIAKKLKIEQMQKIEENRDCQLEKQIKEETLEQRDFTTKSEKFQEEEFQNDIEKAIDTHNQNDLTFRVSCRCSGTIGKAFTAQEVGKVIGIAIMKHFGWKADLRNPQLEIFIHLNDIYSVVGIPVFRVSLASRAYIKTAGLRSTIAWAMASLADIKAGAFVLDPMCGLGTILLEAAKEWPDVYYVGADVSDSQLLGTWDNLKAAGLEDKIELLKISVIELPLPSESVDIIISDIPFGKKFKLGKDIKSILQEMERVLHVGGTIVLLLSEDHHRRLTDCKESNIPFNSKDSHTDEPGIKKCLNPEEKTGAFKTASTSFEASNHKFLDRMSPFGSLVPVECYKVSLGKTDAFICKYKKSHSSGL

SEQ ID NO: 14753 - protein, 48 aa, Homo sapiens
MQKIMHISVLLSPVLWGLIFGVSSNSIQIGGLFPRGADQEYSAFRVGM

SEQ ID NO: 14754 - protein, 98 aa, Homo sapiens
MALWMRLLPLLALLALWGPDPAAAFVNQHLCGSHLVEALYLVCGERGFFYTPKTRREAEDLQGSLQPLALEGSLQKRGIVEQCCTSICSLYQLENYCN

SEQ ID NO: 14755 - protein, 672 aa, Homo sapiens
MSALASRSAPAMQSSGSFNYARPKQFIAAQNLGPASGHGTPASSPSSSSLPSPMSPTPRQFGRAPVPPFAQPFGAEPEAPWGSSSPSPPPPPPPVFSPTAAFPVPDVFPLPPPPPPLPSPGQASHCSSPATRFGHSQTPAAFLSALLPSQPPPAAVNALGLPKGVTPAGFPKKASRTARIASDEEIQGTKDAVIQDLERKLRFKEDLLNNGQPRLTYEERMARRLLGADSATVFNIQEPEEETANQEYKVSSCEQRLISEIEYRLERSPVDESGDEVQYGDVPVENGMAPFFEMKLKHYKIFEGMPVTFTCRVAGNPKPKIYWFKDGKQISPKSDHYTIQRDLDGTCSLHTTASTLDDDGNYTIMAANPQGRISCTGRLMVQAVNQRGRSPRSPSGHPHVRRPRSRSRDSGDENEPIQERFFRPHFLQAPGDLTVQEGKLCRMDCKVSGLPTPDLSWQLDGKPVRPDSAHKMLVRENGVHSLIIEPVTSRDAGIYTCIATNRAGQNSFSLELVVAAKEAHKPPVFIEKLQNTGVADGYPVRLECRVLGVPPPQIFWKKENESLTHSTDRVSMHQDNHGYICLLIQGATKEDAGWYTVSAKNEAGIVSCTARLDVYTQWHQQSQSTKPKKVRPSASRYAALSDQGLDIKAAFQPEANPSHLTLNTALVESEDL

SEQ ID NO: 14756 - protein, 70 aa, Homo sapiens
MALLSRPALTLLLLLMAAVVRCQEQAQTTDWRATLKTIRNGVHKIDTYLNAALDLLGGEDGLCQYKCSDA

SEQ ID NO: 14757 - protein, 1351 aa, Homo sapiens
MWPSQLLIFMMLLAPIIHGGKHSERHPALAAPLRHAERSPGGALPPRHLLQQPAAERTAAHRGQGPRGATRGVRGPGAQGAQIAAQAFSRAPIPMAVVRRELSCESYPIELRCPGTDVIMIESANYGRTDDKICDSDPAQMENIRCYLPDAYKIMSQRCNNRTQCAVVAGPDVFPDPCPGTYKYLEVQYECVPYKVEQKVFLCPGLLKGVYQSEHLFESDHQSGAWCKDPLQASDKIYYMPWTPYRTDTLTEYSSKDDFIAGRPTTTYKLPHRVDGTGFVVYDGALFFNKERTRNIVKFDLRTRIKSGEAIIANANYHDTSPYRWGGKSDIDLAVDENGLWVIYATEQNNGKIVISQLNPYTLRIEGTWDTAYDKRSASNAFMICGILYVVKSVYEDDDNEATGNKIDYIYNTDQSKDSLVDVPFPNSYQYIAAVDYNPRDNLLYVWNNYHVVKYSLDFGPLDSRSGQAHHGQVSYISPPIHLDSELERPSVKDISTTGPLGMGSTTTSTTLRTTTLSPGRSTTPSVSGRRNRSTSTPSPAVEVLDDMTTHLPSASSQIPALEESCEAVEAREIMWFKTRQGQIAKQPCPAGTIGVSTYLCLAPDGIWDPQGPDLSNCSSPWVNHITQKLKSGETAANIARELAEQTRNHLNAGDITYSVRAMDQLVGLLDVQLRNLTPGGKDSAARSLNKLQKRERSCRAYVQAMVETVNNLLQPQALNAWRDLTTSDQLRAATMLLHTVEESAFVLADNLLKTDIVRENTDNIKLEVARLSTEGNLEDLKFPENMGHGSTIQLSANTLKQNGRNGEIRVAFVLYNNLGPYLSTENASMKLGTEALSTNHSVIVNSPVITAAINKEFSNKVYLADPVVFTVKHIKQSEENFNPNCSFWSYSKRTMTGYWSTQGCRLLTTNKTHTTCSCNHLTNFAVLMAHVEVKHSDAVHDLLLDVITWVGILLSLVCLLICIFTFCFFRGLQSDRNTIHKNLCISLFVAELLFLIGINRTDQPIACAVFAALLHFFFLAAFTWMFLEGVQLYIMLVEVFESEHSRRKYFYLVGYGMPALIVAVSAAVDYRSYGTDKVCWLRLDTYFIWSFIGPATLIIMLNVIFLGIALYKMFHHTAILKPESGCLDNINYEDNRPFIKSWVIGAIALLCLLGLTWAFGLMYINESTVIMAYLFTIFNSLQGMFIFIFHCVLQKKVRKEYGKCLRTHCCSGKSTESSIGSGKTSGSRTPGRYSTGSQSRIRRMWNDTVRKQSESSFITGDINSSASLNRGAMANHLISNALLRPHGTNNPYNTLLGEPAVCNNPSVSMYNAQEPYRETSMGVKLNIAYQIGASEQCQGYKCHGYSTTEW

SEQ ID NO: 14758 - protein, 152 aa, Homo sapiens
MTPSPLLLLLLPPLLLGAFPPAAAARGPPKMADKVVPRQVARLGRTVRLQCPVEGDPPPLTMWTKDGRTIHSGWSRFRVLPQGLKVKQVEREDAGVYVCKATNGFGSLSVNYTLVVLDDISPGKESLGPDSSSGGQEDPASQQWARPRFTQP

SEQ ID NO: 14759 - protein, 181 aa, Homo sapiens
MEQRPRGCAAVAAALLLVLLGARAQGGTRSPRCDCAGDFHKKIGLFCCRGCPAGHYLKAPCTEPCGNSTCLVCPQDTFLAWENHHNSECARCQACDEQASQVALENCSAVADTRCGCKPGWFVECQVSQCVSSSPFYCQPCLDCGALHRHTRLLCSRRDTDCGTCLPGFYEHGDGCVSCPT

SEQ ID NO: 14760 - protein, 137 aa, Homo sapiens
MKTKLNIYNMQFLLFVFLVWDPARLVLANIQEDEAKNNITIFTRILDRLLDGYDNRLRPGLGDSITEVFTNIYVTSFGPVSDTDMEYTIDVFFRQKWKDERLKFKGPMNILRLNNLMASKIWTPDTFFHNGKKSVAH

SEQ ID NO: 14761 - protein, 906 aa, Homo sapiens
MVGLLLFFFPAIFLEVSLLPRSPGRKVLLAGASSQRSVARMDGDVIIGALFSVHHQPPAEKVPERKCGEIREQYGIQRVEAMFHTLDKINADPVLLPNITLGSEIRDSCWHSSVALEQSIEFIRDSLISIRDEKDGINRCLPDGQSLPPGRTKKPIAGVIGPGSSSVAIQVQNLLQLFDIPQIAYSATSIDLSDKTLYKYFLRVVPSDTLQARAMLDIVKRYNWTYVSAVHTEGNYGESGMDAFKELAAQEGLCIAHSDKIYSNAGEKSFDRLLRKLRERLPKARVVVCFCEGMTVRGLLSAMRRLGVVGEFSLIGSDGWADRDEVIEGYEVEANGGITIKLQSPEVRSFDDYFLKLRLDTNTRNPWFPEFWQHRFQCRLPGHLLENPNFKRICTGNESLEENYVQDSKMGFVINAIYAMAHGLQNMHHALCPGHVGLCDAMKPIDGSKLLDFLIKSSFIGVSGEEVWFDEKGDAPGRYDIMNLQYTEANRYDYVHVGTWHEGVLNIDDYKIQMNKSGVVRSVCSEPCLKGQIKVIRKGEVSCCWICTACKENEYVQDEFTCKACDLGWWPNADLTGCEPIPVRYLEWSNIESIIAIAFSCLGILVTLFVTLIFVLYRDTPVVKSSSRELCYIILAGIFLGYVCPFTLIAKPTTTSCYLQRLLVGLSSAMCYSALVTKTNRIARILAGSKKKICTRKPRFMSAWAQVIIASILISVQLTLVVTLIIMEPPMPILSYPSIKEVYLICNTSNLGVVAPLGYNGLLIMSCTYYAFKTRNVPANFNEAKYIAFTMYTTCIIWLAFVPIYFGSNYKIITTCFAVSLSVTVALGCMFTPKMYIIIAKPERNVRSAFTTSDVVRMHVGDGKLPCRSNTFLNIFRRKKAGAGNAKKRQPEFSPTSQCPSAHVQL

SEQ ID NO: 14762 - protein, 807 aa, Homo sapiens
MEIPFEEVLERAKAGDPKAQTEVGKHYLQLAGDTDEELNSCTAVDWLVLAAKQGRREAVKLLRRCLADRRGITSENEREVRQLSSETDLERAVRKAALVMYWKLNPKKKKQVAVAELLENVGQVNEHDGGAQPGPVPKSLQKQRRMLERLVSSESKNYIALDDFVEITKKYAKGVIPSSLFLQDDEDDDELAGKSPEDLPLRLKVVKYPLHAIMEIKEYLIDMASRAGMHWLSTIIPTHHINALIFFFIVSNLTIDFFAFFIPLVIFYLSFISMVICTLKVFQDSKAWENFRTLTDLLLRFEPNLDVEQAEVNFGWNHLEPYAHFLLSVFFVIFSFPIASKDCIPCSELAVITGFFTVTSYLSLSTHAEPYTRRALATEVTAGLLSLLPSMPLNWPYLKVLGQTFITVPVGHLVVLNVSVPCLLYVYLLYLFFRMAQLRNFKGTYCYLVPYLVCFMWCELSVVILLESTGLGLLRASIGYFLFLFALPILVAGLALVGVLQFARWFTSLELTKIAVTVAVCSVPLLLRWWTKASFSVVGMVKSLTRSSMVKLILVWLTAIVLFCWFYVYRSEGMKVYNSTLTWQQYGALCGPRAWKETNMARTQILCSHLEGHRVTWTGRFKYVRVTDIDNSAESAINMLPFFIGDWMRCLYGEAYPACSPGNTSTAEEELCRLKLLAKHPCHIKKFDRYKFEITVGMPFSSGADGSRSREEDDVTKDIVLRASSEFKSVLLSLRQGSLIEFSTILEGRLGSKWPVFELKAISCLNCMAQLSPTRRHVKIEHDWRSTVHGAVKFAFDFFFFPFLSAA

SEQ ID NO: 14763 - protein, 86 aa, Homo sapiens
MLGIWTLLPLVLTSVARLSSKSVNAQVTDINSKGLELRKTVTTVETQNLEGLHHDGQFCHKPCPPDVNMESSRNAHSPATPSAKRK

SEQ ID NO: 14764 - protein, 1231 aa, Homo sapiens
MWPSQLLIFMMLLAPIIHAFSRAPIPMAVVRRELSCESYPIELRCPGTDVIMIESANYGRTDDKICDSDPAQMENIRCYLPDAYKIMSQRCNNRTQCAVVAGPDVFPDPCPGTYKYLEVQYECVPYKVEQKVFLCPGLLKGVYQSEHLFESDHQSGAWCKDPLQASDKIYYMPWTPYRTDTLTEYSSKDDFIAGRPTTTYKLPHRVDGTGFVVYDGALFFNKERTRNIVKFDLRTRIKSGEAIIANANYHDTSPYRWGGKSDIDLAVDENGLWVIYATEQNNGKIVISQLNPYTLRIEGTWDTAYDKRSASNAFMICGILYVVKSVYEDDDNEATGNKIDYIYNTDQSKDSLVDVPFPNSYQYIAAVDYNPRDNLLYVWNNYHVVKYSLDFGPLDSRSGQAHHGQVSYISPPIHLDSELERPSVKDISTTGPLGMGSTTTSTTLRTTTLSPGRSTTPSVSGRRNRSTSTPSPAVEVLDDMTTHLPSASSQIPALEESCEAVEAREIMWFKTRQGQIAKQPCPAGTIGVSTYLCLAPDGIWDPQGPDLSNCSSPWVNHITQKLKSGETAANIARELAEQTRNHLNAGDITYSVRAMDQLVGLLDVQLRNLTPGGKDSAARSLNKLQKRERSCRAYVQAMVETVNNLLQPQALNAWRDLTTSDQLRAATMLLHTVEESAFVLADNLLKTDIVRENTDNIKLEVARLSTEGNLEDLKFPENMGHGSTIQLSANTLKQNGRNGEIRVAFVLYNNLGPYLSTENASMKLGTEALSTNHSVIVNSPVITAAINKEFSNKVYLADPVVFTVKHIKQSEENFNPNCSFWSYSKRTMTGYWSTQGCRLLTTNKTHTTCSCNHLTNFAVLMAHVEVKHSDAVHDLLLDVITWVGILLSLVCLLICIFTFCFFRGLQSDRNTIHKNLCISLFVAELLFLIGINRTDQPIACAVFAALLHFFFLAAFTWMFLEGVQLYIMLVEVFESEHSRRKYFYLVGYGMPALIVAVSAAVDYRSYGTDKVCWLRLDTYFIWSFIGPATLIIMLNVIFLGIALYKMFHHTAILKPESGCLDNIKSWVIGAIALLCLLGLTWAFGLMYINESTVIMAYLFTIFNSLQGMFIFIFHCVLQKKVRKEYGKCLRTHCCSGKSTESSIGSGKTSGSRTPGRYSTGSQSRIRRMWNDTVRKQSESSFITGDINSSASLNREPYRETSMGVKLNIAYQIGASEQCQGYKCHGYSTTEW

SEQ ID NO: 14765 - protein, 428 aa, Homo sapiens
MALSGNCSRYYPREQGSAVPNSFPEVVELNVGGQVYFTRHSTLISIPHSLLWKMFSPKRDTANDLAKDSKGRFFIDRDGFLFRYILDYLRDRQVVLPDHFPEKGRLKREAEYFQLPDLVKLLTPDEIKQSPDEFCHSDFEDASQGSDTRICPPSSLLPADRKWGFITVGYRGSCTLGREGQADAKFRRVPRILVCGRISLAKEVFGETLNESRDPDRAPERYTSRFYLKFKHLERAFDMLSECGFHMVACNSSVTASFINQYTDDKIWSSYTEYVFYREPSRWSPSHCDCCCKNGKGDKEGESGTSCNDLSTSSCDSQSEASSPQETVICGPVTRQTNIQTLDRPIKKGPVQLIQQSEMRRKSDLLRTLTSGSRESNMSSKKKAVKEKLSIEEELEKCIQDFLKIKIPDRFPERKHPWQSELLRKYHL

SEQ ID NO: 14766 - protein, 150 aa, Homo sapiens
MEHLRHSPGPGGQRLLLPSMLLALLLLLAPSPGHATRVVYKVPEEQPPNTLIGSLAADYGFPDVGHLYKLEVGAPYLRVDGKTGDIFTTETSIDREGLRECQNQLPGDPCILEFEVSITDLVQNGSPRLLEGQIEVQDINDNTPNFASPV

SEQ ID NO: 14767 - protein, 115 aa, Homo sapiens
MLKVSAVLCVCAAAWCSQSLAAAAAVAAAGGRSDGGNFLDDKQWLTTISQYDKEVGQWNKFRDEVEDDYFRTWSPGKPFDQALDPAKDPCLKMKCSRHKVCIAQDSQTAVCISHR

SEQ ID NO: 14768 - protein, 179 aa, Homo sapiens
MGSSGLLSLLVLFVLLANVQGPGLTDWLFPRRCPKIREECEFQERDVCTKDRQCQDNKKCCVFSCGKKCLDLKQDVCEMPKETGPCLAYFLHWWYDKKDNTCSMFVYGGCQGNNNNFQSKANCLNTCKNKQPCPKIKVECEVEEIDQCTKPRDCPENMKCCPFSRGKKCLDFRKASLST

SEQ ID NO: 14769 - protein, 124 aa, Homo sapiens
MADDLKRFLYKKLPSVEGLHAIVVSDRDGVPVIKVANDNAPEHALRPGFLSTFALATDQGSKLGLSKNKSIICYYNTYQVVQFNRLPLVVSFIASSSANTGLIVSLEKELAPLFEELRQVVEVS

SEQ ID NO: 14770 - protein, 478 aa, Homo sapiens
MLLWVQQALLALLLPTLLAQGEARRSRNTTRPALLRLSDYLLTNYRKGVRPVRDWRKPTTVSIDVIVYAILNVDEKNQVLTTYIWYRQYWTDEFLQWNPEDFDNITKLSIPTDSIWVPDILINEFVDVGKSPNIPYVYIRHQGEVQNYKPLQVVTACSLDIYNFPFDVQNCSLTFTSWLHTIQDINISLWRLPEKVKSDRSVFMNQGEWELLGVLPYFREFSMESSNYYAEMKFYVVIRRRPLFYVVSLLLPSIFLMVMDIVGFYLPPNSGERVSFKITLLLGYSVFLIIVSDTLPATAIGTPLIGVYFVVCMALLVISLAETIFIVRLVHKQDLQQPVPAWLRHLVLERIAWLLCLREQSTSQRPPATSQATKTDDCSAMGNHCSHMGGPQDFEKSPRDRCSPPPPPREASLAVCGLLQELSSIRQFLEKRDEIREVARDWLRVGSVLDKLLFHIYLLAVLAYSITLVMLWSIWQYA

SEQ ID NO: 14771 - protein, 743 aa, Homo sapiens
MGTSHPAFLVLGCLLTGLSLILCQLSLPSILPNENEKVVQLNSSFSLRCFGESEVSWQYPMSEEESSDVEIRNEENNSGLFVTVLEVSSASAAHTGLYTCYYNHTQTEENELEGRHIYIYVPDPDVAFVPLGMTDYLVIVEDDDSAIIPCRTTDPETPVTLHNSEGVVPASYDSRQGFNGTFTVGPYICEATVKGKKFQTIPFNVYALKATSELDLEMEALKTVYKSGETIVVTCAVFNNEVVDLQWTYPGEVKGKGITMLEEIKVPSIKLVYTLTVPEATVKDSGDYECAARQATREVKEMKKVTISVHEKGFIEIKPTFSQLEAVNLHEVKHFVVEVRAYPPPRISWLKNNLTLIENLTEITTDVEKIQEIRYRSKLKLIRAKEEDSGHYTIVAQNEDAVKSYTFELLTQVPSSILDLVDDHHGSTGGQTVRCTAEGTPLPDIEWMICKDIKKCNNETSWTILANNVSNIITEIHSRDRSTVEGRVTFAKVEETIAVRCLAKNLLGAENRELKLVAPTLRSELTVAAAVLVLLVIVIISLIVLVVIWKQKPRYEIRWRVIESISPDGHEYIYVDPMQLPYDSRWEFPRDGLVLGRVLGSGAFGKVVEGTAYGLSRSQPVMKVAVKMLKPTARSSEKQALMSELKIMTHLGPHLNIVNLLGACTKSGPIYIITEYCFYGDLVNYLHKNRDSFLSHHPEKPKKELDIFGLNPADESTRSSGQGCLSSGTLQELSVDLQARGPC

SEQ ID NO: 14772 - protein, 155 aa, Homo sapiens
MVPAAGRRPPRVMRLLGWWQVLLWVLGLPVRGVEEESGRLWSEEQPAHPLQVGAVYLGEEELLHDPMGQDRAAEEANAVLGLDTQGDHMVMLSVIPGEAEDKVSSEPSGVTCGAGGAEDSRCNVRESLFSLDGAGAHFPDREEEYYTEPEVAESD

SEQ ID NO: 14773 - protein, 150 aa, Homo sapiens
MAAAAELSLLEKSLGLSKGNKYSAQGERQIPVLQTNNGPSLTGLTTIAAHLVKQANKEYLLGSTAEEKAIVQQWLEYRVTQVDGHSSKNDIHTLLKDLNSYLEDKVYLTGYNFTLADILLYYGLHRFIVSICIVTGFFSVVLRMIFKTLS

SEQ ID NO: 14774 - protein, 2699 aa, Homo sapiens
MDVKERRPYCSLTKSRREKERRYTNSSADNEECRVPTQKSYSSSETLKAFDHDSSRLLYGNRVKDLVHREADEFTRQGQNFTLRQLGVCEPATRRGLAFCAEMGLPHRGYSISAGSDADTENEAVMSPEHAMRLWGRGVKSGRSSCLSSRSNSALTLTDTEHENKSDSENEQPASNQGQSTLQPLPPSHKQHSAQHHPSITSLNRNSLTNRRNQSPAPPAALPAELQTTPESVQLQDSWVLGSNVPLESRHFLFKTGTGTTPLFSTATPGYTMASGSVYSPPTRPLPRNTLSRSAFKFKKSSKYCSWKCTALCAVGVSVLLAILLSYFIAMHLFGLNWQLQQTENDTFENGKVNSDTMPTNTVSLPSGDNGKLGGFTQENNTIDSGELDIGRRAIQEIPPGIFWRSQLFIDQPQFLKFNISLQKDALIGVYGRKGLPPSHTQYDFVELLDGSRLIAREQRSLLETERAGRQARSVSLHEAGFIQYLDSGIWHLAFYNDGKNAEQVSFNTIVIESVVECPRNCHGNGECVSGTCHCFPGFLGPDCSRAACPVLCSGNGQYSKGRCLCFSGWKGTECDVPTTQCIDPQCGGRGICIMGSCACNSGYKGESCEEADCIDPGCSNHGVCIHGECHCSPGWGGSNCEILKTMCPDQCSGHGTYLQESGSCTCDPNWTGPDCSNEICSVDCGSHGVCMGGTCRCEEGWTGPACNQRACHPRCAEHGTCKDGKCECSQGWNGEHCTIEGCPGLCNSNGRCTLDQNGWHCVCQPGWRGAGCDVAMETLCTDSKDNEGDGLIDCMDPDCCLQSSCQNQPYCRGLPDPQDIISQSLQSPSQQAAKSFYDRISFLIGSDSTHVIPGESPFNKSLASVIRGQVLTADGTPLIGVNVSFFHYPEYGYTITRQDGMFDLVANGGASLTLVFERSPFLTQYHTVWIPWNVFYVMDTLVMKKEENDIPSCDLSGFVRPNPIIVSSPLSTFFRSSPEDSPIIPETQVLHEETTIPGTDLKLSYLSSRAAGYKSVLKITMTQSIIPFNLMKVHLMVAVVGRLFQKWFPASPNLAYTFIWDKTDAYNQKVYGLSEAVVSVGYEYESCLDLTLWEKRTAILQGYELDASNMGGWTLDKHHVLDVQNGILYKGNGENQFISQQPPVVSSIMGNGRRRSISCPSCNGQADGNKLLAPVALACGIDGSLYVGDFNYVRRIFPSGNVTSVLELSSNPAHRYYLATDPVTGDLYVSDTNTRRIYRPKSLTGAKDLTKNAEVVAGTGEQCLPFDEARCGDGGKAVEATLMSPKGMAVDKNGLIYFVDGTMIRKVDQNGIISTLLGSNDLTSARPLTCDTSMHISQVRLEWPTDLAINPMDNSIYVLDNNVVLQITENRQVRIAAGRPMHCQVPGVEYPVGKHAVQTTLESATAIAVSYSGVLYITETDEKKINRIRQVTTDGEISLVAGIPSECDCKNDANCDCYQSGDGYAKDAKLSAPSSLAASPDGTLYIADLGNIRIRAVSKNKPLLNSMNFYEVASPTDQELYIFDINGTHQYTVSLVTGDYLYNFSYSNDNDITAVTDSNGNTLRIRRDPNRMPVRVVSPDNQVIWLTIGTNGCLKSMTAQGLELVLFTYHGNSGLLATKSDETGWTTFFDYDSEGRLTNVTFPTGVVTNLHGDMDKAITVDIESSSREEDVSITSNLSSIDSFYTMVQDQLRNSYQIGYDGSLRIIYASGLDSHYQTEPHVLAGTANPTVAKRNMTLPGENGQNLVEWRFRKEQAQGKVNVFGRKLRVNGRNLLSVDFDRTTKTEKIYDDHRKFLLRIAYDTSGHPTLWLPSSKLMAVNVTYSSTGQIASIQRGTTSEKVDYDGQGRIVSRVFADGKTWSYTYLEKSMVLLLHSQRQYIFEYDMWDRLSAITMPSVARHTMQTIRSIGYYRNIYNPPESNASIITDYNEEGLLLQTAFLGTSRRVLFKYRRQTRLSEILYDSTRVSFTYDETAGVLKTVNLQSDGFICTIRYRQIGPLIDRQIFRFSEDGMVNARFDYSYDNSFRVTSMQGVINETPLPIDLYQFDDISGKVEQFGKFGVIYYDINQIISTAVMTYTKHFDAHGRIKEIQYEIFRSLMYWITIQYDNMGRVTKREIKIGPFANTTKYAYEYDVDGQLQTVYLNEKIMWRYNYDLNGNLHLLNPSNSARLTPLRYDLRDRITRLGDVQYRLDEDGFLRQRGTEIFEYSSKGLLTRVYSKGSGWTVIYRYDGLGRRVSSKTSLGQHLQFFYADLTYPTRITHVYNHSSSEITSLYYDLQGHLFAMEISSGDEFYIASDNTGTPLAVFSSNGLMLKQIQYTAYGEIYFDSNIDFQLVIGFHGGLYDPLTKLIHFGERDYDILAGRWTTPDIEIWKRIGKDPAPFNLYMFRNNNPASKIHDVKDYITDVNSWLVTFGFHLHNAIPGFPVPKFDLTEPSYELVKSQQWDDIPPIFGVQQQVARQAKAFLSLGKMAEVQVSRRRAGGAQSWLWFATVKSLIGKGVMLAVSQGRVQTNVLNIANEDCIKVAAVLNNAFYLENLHFTIEGKDTHYFIKTTTPESDLGTLRLTSGRKALENGINVTVSQSTTVVNGRTRRFADVEMQFGALALHVRYGMTLDEEKARILEQARQRALARAWAREQQRVRDGEEGARLWTEGEKRQLLSAGKVQGYDGYYVLSVEQYPELADSANNIQFLRQSEIGRR

SEQ ID NO: 14775 - protein, 3144 aa, Homo sapiens
MTDKSIVILSLMVFHSSFINGKTCRRQLVEEWHPQPSSYVVNWTLTENICLDFYRDCWFLGVNTKIDTSGNQAVPQICPLQIQLGDILVISSEPSLQFPEINLMNVSETSFVGCVQNTTTEDQLLFGCRLKGMHTVNSKWLSVGTHYFITVMASGPSPCPLGLRLNVTVKQQFCQESLSSEFCSGHGKCLSEAWSKTYSCHCQPPFSGKYCQELDACSFKPCKNNGSCINKRENWDEQAYECVCHPPFTGKNCSEIIGQCQPHVCFHGNCSNITSNSFICECDEQFSGPFCEVSAKPCVSLLFWKRGICPNSSSAYTYECPKGSSSQNGETDVSEFSLVPCQNGTDCIKISNDVMCICSPIFTDLLCKSIQTSCESFPLRNNATCKKCEKDYPCSCISGFTEKNCEKAIDHCKLLSINCLNEEWCFNIIGRFKYVCIPGCTKNPCWFLKNVYLIHQHLCYCGVTFHGICQDKGPAQFEYVWQLGFAGSEGEKCQGVIDAYFFLAANCTEDATYVNDPEDNNSSCWFPHEGTKEICANGCSCLSEEDSQEYRYLCFLRWAGNMYLENTTDDQENECQHEAVCKDEINRPRCSCSLSYIGRLCVVNVDYCLGNHSISVHGLCLALSHNCNCSGLQRYERNICEIDTEDCKSASCKNGTTSTHLRGYFFRKCVPGFKGTQCEIDIDECASHPCKNGATCIDQPGNYFCQCVPPFKVVDGFSCLCNPGYVGIRCEQDIDDCILNACEHNSTCKDLHLSYQCVCLSDWEGNFCEQESNECKMNPCKNNSTCTDLYKSYRCECTSGWTGQNCSEEINECDSDPCMNGGLCHESTIPGQFVCLCPPLYTGQFCHQRYNLCDLLHNPCRNNSTCLALVDANQHCICREEFEGKNCEIDVKDCLFLSCQDYGDCEDMVNNFRCICRPGFSGSLCEIEINECSSEPCKNNGTCVDLTNRFFCNCEPEYHGPFCELDVNKCKISPCLDEENCVYRTDGYNCLCAPGYTGINCEINLDECLSEPCLHDGVCIDGINHYTCDCKSGFFGTHCETNANDCLSNPCLHGRCTELINEYPCSCDADGTSTQCKIKINDCTSIPCMNEGFCQKSAHGFTCICPRGYTGAYCEKSIDNCAEPELNSVICLNGGICVDGPGHTFDCRCLPGFSGQFCEININECSSSPCLHGADCEDHINGYVCKCQPGWSGHHCENELECIPNSCVHELCMENEPGSTCLCTPGFMTCSIGLLCGDEIRRITCLTPIFQRTDPISTQTYTIPPSETLVSSFPSIKATRIPAIMDTYPVDQGPKQTGIVKHDILPTTGLATLRISTPLESYLLQELIVTRELSAKHSLLSSADVSSSRFLNFGIRDPAQIVQDKTSVSHMPIRTSAATLGFFFPDRRARTPFIMSSLMSDFIFPTQSLLFENCQTVALSATPTTSVIRSIPGADIELNRQSLLSRGFLLIAASISATPVVSRGAQEDIEEYSADSLISRREHWRLLSPSMSPIFPAKVIISKQVTILNSSALHRFSTKAFNPSEYQAITEASSNQRLTNIKSQAADSLRELSQTCATCSMTEIKSSREFSDQVLHSKQSHFYETFWMNSAILASWYALMGAQTITSGHSFSSATEITPSVAFTEVPSLFPSKKSAKRTILSSSLEESITLSSNLDVNLCLDKTCLSIVPSQTISSDLMNSDLTSKMTTDELSVSENILKLLKIRQYGITMGPTEVLNQESLLDMEKSKGSHTLFKLHPSDSSLDFELNLQIYPDVTLKTYSEITHANDFKNNLPPLTGSVPDFSEVTTNVAFYTVSATPALSIQTSSSMSVIRPDWPYFTDYMTSLKKEVKTSSEWSKWELQPSVQYQEFPTASRHLPFTRSLTLSSLESILAPQRLMISDFSCVRYYGDSYLEFQNVALNPQNNISLEFQTFSSYGLLLYVKQDSNLVDGFFIQLFIENGTLKYHFYCPGEAKFKSINTTVRVDNGQKYTLLIRQELDPCNAELTILGRNTQICESINHVLGKPLPKSGSVFIGGFPDLHGKIQMPVPVKNFTGCIEVIEINNWRSFIPSKAVKNYHINNCRSQGFMLSPTASFVDASDVTQGVDTMWTSVSPSVAAPSVCQQDVCHNGGTCHAIFLSSGIVSFQCDCPLHFTGRFCEKDAGLFFPSFNGNSYLELPFLKFVLEKEHNRTVTIYLTIKTNSLNGTILYSNGNNCGKQFLHLFLVEGRPSVKYGCGNSQNILTVSANYSINTNAFTPITIRYTTPVGSPGVVCMIEMTADGKPPVQKKDTEISHASQAYFESMFLGHIPANVQIHKKAGPVYGFRGCILDLQVNNKEFFIIDEARHGKNIENCHVPWCAHHLCRNNGTCISDNENLFCECPRLYSGKLCQFASCENNPCGNGATCVPKSGTDIVCLCPYGRSGPLCTDAINITQPRFSGTDAFGYTSFLAYSRISDISFHYEFHLKFQLANNHSALQNNLIFFTGQKGHGLNGDDFLAVGLLNGSVVYSYNLGSGIASIRSEPLNLSLGVHTVHLGKFFQEGWLKVDDHKNKSIIAPGRLVGLNVFSQFYVGGYSEYTPDLLPNGADFKNGFQGCIFTLQVRTEKDGHFRGLGNPEGHPNAGRSVGQCHASPCSLMKCGNGGTCIESGTSVYCNCTTGWKGSFCTETVSTCDPEHDPPHHCSRGATCISLPHGYTCFCPLGTTGIYCEQALSISDPSFRSNELSWMSFASFHVRKKTHIQLQFQPLAADGILFYAAQHLKAQSGDFLCISLVNSSVQLRYNLGDRTIILETLQKVTINGSTWHIIKAGRVGAEGYLDLDGINVTEKASTKMSSLDTNTDFYIGGVSSLNLVNPMAIENEPVGFQGCIRQVIINNQELQLTEFGAKGGSNVGDCDGTACGYNTCRNGGECTVNGTTFSCRCLPDWAGNTCNQSVSCLNNLCLHQSLCIPDQSFSYSCLCTLGWVGRYCENKTSFSTAKFMGNSYIKYIDPNYRMRNLQFTTISLNFSTTKTEGLIVWMGIAQNEENDFLAIGLHNQTLKIAVNLGERISVPMSYNNGTFCCNKWHHVVVIQNQTLIKAYINNSLILSEDIDPHKNFVALNYDGICYLGGFEYGRKVNIVTQEIFKTNFVGKIKDVVFFQEPKNIELIKLEGYNVYDGDEQNEVT

SEQ ID NO: 14776 - protein, 1503 aa, Homo sapiens
MWPSQLLIFMMLLAPIIHAFSRAPIPMAVVRRELSCESYPIELRCPGTDVIMIESANYGRTDDKICDSDPAQMENIRCYLPDAYKIMSQRCNNRTQCAVVAGPDVFPDPCPGTYKYLEVQYECVPYKVEQKVFLCPGLLKGVYQSEHLFESDHQSGAWCKDPLQASDKIYYMPWTPYRTDTLTEYSSKDDFIAGRPTTTYKLPHRVDGTGFVVYDGALFFNKERTRNIVKFDLRTRIKSGEAIIANANYHDTSPYRWGGKSDIDLAVDENGLWVIYATEQNNGKIVISQLNPYTLRIEGTWDTAYDKRSASNAFMICGILYVVKSVYEDDDNEATGNKIDYIYNTDQSKDSLVDVPFPNSYQYIAAVDYNPRDNLLYVWNNYHVVKYSLDFGPLDSRSGQAHHGQVSYISPPIHLDSELERPSVKDISTTGPLGMGSTTTSTTLRTTTLSPGRSTTPSVSGRRNRSTSTPSPAVEVLDDMTTHLPSASSQIPALEESCEAVEAREIMWFKTRQGQIAKQPCPAGTIGVSTYLCLAPDGIWDPQGPDLSNCSSPWVNHITQKLKSGETAANIARELAEQTRNHLNAGDITYSVRAMDQLVGLLDVQLRNLTPGGKDSAARSLNKLQKRERSCRAYVQAMVETVNNLLQPQALNAWRDLTTSDQLRAATMLLHTVEESAFVLADNLLKTDIVRENTDNIKLEVARLSTEGNLEDLKFPENMGHGSTIQLSANTLKQNGRNGEIRVAFVLYNNLGPYLSTENASMKLGTEALSTNHSVIVNSPVITAAINKEFSNKVYLADPVVFTVKHIKQSEENFNPNCSFWSYSKRTMTGYWSTQGCRLLTTNKTHTTCSCNHLTNFAVLMAHVEVKHSDAVHDLLLDVITWVGILLSLVCLLICIFTFCFFRGLQSDRNTIHKNLCISLFVAELLFLIGINRTDQPIACAVFAALLHFFFLAAFTWMFLEGVQLYIMLVEVFESEHSRRKYFYLVGYGMPALIVAVSAAVDYRSYGTDKVCWLRLDTYFIWSFIGPATLIIMLNVIFLGIALYKMFHHTAILKPESGCLDNIKSWVIGAIALLCLLGLTWAFGLMYINESTVIMAYLFTIFNSLQGMFIFIFHCVLQKKVRKEYGKCLRTHCCSGKSTESSIGSGKTSGSRTPGRYSTGSQSRIRRMWNDTVRKQSESSFITGDINSSASLNRGAMANHLISNALLRPHGTNNPYNTLLGEPAVCNNPSVSMYNAQEGLLNNARDTSVMDTLPLNGNHGNSYSIASGEYLSNCVQIIDRGYNHNETALEKKILKELTSNYIPSYLNNHERSSEQNRNLMNKLVNNLGSGREDDAIVLDDATSFNHEESLGLELIHEESDAPLLPPRVYSTENHQPHHYTRRRIPQDHSESFFPLLTNEHTEDLQSPHRDSLYTSMPTLAGVAATESVTTSTQTEPPPAKCGDAEDVYYKSMPNLGSRNHVHQLHTYYQLGRGSSDGFIVPPNKDGTPPEGSSKGPAHLVTSL

SEQ ID NO: 14777 - protein, 77 aa, Homo sapiens
MAGNSILLAAVSILSACQQSYFALQVGKARLKYKVTPPAVTGSPEFERVFRAHFCYLSGSGVHIWPSPILLGIFRSC

SEQ ID NO: 14778 - protein, 145 aa, Homo sapiens
MIFWSFVAGVVTFYCSLGPDSLLPNIFFTIKYKPKQLGLQELFPQGHSCAVCGKVKCKRHRPSLLLENYQPWLDLKISSKVDASLSEVDIPSIITKKLLKAAMKHIEVIVKARQKVKNTEFLQQAALEEYGPELHVALRSRRDEL

SEQ ID NO: 14779 - protein, 1165 aa, Homo sapiens
MLLTLIILLPVVSKFSFVSLSAPQHWSCPEGTLAGNGNSTCVGPAPFLIFSHGNSIFRIDTEGTNYEQLVVDAGVSVIMDFHYNEKRIYWVDLERQLLQRVFLNGSRQERVCNIEKNVSGMAINWINEEVIWSNQQEGIITVTDMKGNNSHILLSALKYPANVAVDPVERFIFWSSEVAGSLYRADLDGVGVKALLETSEKITAVSLDVLDKRLFWIQYNREGSNSLICSCDYDGGSVHISKHPTQHNLFAMSLFGDRIFYSTWKMKTIWIANKHTGKDMVRINLHSSFVPLGELKVVHPLAQPKAEDDTWEPDVNECAFWNHGCTLGCKNTPGSYYCTCPVGFVLLPDGKRCHQLVSCPRNVSECSHDCVLTSEGPLCFCPEGSVLERDGKTCSGCSSPDNGGCSQLCVPLSPVSWECDCFPGYDLQLDEKSCAASGPQPFLLFANSQDIRHMHFDGTDYGTLLSQQMGMVYALDHDPVENKIYFAHTALKWIERANMDGSQRERLIEEGVDVPEGLAVDWIGRRFYWTDRGKSLIGRSDLNGKRSKIITKENISQPRGIAVHPMAKRLFWTDTGINPRIESSSLQGLGRLVIASSDLIWPSGITIDFLTDKLYWCDAKQSVIEMANLDGSKRRRLTQNDVGHPFAVAVFEDYVWFSDWAMPSVMRVNKRTGKDRVRLQGSMLKPSSLVVVHPLAKPGADPCLYQNGGCEHICKKRLGTAWCSCREGFMKASDGKTCLALDGHQLLAGGEVDLKNQVTPLDILSKTRVSEDNITESQHMLVAEIMVSDQDDCAPVGCSMYARCISEGEDATCQCLKGFAGDGKLCSDIDECEMGVPVCPPASSKCINTEGGYVCRCSEGYQGDGIHCLDIDECQLGEHSCGENASCTNTEGGYTCMCAGRLSEPGLICPDSTPPPHLREDDHHYSVRNSDSECPLSHDGYCLHDGVCMYIEALDKYACNCVVGYIGERCQYRDLKWWELRHAGHGQQQKVIVVAVCVVVLVMLLLLSLWGAHYYRTQKLLSKNPKNPYEESSRDVRSRRPADTEDGMSSCPQPWFVVIKEHQDLKNGGQPVAGEDGQAADGSMQPTSWRQEPQLCGMGTEQGCWIPVSSDKGSCPQVMERSFHMPSYGTQTLEGGVEKPHSLLSANPLWQQRALDPPHQMELTQ

SEQ ID NO: 14780 - protein, 439 aa, Homo sapiens
MAAARCWRPLLRGPRLSLHTAANAAATATETTCQDVAATPVARYPPIVASMTADSKAARLRRIERWQATVHAAESVDEKLRILTKMQFMKYMVYPQTFALNADRWYQYFTKTVFLSGLPPPPAEPEPEPEPEPEPALDLAALRAVACDCLLQEHFYLRRRRRVHRYEESEVISLPFLDQLVSTLVGLLSPHNPALAAAALDYRCPVHFYWVRGEEIIPRGHRRGRIDDLRYQIDDKPNNQIRISKQLAEFVPLDYSVPIEIPTIKCKPDKLPLFKRQYENHIFVGSKTADPCCYGHTQFHLLPDKLRRERLLRQNCADQIEVVFRANAIASLFAWTGAQAMYQGFWSEADVTRPFVSQAVITDGKYFSFFCYQLNTLALTTQADQNNPRKNICWGTQSKPLYETIEDNDVKGFNDDVLLQIVHFLLNRPKEEKSQLLEN

SEQ ID NO: 14781 - protein, 402 aa, Homo sapiens
MKETRGYGGDAPFCTRLNHSYTGMWAPERSAEARGNLTRPPGSGEDCGSVSVAFPITMLLTGFVGNALAMLLVSRSYRRRESKRKKSFLLCIGWLALTDLVGQLLTTPVVIVVYLSKQRWEHIDPSGRLCTFFGLTMTVFGLSSLFIASAMAVERALAIRAPHWYASHMKTRATRAVLLGVWLAVLAFALLPVLGVGQYTVQWPGTWCFISTGRGGNGTSSSHNWGNLFFASAFAFLGLLALTVTFSCNLATIKALVSRCRAKATASQSSAQWGRITTETAIQLMGIMCVLSVCWSPLLIMMLKMIFNQTSVEHCKTHTEKQKECNFFLIAVRLASLNQILDPWVYLLLRKILLRKFCQMRKRRLREQEMGPDGRCFCHAWRQVPRTWCSSHDREPCSVQLS

SEQ ID NO: 14782 - protein, 144 aa, Homo sapiens
MEGKWLLCMLLVLGTAIVEAHDGHDDDVIDIEDDLDDVIEEVEDSKPDTTAPPSSPKVTYKAPVPTGEVYFADSFDRGTLSGWILSKAKKDDTDDEIAKYDGKWEVEEMKESKLPGDKGLVLMSRAKHHAISAKLNKPFLFDTK

SEQ ID NO: 14783 - protein, 55 aa, Homo sapiens
MGPEALSSLLLLLLVASGDADMKGHFDPAKCRYALGMQDRTIPDSDISASSSWSD

SEQ ID NO: 14784 - protein, 151 aa, Homo sapiens
MKTKLNIYNMQFLLFVFLVWDPARLVLANIQEDEAKNNITIFTRILDRLLDGYDNRLRPGLGDSITEVFTNIYVTSFGPVSDTDMEYTIDVFFRQKWKDERLKFKGPMNILRLNNLMASKIWTPDTFFHNGKKSVAHNMTMPNKLLRIQDD

SEQ ID NO: 14785 - protein, 544 aa, Homo sapiens
MSVLDALWEDRDVRFDLSAQQMKTRPGEVLIDCLDSIEDTKGNNGDRGRLLVTNLRILWHSLALSRVNVSVGYNCILNITTRTANSKLRGQTEALYILTKCNSTRFEFIFTNLVPGSPRLFTSVMAVHRAYETSKMYRDFKLRSALIQNKQLRLLPQEHVYDKINGVWNLSSDQGNLGTFFITNVRIVWHANMNDSFNVSIPYLQIRSIKIRDSKFGLALVIESSQQSGGYVLGFKIDPVEKLQESVKEINSLHKVYSASPIFGVDYEMEEKPQPLEALTVEQIQDDVEIDSDGHTDAFVAYFADGNKLDSIASEWVGLPPLPSARCLFGLGEVDDKIYVVAGKDLQTEASLDSVLCYDPVAAKWNEVKKLPIKVYGHNVISHKGMIYCLGGKTDDKKCTNRVFIFNPKKGDWKDLAPMKIPRSMFGVAVHKGKIVIAGGVTEDGLSASVEAFDLTTNKWDVMTEFPQERSSISLVSLAGSLYAIGGFAMIQLESKEFAPTEVNDIWKYEDDKKEWAGMLKEIRYASGASCLATRLNLFKLSKL

SEQ ID NO: 14786 - protein, 1160 aa, Homo sapiens
MSKVIQKKNHWTSRVHECTVKRGPQGELGVTVLGGAEHGEFPYVGAVAAVEAAGLPGGGEGPRLGEGELLLEVQGVRVSGLPRYDVLGVIDSCKEAVTFKAVRQGGRLNKDLRHFLNQRFQKGSPDHELQQTIRDNLYRHAVPCTTRSPREGEVPGVDYNFLTVKEFLDLEQSGTLLEVGTYEGNYYGTPKPPSQPVSGKVITTDALHSLQSGSKQSTPKRTKSYNDMQNAGIVHAENEEEDDVPEMNSSFTADSGEQEEHTLQETALPPVNSSIIAAPITDPSQKFPQYLPLSAEDNLGPLPENWEMAYTENGEVYFIDHNTKTTSWLDPRCLNKQQKPLEECEDDEGVHTEELDSELELPAGWEKIEDPVYGIYYVDHINRKTQYENPVLEAKRKKQLEQQQQQQQQQQQQQQQQQQQQTEEWTEDHSALVPPVIPNHPPSNPEPAREVPLQGKPFFTRNPSELKGKFIHTKLRKSSRGFGFTVVGGDEPDEFLQIKSLVLDGPAALDGKMETGDVIVSVNDTCVLGHTHAQVVKIFQSIPIGASVDLELCRGYPLPFDPDDPNTSLVTSVAILDKEPIIVNGQETYDSPASHSSKTGKVNGMKDARPSSPADVASNSSHGYPNDTVSLASSIATQPELITVHIVKGPMGFGFTIADSPGGGGQRVKQIVDSPRCRGLKEGDLIVEVNKKNVQALTHNQVVDMLVECPKGSEVTLLVQRGGLPVPKKSPKSQPLERKDSQNSSQHSVSSHRSLHTASPSHSTQVLPEFPPAEAQAPDQTDSSGQKKPDPFKIWAQSRSMYENRLPDYQEQDIFLWRKETGFGFRILGGNEPGEPIYIGHIVPLGAADTDGRLRSGDELICVDGTPVIGKSHQLVVQLMQQAAKQGHVNLTVRRKVVFAVPKTENEVPSPASSHHSSNQPASLTEEKRTPQGSQNSLNTVSSGSGSTSGIGSGGGGGSGVVSTVVQPYDVEIRRGENEGFGFVIVSSVSRPEAGTTFESSNATLLTNAEKIATITTTHTPSQQGTQETRNTTKPKQESQFEFKAPQATQEQDFYTVELERGAKGFGFSLRGGREYNMDLYVLRLAEDGPAERCGKMRIGDEILEINGETTKNMKHSRAIELIKNGGRRVRLFLKRGDGSVPEYGGSNYENIPSFPGMTP

SEQ ID NO: 14787 - protein, 292 aa, Homo sapiens
MEILWKTLTWILSLIMASSEFHSDHRLSYSSQEEFLTYLEHYQLTIPIRVDQNGAFLSFTVKNDKHSRRRRSMDPIDPQQAVSKLFFKLSAYGKHFHLNLTLNTDFVSKHFTVEYWGKDGPQWKHDFLDNCHYTGYLQDQRSTTKVALSNCVGLHGVIATEDEEYFIEPLKNTTEDSKHFSYENGHPHVIYKKSALQQRHLYDHSHCGVSDFTRSGKPWWLNDTSTVSYSLPINNTHIHHRQKRSVSIERFVETLVVADKMMVGYHGRKDIEHYILSVMNIVRLPNFTVIPA

SEQ ID NO: 14788 - protein, 707 aa, Homo sapiens
MAGSRLPRQLFLQGVAAVFMFAFASLYTQIPGLYGPEGILPARRTLRPQGKGRWQQLWETPTLLWEAPRLGLDTAQGLELLSLLGALVALGALLLSPLRHPVIYLLLWAAYLSACQVGQVFLYFQWDSLLLETGFLAVLVAPLRPASHRKEAPQGRQAGALPHEDLPFWLVRWLLFRLMFASGVVKLTSRCPAWWGLTALTYHYETQCLPTPAAWFAHHLPVWLHKLSVVATFLIEIAVPPLFFAPIRRLRLAAFYSQVLLQVLIIITGNYNFFNLMTLVLTTALLDDQHLAAEPGHGSRKKTATSWPKALLATLSLLLELAVYGLLAYGTVHYFGLEVDWQQRTIHSRTTFTFHQFSQWLKTLTLPTVWLGVASLVWELLSALWRWTQVRGWLRKLSAVVQLSLVGTATVALFLISLVPYSYVEPGTHGRLWTGAHRLFGAVEHLQLANSYGLFRRMTGLGGRPEVVLEGSYDGHHWTEIEFMYKPGNLSRPPPVVVPHQPRLDWQMWFAALGPHTHSPWFTSLVLRLLQGKEPVIRLVQSQVARYPFHKQPPTYVRAQRYKYWFSQPGEQGQWWRRQWVEEFFPSVSLGDPTLETLLRQFGLQEKSPPRTRSANSTLAQALHWTRSQLSPLEAPALLWGLLMAVGAVRFVQALLAPCSLRSSPLAPVSGEKRRPASQKDSGAASEQATAAPNPCSSSSRTTRRKK

SEQ ID NO: 14789 - protein, 94 aa, Homo sapiens
MALGVPISVYLLFNAMTALTEEAAVTVTPPITAQQADNIEGPIALKFSHLCLEDHNSYCINGACAFHHELEKAICRCLKLKSPYNVCSGERRPL

SEQ ID NO: 14790 - protein, 815 aa, Homo sapiens
MGPERTGAAPLPLLLVLALSQGILNCCLAYNVGLPEAKIFSGPSSEQFGYAVQQFINPKGNWLLVGSPWSGFPENRMGDVYKCPVDLSTATCEKLNLQTSTSIPNVTEMKTNMSLGLILTRNMGTGGFLTCGPLWAQQCGNQYYTTGVCSDISPDFQLSASFSPATQPCPSLIDVVVVCDESNSIYPWDAVKNFLEKFVQGLDIGPTKTQVGLIQYANNPRVVFNLNTYKTKEEMIVATSQTSQYGGDLTNTFGAIQYARKYAYSAASGGRRSATKVMVVVTDGESHDGSMLKAVIDQCNHDNILRFGIAVLGYLNRNALDTKNLIKEIKAIASIPTERYFFNVSDEAALLEKAGTLGEQIFSIEGTVQGGDNFQMEMSQVGFSADYSSQNDILMLGAVGAFGWSGTIVQKTSHGHLIFPKQAFDQILQDRNHSSYLGYSVAAISTGESTHFVAGAPRANYTGQIVLYSVNENGNITVIQAHRGDQIGSYFGSVLCSVDVDKDTITDVLLVGAPMYMSDLKKEEGRVYLFTIKEGILGQHQFLEGPEGIENTRFGSAIAALSDINMDGFNDVIVGSPLENQNSGAVYIYNGHQGTIRTKYSQKILGSDGAFRSHLQYFGRSLDGYGDLNGDSITDVSIGAFGQVVQLWSQSIADVAIEASFTPEKITLVNKNAQIILKLCFSAKFRPTKQNNQVAIVYNITLDADGFSSRVTSRGLFKENNERCLQKNMVVNQAQSCPEHIIYIQEPSDVVNSLDLRVDISLENPGTSPALEAYSETAKVFSIPFHKDCGEDGLCISDLVLDVRQIPAAQLMGQK

SEQ ID NO: 14791 - protein, 514 aa, Homo sapiens
MVEEVQKHSVHTLVFRSLKRTHDMFVADNGKPVPLDEESHKRKMAIKLRNEYGPVLHMPTSKENLKEKGPQNATDSYVHKQYPANQGQEVEYFVAGTHPYPPGPGVALTADTKIQRMPSESAAQSLAVALPLQTKADANRTAPSGSEYRHPGASDRPQPTAMNSIVMETGNTKNSALMAKKAPTMPKPQWHPPWKLYRVISGHLGWVRCIAVEPGNQWFVTGSADRTIKIWDLASGKLKLSLTGHISTVRGVIVSTRSPYLFSCGEDKQVKCWDLEYNKVIRHYHGHLSAVYGLDLHPTIDVLVTCSRDSTARIWDVRTKASVHTLSGHTNAVATVRCQAAEPQIITGSHDTTIRLWDLVAGKTRVTLTNHKKSVRAVVLHPRHYTFASGSPDNIKQWKFPDGSFIQNLSGHNAIINTLTVNSDGVLVSGADNGTMHLWDWRTGYNFQRVHAAVQPGSLDSESGIFACAFDQSESRLLTAEADKTIKVYREDDTATEETHPVSWKPEIIKRKRF

SEQ ID NO: 14792 - protein, 725 aa, Homo sapiens
MDRGQVLEQLLPELTGLLSLLDHEYLSDTTLEKKMAVASILQSLQPLPAKEVSYLYVNTADLHSGPSFVESLFEEFDCDLSDLRDMPEDDGEPSKGASPELAKSPRLRNAADLPPPLPNKPPPEDYYEEALPLGPGKSPEYISSHNGCSPSHSIVDGYYEDADSSYPATRVNGELKSSYNDSDAMSSSYESYDEEEEEGKSPQPRHQWPSEEASMHLVRECRICAFLLRKKRFGQWAKQLTVIREDQLLCYKSSKDRQPHLRLALDTCSIIYVPKDSRHKRHELRFTQGATEVLVLALQSREQAEEWLKVIREVSKPVGGAEGVEVPRSPVLLCKLDLDKRLSQEKQTSDSDSVGVGDNCSTLGRRETCDHGKGKKSSLAELKGSMSRAAGRKITRIIGFSKKKTLADDLQTSSTEEEVPCCGYLNVLVNQGWKERWCRLKCNTLYFHKDHMDLRTHVNAIALQGCEVAPGFGPRHPFAFRILRNRQEVAILEASCSEDMGRWLGLLLVEMGSRVTPEALHYDYVDVETLTSIVSAGRNSFLYARSCQNQWPEPRVYDDVPYEKMQDEEPERPTGAQVKRHASSCSEKSHRVDPQVKVKRHASSANQYKYGKNRAEEDARRYLVEKEKLEKEKETIRTELIALRQEKRELKEAIRSSPGAKLKALEEAVATLEAQCRAKEERRIDLELKLVAVKERLQQSLAGGPALGLSVSSKPKSGEWEMKKT

SEQ ID NO: 14793 - protein, 223 aa, Homo sapiens
VEPLEQLDDEDGLPEKLAQKNPMYQKERETPPRFAQHGTFEYEYSQRWKSLDEMEKQQREQVEKNMKDAKDKLESEMEDAYHEHQANLLRQDLMRRQEELRRMEELHNQEMQKRKEMQLRQEEERRRREEEMMIRQREMEEQMRRQREESYSRMGYMDPRERDMRMGGGGAMNMGDPYGSGGQKFPPLGGGGGIGYEANPGVPPATMSGSMMGSDMVRMIDVG

SEQ ID NO: 14794 - protein, 791 aa, Homo sapiens
MDGESEVDFSSNSITPLWRRRSIPQPHQVLGRSKPRPQSYQSPNGLLITDFPVEDGGTLLAAQIPAQVPTASDSRTVHRSPLLLGAQRRAVANGGTASPEYRAASPRLRRPKSPKLPKAVPGGSPKSPANGAVTLPAPPPPPVLRPPRTPNAPAPCTPEEDLTGLTASPVPSPTANGLAANNDSPGSGSQSGRKAKDPERGLFPGPQKSSSEQKLPLQRLPSQENELLENPSVVLSTNSPAALKVGKQQIIPKSLASEIKISKSNNQNVEPHKRLLKVRSMVEGLGGPLGHAGEESEVDNDVDSPGSLRRGLRSTSYRRAVVSGFDFDSPTSSKKKNRMSQPVLKVVMEDKEKFSSLGRIKKKMLKGQGTFDGEENAVLYQNYKEKALDIDSDEESEPKEQKSDEKIVIHHKPLRSTWSQLSAVKRKGLSQTVSQEERKRQEAIFEVISSEHSYLLSLEILIRMFKNSKELSDTMTKTERHHLFSNITDVCEASKKFFIELEARHQNNIFIDDISDIVEKHTASTFDPYVKYCTNEVYQQRTLQKLLATNPSFKEVLSRIESHEDCRNLPMISFLILPMQRVTRLPLLMDTICQKTPKDSPKYEVCKRALKEVSKLVRLCNEGARKMERTEMMYTINSQLEFKIKPFPLVSSSRWLVKRGELTAYVEDTVLFSRRTSKQQVYFFLFNDVLIITKKKSEESYNVNDYSLRDQLLVESCDNEELNSSPGKNSSTMLYSRQSSASHLFTLTVLSNHANEKVEMLLGAETQSERARWITALGHSSGKPPADRTCG

SEQ ID NO: 14795 - protein, 1166 aa, Homo sapiens
MKLKEVDRTAMQAWSPAQNHPIYLATGTSAQQLDATFSTNASLEIFELDLSDPSLDMKSCATFSSSHRYHKLIWGPYKMDSKGDVSGVLIAGGENGNIILYDPSKIIAGDKEVVIAQNDKHTGPVRALDVNIFQTNLVASGANESEIYIWDLNNFATPMTPGAKTQPPEDISCIAWNRQVQHILASASPSGRATVWDLRKNEPIIKVSDHSNRMHCSGLAWHPDVATQMVLASEDDRLPVIQMWDLRFASSPLRVLENHARGILAIAWSMADPELLLSCGKDAKILCSNPNTGEVLYELPTNTQWCFDIQWCPRNPAVLSAASFDGRISVYSIMGGSTDGLRQKQVDKLSSSFGNLDPFGTGQPLPPLQIPQQTAQHSIVLPLKKPPKWIRRPVGASFSFGGKLVTFENVRMPSHQGAEQQQQQHHVFISQVVTEKEFLSRSDQLQQAVQSQGFINYCQKKIDASQTEFEKNVWSFLKVNFEDDSRGKYLELLGYRKEDLGKKHIKEEKEESEFLPSSGGTFNISVSGDIDGLITQALLTGNFESAVDLCLHDNRMADAIILAIAGGQELLARTQKKYFAKSQSKITRLITAVVMKNWKEIVESCDLKNWREALAAVLTYAKPDEFSALCDLLGTRLENEGDSLLQTQACLCYICAGNVEKLVACWTKAQDGSHPLSLQDLIEKVVILRKAVQLTQAMDTSTVGVLLAAKMSQYANLLAAQGSIAAALAFLPDNTNQPNIMQLRDRLCRAQGEPVAGHESPKIPYEKQQLPKGRPGPVAGHHQMPRVQTQQYYPHGENPPPPGFIMHGNVNPNAAGQLPTSPGHMHTQVPPYPQPQPYQPAQPYPFGTGGSAMYRPQQPVAPPTSNAYPNTPYISSASSYTGQSQLYAAQHQASSPTSSPATSFPPPPSSGASFQHGGPGAPPSSSAYALPPGTTGPQNGWNDPPALNRVPKKKKMPENFMPPVPITSPIMNPLGDPQSQMLQQQPSAPVPLSSQSSFPQPHLPGGQPFHGVQQPLGQTGMPPSFSKPNIEGAPGAPIGNTFQHVQSLPTKKITKKPIPDEHLILKTTFEDLIQRCLSSATDPQTKRKLDDASKRLEFLYDKLREQTLSPTITSGLHNIARSIETRNYSEGLTMHTHIVSTSNFSETSAFMPVLKVVLTQANKLGV

SEQ ID NO: 14796 - protein, 162 aa, Homo sapiens
MIFLYQVVHFILFTSVSGECVTQLLKDTCFEGGDITTVFTPSAKYCQVVCTYHPRCLLFTFTAESPSEDPTRWFTCVLKDSVTETLPRVNRTAAISGYSFKQCSHQISACNKDIYVDLDMKGINYNSSVAKSAQECQERCTDDVHCHFFTYATRQFPSLEHR

SEQ ID NO: 14797 - protein, 59 aa, Homo sapiens
SLPLLLLLLGAWAIPGGLGDRAPLTATAPQLDDEEMYSAHMPAHLRCDACRAVAYQAHP

SEQ ID NO: 14798 - protein, 139 aa, Homo sapiens
MPAIAVLAAAAAAWCFLQVESRHLDALAGGAGPNHGNFLDNDQWLSTVSQYDRDKYWNRFRDDDYFRNWNPNKPFDQALDPSKDPCLKVKCSPHKVCVTQDYQTALCVSRKHLLPRQKKGNVAQKHWVGPSNLVKCKPC

SEQ ID NO: 14799 - protein, 444 aa, Homo sapiens
MSSVKRSLKQEIVTQFHCSAAEGDIAKLTGILSHSPSLLNETSENGWTALMCDRSIVNKSRQTALDIAVFWGYKHIANLLATAKGGKKPWFLTNEVEECENYFSKTLLDRKSEKRNNSDWLLAKESHPATVFILFSDLNPLVTLGGNKESFQQPEVRLCQLNYTDIKDYLAQPEKITLIFLGVELEIKDKLLNYAGEVPREEEDGLVAWFALGIDPIAAEEFKQRHENCYFLHPPMPALLQLKEKEAGVVAQARSVLAWHSRYKFCPTCGNATKIEEGGYKRLCLKEDCPSLNGVHNTSYPRVDPVVIMQVIHPDGTKCLLGRQKRFPPGMFTCLAGFIEPGETIEDAVRREVEEESGVKVGHVQYVACQPWPMPSSLMIGCLALAVSTEIKVDKNEIEDARWFTREQVLDVLTKGKQQAFFVPPSRAIAHQLIKHWIRINPNL

SEQ ID NO: 14800 - protein, 56 aa, Homo sapiens
MAEEPQSVLQLPTSIAAGGEGLTDVSPETTTPEPPSSAAVSPGTEEPAGDTKKKSN

SEQ ID NO: 14801 - protein, 476 aa, Homo sapiens
MAQALPWLLLWMGAGVLPAHGTQHGIRLPLRSGLGGAPLGLRLPRETDEEPEEPGRRGSFVEMVDNLRGKSGQGYYVEMTVGSPPQTLNILVDTGSSNFAVGAAPHPFLHRYYQRQLSSTYRDLRKGVYVPYTQGKWEGELGTDLVSIPHGPNVTVRANIAAITESDKFFINGSNWEGILGLAYAEIARLCGAGFPLNQSEVLASVGGSMIIGGIDHSLYTGSLWYTPIRREWYYEVIIVRVEINGQDLKMDCKEYNYDKSIVDSGTTNLRLPKKVFEAAVKSIKAASSTEKFPDGFWLGEQLVCWQAGTTPWNIFPVISLYLMGEVTNQSFRITILPQQYLRPVEDVATSQDDCYKFAISQSSTGTVMGAVIMEGFYVVFDRARKRIGFAVSACHVHDEFRTAAVEGPFVTLDMEDCGYNIPQTDESTLMTIAYVMAAICALFMLPLCLMVCQWRCLRCLRQQHDDFADDISLLK

SEQ ID NO: 14802 - protein, 108 aa, Homo sapiens
MENPSPAAALGKALCALLLATLGAAGQPLGGESICSARALAKYSITFTGKWSQTAFPKQYPLFRPPAQWSSLLGAAHSSDYSMWRKNQYVSNGLRDFAERGEAWALMK

SEQ ID NO: 14803 - protein, 348 aa, Homo sapiens
MGARGAPSRRRQAGRRLRYLPTGSFPFLLLLLLLCIQLGGGQKKKENLLAEKVEQLMEWSSRRSIFRMNGDKFRKFIKAPPRNYSMIVMFTALQPQRQCSVCRQANEEYQILANSWRYSSAFCNKLFFSMVDYDEGTDVFQQLNMNSAPTFMHFPPKGRPKRADTFDLQRIGFAAEQLAKWIADRTDVHIRVFRPPNYSGTIALALLVSLVGGLLYLRRNNLEFIYNKTGWAMVSLCIVFAMTSGQMWNHIRGPPYAHKNPHNGQVSYIHGSSQAQFVAESHIILVLNAAITMGMVLLNEAATSKGDVGKRRIICLVGLGLVVFFFSFLLSIFRSKYHGYPYSDLDFE

SEQ ID NO: 14804 - protein, 53 aa, Homo sapiens
QDSHKAGPIGILFELVHIFLYVVQPRDFPEDENTKAQIGEACSFKTLQPNESW

SEQ ID NO: 14805 - protein, 610 aa, Homo sapiens
MASGGSGGVSVPALWSEVNRYGQNGDFTRALKTVNKILQINKDDVTALHCKVVCLIQNGSFKEALNVINTHTKVLANNSLSFEKAYCEYRLNRIENALKTIESANQQTDKLKELYGQVLYRLERYDECLAVYRDLVRNSQDDYDEERKTNLSAVVAAQSNWEKVVPENLGLQEGTHELCYNTACALIGQGQLNQAMKILQKAEDLCRRSLSEDTDQNVFDSKKKVKLTNAEGVEFKLSKKQLQAIEFNKALLAMYTNQAEQCRKISASLQSQSPEHLLPVLIQAAQLCREKQHTKAIELLQEFSDQHPENAAEIKLTMAQLKISQGNISKACLILRSIEELKHKPGMVSALVTMYSHEEDIDSAIEVFTQAIQWYQNHQPKSPAHLSLIREAANFKLKYGRKKEAISDLQQLWKQNPKDIHTLAQLISAYSLVDPEKAKALSKHLPSSDSMSLKVDVEALENSAGATYIRKKGGKVTGDSQPKEQGQGDLKKKKKKKKGKLPKNYDPKVTPDPERWLPMRERSYYRGRKKGKKKDQIGKGTQGATAGASSELDASKTVSSPPTSPRPGSAATVSASTSNIIPPRHQKPAGAPATKKKQQQKKKKGGKGGW

SEQ ID NO: 14806 - protein, 340 aa, Homo sapiens
MALMLSLVLSLLKLGSGQWQVFGPDKPVQALVGEDAAFSCFLSPKTNAEAMEVRFFRGQFSSVVHLYRDGKDQPFMQMPQYQGRTKLVKDSIAEGRISLRLENITVLDAGLYGCRISSQSYYQKAIWELQVSALGSVPLISITGYVDRDIQLLCQSSGWFPRPTAKWKGPQGQDLSTDSRTNRDMHGLFDVEISLTVQENAGSISCSMRHAHLSREVESRVQIGDTFFEPISWHLATKVLGILCCGLFFGIVGLKIFFSKFQCKREREAWAGALFMVPAGTGSEMLPHPAASLLLVLASRGPGPKKLEKKARTGRIERRPETRSGGDSGSRDGSPEALRF

SEQ ID NO: 14807 - protein, 179 aa, Homo sapiens
MHFQAFWLCLGLLFISINAEFMDDDVETEDFEENSEEIDVNESELSSEIKYKTPQPIGEVYFAETFDSGRLAGWVLSKAKKDDMDEEISIYDGRWEIEELKENQVPGDRGLVLKSRAKHHAISAVLAKPFIFADKPLIVQYEVNFQDGIDCGGAYIKLLADTDDLILENFYDKTSYIIM

SEQ ID NO: 14808 - protein, 64 aa, Homo sapiens; identical to SEQ ID NO: 4221

SEQ ID NO: 14809 - protein, 818 aa, Homo sapiens
MESEQLFHRGYYRNSYNSITSASSDEELLDGAGVIMDFQTSEDDNLLDGDTAVGTHYTMTNGGSINSSTHLLDLLDEPIPGVGTYDDFHTIDWVREKCKDRERHRRINSKKKESAWEMTKSLYDAWSGWLVVTLTGLASGALAGLIDIAADWMTDLKEGICLSALWYNHEQCCWGSNETTFEERDKCPQWKTWAELIIGQAEGPGSYIMNYIMYIFWALSFAFLAVSLVKVFAPYACGSGIPEIKTILSGFIIRGYLGKWTLMIKTITLVLAVASGLSLGKEGPLVHVACCCGNIFSYLFPKYSTNEAKKREVLSAASAAGVSVAFGAPIGGVLFSLEEVSYYFPLKTLWRSFFAALVAAFVLRSINPFGNSRLVLFYVEYHTPWYLFELFPFILLGVFGGLWGAFFIRANIAWCRRRKSTKFGKYPVLEVIIVAAITAVIAFPNPYTRLNTSELIKELFTDCGPLESSSLCDYRNDMNASKIVDDIPDRPAGIGVYSAIWQLCLALIFKIIMTVFTFGIKVPSGLFIPSMAIGAIAGRIVGIAVEQLAYYHHDWFIFKEWCEVGADCITPGLYAMVGAAACLGGVTRMTVSLVVIVFELTGGLEYIVPLMAAVMTSKWVGDAFGREGIYEAHIRLNGYPFLDAKEEFTHTTLAADVMRPRRNDPPLAVLTQDNMTVDDIENMINETSYNGFPVIMSKESQRLVGFALRRDLTIAIESARKKQEGIVGSSRVCFAQHTPSLPAESPRPLKLRSILDMSPFTVTDHTPMEIVVDIFRKLGLRQCLVTHNGRLLGIITKKDILRHMAQTANQDPASIMFN

SEQ ID NO: 14810 - protein, 895 aa, Homo sapiens
MERASERRTASALFAGFRALGLFSNDIPHVVRFSALKRRFYVTTCVGKSFHTYDVQKLSLVAVSNSVPQDICCMAADGRLVFAAYGNVFSAFARNKEIVHTFKGHKAEIHFLQPFGDHIISVDTDGILIIWHIYSEEEYLQLTFDKSVFKISAILHPSTYLNKILLGSEQGSLQLWNVKSNKLLYTFPGWKVGVTALQQAPAVDVVAIGLMSGQVIIHNIKFNETLMKFRQDWGPITSISFRTDGHPVMAAGSPCGHIGLWDLEDKKLINQMRNAHSTAIAGLTFLHREPLLVTNGADNALRIWIFDGPTGEGRLLRFRMGHSAPLTNIRYYGQNGQQILSASQDGTLQSFSTVHEKFNKSLGHGLINKKRVKRKGLQNTMSVRLPPITKFAAEEARESDWDGIIACHQGKLSCSTWNYQKSTIGAYFLKPKELKKDDITATAVDITSCGNFAVIGLSSGTVDVYNMQSGIHRGSFGKDQAHKGSVRGVAVDGLNQLTVTTGSEGLLKFWNFKNKILIHSVSLSSSPNIMLLHRDSGILGLALDDFSISVLDIETRKIVREFSGHQGQINDMAFSPDGRWLISAAMDCSIRTWDLPSGCLIDCFLLDSAPLNVSMSPTGDFLATSHVDHLGIYLWSNISLYSVVSLRPLPADYVPSIVMLPGTCQTQDVEVSEETVEPSDELIEYDSPEQLNEQLVTLSLLPESRWKNLLNLDVIKKKNKPKEPPKVPKSAPFFIPTIPGLVPRYAAPEQNNDPQQSKVVNLGVLAQKSDFCLKLEEGLVNNKYDTALNLLKESGPSGIETELRSLSPDCGGSIEVMQSFLKMIGMMLDRKRDFELAQAYLALFLKLHLKMLPSEPVLLEEITNLSSQVEENWTHLQSLFNQSMCILNYLKSALL

SEQ ID NO: 14811 - protein, 1205 aa, Homo sapiens
MKLKEVDRTAMQAWSPAQNHPIYLATGTSAQQLDATFSTNASLEIFELDLSDPSLDMKSCATFSSSHRYHKLIWGPYKMDSKGDVSGVLIAGGENGNIILYDPSKIIAGDKEVVIAQNDKHTGPVRALDVNIFQTNLVASGANESEIYIWDLNNFATPMTPGAKTQPPEDISCIAWNRQVQHILASASPSGRATVWDLRKNEPIIKVSDHSNRMHCSGLAWHPDVATQMVLASEDDRLPVIQMWDLRFASSPLRVLENHARGILAIAWSMADPELLLSCGKDAKILCSNPNTGEVLYELPTNTQWCFDIQWCPRNPAVLSAASFDGRISVYSIMGGSTDGLRQKQVDKLSSSFGNLDPFGTGQPLPPLQIPQQTAQHSIVLPLKKPPKWIRRPVGASFSFGGKLVTFENVRMPSHQGAEQQQQQHHVFISQVVTEKEFLSRSDQLQQAVQSQGFINYCQKKIDASQTEFEKNVWSFLKVNFEDDSRGKYLELLGYRKEDLGKKIALALNKVDGANVALKDSDQVAQSDGEESPAAEEQLLGEHIKEEKEESEFLPSSGGTFNISVSGDIDGLITQALLTGNFESAVDLCLHDNRMADAIILAIAGGQELLARTQKKYFAKSQSKITRLITAVVMKNWKEIVESCDLKNWREALAAVLTYAKPDEFSALCDLLGTRLENEGDSLLQTQACLCYICAGNVEKLVACWTKAQDGSHPLSLQDLIEKVVILRKAVQLTQAMDTSTVGVLLAAKMSQYANLLAAQGSIAAALAFLPDNTNQPNIMQLRDRLCRAQGEPVAGHESPKIPYEKQQLPKGRPGPVAGHHQMPRVQTQQYYPHGENPPPPGFIMHGNVNPNAAGQLPTSPGHMHTQVPPYPQPQPYQPAQPYPFGTGGSAMYRPQQPVAPPTSNAYPNTPYISSASSYTGQSQLYAAQHQASSPTSSPATSFPPPPSSGASFQHGGPGAPPSSSAYALPPGTTGPQNGWNDPPALNRVPKKKKMPENFMPPVPITSPIMNPLGDPQSQMLQQQPSAPVPLSSQSSFPQPHLPGGQPFHGVQQPLGQTGMPPSFSKPNIEGAPGAPIGNTFQHVQSLPTKKITKKPIPDEHLILKTTFEDLIQRCLSSATDPQTKRKLDDASKRLEFLYDKLREQTLSPTITSGLHNIARSIETRNYSEGLTMHTHIVSTSNFSETSAFMPVLKVVLTQANKLGV

SEQ ID NO: 14812 - protein, 641 aa, Homo sapiens
MGPERTGAAPLPLLLVLALSQGILNCCLAYNVGLPEAKIFSGPSSEQFGYAVQQFINPKGNWLLVGSPWSGFPENRMGDVYKCPVDLSTATCEKLNLQTSTSIPNVTEMKTNMSLGLILTRNMGTGGFLTCGPLWAQQCGNQYYTTGVCSDISPDFQLSASFSPATQPCPSLIDVVVVCDESNSIYPWDAVKNFLEKFVQGLDIGPTKTQVGLIQYANNPRVVFNLNTYKTKEEMIVATSQTSQYGGDLTNTFGAIQYARKYAYSAASGGRRSATKVMVVVTDGESHDGSMLKAVIDQCNHDNILRFGIAVLGYLNRNALDTKNLIKEIKAIASIPTERYFFNVSDEAALLEKAGTLGEQIFSIEGTVQGGDNFQMEMSQVGFSADYSSQNDILMLGAVGAFGWSGTIVQKTSHGHLIFPKQAFDQILQDRNHSSYLGYSVAAISTGESTHFVAGAPRANYTGQIVLYSVNENGNITVIQAHRGDQIGSYFGSVLCSVDVDKDTITDVLLVGAPMYMSDLKKEEGRVYLFTIKEGILGQHQFLEGPEGIENTRFGSAIAALSDINMDGFNDVIVGSPLENQNSGAVYIYNGHQGTIRTKYSQLLCTIISCQTCSFRKSWDPMEPLGAISSTLGGPWMAMEI

SEQ ID NO: 14813 - protein, 1057 aa, Homo sapiens
MACPALGLEALQPLQPEPPPEPAFSEAQKWIEQVTGRSFGDKDFRTGLENGILLCELLNAIKPGLVKKINRLPTPIAGLDNIILFLRGCKELGLKESQLFDPSDLQDTSNRVTVKSLDYSRKLKNVLVTIYWLGKAANSCTSYSGTTLNLKEFEGLLAQMRKDTDDIESPKRSIRDSGYIDCWDSERSDSLSPPRHGRDDSFDSLDSFGSRSRQTPSPDVVLRGSSDGRGSDSESDLPHRKLPDVKKDDMSARRTSHGEPKSAVPFNQYLPNKSNQTAYVPAPLRKKKAEREEYRKSWSTATSPLGGERPFRYGPRTPVSDDAESTSMFDMRCEEEAAVQPHSRARQEQLQLINNQLREEDDKWQDDLARWKSRRRSVSQDLIKKEEERKKMEKLLAGEDGTSERRKSIKTYREIVQEKERRERELHEAYKNARSQEEAEGILQQYIERFTISEAVLERLEMPKILERSHSTEPNLSSFLNDPNPMKYLRQQSLPPPKFTATVETTIARASVLDTSMSAGSGSPSKTVTPKAVPMLTPKPYSQPKNSQDVLKTFKVDGKVSVNGETVHREEEKERECPTVAPAHSLTKSQMFEGVARVHGSPLELKQDNGSIEINIKKPNSVPQELAATTEKTEPNSQEDKNDGGKSRKGNIELASSEPQHFTTTVTRCSPTVAFVEFPSSPQLKNDVSEEKDQKKPENEMSGKVELVLSQKVVKPKSPEPEATLTFPFLDKMPEANQLHLPNLNSQVDSPSSEKSPVMTPQFKFWAWDPEEERRRQEKWQQEQERLLQERYQKEQDKLKEEWEKAQKEVEEEERRYYEEERKIIEDTVVPFTVSSSSADQLSTSSSMTEGSGTMNKIDLGNCQDEKQDRRWKKSFQGDDSDLLLKTRESDRLEEKGSLTEGALAHSGNPVSKGVHEDHQLDTEAGAPHCGTNPQLAQDPSQNQQTSNPTHSSEDVKPKTLPLDKSINHQIESPSERRKSISGKKLCSSCGLPLGKGAAMIIETLNLYFHIQCFRCGICKGQLGDAVSGTDVRIRNGLLNCNDCYMRSRSAGQPTTL

SEQ ID NO: 14814 - protein, 339 aa, Homo sapiens
MYGKGKSNSSAVPSDSQAREKLALYVYEYLLHVGAQKSAQTFLSEIRWEKNITLGEPPGFLHSWWCVFWDLYCAAPERRETCEHSSEAKAFHDYPFMSPRYPGGPRPPLRIPNQALGGVPGSQPLLPSGMDPTRQQGHPNMGGPMQRMTPPRGMVPLGPQSDPWLSLQNYGGAMRPPLNALGGPGMPGMNMGPGGGRPWPNPTNANSIPYSSASPGNYVGPPGGGGPPGTPIMPSPADSTNSGDNMYTLMNAVPPGPNRPNFPMGPGSDGPMGGLGGMESHHMNGSLGSGDMDSISKNSPNNMSLSNQPGTPRDDGEMGGNFLNPFQSESYSPSMTMSV

SEQ ID NO: 14815 - protein, 79 aa, Homo sapiens
MLKVSAVLCVCAAAWCSQSLAAAAAVAAAGGRSDGGNFLDDKQWLTTISQYDKEVGQWNKFRDDDYFRTWSPGKPFDQG

SEQ ID NO: 14816 - protein, 71 aa, Homo sapiens
MLKVSAVLCVCAAAWCSQSLAAAAAVAAAGGRSDGGNFLDDKQWLTTISQYDKEVGQWNKFRDDERSRSRP

SEQ ID NO: 14817 - protein, 1079 aa, Homo sapiens
MGQQVGRVGEAPGLQQPQPRGIRGSSAARPSGRRRDPAGRTTETGFNIFTQHDHFASCVEDGFEGDKTGGSSPEALHRPYGCDVEPQALNEAIRWSSKENLLGATESDPNLFVALYDFVASGDNTLSITKGEKLRVLGYNQNGEWSEVRSKNGQGWVPSNYITPVNSLEKHSWYHGPVSRSAAEYLLSSLINGSFLVRESESSPGQLSISLRYEGRVYHYRINTTADGKVYVTAESRFSTLAELVHHHSTVADGLVTTLHYPAPKCNKPTVYGVSPIHDKWEMERTDITMKHKLGGGQYGEVYVGVWKKYSLTVAVKTLKEDTMEVEEFLKEAAVMKEIKHPNLVQLLGVCTLEPPFYIVTEYMPYGNLLDYLRECNREEVTAVVLLYMATQISSAMEYLEKKNFIHRDLAARNCLVGENHVVKVADFGLSRLMTGDTYTAHAGAKFPIKWTAPESLAYNTFSIKSDVWAFGVLLWEIATYGMSPYPGIDLSQVYDLLEKGYRMEQPEGCPPKVYELMRACWKWSPADRPSFAETHQAFETMFHDSSISEEVAEELGRAASSSSVVPYLPRLPILPSKTRTLKKQVENKENIEGAQDATENSASSLAPGFIRGAQASSGSPALPRKQRDKSPSSLLEDAKETCFTRDRKGGFFSSFMKKRNAPTPPKRSSSFREMENQPHKKYELTGLPEQDRMAMTLPRNCQRSKLQLERTVSTSSQPEENVDRANDMLPKKSEESAAPSRERPKAKLLPRGATALPLRTPSGDLAITEKDPPGVGVAGVAAAPKGKEKNGGARLGMAGVPEDGEQPGWPSPAKAAPVLPTTHNHKVPVLISPTLKHTPADVQLIGTDSQGNKFKLLSEHQVTSSGDKDRPRRVKPKCAPPPPPVMRLLQHPSICSDPTEEPTALTAGQSTSETQEGGKKAALGAVPISGKAGRPVMPPPQVPLPTSSISPAKMANGTAGTKVALRKTKQAAEKISADKISKEALLECADLLSSALTEPVPNSQLVDTGHQLLDYCSGYVDCIPQTRNKFAFREAVSKLELSLQELQVSSAAAGVPGTNPVLNNLLSCVQEISDVVQR

SEQ ID NO: 14818 - protein, 78 aa, Homo sapiens
MGPEALSSLLLLLLVASGDADMKGHFDPAKCRYALGMQDRTIPDSDISASSSWSDSTAARHSRLESSDGDGAWCPAGS

SEQ ID NO: 14819 - protein, 80 aa, Homo sapiens
VRAGARLVEVALCSFTVTCLEVMRRFLLLYATQQGQAKAIAEEICEQAVVHGFSADLHCISESDKVSVIQNTPTFAMGGR

SEQ ID NO: 14820 - protein, 134 aa, Homo sapiens
MEGKWLLCMLLVLGTAIVEAHDGHDDDVIDIEDDLDDVIEEVEDSKPDTTAPPSSPKVTYKAPVPTGEVYFADSFDRGTLSGWILSKAKKDDTDDEIAKYDGKWEVEEMKESKLPGDKGLVLMSRAKHHAISAK

SEQ ID NO: 14821 - protein, 341 aa, Homo sapiens
MGRRRRLCLQLYFLWLGCVVLWAQGTAGQPQPPPPKPPRPQPPPQQVRSATAGSEGGFLAPEYREEGAAVASRVRRRGQQDVLRGPNVCGSRFHSYCCPGWKTLPGGNQCIVPICRNSCGDGFCSRPNMCTCSSGQISSTCGSKSIQQCSVRCMNGGTCADDHCQCQKGYIGTYCGQPVCENGCQNGGRCIGPNRCACVYGFTGPQCERDYRTGPCFTQVNNQMCQGQLTGIVCTKTLCCATIGRAWGHPCEMCPAQPQPCRRGFIPNIRTGACQDVDECQAIPGICQGGNCINTVGSFECRCPAGHKQSETTQKCEVHVDKAQAGARCPCVILPSRLYLR

SEQ ID NO: 14822 - protein, 73 aa, Homo sapiens
MGPEALSSLLLLLLVASGDADMKGHFDPAKCRYALGMQDRTIPDSDISASSSWSDSTAARHSRLESSDGDGAW

SEQ ID NO: 14823 - protein, 510 aa, Homo sapiens
MLLWVQQALLALLLPTLLAQGEARRSRNTTRPALLRLSDYLLTNYRKGVRPVRDWRKPTTVSIDVIVYAILNVDEKNQVLTTYIWYRQYWTDEFLQWNPEDFDNITKLSIPTDSIWVPDILINEFVDVGKSPNIPYVYIRHQGEVQNYKPLQVVTACSLDIYNFPFDVQNCSLTFTSWLHTIQDINISLWRLPEKVKSDRSVFMNQGEWELLGVLPYFREFSMESSNYYAEMKFYVVIRRRPLFYVVSLLLPSIFLMVMDIVGFYLPPNSGERVSFKITLLLGYSVFLIIVSDTLPATAIGTPLIGKAPPGSRAQSGEKPAPSHLLHVSLASALGCTGVYFVVCMALLVISLAETIFIVRLVHKQDLQQPVPAWLRHLVLERIAWLLCLREQSTSQRPPATSQATKTDDCSAMGNHCSHMGGPQDFEKSPRDRCSPPPPPREASLAVCGLLQELSSIRQFLEKRDEIREVARDWLRVGSVLDKLLFHIYLLAVLAYSITLVMLWSIWQYA

SEQ ID NO: 14824 - protein, 438 aa, Homo sapiens
MAAAVRQDLAQLMNSSGSHKDLAGKYRQILEKAIQLSGAEQLEALKAFVEAMVNENVSLVISRQLLTDFCTHLPNLPDSTAKEIYHFTLEKIQPRVISFEEQVASIRQHLASIYEKEEDWRNAAQVLVGIPLETGQKQYNVDYKLETYLKIARLYLEDDDPVQAEAYINRASLLQNESTNEQLQIHYKVCYARVLDYRRKFIEAAQRYNELSYKTIVHESERLEALKHALHCTILASAGQQRSRMLATLFKDERCQQLAAYGILEKMYLDRIIRGNQLQEFAAMLMPHQKATTADETGSLHFAQAGLELLGSSSSSHLGFPKCWDDRGSSILDRAVIEHNLLSASKLYNNITFEELGALLEIPAAKAEKIASQMITEGRMNGFIDQIDGIVHFETREALPTWDKQIQSLCFQVNNLLEKISQTAPEWTAQAMEAQMAQ

SEQ ID NO: 14825 - protein, 312 aa, Homo sapiens
MAAPLELSCWGGGWGLPSVHSESLVVMAYAKFSGAPLKVNVIDNTWRGSRGDVPILTTEDDMVSQPAKILNFLRKQKYNADYELSAKQGADTLAYIALLEEKLLPAVLHTFWVESDNYFTVTKPWFASQIPFPLSLILPGRMSKGALNRILLTRGQPPLYHLREVEAQIYRDAKECLNLLSNRLGTSQFFFGDTPSTLDAYVFGFLAPLYKVRFPKVQLQEHLKQLSNLCRFCDDILSSYFRLSLGGISPAGQETVDANLQKLTQLVNKESNLIEKMDDNLRQSPQLPPRKLPTLKLTPAEEENNSFQRLSP

SEQ ID NO: 14826 - protein, 894 aa, Homo sapiens
MPYTTYLVEKGASHSFVAEAKPPTVTMPRIKALMTGSLPGFVDVIRNLNSPALLEDSVIRQAKAAGKRIVFYGDETWVKLFPKHFVEYDGTTSFFVSDYTEVDNNVTRHLDKVLKRGDWDILILHYLGLDHIGHISGPNSPLIGQKLSEMDSVLMKIHTSLQSKERETPLPNLLVLCGDHGMSETGSHGASSTEEVNTPLILISSAFERKPGDIRHPKHVQQTDVAATLAIALGLPIPKDSVGSLLFPVVEGRPMREQLRFLHLNTVQLSKLLQENVPSYEKDPGFEQFKMSERLHGNWIRLYLEEKHSEVLFNLGSKVLRQYLDALKTLSLSLSAQVAQYDIYSMMVGTVVVLEVLTLLLLSVPQALRRKAELEVPLSSPGFSLLFYLVILVLSAVHVIVCTSAESSCYFCGLSWLAAGGVMVLASALLCVIVSVLTNVLVGGNTPRKNPMHPSSRWSELDLLILLGTAGHVLSLGASSFVEEEHQTWYFLVNTLCLALSQETYRNYFLGDDGEPPCGLCVEQGHDGATAAWQDGPGCDVLERDKGHGSPSTSEVLRGREKWMVLASPWLILACCRLLRSLNQTGVQWAHRPDLGHWLTSSDHKAELSVLAALSLLVVFVLVQRGCSPVSKAALALGLLGVYCYRAAIGSVRFPWRPDSKDISKGIIEARFVYVFVLGILFTGTKDLLKSQVIAADFKLKTVGLWEIYSGLVLLAALLFRPHNLPVLAFSLLIQTLMTKFIWKPLRHDAAEITVMHYWFGQAFFYFQGNSNNIATVDISAGFVGLDTYVEIPAVLLTAFGTYAGPVLWASHLVHFLSSETRSGSALSHACFCYALICSIPVFTYIVLVTSLRYHLFIWSVFSPKLLYEGMHLLITAAVCVFFTAMDQTRLTQS

SEQ ID NO: 14827 - protein, 113 aa, Homo sapiens
MSLPSSRAARVPGPSGSLCALLALLLLLTPPGPLASAGPVSAVLTELRCTCLRVTLRVNPKTIGKLQVFPAGPQCSKVEVVASLKNGKQVCLDPEAPFLKKVIQKILDRYLSL

SEQ ID NO: 14828 - protein, 1056 aa, Homo sapiens
MACPALGLEALQPLQPEPPPEPAFSEAQKWIEQVTGRSFGDKDFRTGLENGILLCELLNAIKPGLVKKINRLPTPIAGLDNIILFLRGCKELGLKESQLFDPSDLQDTSNRVTVKSLDYSRKLKNVLVTIYWLGKAANSCTSYSGTTLNLKEFEGLLAQMRKDTDDIESPKRSIRDSGYIDCWDSERSDSLSPPRHGRDDSFDSLDSFGSRSRQTPSPDVVLRGSSDGRGSDSESDLPHRKLPDVKKDDMSARRTSHGEPKSAVPFNQYLPNKSNQTAYVPAPLRKKKAEREEYRKSWSTATSPLGGERPFRYGPRTPVSDDAESTSMFDMRCEEEAAVQPHSRARQEQLQLINNQLREEDDKWQDDLARWKSRRRSVSQDLIKKEEERKKMEKLLAGEDGTSERRKSIKTYREIVQEKERRERELHEAYKNARSQEEAEGILQQYIERFTISEAVLERLEMPKILERSHSTEPNLSSFLNDPNPMKYLRQQSLPPPKFTATVETTIARASVLDTSMSAGSGSPSKTVTPKAVPMLTPKPYSQPKNSQDVLKTFKVDGKVSVNGETVHREEEKERECPTVAPAHSLTKSQMFEGVARVHGSPLELKQDNGSIEINIKKPNSVPQELAATTEKTEPNSQEDKNDGGKSRKGNIELASSEPQHFTTTVTRCSPTVAFVEFPSSPQLKNDVSEEKDQKKPENEMSGKVELVLSQKVVKPKSPEPEATLTFPFLDKMPEANQLHLPNLNSQVDSPSSEKSPVMTPFKFWAWDPEEERRRQEKWQQEQERLLQERYQKEQDKLKEEWEKAQKEVEEEERRYYEEERKIIEDTVVPFTVSSSSADQLSTSSSMTEGSGTMNKIDLGNCQDEKQDRRWKKSFQGDDSDLLLKTRESDRLEEKGSLTEGALAHSGNPVSKGVHEDHQLDTEAGAPHCGTNPQLAQDPSQNQQTSNPTHSSEDVKPKTLPLDKSINHQIESPSERRKSISGKKLCSSCGLPLGKGAAMIIETLNLYFHIQCFRCGICKGQLGDAVSGTDVRIRNGLLNCNDCYMRSRSAGQPTTL

SEQ ID NO: 14829 - protein, 288 aa, Homo sapiens
MKENVASATVFTLLLFLNTCLLNGQLPPGKPEIFKCRSPNKETFTCWWRPGTDGGLPTNYSLTYHREGETLMHECPDYITGGPNSCHFGKQYTSMWRTYIMMVNATNQMGSSFSDELYVDVTYIVQPDPPLELAVEVKQPEDRKPYLWIKWSPPTLIDLKTGWFTLLYEIRLKPEKAAEWEIHFAGQQTEFKILSLHPGQKYLVQVRCKPDHGYWSAWSPATFIQIPSDFTMNDTTVWISVAVLSAVICLIIVWAVALKGYSMVTCIFPPVPGPKIKGFDAHLLEVTP

SEQ ID NO: 14830 - protein, 542 aa, Homo sapiens
MDLGAITKYSALHAKPNGLILQYGTAGFRTKAEHLDHVMFRMGLLAVLRSKQTKSTIGVMVTASHNPEEDNGVKLVDPLGEMLAPSWEEHATCLANAEEQDMQRVLIDISEKEAVNLQQDAFVVIGRDTRPSSEKLSQSVIDGVTVLGGQFHDYGLLTTPQLHYMVYCRNTGGRYGKATIEGYYQKLSKAFVELTKQASCSGDEYRSLKVDCANGIGALKLREMEHYFSQGLSVQLFNDGSKGKLNHLCGADFVKSHQKPPQGMEIKSNERCCSFDGDADRIVYYYHDADGHFHLIDGDKIATLISSFLKELLVEIGESLNIGVVQTAYANGSSTRYLEEVMKVPVYCTKTGVKHLHHKAQEFDIGVYFEANGHGTALFSTAVEMKIKQSAEQLEDKKRKAAKMLENIIDLFNQAAGDAISDMLVIEAILALKGLTVQQWDALYTDLPNRQLKVQVADRRVISTTDAERQAVTPPGLQEAINDLVKKYKLSRAFVRPSGTEDVVRVYAEADSQESADHLAHEVSLAVFQLAGGIGERPQPGF

SEQ ID NO: 14831 - protein, 414 aa, Homo sapiens
MEKDKHSHFYNQKSDFRIEHSMLEELENKLIHSRKTERAKIQQQLAKIHNNVKKLQHQLKDVKPTPDFVEKLREMMEEIENAINTFKEEQRLIYEELIKEEKTTNNELSAISRKIDTWALGNSETEKAFRAISSKVPVDKVTPSTLPEEVLDFEKFLQQTGGRQGAWDDYDHQNFVKVRNKHKGKPTFMEEVLEHLPGKTQDEVQQHEKWYQKFLALEERKKESIQIWKTKKQQKREEIFKLKEKADNTPVLFHNKQEDNQKQKEEQRKKQKLAVEAWKKQKSIEMSMKCASQLKEEEEKEKKHQKERQRQFKLKLLLESYTQQKKEQEEFLRLEKEIREKAEKAEKRKNAADEISRFQERVENNVSRDPSRLYKPTKGWEERTKKIGPTGSGPLLHIPHRAIPTWRQGIQRRV

SEQ ID NO: 14832 - protein, 23 aa, Homo sapiens
MTSIFHFAIIFMLILQIRIQLSE

SEQ ID NO: 14833 - protein, 105 aa, Homo sapiens
MKRSLQALYCQLLTVLLTVCCMKRKKKTANPENNLSYWNNTITMDYFNRHAVELPREIQSLETSEDQLSEPRSPANGDYRDTGMVLVNPFCQETLFVGNDQVSEI

SEQ ID NO: 14834 - protein, 201 aa, Homo sapiens
MRLLLALLGVLLSVPGPPVLSLEASEEVELEPCLAPSLEQQEQELTVALGQPVRLCCGRAERGGHWYKEGSRLAPAGRVRGWRGRLEIASFLPEDAGRYLCLARGSMIVLQNLTLITGDSLTSSNDDEDPKSHRDPSNRHSYPQQAPYWTHPQRMEKKLHAVPAGNTVKFRCPAAGNPTPTIRWLKDGQAFHGENRIGGIR

SEQ ID NO: 14835 - protein, 575 aa, Homo sapiens
MKITSTSCICPVLVCLCFVQRCYGTAHHSSIKVMRNQTKHIEGETEVHHRPKRGWVWNQFFVLEEHMGPDPQYVGKLHSNSDKGDGSVKYILTGEGAGTIFIIDDTTGDIHSTKSLDREQKTHYVLHAQAIDRRTNKPLEPESEFIIKVQDINDNAPKFTDGPYIVTVPEMSDMGTSVLQVTATDADDPTYGNSARVVYSILQGQPYFSVDPKTGVIRTALHNMDREAREHYSVVIQAKDMAGQVGGLSGSTTVNITLTDVNDNPPRFPQKHYQLYVPESAQVGSAVGKIKANDADTGSNADMTYSIINGDGMGIFSISTDKETREGILSLKKPLNYEKKKSYTLNIEGANTHLDFRFSHLGPFKDATMLKIIVGDVDEPPLFSMPSYLMEVYENAKIGTVVGTVLAQDPDSTNSLVRYFINYNVEDDRFFNIDANTGTIRTTKVLDREETPWYNITVTASEIDNPDLLSHVTVGIRVLDVNDNPPELAREYDIIVCENSKPGQVIHTISATDKDDFANGPRFNFFLDERLPVNPNFTLKDNEAAAAPSPSGFVHAREMGVCGPAMQKPSCPRLV

SEQ ID NO: 14836 - protein, 736 aa, Homo sapiens
MGSPLRFDGRVVLVTGAGAGLGRAYALAFAERGALVVVNDLGGDFKGVGKGSLAADKVVEEIRRRGGKAVANYDSVEEGEKVVKTALDAFGRIDVVVNNAGILRDRSFARISDEDWDIIHRVHLRGSFQVTRAAWEHMKKQKYGRIIMTSSASGIYGNFGQANYSAAKLGLLGLANSLAIEGRKSNIHCNTIAPNAGSRMTQTVMPEDLVEALKPEYVAPLVLWLCHESCEENGGLFEVGAGWIGKLRWERTLGAIVRQKNHPMTPEAVKANWKKICDFENASKPQSIQESTGSIIEVLSKIDSEGGVSANHTSRATSTATSGFAGAIGQKLPPFSYAYTELEAIMYALGVGASIKDPKDLKFIYEGSSDFSCLPTFGVIIGQKSMMGGGLAEIPGLSINFAKVLHGEQYLELYKPLPRAGKLKCEAVVADVLDKGSGVVIIMDVYSYSEKELICHNQFSLFLVGSGGFGGKRTSDKVKVAVAIPNRPPDAVLTDTTSLNQAALYRLSGDWNPLHIDPNFASLAGFDKPILHGLCTFGFSARRVLQQFADNDVSRFKAIKARFAKPVYPGQTLQTEMWKEGNRIHFQTKVQETGDIVISNAYVDLAPTSGTSAKTPSEGGKLQSTFVFEEIGRRLKDIGPEVVKKVNAVFEWHITKGGNIGAKWTIDLKSGSGKVYQGPAKGAADTTIILSDEDFMEVVLGKLDPQKAFFSGRLKARGNIMLSQKLQMILKDYAKL

SEQ ID NO: 14837 - protein, 118 aa, Homo sapiens
MFHWQATIMGPNDSPYQGGVFFLTIHFPTDYPFKPPKVAFTTRIYHPNINSNGSICLDILRSQWSPALTISKVLLSICSLLCDPNPDDPLVPEIARIYKTDREKYNRIAREWTQKYAM

SEQ ID NO: 14838 - protein, 218 aa, Homo sapiens
MVQHWPETVCEKIQNDCRDPPDYWTIHGLWPDKSEGCNRSWPFNLEEIKDLLPEMRAYWPDVIHSFPNRSRFWKHEWEKHGTCAAQVDALNSQKKYFGRSLELYRELDLNSVLLKLGIKPSINYYQVADFKDALARVYGVIPKIQCLPPSQDEEVQTIGQIELCLTKQDQQLQNCTEPGEQPSPKQEVWLANGAAESRGLRVCEDGPVFYPPPKKTKH

SEQ ID NO: 14839 - protein, 63 aa, Homo sapiens
MLKVSAVLCVCAAAWCSQSLAAAAAVAAAGGRSDGGNFLDDKQWLTTISQYDKEVGQWNKFRD

SEQ ID NO: 14840 - protein, 347 aa, Homo sapiens
MAESVERLQQRVQELERELAQERSLQVPRSGDGGGGRVRIEKMSSEVVDSNPYSRLMALKRMGIVSDYEKIRTFAVAIVGVGGVGSVTAEMLTRCGIGKLLLFDYDKVELANMNRLFFQPHQAGLSKVQAAEHTLRNINPDVLFEVHNYNITTVENFQHFMDRISNGGLEEGKPVDLVLSCVDNFEARMTINTACNELGQTWMESGVSENAVSGHIQLIIPGESACFACAPPLVVAANIDEKTLKREGVCAASLPTTMGVVAGILVQNVLKFLLNFGTVSFYLGYNAMQDFFPTMSMKPNPQCDDRNCRKQQEEYKKKVAALPKQEVIQEEEEIIHEDNEWARRFCH

SEQ ID NO: 14841 - protein, 1299 aa, Homo sapiens
MWPSQLLIFMMLLAPIIHGGKHSERHPALAAPLRHAERSPGGALPPRHLLQQPAAERTAAHRGQGPRGATRGVRGPGAQGAQIAAQAFSRAPIPMAVVRRELSCESYPIELRCPGTDVIMIESANYGRTDDKICDSDPAQMENIRCYLPDAYKIMSQRCNNRTQCAVVAGPDVFPDPCPGTYKYLEVQYECVPYKVEQKVFLCPGLLKGVYQSEHLFESDHQSGAWCKDPLQASDKIYYMPWTPYRTDTLTEYSSKDDFIAGRPTTTYKLPHRVDGTGFVVYDGALFFNKERTRNIVKFDLRTRIKSGEAIIANANYHDTSPYRWGGKSDIDLAVDENGLWVIYATEQNNGKIVISQLNPYTLRIEGTWDTAYDKRSASNAFMICGILYVVKSVYEDDDNEATGNKIDYIYNTDQSKDSLVDVPFPNSYQYIAAVDYNPRDNLLYVWNNYHVVKYSLDFGPLDSRSGQAHHGQVSYISPPIHLDSELERPSVKDISTTGPLGMGSTTTSTTLRTTTLSPGRSTTPSVSGRRNRSTSTPSPAVEVLDDMTTHLPSASSQIPALEESCEAVEAREIMWFKTRQGQIAKQPCPAGTIGVSTYLCLAPDGIWDPQGPDLSNCSSPWVNHITQKLKSGETAANIARELAEQTRNHLNAGDITYSVRAMDQLVGLLDVQLRNLTPGGKDSAARSLNKLQKRERSCRAYVQAMVETVNNLLQPQALNAWRDLTTSDQLRAATMLLHTVEESAFVLADNLLKTDIVRENTDNIKLEVARLSTEGNLEDLKFPENMGHGSTIQLSANTLKQNGRNGEIRVAFVLYNNLGPYLSTENASMKLGTEALSTNHSVIVNSPVITAAINKEFSNKVYLADPVVFTVKHIKQSEENFNPNCSFWSYSKRTMTGYWSTQGCRLLTTNKTHTTCSCNHLTNFAVLMAHVEVKHSDAVHDLLLDVITWVGILLSLVCLLICIFTFCFFRGLQSDRNTIHKNLCISLFVAELLFLIGINRTDQPIACAVFAALLHFFFLAAFTWMFLEGVQLYIMLVEVFESEHSRRKYFYLVGYGMPALIVAVSAAVDYRSYGTDKVCWLRLDTYFIWSFIGPATLIIMLNVIFLGIALYKMFHHTAILKPESGCLDNIKSWVIGAIALLCLLGLTWAFGLMYINESTVIMAYLFTIFNSLQGMFIFIFHCVLQKKVRKEYGKCLRTHCCSGKSTESSIGSGKTSGSRTPGRYSTGSQSRIRRMWNDTVRKQSESSFITGDINSSASLNREPYRETSMGVKLNIAYQIGASEQCQGYKCHGYSTTEW

SEQ ID NO: 14842 - protein, 155 aa, Homo sapiens
MAAKVFESIGKFGLALAVAGGVVNSALYNVDAGHRAVIFDRFRGVQDIVVGEGTHFLIPWVQKPIIFDCRSRPRNVPVITGSKDLQNVNITLRILFRPVASQLPRIFTSIGEDYDERVLPSITTEILKSVVARFDAGELITYLPAGQSVLLQLPQ

SEQ ID NO: 14843 - protein, 166 aa, Homo sapiens
MAWLCGSLPVVVAVTAMETAARQECYPELKPVQSINAHPSNCICIKFDPMGKYFATGSADALVSLWDVDELVCVRCFSRLDWPVRTLSFSHDGKMLASASEDHFIDIAEVETGDKLWEVQCESPTFTVAWHPKRPLLAFACDDKDGKYDSSREAGTVKLFGLPNDS

SEQ ID NO: 14844 - protein, 298 aa, Homo sapiens
MESQKEARTLQEPVARPSGASSSQTPNDKERREGGAVPAAAALGAEADDDSADGLWELPVEPAERRPECTRCSRPQKVCLCPFLPAHPLHISTHLYIIQHPAEENKVLRTVPLLAACLPQDKCKVKIGRRFSEERDPELSTVCRKSGTLILYPGAEAANLEEFILDSPVYPSTIIIIDGTWSQAKDIFYKNSLFRHPKQVQLKTSISSQYVIRMQPTNRCLSTLECAAVALSILEKNNYIQETLLRPLQALCSFQLQHGAQIRLSKEHLLKNGLYPKPMPKNKRKLRKMELLMNSVKI

SEQ ID NO: 14845 - protein, 61 aa, Homo sapiens
ALRVTRVSRFGLRTNAAFLAAACSPCLACGSLPSGRGPQERFGEEGGRGLTKRAPRWAQAW

SEQ ID NO: 14846 - protein, 140 aa, Homo sapiens
MAEEPQSVLQLPTSIAAGGEGLTDVSPETTTPEPPSSAAVSPGTEEPAGDTKKKIDILLKAVGDTPIMKTKKWAVERTRTIQGLIDFIKKFLKLVASEQLFIYVNQSFAPSPDQEVGTLYECFGSDGKLVLHYCKSQAWG

SEQ ID NO: 14847 - protein, 142 aa, Homo sapiens
MGPEALSSLLLLLLVASGDADMKGHFDPAKCRYALGMQDRTIPDSDISASSSWSDSTAARHSRLESSDGDGAWCPAGSVFPKEEEYLQVDLQRLHLVALVGTQGRHAGGLGKEFSRSYRLRYSRDGRRWMGWKDRWGQEVIS

SEQ ID NO: 14848 - protein, 890 aa, Homo sapiens
MEYEWKPDEQGLQQILQLLKESQSPDTTIQRTVQQKLEQLNQYPDFNNYLIFVLTKLKSEDEPTRSLSGLILKNNVKAHFQNFPNGVTDFIKSECLNNIGDSSPLIRATVGILITTIASKGELQNWPDLLPKLCSLLDSEDYNTCEGAFGALQKICEDSAEILDSDVLDRPLNIMIPKFLQFFKHSSPKIRSHAVACVNQFIISRTQALMLHIDSFIENLFALAGDEEPEVRKNVCRALVMLLEVRMDRLLPHMHNIVEYMLQRTQDQDENVALEACEFWLTLAEQPICKDVLVRHLPKLIPVLVNGMKYSDIDIILLKGDVEEDETIPDSEQDIRPRFHRSRTVAQQHDEDGIEEEDDDDDEIDDDDTISDWNLRKCSAAALDVLANVYRDELLPHILPLLKELLFHHEWVVKESGILVLGAIAEGCMQGMIPYLPELIPHLIQCLSDKKALVRSITCWTLSRYAHWVVSQPPDTYLKPLMTELLKRILDSNKRVQEAACSAFATLEEEACTELVPYLAYILDTLVFAFSKYQHKNLLILYDAIGTLADSVGHHLNKPEYIQMLMPPLIQKWNMLKDEDKDLFPLLECLSSVATALQSGFLPYCEPVYQRCVNLVQKTLAQAMLNNAQPDQYEAPDKDFMIVALDLLSGLAEGLGGNIEQLVARSNILTLMYQCMQDKMPEVRQSSFALLGDLTKACFQHVKPCIADFMPILGTNLNPEFISVCNNATWAIGEISIQMGIEMQPYIPMVLHQLVEIINRPNTPKTLLENTAITIGRLGYVCPQEVAPMLQQFIRPWCTSLRNIRDNEEKDSAFRGICTMISVNPSGVIQDFIFFCDAVASWINPKDDLRDMFCKILHGFKNQVGDENWRRFSDQFPLPLKERLAAFYGV

SEQ ID NO: 14849 - protein, 74 aa, Homo sapiens
MAEEPQSVLQLPTSIAAGGEGLTDVSPETTTPEPPSSAAVSPGTEEPAGDTKKKIYLCESVLCSFPRPRSWNSL

SEQ ID NO: 14850 - protein, 229 aa, Homo sapiens
MFAIQPGLAEGGQFLGDPPPGLCQPELQPDSNSNFMASAKDANENWHGMPGRVEPILRRSSSESPSDNQAFQAPGSPEEGVRSPPEGAEIPGAEPEKMGGAGTVCSPLEDNGYASSSLSIDSRSSSPEPACGTPRGPGPPDPLLPSVAQAVQHLQVQERYKEQEKEKHHVHLVMYRRLALLQWIRGLQHQLIDQQARLQESFDTILDNRKELIRCLQQRAAPSRPQDQA

SEQ ID NO: 14851 - protein, 120 aa, Homo sapiens
MASSSSLVPDRLRLPLCFLGVFVCYFYYGILQEKITRGKYGEGAKQETFTFALTLVFIQCVINAVFAKIWWIVPGAGSMLPVLSPIWVPWSPAIQHYSLSTTQLRSLVNPASQSQSCSLG

SEQ ID NO: 14852 - protein, 444 aa, Homo sapiens
MRTLSTPSPALICPPNLPGFQNGRGSSTSSSSITGETVAMVHSPPPTRLTHPLIRLASRPQKEQASIDRLPDHSMVQIFSFLPTNQLCRCARVCRRWYNLAWDPRLWRTIRLTGETINVDRALKVLTRRLCQDTPNVCLMLETVTVSGCRRLTDRGLYTIAQCCPELRRLEVSGCYNISNEAVFDVVSLCPNLEHLDVSGCSKVTCISLTREASIKLSPLHGKQISIRYLDMTDCFVLEDEGLHTIAAHCTQLTHLYLRRCVRLTDEGLRYLVIYCASIKELSVSDCRFVSDFGLREIAKLESRLRYLSIAHCGRVTDVGIRYVAKYCSKLRYLNARGCEGITDHGVEYLAKNCTKLKSLDIGKCPLVSDTGLECLALNCFNLKRLSLKSCESITGQGLQIVAANCFDLQTLNVQDCEVSVEALRFVKRHCKRCVIEHTNPAFF

SEQ ID NO: 14853 - protein, 1274 aa, Homo sapiens
MWPSQLLIFMMLLAPIIHAFSRAPIPMAVVRRELSCESYPIELRCPGTDVIMIESANYGRTDDKICDSDPAQMENIRCYLPDAYKIMSQRCNNRTQCAVVAGPDVFPDPCPGTYKYLEVQYECVPYKVEQKVFLCPGLLKGVYQSEHLFESDHQSGAWCKDPLQASDKIYYMPWTPYRTDTLTEYSSKDDFIAGRPTTTYKLPHRVDGTGFVVYDGALFFNKERTRNIVKFDLRTRIKSGEAIIANANYHDTSPYRWGGKSDIDLAVDENGLWVIYATEQNNGKIVISQLNPYTLRIEGTWDTAYDKRSASNAFMICGILYVVKSVYEDDDNEATGNKIDYIYNTDQSKDSLVDVPFPNSYQYIAAVDYNPRDNLLYVWNNYHVVKYSLDFGPLDSRSGQAHHGQVSYISPPIHLDSELERPSVKDISTTGPLGMGSTTTSTTLRTTTLSPGRSTTPSVSGRRNRSTSTPSPAVEVLDDMTTHLPSASSQIPALEESCEAVEAREIMWFKTRQGQIAKQPCPAGTIGVSTYLCLAPDGIWDPQGPDLSNCSSPWVNHITQKLKSGETAANIARELAEQTRNHLNAGDITYSVRAMDQLVGLLDVQLRNLTPGGKDSAARSLNKLQKRERSCRAYVQAMVETVNNLLQPQALNAWRDLTTSDQLRAATMLLHTVEESAFVLADNLLKTDIVRENTDNIKLEVARLSTEGNLEDLKFPENMGHGSTIQLSANTLKQNGRNGEIRVAFVLYNNLGPYLSTENASMKLGTEALSTNHSVIVNSPVITAAINKEFSNKVYLADPVVFTVKHIKQSEENFNPNCSFWSYSKRTMTGYWSTQGCRLLTTNKTHTTCSCNHLTNFAVLMAHVEVKHSDAVHDLLLDVITWVGILLSLVCLLICIFTFCFFRGLQSDRNTIHKNLCISLFVAELLFLIGINRTDQPIACAVFAALLHFFFLAAFTWMFLEGVQLYIMLVEVFESEHSRRKYFYLVGYGMPALIVAVSAAVDYRSYGTDKVCWLRLDTYFIWSFIGPATLIIMLNVIFLGIALYKMFHHTAILKPESGCLDNIKSWVIGAIALLCLLGLTWAFGLMYINESTVIMAYLFTIFNSLQGMFIFIFHCVLQKKVRKEYGKCLRTHCCSGKSTESSIGSGKTSGSRTPGRYSTGSQSRIRRMWNDTVRKQSESSFITGDINSSASLNRGAMANHLISNALLRPHGTNNPYNTLLGEPAVCNNPSVSMYNAQEPYRETSMGVKLNIAYQIGASEQCQGYKCHGYSTTEW

SEQ ID NO: 14854 - protein, 384 aa, Homo sapiens
MALMLSLVLSLLKLGSALGSVPLISITGYVDRDIQLLCQSSGWFPRPTAKWKGPQGQDLSTDSRTNRDMHGLFDVEISLTVQENAGSISCSMRHAHLSREVESRVQIGDTFFEPISWHLATKVLGILCCGLFFGIVGLKIFFSKFQWKIQAELDWRRKHGQAELRDARKHAVEVTLDPETAHPKLCVSDLKTVTHRKAPQEVPHSEKRFTRKSVVASQSFQAGKHYWEVDGGHNKRWRVGVCRDDVDRRKEYVTLSPDHGYWVLRLNGEHLYFTLNPRFISVFPRTPPTKIGVFLDYECGTISFFNINDQSLIYTLTCRFEGLLRPYIEYPSYNEQNGTPIVICPVTQESEKEASWQRASAIPETSNSESSSQATTPFLPRGEM

SEQ ID NO: 14855 - protein, 273 aa, Homo sapiens
MRALPGLLEARARTPRLLLLQCLLAAARPSSADGSAPDSPFTSPPLREEIMANNFSLESHNISLTGSTLYTQYRFTIINSKQMGSYSCFFREEKEQRGTFNFKVPELHGKNKPLISYVGDSTVLTCKCQNCFPLNWTWYSSNGSVKVPVGVQMNKYVINGTYANETKLKITQLLEEDGESYWCRALFQLGESEEHIELVVLSYLVPLKPFLVIVAEVILLVATILLCEKYTQKKKKHSDEGKEFEQIEQLKSDDSNGIENNVPRHRKNESLGQ

SEQ ID NO: 14856 - protein, 124 aa, Homo sapiens
MQKIMHISVLLSPVLWGLIFGVSSNSIQIGGLFPRGADQEYSAFRVGMVQFSTSEFRLTPHIDNLEVANSFAVTNAFCSQFSRGVYAIFGFYDKKSVNTITSFCGTLHVSFITPSFPTDGTHPF

SEQ ID NO: 14857 - protein, 154 aa, Homo sapiens
MGTSHPAFLVLGCLLTGLSLILCQLSLPSILPNENEKVVQLNSSFSLRCFGESEVSWQYPMSEEESSDVEIRNEENNSGLFVTVLEVSSASAAHTGLYTCYYNHTQTEENELEGRHIYIYVPDPDVAFVPLGMTDYLVIVEDDDSAIIPCRTTD

SEQ ID NO: 14858 - protein, 168 aa, Homo sapiens
MEGKWLLCMLLVLGTAIVEAHDGHDDDVIDIEDDLDDVIEEVEDSKPDTTAPPSSPKVTYKAPVPTGEVYFADSFDRGTLSGWILSKAKKDDTDDEIAKYDGKWEVEEMKESKLPGDKGLVLMSRAKHHAISAKLNKPFLFDTKPLIVQYEVNFQNGIECGGAYVKLL

SEQ ID NO: 14859 - protein, 334 aa, Homo sapiens
MLCRLGGRWLRPLPALQLWARDLPLAPVPTSGAKRPTLPVWAVAPVSAVHANGWYEALAASSPVRVAEEVLLGVHAATGLPWWGSILLSTVALRGAVTLPLAAYQHYILAKVENLQPEIKTIARHLNQEVAVRANQLGWSKRDARLTYLKNMRRLISELYVRDNCHPFKATVLVWIQLPMWIFMSFALRNLSTGAAHSEAGFSVQEQLATGGILWFPDLTAPDSTWILPISVGVINLLIVEICALQKIGMSRFQTYITYFVRAMSVLMIPIAATVPSSIVLYWLCSSFVGLSQNLLLRSPGFRQLCRIPSTKSDSETPYKDIFAAFNTKFISRK

SEQ ID NO: 14860 - protein, 187 aa, Homo sapiens
MALLSRPALTLLLLLMAAVVRCQEQAQTTDWRATLKTIRNGVHKIDTYLNAALDLLGGEDGLCQYKCSDGSKPFPRYGYKPSPPNGCGSPLFGLNIGIPSLTKCCNQHDRCYETCGKSKNDCDEEFQYCLSKICRDVQKTLGLTQHVQACETTVELLFDSVIHLGCKPYLDSQRAACRCHYEEKTDL

SEQ ID NO: 14861 - protein, 98 aa, Homo sapiens
MDRLKSHLTVCFLPSVPFLILVSTLATAKSVTNSTLNGTNVVLGSVPVIIARTDHIIVKEGNSALINCSVYGIPDPQFKWYNSIGKLLKEEEDEKERG

SEQ ID NO: 14862 - protein, 150 aa, Homo sapiens
MTILGTTFGMVFSLLQVVSGESGYAQNGDLEDAELDDYSFSCYSQLEVNGSQHSLTCAFEDPDVNITNLEFEICGALVEVKCLNFRKLQEIYFIETKKFLLIGKSNICVKVGEKSLTCKKIDLTTIGKKLYIKVWLSLLGYLKTLCLDIL

SEQ ID NO: 14863 - protein, 174 aa, Homo sapiens
MKTGHFEIVTMLLATMILVDIFQVKAEVLDMADNAFDDEYLKCTDRMEIKYVPQLLKEEKASHQQLDTVWENAKAKWAARKTQIFLPMNFKDNHGIALMAYISEAQEQTPFYHLFSEAVKMAGQSREDYIYGFQFKAFHFYLTRALQLLRKPCEASSKTVVYRTSQGTSFTFGG

SEQ ID NO: 14864 - protein, 417 aa, Homo sapiens
MGDEDKRITYEDSEPSTGMNYTPSMHQEAQEETVMKLKGIDANEPTEGSILLKSSEKKLQETPTEANHVQRLRQMLACPPHGLLDRVITNGMLLAGFLIRNIPVINDNVQIKHKWSSSLRSIALSIILVRAGLGLDSKALKKLKGVCVRLSMGPCIVEACTSALLAHYLLGLPWQWGFILGFVLGAVSPAVVVPSMLLLQGGGYGVEKGVPTLLMAAGSFDDILAITGFNTCLGIAFSTGSTVFNVLRGVLEVVIGVATGSVLGFFIQYFPSRDQDKLVCKRTFLVLGLSVLAVFSSVHFGFPGSGGLCTLVMAFLAGMGWTSEKAEVEKIIAVAWDIFQPLLFGLIGAEVSIASLRPETVGCNRICGFGHSKVTWRETIRRLWNGCVDSGIFVHPHHSPNWKSAYWFTGPQASAES

SEQ ID NO: 14865 - protein, 75 aa, Homo sapiens
PGPLPVLLLLLAGAPAARPTPPTCYSRMRALSQEITRDFNLLQVSEPSDLVFLLDDCNALEYPIPVTTVLPDRQR

SEQ ID NO: 14866 - protein, 1005 aa, Homo sapiens
MKQSPALAPEERCRRAGSPKPVLRADDNNMGNGCSQKLATANLLRFLLLVLIPCICALVLLLVILLSYVGTLQKVYFKSNGSEPLVTDGEIQGSDVILTNTIYNQSTVVSTAHPDQHVPAWTTDASLPGDQSHRNTSACMNITHSQCQMLPYHATLTPLLSVVRNMEMEKFLKFFTYLHRLSCYQHIMLFGCTLAFPECIIDGDDSHGLLPCRSFCEAAKEGCESVLGMVNYSWPDFLRCSQFRNQTESSNVSRICFSPQQENGKQLLCGRGENFLCASGICIPGKLQCNGYNDCDDWSDEAHCNCSENLFHCHTGKCLNYSLVCDGYDDCGDLSDEQNCACHSQGLVECRNGQCIPSTFQCDGDEDCKDGSDEENCSVIQTSCQEGDQRCLYNPCLDSCGGSSLCDPNNSLNNCSQCEPITLELCMNLPYNSTSYPNYFGHRTQKEASISWESSLFPALVQTNCYKYLMFFSCTILVPKCDVNTGEHIPPCRALCEHSKERCESVLGIVGLQWPEDTDCSQFPEENSDNQTCLMPDEYVEECSPSHFKCRSGQCVLASRRCDGQADCDDDSDEENCGCKERDLWECPSNKQCLKHTVICDGFPDCPDYMDEKNCSFCQDDELECANHACVSRDLWCDGEADCSDSSDEWDCVTLSINVNSSSFLMVHRAATEHHVCADGWQEILSQLACKQMGLGEPSVTKLIQEQEKEPRWLTLHSNWESLNGTTLHELLVNGQSCESRSKISLLCTKQDCGRRPAARMNKRILGGRTSRPGRWPWQCSLQSEPSGHICGCVLIAKKWVLTVAHCFEGRENAAVWKVVLGINNLDHPSVFMQTRFVKTIILHPRYSRAVVDYDISIVELSEDISETGYVRPVCLPNPEQWLEPDTYCYITGWGHMGNKMPFKLQEGEVRIISLEHCQSYFDMKTITTRMICAGYESGTVDSCMGDSGGPLVCEKPGGRWTLFGLTSWGSVCFSKVLGPGVYSNVSYFVEWIKRQIYIQTFLLN

SEQ ID NO: 14867 - protein, 92 aa, Homo sapiens
MKLMVLVFTIGLTLLLGVQAMPANRLSCYRKILKDHNCHNLPEGVADLTQIDVNVQDHFWDGKGCEMICYCNFSELLCCPKCHHIFILLRNL

SEQ ID NO: 14868 - protein, 115 aa, Homo sapiens; identical to SEQ ID NO: 14767

SEQ ID NO: 14869 - protein, 203 aa, Homo sapiens
MMQPQQPYTGQIYQPTQAYTPASPQPFYGNNFEDEPPLLEELGINFDHIWQKTLTVLHPLKVADGSIMNETDLAGPMVFCLAFGATLLLAGKIQFGYVYGISAIGCLGMFCLLNLMSMTGVSFGCVASVLGYCLLPMILLSSFAVIFSLQGMVGIILTAGIIGWCSFSASKIFISALAMEGQQLLVAYPCALLYGVFALISVF

SEQ ID NO: 14870 - protein, 56 aa, Homo sapiens
MKFLLTTAFLILISLWVEEAYSKEKSSKKGKGKKKQYLCPSLVRPDAKKFVLLSLI

SEQ ID NO: 14871 - protein, 55 aa, Homo sapiens
MERASCLLLLLLPLVHVSATTPEPCELDDEDFRCVCNFSEPQPDWSEAFQCVSAV

SEQ ID NO: 14872 - protein, 108 aa, Homo sapiens
MVSRKAVAALLVVHVAAMLASQTEAFVPIFTYGELQRMQEKERNKGQKKSLSVWQRSGEEGPVDPAEPIREEENEMIKLTAPLEIGMRMNSRQLEKYPATLEGLLTAK

SEQ ID NO: 14873 - protein, 1234 aa, Homo sapiens
MRAVLTWRDKAEHCINDIAFKPDGTQLILAAGSRLLVYDTSDGTLLQPLKGHKDTVYCVAYAKDGKRFASGSADKSVIIWTSKLEGILKYTSWSVMSSLHLHLPFLGLHKTVRVTATDKAPKGQGGRIDCLRPSVQNQPGQKHNDAIQCVSYNPITHQLASCSSSDFGLWSPEQKSVSKHKSSSKIICCSWTNDGQYLALGMFNGIISIRNKNGEEKVKIERPGGSLSPIWSICWNPSREERNDILAVADWGQKVSFYQLSGKQIGKDRALNFDPCCISYFTKGEYILLGGSDKQVSLFTKDGVRLGTVGEQNSWVWTCQAKPDSNYVVVGCQDGTISFYQLIFSTVHGLYKDRYAYRDSMTDVIVQHLITEQKVRIKCKELVKKIAIYRNRLAIQLPEKILIYELYSEDLSDMHYRVKEKIIKKFECNLLVVCANHIILCQEKRLQCLSFSGVKEREWQMESLIRYIKVIGGPPGREGLLVGLKNGQILKIFVDNLFAIVLLKQATAVRCLDMSASRKKLAVVDENDTCLVYDIDTKELLFQEPNANSVAWNTQCEDMLCFSGGGYLNIKASTFPVHRQKLQGFVVGYNGSKIFCLHVFSISAVEVPQSAPMYQYLDRKLFKEAYQIACLGVTDTDWRELAMEALEGLDFETAKKAFIRVQDLRYLELISSIEERKKRGETNNDLFLADVFSYQGKFHEAAKLYKRSGHENLALEMYTDLCMFEYAKDFLGSGDPKETKMLITKQADWARNIKEPKAAVEMYISAGEHVKAIEICGDHGWVDMLIDIARKLDKAEREPLLLCATYLKKLDSPGYAAETYLKMGDLKSLVQLHVETQRWDEAFALGEKHPEFKDDIYMPYAQWLAENDRFEEAQKAFHKAGRQREAVQVLEQLTNNAVAESRFNDAAYYYWMLSMQCLDIAQADPAQKDTMLGKFYHFQRLAELYHGYHAIHRHTEDPFSVHRPETLFNISRFLLHSLPKDTPSGISKVKILFTLAKQSKALGAYRLARHAYDKLRGLYIPARFQKSIELGTLTIRAKPFHDSEELVPLCYRCSTNNPLLNNLGNVCINCRQPFIFSASSYDVLHLVEFYLEEGITDEEAISLIDLEVLRPKRDDRQLEIANNSSQILRLVETKDSIGDEDPFTAKLSFEQGGSEFVPVVVSRLVLRSMSRRDVLIKRWPPPLRWQYFRSLLPDASITMCPSCFQMFHSEDYELLVLQHGCCPYCRRCKDDPGP

SEQ ID NO: 14874 - protein, 52 aa, Homo sapiens
MTILGTTFGMVFSLLQVVSGESGYAQNGDLEDAELDDYSFSCYSQLEVNGSQ

SEQ ID NO: 14875 - protein, 114 aa, Homo sapiens
MRSEALLLYFTLLHFAGAGFPEDSEPISISHGNYTKQYPVFVGHKPGRNTTQRHRLDIQMIMIMNGTLYIAARDHIYTVDIDTSHTEEIYCSKKLTWKSRQADVDTCRMKGKHK

SEQ ID NO: 14876 - protein, 39 aa, Homo sapiens
MGVLKVWLGLALALAEFAVLPHHSEGACVYQDSLLAEGG

SEQ ID NO: 14877 - protein, 1473 aa, Homo sapiens
MGRRRRLCLQLYFLWLGCVVLWAQGTAGQPQPPPPKPPRPQPPPQQVRSATAGSEGGFLAPEYREEGAAVASRVRRRGQQDVLRGPNVCGSRFHSYCCPGWKTLPGGNQCIVLQQCSVRCMNGGTCADDHCQCQKGYIGTYCGQPVCENGCQNGGRCIGPNRCACVYGFTGPQCERDYRTGPCFTQVNNQMCQGQLTGIVCTKTLCCATIGRAWGHPCEMCPAQPQPCRRGFIPNIRTGACQDVDECQAIPGICQGGNCINTVGSFECRCPAGHKQSETTQKCEDIDECSIIPGICETGECSNTVGSYFCVCPRGYVTSTDGSRCIDQRTGMCFSGLVNGRCAQELPGRMTKMQCCCEPGRCWGIGTIPEACPVRGSEEYRRLCMDGLPMGGIPGSAGSRPGGTGGNGFAPSGNGNGYGPGGTGFIPIPGGNGFSPGVGGAGVGAGGQGPIITGLTILNQTIDICKHHANLCLNGRCIPTVSSYRCECNMGYKQDANGDCIDVDECTSNPCTNGDCVNTPGSYYCKCHAGFQRTPTKQACIDIDECIQNGVLCKNGRCVNTDGSFQCICNAGFELTTDGKNCVDHDECTTTNMCLNGMCINEDGSFKCICKPGFVLAPNGRYCTDVDECQTPGICMNGHCINSEGSFRCDCPPGLAVGMDGRVCVDTHMRSTCYGGIKKGVCVRPFPGAVTKSECCCANPDYGFGEPCQPCPAKNSAEFHGLCSSGVGITVDGRDINECALDPDICANGICENLRGSYRCNCNSGYEPDASGRNCIDIDECLVNRLLCDNGLCRNTPGSYSCTCPPGYVFRTETETCEDINECESNPCVNGACRNNLGSFNCECSPGSKLSSTGLICIDSLKGTCWLNIQDSRCEVNINGATLKSECCATLGAAWGSPCERCELDTACPRGLARIKGVTCEDVNECEVFPGVCPNGRCVNSKGSFHCECPEGLTLDGTGRVCLDIRMEQCYLKWDEDECIHPVPGKFRMDACCCAVGAAWGTECEECPKPGTKEYETLCPRGAGFANRGDVLTGRPFYKDINECKAFPGMCTYGKCRNTIGSFKCRCNSGFALDMEERNCTDIDECRISPDLCGSGICVNTPGSFECECFEGYESGFMMMKNCMDIDECERNPLLCRGGTCVNTEGSFQCDCPLGHELSPSREDCVDINECSLSDNLCRNGKCVNMIGTYQCSCNPGYQATPDRQGCTDIDECMIMNGGCDTQCTNSEGSYECSCSEGYALMPDGRSCADIDECENNPDICDGGQCTNIPGEYRCLCYDGFMASMDMKTCIDVNECDLNSNICMFGECENTKGSFICHCQLGYSVKKGTTGCTDVDECEIGAHNCDMHASCLNIPGSFKCSCREGWIGNGIKCIDLDECSNGTHQCSINAQCVNTPGSYRCACSEGFTGDGFTCSDVDECAENINLCENGQCLNVPGAYRCECEMGFTPASDSRSCQGGSPGFQLIFKLDQPQ

SEQ ID NO: 14878 - protein, 199 aa, Homo sapiens
MSALEWYAHKSLGDGIFWIQERFYESGNRANIWLVRGSEQDVVIDTGLGLRSLPEYLYSSGLLQDREAKEDAARRPLLAVATHVHFDHSGGLYQFDRVAVHHAEAEALARGDNFETVTWLSDSEVVRTPSPGWRARQFRVQAVQPTLILQDGNGPPRARALVKGGYWEETVRVPHVADLRGHKGDYFGTSQSHFCFTLP

SEQ ID NO: 14879 - protein, 253 aa, Homo sapiens
MEAEETMECLQEFPEHHKMILDRLNEQREQDRFTDITLIVDGHHFKAHKAVLAACSKFFYKFFQEFTQEPLVEIEGVSKMAFRHLIEFTYTAKLMIQGEEEANDVWKAAEFLQMLEAIKALEVRNKENSAPLEENTTGKNEAKKRKIAETSNVITESLPSAESEPVEIEVEIAEGTIEVEDEGIETLEEVASAKQSVKYIQSTGSSDDSALALLADITSKYRQGDRKGQIKEDGCPSDPTSKQVEGAHEITLH

SEQ ID NO: 14880 - protein, 509 aa, Homo sapiens
MAERAALEELVKLQGERVRGLKQQKASAELIEEEVAKLLKLKAQLGPDESKQKFVLKTPKGTRDYSPRQMAVREKVFDVIIRCFKRHGAEVIDTPVFELKETLMGKYGEDSKLIYDLKDQGGELLSLRYDLTVPFARYLAMNKLTNIKRYHIAKVYRRDNPAMTRGRYREFYQCDFDIAGNFDPMIPDAECLKIMCEILSSLQIGDFLVKVNDRRILDGMFAICGVSDSKFRTICSSVDKLDKVSWEEVKNEMVGEKGLAPEVADRIGDYVQQHGGVSLVEQLLQDPKLSQNKQALEGLGDLKLLFEYLTLFGIDDKISFDLSLARGLDYYTGVIYEAVLLQTPAQAGEEPLGVGSVAAGGRYDGLVGMFDPKGRKVPCVGLSIGVERIFSIVEQRLEALEEKIRTTETQVLVASAQKKLLEERLKLVSELWDAGIKAELLYKKNPKLLNQLQYCEEAGIPLVAIIGEQELKDGVIKLRSVTSREEVDVRREDLVEEIKRRTGQPLCIC

SEQ ID NO: 14881 - protein, 315 aa, Homo sapiens
MPKVSGSRDTVSQLLSMLHQGQYQPRPSFRGNKYSRSYRYALQDMDKFSLKDSGRGDSEAGDSDYDLGRDSPIDRLLGEGFSDLFLTDGRIPAAMRLCTEECRVLGHSDQCWMPPLPSPSSDYRSNMFIPGEEFPTQPQQQHPHQSLEDDAQPADSGEKKKSFSTFGKDSPNDEDTGDTSTSSLLSEMSSVFQRLLPPSLDTYSECSEVDRSNSLERRKGPLPAKTVGYPQGVAAWAASTHFQNPTTNCGPPLGTHSSVQPSSKWLPAMEEIPENYEEDDFDNVLNHLNDGKHELMDASELVAEINKLLQDVRQS

SEQ ID NO: 14882 - protein, 218 aa, Homo sapiens
MGTSHPAFLVLGCLLTGLSLILCQLSLPSILPNENEKVVQLNSSFSLRCFGESEVSWQYPMSEEESSDVEIRNEENNSGLFVTVLEVSSASAAHTGLYTCYYNHTQTEENELEGRHIYIYVPDPDVAFVPLGMTDYLVIVEDDDSAIIPCRTTDPETPVTLHNSEGVVPASYDSRQGFNGTFTVGPYICEATVKGKKFQTIPFNVYALKGTCIISFLL

SEQ ID NO: 14883 - protein, 436 aa, Homo sapiens
MTIHQFLLLFLFWVCLPHFCSPEIMFRRTPVPQQRILSSRVPRSDGKILHRQKRGWMWNQFFLLEEYTGSDYQYVGKLHSDQDKGDGSLKYILSGDGAGTLFIIDEKTGDIHATRRIDREEKAFYTLRAQAINRRTLRPVEPESEFVIKIHDINDNEPTFPEEIYTASVPEMSVVGTSVVQVTATDADDPSYGNSARVIYSILQGQPYFSVEPETGIIRTALPNMNRENREQYQVVIQAKDMGGQMGGLSGTTTVNITLTDVNDNPPRFPQNTIHLRVLESSPVGTAIGSVKATDADTGKNAEVEYRIIDGDGTDMFDIVTEKDTQEGIITVKKPLDYESRRLYTLKVEAENTHVDPRFYYLGPFKDTTIVKISIEDVDEPPVFSRSSYLFEVHEDIEVGTIIGTVMARDPDSISSPIRQSQRDNTRGCFCENFGC

SEQ ID NO: 14884 - protein, 38 aa, Homo sapiens
MLVPLAKLSCLDGLQLLLCLELLPIILFIPGIRTRDGK

SEQ ID NO: 14885 - protein, 272 aa, Homo sapiens
MYSFNKTQGPRALWKGMGSTFIVQGVTLGAEGIISEFTPLPREVLHKWSPKQIGEHLLLKSLTYVVAMPFYSASLIETVQSEIIRDNTGILECVKEGIGRVIGMGVPHSKRLLPLLSLIFPTVLHGVLHYIISSVIQKFVLLILKRKTYNSHLAESTSPVQSMLDAYFPELIANFAASLCSDVILYPLETVLHRLHIQGTRTIIDNTDLGYEVLPINTQYEGMRDCINTIRQEEGVFGFYKGFGAVIIQYTLHAAVLQITKIIYSTLLQNNI

SEQ ID NO: 14886 - protein, 70 aa, Homo sapiens
MGPEALSSLLLLLLVASGDADMKGHFDPAKCRYALGMQDRTIPDSDISASSSWSDSTAARHSRLESSDGD

SEQ ID NO: 14887 - protein, 791 aa, Homo sapiens
MSQPGQKPAASPRPRRAAAARRTHEHVSEKTSESPSKPGEKKGSDEKKAASLGSSQSSRTYAGGTASATKVSASSGATSKSSSMNPTETKAIPVSQQMEGPHLPNKKKHKKQAVKTEPEKKSQSTKLSVVHEKKSQEGKPKEHTEPKSLPKQASDTGSNDAHNKKAVSRSAEQQPSEKSTEPKTKPQDMISAGGESVAGITAISGKPGDKKKEKKSLTPAVPVESKPDKPSGKSGMDAALDDLIDTLGGPEETEEENTTYTGPEVSDPMSSTYIEELGKREVTIPPKYRELLAKKEGITGPPADSSKPIGPDDAIDALSSDFTCGSPTAAGKKTEKEESTEVLKAQSAGTVRSAAPPQEKKRKVEKDTMSDQALEALSASLGTRQAEPELDLRSIKEVDEAKAKEEKLEKCGEDDETIPSEYRLKPATDKDGKPLLPEPEEKPKPRSESELIDELSEDFDRSECKEKPSKPTEKTEESKAAAPAPVSEAVCRTSMCSIQSAPPEPATLKGTVPDDAVEALADSLGKKEADPEDGKPVMDKVKEKAKEEDREKLGEKEETIPPDYRLEEVKDKDGKPLLPKESKEQLPPMSEDFLLDALSEDFSGPQNASSLKFEDAKLAAAISEVVSQTPASTTQAGAPPRDTSQSDKDLDDALDKLSDSLGQRQPDPDENKPMEDKVKEKAKAEHRDKLGERDDTIPPEYRHLLDDNGQDKPVKPPTKKSEDSKKPADDQDPIDALSGDLDSCPSTTETSQNTAKDKCKKAASSSKAPKNGGKAKDSAKTTEETSKPKDD

SEQ ID NO: 14888 - protein, 310 aa, Homo sapiens
MEYPAPATVQAADGGAAGPYSSSELLEGQEPDGVRFDRERARRLWEAVSGAQPVGREEVEHMIQKNQCLFTNTQCKVCCALLISESQKLAHYQSKKHANKVKRYLAIHGMETLKGETKKLDSDQKSSRSKDKNQCCPICNMTFSSPVVAQSHYLGKTHAKNLKLKQQSTKVEALSKRLTNPFLVASTLALHQNREMIDPDKFCSLCHATFNDPVMAQQHYVGKKHRKQETKLKLMARYGRLADPAVTDFPAGKGYPCKTCKIVLNSIEQYQAHVSGFKHKNQSPKTVASSLGQIPMQRQPIQKDSTTLED

SEQ ID NO: 14889 - protein, 76 aa, Homo sapiens
MRLSLPLLLLLLGAWAIPGGLGDRAPLTATAPQLDDEEMYSAHMPAHLRCDACRAVAYQLRSSRSGPSETSHRPRT

SEQ ID NO: 14890 - protein, 590 aa, Homo sapiens
MKITSTSCICPVLVCLCFVQRCYGTAHHSSIKVMRNQTKHIEGETEVHHRPKRGWVWNQFFVLEEHMGPDPQYVGKLHSNSDKGDGSVKYILTGEGAGTIFIIDDTTGDIHSTKSLDREQKTHYVLHAQAIDRRTNKPLEPESEFIIKVQDINDNAPKFTDGPYIVTVPEMSDMGTSVLQVTATDADDPTYGNSARVVYSILQGQPYFSVDPKTGVIRTALHNMDREAREHYSVVIQAKDMAGQVGGLSGSTTVNITLTDVNDNPPRFPQKHYQLYVPESAQVGSAVGKIKANDADTGSNADMTYSIINGDGMGIFSISTDKETREGILSLKKPLNYEKKKSYTLNIEGANTHLDFRFSHLGPFKDATMLKIIVGDVDEPPLFSMPSYLMEVYENAKIGTVVGTVLAQDPDSTNSLVRYFINYNVEDDRFFNIDANTGTIRTTKVLDREETPWYNITVTASEIDNPDLLSHVTVGIRVLDVNDNPPELAREYDIIVCENSKPGQVIHTISATDKDDFANGPRFNFFLDERLPVNPNFTLKDNEGEHIYTYLFIYVVSALTLYVIGFILIYTQTSCKSAFKVSLMLLCYDL

SEQ ID NO: 14891 - protein, 119 aa, Homo sapiens
MEEPEMQLKGKKVTDKFTESVYVLANEPSVALYRLQEHVRRSLPELAQHKADMQRWEEQSQGAIYTVEYACSAVKNLVDSSVYFRSVEGLLKQAISIRDHMNASAQGHSPEEPPPPSSA

SEQ ID NO: 14892 - protein, 134 aa, Homo sapiens
MGKCRGLRTARKLRSHRRDQKWHDKQYKKAHLGTALKANPFGGASHAKGIVLEKVGVEAKQPNSAIRKCVRVQLIKNGKKITAFVPNDGCLNFIEENDEVLVAGFGRKGHAVGDIPGVRFKSFHGYSGMVEMKL

SEQ ID NO: 14893 - protein, 64 aa, Homo sapiens
MENPSPAAALGKALCALLLATLGAAGQPLGGESICSARALAKYSITFTGKWSQTAFPKQYPLFR

SEQ ID NO: 14894 - protein, 1571 aa, Homo sapiens
MWPSQLLIFMMLLAPIIHGGKHSERHPALAAPLRHAERSPGGALPPRHLLQQPAAERTAAHRGQGPRGATRGVRGPGAQGAQIAAQAFSRAPIPMAVVRRELSCESYPIELRCPGTDVIMIESANYGRTDDKICDSDPAQMENIRCYLPDAYKIMSQRCNNRTQCAVVAGPDVFPDPCPGTYKYLEVQYECVPYKVEQKVFLCPGLLKGVYQSEHLFESDHQSGAWCKDPLQASDKIYYMPWTPYRTDTLTEYSSKDDFIAGRPTTTYKLPHRVDGTGFVVYDGALFFNKERTRNIVKFDLRTRIKSGEAIIANANYHDTSPYRWGGKSDIDLAVDENGLWVIYATEQNNGKIVISQLNPYTLRIEGTWDTAYDKRSASNAFMICGILYVVKSVYEDDDNEATGNKIDYIYNTDQSKDSLVDVPFPNSYQYIAAVDYNPRDNLLYVWNNYHVVKYSLDFGPLDSRSGQAHHGQVSYISPPIHLDSELERPSVKDISTTGPLGMGSTTTSTTLRTTTLSPGRSTTPSVSGRRNRSTSTPSPAVEVLDDMTTHLPSASSQIPALEESCEAVEAREIMWFKTRQGQIAKQPCPAGTIGVSTYLCLAPDGIWDPQGPDLSNCSSPWVNHITQKLKSGETAANIARELAEQTRNHLNAGDITYSVRAMDQLVGLLDVQLRNLTPGGKDSAARSLNKLQKRERSCRAYVQAMVETVNNLLQPQALNAWRDLTTSDQLRAATMLLHTVEESAFVLADNLLKTDIVRENTDNIKLEVARLSTEGNLEDLKFPENMGHGSTIQLSANTLKQNGRNGEIRVAFVLYNNLGPYLSTENASMKLGTEALSTNHSVIVNSPVITAAINKEFSNKVYLADPVVFTVKHIKQSEENFNPNCSFWSYSKRTMTGYWSTQGCRLLTTNKTHTTCSCNHLTNFAVLMAHVEVKHSDAVHDLLLDVITWVGILLSLVCLLICIFTFCFFRGLQSDRNTIHKNLCISLFVAELLFLIGINRTDQPIACAVFAALLHFFFLAAFTWMFLEGVQLYIMLVEVFESEHSRRKYFYLVGYGMPALIVAVSAAVDYRSYGTDKVCWLRLDTYFIWSFIGPATLIIMLNVIFLGIALYKMFHHTAILKPESGCLDNIKSWVIGAIALLCLLGLTWAFGLMYINESTVIMAYLFTIFNSLQGMFIFIFHCVLQKKVRKEYGKCLRTHCCSGKSTESSIGSGKTSGSRTPGRYSTGSQSRIRRMWNDTVRKQSESSFITGDINSSASLNRGAMANHLISNALLRPHGTNNPYNTLLGEPAVCNNPSVSMYNAQEGLLNNARDTSVMDTLPLNGNHGNSYSIASGEYLSNCVQIIDRGYNHNETALEKKILKELTSNYIPSYLNNHERSSEQNRNLMNKLVNNLGSGREDDAIVLDDATSFNHEESLGLELIHEESDAPLLPPRVYSTENHQPHHYTRRRIPQDHSESFFPLLTNEHTEDLQSPHRDSLYTSMPTLAGVAATESVTTSTQTEPPPAKCGDAEDVYYKSMPNLGSRNHVHQLHTYYQLGRGSSDGFIVPPNKDGTPPEGSSKGPAHLVTSL

SEQ ID NO: 14895 - protein, 112 aa, Homo sapiens
MALGVPISVYLLFNAMTALTEEAAVTVTPPITAQQGNWTVNKTEADNIEGPIALKFSHLCLEDHNSYCINGACAFHHELEKAICRCFTGYTGERCLKLKSPYNVCSGERRPL

SEQ ID NO: 14896 - protein, 159 aa, Homo sapiens
MGTSHPAFLVLGCLLTGLSLILCQLSLPSILPNENEKVVQLNSSFSLRCFGESEVSWQYPMSEEESSDVEIRNEENNSGLFVTVLEVSSASAAHTGLYTCYYNHTQTEENELEGRHIYIYVPDPDVAFVPLGMTDYLVIVEDDDSAIIPCRTTDPETPV

SEQ ID NO: 14897 - protein, 414 aa, Homo sapiens
MSYTSPYSPNASSPYSSGFNSPSSTPVRPPIVKQLILPGNSGNLKSSDRNPPLSPQSSIDSELSASELDEDSIGSNYKLNDVTDVQILARMQEESLRQEYAATTSRRSSGSSCNSTRRGTFSDQELDAQSLDDEDDNMHHAVYPAVNRFSPSPRNSPRPSPKQSPRNSPRSRSPARGIEYSRVSPQPMISRLQQPRLSLQGHPTDLQTSNVKNEEKLRRSLPNLSRTSNTQVDSVKSSRSDSNFQVPNGGIPRMQPQASATSQRLKNLPRTSLKAKQLLQTSSTKRVPSPGKFRSPAAPSPLALRQPVKAFSNHGSGSPGSQEITQLTQTTSSPGPPMVQSTVSANPPSNINSATLTRPAGTTAMRSGLPRPSAPSAGGIPVPRSKLAQPVRRSLPAPKTYGSMKDDSWKDGCY

SEQ ID NO: 14898 - protein, 57 aa, Homo sapiens
MALVLGSLLLLGLCGNSFSGGQPSSTDAPKAWNYELPATNYETQDSHKAGPIGILFE

SEQ ID NO: 14899 - protein, 91 aa, Homo sapiens
MLRNLLALRQIGQRTISTASRRHFKNKVPEKQKLFQEDDEIPLYLKGGVADALLYRATMILTVGGKAFGMFEGTAYAIYELAVASFPKKQE

SEQ ID NO: 14900 - protein, 5256 aa, Homo sapiens
MECPSCQHVSKEETPKFCSQCGERLPPAAPIADSENNNSTMASASEGEMECGQELKEEGGPCLFPGSDSWQENPEEPCSKASWTVQEGATSEVLVDAAVDLISDEWEAANAIPSKRRKQDAAPLEAASVPSADCEQSKKKKRKKKKKGNKSASSELASLPLSPASPCHLTLLSNPWPQDTALPHSQAQQSGPTGQPSQPPGTATTPLEGDGLSAPTEVGDSPLQAQALGEAGVATGSEAQSSPQFQDHTEGEDQDASIPSGGRGLSQEGTGPPTSAGEGHSRTEDAAQELLLPESKGGSSEPGTELQTTEQQAGASASMAVDAVAEPANAVKGAGKEMKEKTQRMKQPPATTPPFKTHCQEAETKTKDEMAAAEEKVGKNEQGEPEDLKKPEGKNRSAAAVKNEKEQKNQEADVQEVKASTLSPGGGVTVFFHAIISLHFPFNPDLHKVFIRGGEEFGESKWDSNICELHYTRDLGHDRVLVEGIVCISKKHLDKYIPYKYVIYNGESFEYEFIYKHQQKKGEYVNRCLFIKSSLLGSGDWHQYYDIVYMKPHGRLQKVMNHITDGPRKDLVKGKQIAAALMLDSTFSILQTWDTINLNSFFTQFEQFCFVLQQPMIYEGQAQLWTDLQYREKEVKRYLWQHLKKHVVPLPDGKSTDFLPVDCPVRSKLKTGLIVLFVVEKIELLLEGSLDWLCHLLTSDASSPDEFHRDLSHILGIPQSWRLYLVNLCQRCMDTRTYTWLGALPVLHCCMELAPRHKDAWRQPEDTWAALEGLSFSPFREQMLDTSSLLQFMREKQHLLSIDEPLFRSWFSLLPLSHLVMYMENFIEHLGRFPAHILDCLSGIYYRLPGLEQVLNTQDVQDVQNVQNILEMLLRLLDTYRDKIPEEALSPSYLTVCLKLHEAICSSTKLLKFYELPALSAEIVCRMIRLLSLVDSAGQRDETGNNSVQTVFQGTLAATKRWLREVFTKNMLTSSGASFTYVKEIEVWRRLVEIQFPAEHGWKESLLGDMEWRLTKEEPLSQITAYCNSCWDTKGLEDSVAKTFEKCIIEAVSSACQSQTSILQGFSYSDLRKFGIVLSAVITKSWPRTADNFDDILKHLLTLADVKHVFRLCGTDEKILANVTEDAKRLIAVADSVLTKVVGDLLSGTILVGQLELIIKHKNQFLDIWQLREKSLSPQDEQCAVEEALDWRREELLLLKKEKRCVDSLLKMCGNVKHLIQVDFGVLAVRHSQDLSSKRLNDTVTVRLSTSSNSQRATHYHLSSQVQEMAGKIDLLRDSHIFQLFWREAAEPLSEPKEDQEAAELLSEPEEESERHILELEEVYDYLYQPSYRKFIKLHQDLKSGEVTLAEIDVIFKDFVNKYTDLDSELKIMCTVDHQDQRDWIKDRVEQIKEYHHLHQAVHAAKVILQVKESLGLNGDFSVLNTLLNFTDNFDDFRRETLDQINQELIQAKKLLQDISEARCKGLQALSLRKEFICWVREALGGINELKVFVDLASISAGENDIDVDRVACFHDAVQGYASLLFKLDPSVDFSAFMKHLKKLWKALDKDQYLPRKLCDSARNLEWLKTVNESHGSVERSSLTLATAINQRGIYVIQAPKGGQKISPDTVLHLILPESPGSHEESREYSLEEVKELLNKLMLMSGKKDRNNTEVERFSEVFCSVQRLSQAFIDLHSAGNMLFRTWIAMAYCSPKQGVSLQMDFGLDLVTELKEGGDVTELLAALCRQMEHFLDSWKRFVTQKRMEHFYLNFYTAEQLVYLSTELRKQPPSDAALTMLSFIKSNCTLRDVLRASVGCGSEAARYRMRRVMEELPLMLLSEFSLVDKLRIIMEQSMRCLPAFLPDCLDLETLGHCLAHLAGMGGSPVERCLPRGLQVGQPNLVVCGHSEVLPAALAVYMQTPSQPLPTYDEVLLCTPATTFEEVALLLRRCLTLGSLGHKVYSLLFADQLSYEVARQAEELFHNLCTQQHREDYQLVMVCDGDWEHCYLPSAFSQHKVFVTPQAPLEAIQAYLAGHYRVPKQTLSAAAVFNDRLCVGIVASERAGVGKSLYVKRLHDKMKMQLNVKNVPLKTIRLIDPQVDESRVLGALLPFLDAQYQKVPVLFHLDVTSSVQTGIWVFLFKLLILQYLMDINGKMWLRNPCHLYIVEILERRTSVPSRSSSALRTRVPQFSFLDIFPKVTCRPPKEVIDMELSALRSDTEPGMDLWEFCSETFQRPYQYLRRFNQNQDLDTFQYQEGSVEGTPEECLQHFLFHCGVINPSWSELRNFARFLNYQLRDCEASLFCNPSFIGDTLRGFKKFVVTFMIFMARDFATPSLHTSDQSPGKHMVTMDGVREEDLAPFSLRKRWESEPHPYVFFNDDHTTMTFIGFHLQPNINGSVDAISHLTGKVIKRDVMTRDLYQGLLLQRVPFNVDFDKLPRHKKLERLCLTLGIPQATDPDKTYELTTDNMLKILAIEMRFRCGIPVIIMGETGCGKTRLIKFLSDLRRGGTNADTIKLVKVHGGTTADMIYSRVREAENVAFANKDQHQLDTILFFDEANTTEAISCIKEVLCDHMVDGQPLAEDSGLHIIAACNPYRKHSEEMICRLESAGLGYRVSMEETADRLGSIPLRQLVYRVHALPPSLIPLVWDFGQLSDVAEKLYIQQIVQRLVESISLDENGTRVITEVLCASQGFMRKTEDECSFVSLRDVERCVKVFRWFHEHSAMLLAQLNAFLSKSSVSKNHTERDPVLWSLMLAIGVCYHASLEKKDSYRKAIARFFPKPYDDSRLLLDEITRAQDLFLDGVPLRKTIAKNLALKENVFMMVVCIELKIPLFLVGKPGSSKSLAKTIVADAMQGPAAYSDLFRSLKQVHLVSFQCSPHSTPQGIISTFRQCARFQQGKDLQQYVSVVVLDEVGLAEDSPKMPLKTLHPLLEDGCIEDDPAPHKKVGFVGISNWALDPAKMNRGIFVSRGSPNETELIESAKGICSSDILVQDRVQGYFASFAKAYETVCKRQDKEFFGLRDYYSLIKMVFAAAKASNRKPSPQDIAQAVLRNFSGKDDIQALDIFLANLPEAKCSEEVSPMQLIKQNIFGPSQKVPGGEQEDAESRYLLVLTKNYVALQILQQTFFEGDQQPEIIFGSGFPKDQEYTQLCRNINRVKICMETGKMVLLLNLQNLYESLYDALNQYYVHLGGQKYVDLGLGTHRVKCRVHPNFRLIVIEEKDVVYKHFPIPLINRLEKHYLDINTVLEKWQKSIVEELCAWVEKFINVKAHHFQKRHKYSPSDVFIGYHSDACASVVLQVIERQGPRALTEELHQKVSEEAKSILLNCATPDAVVRLSAYSLGGFAAEWLSQEYFHRQRHNSFADFLQAHLHTADLERHAIFTEITTFSRLLTSHDCEILESEVTGRAPKPTLLWLQQFDTEYSFLKEVRNCLTNTAKCKILIFQTDFEDGIRSAQLIASAKYSVINEINKIRENEDRIFVYFITKLSRVGRGTAYVGFHGGLWQSVHIDDLRRSTLMVSDVTRLQHVTISQLFAPGDLPELGLEHRAEDGHEEAMETEASTSGEVAEVAEEAMETESSEKVGKETSELGGSDVSILDTTRLLRSCVQSAVGMLRDQNESCTRNMRRVVLLLGLLNEDDACHASFLRVSKMRLSVFLKKQEESQFHPLEWLAREACNQDALQEAGTFRHTLWKRVQGAVTPLLASMISFIDRDGNLELLTRPDTPPWARDLWMFIFSDTMLLNIPLVMNNERHKGEMAYIVVQNHMNLSENASNNVPFSWKIKDYLEELWVQAQYITDAEGLPKKFVDIFQQTPLGRFLAQLHGEPQQELLQCYLKDFILLTMRVSTEEELKFLQMALWSCTRKLKAASEAPEEEVSLPWVHLAYQRFRSRLQNFSRILTIYPQVLHSLMEARWNHELAGCEMTLDAFAAMACTEMLTRNTLKPSPQAWLQLVKNLSMPLELICSDEHMQGSGSLAQAVIREVRAQWSRIFSTALFVEHVLLGTESRVPELQGLVTEHVFLLDKCLRENSDVKTHGPFEAVMRTLCECKETASKTLSRFGIQPCSICLGDAKDPVCLPCDHVHCLRCLRAWFASEQMICPYCLTALPDEFSPAVSQAHREAIEKHARFRQMCNSFFVDLVSTICFKDNAPPEKEVIESLLSLLFVQKGRLRDAAQRHCEHTKSLSPFNDVVDKTPVIRSVILKLLLKYSFHDVKDYIQEYLTLLKKKAFITEDKTELYMLFINCLEDSILEKTSAYSRNDELNHLEEEGRFLKAYSPASRGREPANEASVEYLQEVARIRLCLDRAADFLSEPEGGPEMAKEKQCYLQQVKQFCIRVENDWHRVYLVRKLSSQRGMEFVQGLSKPGRPHQWVFPKDVVKQQGLRQDHPGQMDRYLVYGDEYKALRDAVAKAVLECKPLGIKTALKACKTPQSQQSAYFLLTLFREVAILYRSHNASLHPTPEQCEAVSKFIGECKILSPPDISRFATSLVDNSVPLLRAGPSDSNLDGTVTEMAIHAAAVLLCGQNELLEPLKNLAFSPATMAHAFLPTMPEDLLAQARRWKGLERVHWYTCPNGHPCSVGECGRPMEQSICIDCHAPIGGIDHKPRDGFHLVKDKADRTQTGHVLGNPQRRDVVTCDRGLPPVVFLLIRLLTHLALLLGASQSSQALINIIKPPVRDPKGFLQQHILKDLEQLAKMLGHSADETIGVVHLVLRRLLQEQHQLSSRRLLNFDTELSTKEMRNNWEKEIAAVISPELEHLDKTLPTMNNLISQDKRISSNPVAKIIYGDPVTFLPHLPRKSVVHCSKIWSCRKRITVEYLQHIVEQKNGKERVPILWHFLQKEAELRLVKFLPEILALQRDLVKQFQNVQQVEYSSIRGFLSKHSSDGLRQLLHNRITVFLSTWNKLRRSLETNGEINLPKDYCSTDLDLDTEFEILLPRRRGLGLCATALVSYLIRLHNEIVYAVEKLSKENNSYSVDAAEVTELHVISYEVERDLTPLILSNCQYQVEEGRETVQEFDLEKIQRQIVSRFLQGKPRLSLKGIPTLVYRHDWNYEHLFMDIKNKMAQDSLPSSVISAISGQLQSYSDACEVLSVVEVTLGFLSTAGGDPNMQLNVYTQDILQMGDQTIHVLKALNRCQLKHTIALWQFLSAHKSEQLLRLHKEPFGEISSRYKADLSPENAKLLSTFLNQTGLDAFLLELHEMIILKLKNPQTQTEERFRPQWSLRDTLVSYMQTKESEILPEMASQFPEEILLASCVSVWKTAAVLKWNREMR

SEQ ID NO: 14901 - protein, 134 aa, Homo sapiens
MALSVLRLALLLLAVTFAGSARSGPGERGPPEKSGFGSQTGGGPCPAPGGLGDGTRAPVTGGSPEDLPASLIPQFGLFSKYRTPNCSQYRLPGCPRHFNPVCGSDMSTYANECTLCMKIREGGHNIKIIRNGPC

SEQ ID NO: 14902 - protein, 117 aa, Homo sapiens; identical to SEQ ID NO: 14096

SEQ ID NO: 14903 - protein, 131 aa, Homo sapiens
MAAVSMSVVLRQTLWRRRAVAVAALSVSRVPTRSLRTSTWRLAQDQTQDTQLITVDEKLVYLVPLCFTFCGLATPSLELATLFPASRHLEFLFTLPGCILTNPEDFIRSPSTYSSNGYHYFNWSSRRAYKN

SEQ ID NO: 14904 - protein, 58 aa, Homo sapiens
MALDVKSRAKRYEKLDFLGEGQFATVYKARDKNTNQIVAIKKIKLGHRSEAKDGYNKG

SEQ ID NO: 14905 - protein, 599 aa, Homo sapiens
MKKQKYGRIIMTSSASGIYGNFGQANYSAAKLGLLGLANSLAIEGRKSNIHCNTIAPNAGSRMTQTVMPEDLVEALKPEYVAPLVLWLCHESCEENGGLFEVGAGWIGKLRWERTLGAIVRQKNHPMTPEAVKANWKKICDFENASKPQSIQESTGSIIEVLSKIDSEGGVSANHTSRATSTATSGFAGAIGQKLPPFSYAYTELEAIMYALGVGASIKDPKDLKFIYEGSSDFSCLPTFGVIIGQKSMMGGGLAEIPGLSINFAKVLHGEQYLELYKPLPRAGKLKCEAVVADVLDKGSGVVIIMDVYSYSEKELICHNQFSLFLVGSGGFGGKRTSDKVKVAVAIPNRPPDAVLTDTTSLNQAALYRLSGDWNPLHIDPNFASLAGFDKPILHGLCTFGFSARRVLQQFADNDVSRFKAIKARFAKPVYPGQTLQTEMWKEGNRIHFQTKVQETGDIVISNAYVDLAPTSGTSAKTPSEGGKLQSTFVFEEIGRRLKDIGPEVVKKVNAVFEWHITKGGNIGAKWTIDLKSGSGKVYQGPAKGAADTTIILSDEDFMEVVLGKLDPQKAFFSGRLKARGNIMLSQKLQMILKDYAKL

SEQ ID NO: 14906 - protein, 47 aa, Homo sapiens
MLQFLLGFTLGNVVGMYLAQNYDIPNLAKKLEEIKKDLDAKKKPPSA

SEQ ID NO: 14907 - protein, 877 aa, Homo sapiens
MKLKEVDRTAMQAWSPAQNHPIYLATGTSAQQLDATFSTNASLEIFELDLSDPSLDMKSCATFSSSHRYHKLIWGPYKMDSKGDVSGVLIAGGENGNIILYDPSKIIAGDKEVVIAQNDKHTGPVRALDVNIFQTNLVASGANESEIYIWDLNNFATPMTPGAKTQPPEDISCIAWNRQVQHILASASPSGRATVWDLRKNEPIIKVSDHSNRMHCSGLAWHPDVATQMVLASEDDRLPVIQMWDLRFASSPLRVLENHARGILAIAWSMADPELLLSCGKDAKILCSNPNTGEVLYELPTNTQWCFDIQWCPRNPAVLSAASFDGRISVYSIMGGSTDGLRQKQVDKLSSSFGNLDPFGTGQPLPPLQIPQQTAQHSIVLPLKKPPKWIRRPVGASFSFGGKLVTFENVRMPSHQGAEQQQQQHHVFISQVVTEKEFLSRSDQLQQAVQSQGFINYCQKKIDASQTEFEKNVWSFLKVNFEDDSRGKYLELLGYRKEDLGKKIALALNKVDGANVALKDSDQVAQSDGEESPAAEEQLLGEHIKEEKEESEFLPSSGGTFNISVSGDIDGLITQALLTGNFESAVDLCLHDNRMADAIILAIAGGQELLARTQKKYFAKSQSKITRLITAVVMKNWKEIVESCDLKNWREALAAVLTYAKPDEFSALCDLLGTRLENEGDSLLQTQACLCYICAGNVEKLVACWTKAQDGSHPLSLQDLIEKVVILRKAVQLTQAMDTSTVGVLLAAKMSQYANLLAAQGSIAAALAFLPDNTNQPNIMQLRDRLCRAQGEPVAGHESPKIPYEKQQLPKGRPGPVAGHHQMPRVQTQQYYPHGENPPPPGFIMHGNVNPNAAGQLPTSPGHMHTQVPPYPQPQRK

SEQ ID NO: 14908 - protein, 1122 aa, Homo sapiens
MNGRLHLGHTFSLSKCEFAVGYQRLKGKCCLFPFGLHCTGMPIKACADKLKREIELYGCPPDFPDEEEEEEETSVKTEDIIIKDKAKGKKSKAAAKAGSSKYQWGIMKSLGLSDEEIVKFSEAEHWLDYFPPLAIQDLKRMGLKVDWRRSFITTDVNPYYDSFVRWQFLTLRERNKIKFGKRYTIYSPKDGQPCMDHDRQTGEGVGPQEYTLLKLKVLEPYPSKLSGLKGKNIFLVAATLRPETMFGQTNCWVRPDMKYIGFETVNGDIFICTQKAARNMSYQGFTKDNGVVPVVKELMGEEILGASLSAPLTSYKVIYVLPMLTIKEDKGTGVVTSVPSDSPDDIAALRDLKKKQALRAKYGIRDDMVLPFEPVPVIEIPGFGNLSAVTICDELKIQSQNDREKLAEAKEKIYLKGFYEGIMLVDGFKGQKVQDVKKTIQKKMIDAGDALIYMEPEKQVMSRSSDECVVALCDQWYLDYGEENWKKQTSQCLKNLETFCEETRRNFEATLGWLQEHACSRTYGLGTHLPWDEQWLIESLSDSTIYMAFYTVAHLLQGGNLHGQAESPLGIRPQQMTKEVWDYVFFKEAPFPKTQIAKEKLDQLKQEFEFWYPVDLRVSGKDLVPNHLSYYLYNHVAMWPEQSDKWPTAVRANGHLLLNSEKMSKSTGNFLTLTQAIDKFSADGMRLALADAGDTVEDANFVEAMADAGILRLYTWVEWVKEMVANWDSLRSGPASTFNDRVFASELNAGIIKTDQNYEKMMFKEALKTGFFEFQAAKDKYRELAVEGMHRELVFRFIEVQTLLLAPFCPHLCEHIWTLLGKPDSIMNASWPVAGPVNEVLIHSSQYLMEVTHDLRLRLKNYMMPAKGKKTDKQPLQKPSHCTIYVAKNYPPWQHTTLSVLRKHFEANNGKLPDNKVIASELGSMPELKKYMKKVMPFVAMIKENLEKMGPRILDLQLEFDEKAVLMENIVYLTNSLELEHIEVKFASEAEDKIREDCCPGKPLNVFRIEPGVSVSLVNPQPSNGHFSTKIEIRQGDNCDSIIRRLMKMNRGIKDLSKVKLMRFDDPLLGPRRVPVLGKEYTEKTPISEHAVFNVDLMSKKIHLTENGIRVDIGDTIIYLVH

SEQ ID NO: 14909 - protein, 120 aa, Homo sapiens
MAGQRVLLLVGFLLPGVLLSEAAKILTISTVGGSHYLLMDRVSQILQDHGHNVTMLNHKRGPFMPDFKKEEKSYQVISWLAPEDHQREFKKSFDFFLEETLGGRTWRTSLPSLGTLVLSL

SEQ ID NO: 14910 - protein, 1166 aa, Homo sapiens
MCRKRTRARTSAAEASLRASILARDCAAAAAIVFLVDRFLYGLDVSGKLLQVAKGLHKLQPATPIAPQVVIRQARISVNSGKLLKAEYILSSLISNNGATGTWLYRNESDKVLVQSVCIQIRGQILQKLGMWYEAAELIWASIVGYLALPQPDKKGLSTSLGILADIFVSMSKNDYEKFKNNPQINLSLLKEFDHHLLSAAEACKLAAAFSAYTPLFVLTAVNIRGTCLLSYSSSNDCPPELKNLHLCEAKEAFEIGLLTKRDDEPVTGKQELHSFVKAAFGLTTVHRRLHGETGTVHAASQLCKEAMGKLYNFSTSSRSQDREALSQEVMSVIAQVKEHLQVQSFSNVDDRSYVPESFECRLDKLILHGQGDFQKILDTYSQHHTSVCEVFESDCGNNKNEQKDAKTGVCITALKTEIKNIDTVSTTQEKPHCQRDTGISSSLMGKNVQRELRRGGRRNWTHSDAFRVSLDQDVETETEPSDYSNGEGAVFNKSLSGSQTSSAWSNLSGFSSSASWEEVNYHVDDRSARKEPGKEHLVDTQCSTALSEELENDREGRAMHSLHSQLHDLSLQEPNNDNLEPSQNQPQQQMPLTPFSPHNTPGIFLAPGAGLLEGAPEGIQEVRNMGPRNTSAHSRPSYRSASWSSDSGRPKNMGTHPSVQKEEAFEIIVEFPETNCDVKDRQGKEQGEEISERGAGPTFKASPSWVDPEGETAESTEDAPLDFHRVLHNSLGNISMLPCSSFTPNWPVQNPDSRKSGGPVAEQGIDPDASTVDEEGQLLDSMDVPCTNGHGSHRLCILRQPPGQRAETPNSSVSGNILFPVLSEDCTTTEEGNQPGNMLNCSQNSSSSSVWWLKSPAFSSGSSEGDSPWSYLNSSGSSWVSLPGKMRKEILEARTLQPDDFEKLLAGVRHDWLFQRLENTGVFKPSQLHRAHSALLLKYSKKSELWTAQETIVYLGDYLTVKKKGRQRNAFWVHHLHQEEILGRYVGKDYKEQKGLWHHFTDVERQMTAQHYVTEFNKRLYEQNIPTQIFYIPSTILLILEDKTIKGCISVEPYILGEFVKLSNNTKVVKTEYKATEYGLAYGHFSYEFSNHRDVVVDLQGWVTGNGKGLIYLTDPQIHSVDQKVFTTNFGKRGIFYFFNNQHVECNEICHRLSLTRPSMEKPCT

SEQ ID NO: 14911 - protein, 157 aa, Homo sapiens
MKNHLLFWGVLAVFIKAVHVKGSRDSSASASRVAGITAQEDERIVLVDNKCKCARITSRIIRSSEDPNEDIVERNIRIIVPLNNRENISDPTSPLRTRFVYHLSDLCKKCDPTEVELDNQIVTATQSNICDEDSATETCYTYDRNKCYTAVVPLVYG

SEQ ID NO: 14912 - protein, 78 aa, Homo sapiens
MEGKWLLCMLLVLGTAIVEAHDGHDDDVIDIEDDLDDVIEEVEDSKPDTTAPPSSPKVTYKAPVPTGEVYFADSFDRG

SEQ ID NO: 14913 - protein, 1306 aa, Homo sapiens
MQRGAALCLRLWLCLGLLDGLVSGYSMTPPTLNITEESHVIDTGDSLSISCRGQHPLEWAWPGAQEAPATGDKDSEDTGVVRDCEGTDARPYCKVLLLHEVHANDTGSYVCYYKYIKARIEGTTAASSYVFVRDFEQPFINKPDTLLVNRKDAMWVPCLVSIPGLNVTLRSQSSVLWPDGQEVVWDDRRGMLVSTPLLHDALYLQCETTWGDQDFLSNPFLVHITGNELYDIQLLPRKSLELLVGEKLVLNCTVWAEFNSGVTFDWDYPGKQAERGKWVPERRSQQTHTELSSILTIHNVSQHDLGSYVCKANNGIQRFRESTEVIVHENPFISVEWLKGPILEATAGDELVKLPVKLAAYPPPEFQWYKDGKALSGRHSPHALVLKEVTEASTGTYTLALWNSAAGLRRNISLELVVNVPPQIHEKEASSPSIYSRHSRQALTCTAYGVPLPLSIQWHWRPWTPCKMFAQRSLRRRQQQDLMPQCRDWRAVTTQDAVNPIESLDTWTEFVEGKNKTVSKLVIQNANVSAMYKCVVSNKVGQDERLIYFYVTTIPDGFTIESKPSEELLEGQPVLLSCQADSYKYEHLRWYRLNLSTLHDAHGNPLLLDCKNVHLFATPLAASLEEVAPGARHATLSLSIPRVAPEHEGHYVCEVQDRRSHDKHCHKKYLSVQALEAPRLTQNLTDLLVNVSDSLEMQCLVAGAHAPSIVWYKDERLLEEKSGVDLADSNQKLSIQRVREEDAGRYLCSVCNAKGCVNSSASVAVEGSEDKGSMEIVILVGTGVIAVFFWVLLLLIFCNMRRPAHADIKTGYLSIIMDPGEVPLEEQCEYLSYDASQWEFPRERLHLGRVLGYGAFGKVVEASAFGIHKGSSCDTVAVKMLKEGATASEHRALMSELKILIHIGNHLNVVNLLGACTKPQGPLMVIVEFCKYGNLSNFLRAKRDAFSPCAEKSPEQRGRFRAMVELARLDRRRPGSSDRVLFARFSKTEGGARRASPDQEAEDLWLSPLTMEDLVCYSFQVARGMEFLASRKCIHRDLAARNILLSESDVVKICDFGLARDIYKDPDYVRKGSARLPLKWMAPESIFDKVYTTQSDVWSFGVLLWEIFSLGASPYPGVQINEEFCQRLRDGTRMRAPELATPAIRRIMLNCWSGDPKARPAFSELVEILGDLLQGRGLQEEEEVCMAPRSSQSSEEGSFSQVSTMALHIAQADAEDSPPSLQRHSLAARYYNWVSFPGCLARGAETRGSSRMKTFEEFPMTPTTYKGSVDNQTDSGMVLASEEFEQIESRHRQESGFRGTRRTRGA

SEQ ID NO: 14914 - protein, 253 aa, Homo sapiens
MRPAALRGALLGCLCLALLCLGGADKRLRDNHEWKKLIMVQHWPETVCEKIQNDCRDPPDYWTIHGLWPDKSEGCNRSWPFNLEEIKDLLPEMRAYWPDVIHSFPNRSRFWKHEWEKHGTCAAQVDALNSQKKYFGRSLELYRELDLNSVLLKLGIKPSINYYQVADFKDALARVYGVIPKIQCLPPSQDEEVQTIGQIELCLTKQDQQLQNCTEPGEQPSPKQEVWLANGAAESRGLRVCEDGPVFYPPPKK

SEQ ID NO: 14915 - protein, 118 aa, Homo sapiens
MPGAEDDVVTPGTSEDRYKSGLTTLVATSVNSVTGIRIEDLPTSESTVHAQEQSPSATASNVATSHSTEKVDGDTQTTVEKDGLSTVTLVGIIVGVLLAIGFIGAIIVVVMRKMSGRP

SEQ ID NO: 14916 - protein, 1036 aa, Homo sapiens
MGLGTLSPRMLVWLVASGIVFYGELWVCAGLDYDYTFDGNEEDKTETIDYKDPCKAAVFWGDIALDDEDLNIFQIDRTIDLTQNPFGNLGHTTGGLGDHAMSKKRGALYQLIDRIRRIGFGLEQNNTVKGKVPLQFSGQNEKNRVPRAATSRTERIWPGGVIPYVIGGNFTGSQRAMFKQAMRHWEKHTCVTFIERSDEESYIVFTYRPCGCCSYVGRRGNGPQAISIGKNCDKFGIVVHELGHVIGFWHEHTRPDRDNHVTIIRENIQPGQEYNFLKMEPGEVNSLGERYDFDSIMHYARNTFSRGMFLDTILPSRDDNGIRPAIGQRTRLSKGDIAQARKLYRCPACGETLQESNGNLSSPGFPNGYPSYTHCIWRVSVTPGEKIVLNFTTMDLYKSSLCWYDYIEVRDGYWRKSPLLGRFCGDKLPEVLTSTDSRMWIEFRSSSNWVGKGFAAVYEAICGGEIRKNEGQIQSPNYPDDYRPMKECVWKITVSESYHVGLTFQSFEQEHQENPGIASKARESLILIWKPIERHDNCAYDYLEVRDGTSENSPLIGRFCGYDKPEDIRSTSNTLWMKFVSDGTVNKAGFAANFFKEEDECAKPDRGGCEQRCLNTLGSYQCACEPGYELGPDRRSCEAACGGLLTKLNGTITTPGWPKEYPPNKNCVWQVVAPTQYRISVKFEFFELEGNEVCKYDYVEIWSGLSSESKLHGKFCGAEVPEVITSQFNNMRIEFKSDNTVSKKGFKAHFFSDKDECSKDNGGCQHECVNTMGSYMCQCRNGFVLHDNKHDCKEAECEQKIHSPSGLITSPNWPDKYPSRKECTWEISATPGHRIKLAFSEFEIEQHQECAYDHLEVFDGETEKSPILGRLCGNKIPDPLVATGNKMFVRFVSDASVQRKGFQATHSTECGGRLKAESKPRDLYSHAQFGDNNYPGQVDCEWLLVSERGSRLELSFQTFEVEEEADCGYDYVELFDGLDSTAVGLGRFCGSGPPEEIYSIGDSVLIHFHTDDTINKKGFHIRYKSIRYPDTTHTKK

SEQ ID NO: 14917 - protein, 856 aa, Homo sapiens
MALVLGSLLLLGLCGNSFSGGQPSSTDAPKAWNYELPATNYETQDSHKAGPIGILFELVHIFLYVVQPRDFPEDTLRKFLQKAYESKIDYDKIVYYEAGIILCCVLGLLFIILMPLVGYFFCMCRCCNKCGGEMHQRQKENGPFLRKCFAISLLVICIIISIGIFYGFVANHQVRTRIKRSRKLADSNFKDLRTLLNETPEQIKYILAQYNTTKDKAFTDLNSINSVLGGGILDRLRPNIIPVLDEIKSMATAIKETKEALENMNSTLKSLHQQSTQLSSSLTSVKTSLRSSLNDPLCLVHPSSETCNSIRLSLSQLNSNPELRQLPPVDAELDNVNNVLRTDLDGLVQQGYQSLNDIPDRVQRQTTTVVAGIKRVLNSIGSDIDNVTQRLPIQDILSAFSVYVNNTESYIHRNLPTLEEYDSYWWLGGLVICSLLTLIVIFYYLGLLCGVCGYDRHATPTTRGCVSNTGGVFLMVGVGLSFLFCWILMIIVVLTFVFGANVEKLICEPYTSKELFRVLDTPYLLNEDWEYYLSGKLFNKSKMKLTFEQVYSDCKKNRGTYGTLHLQNSFNISEHLNINEHTGSISSELESLKVNLNIFLLGAAGRKNLQDFAACGIDRMNYDSYLAQTGKSPAGVNLLSFAYDLEAKANSLPPGNLRNSLKRDAQTIKTIHQQRVLPIEQSLSTLYQSVKILQRTGNGLLERVTRILASLDFAQNFITNNTSSVIIEETKKYGRTIIGYFEHYLQWIEFSISEKVASCKPVATALDTAVDVFLCSYIIDPLNLFWFGIGKATVFLLPALIFAVKLAKYYRRMDSEDVYDDVETIPMKNMENGNNGYHKDHVYGIHNPVMTSPSQH

SEQ ID NO: 14918 - protein, 82 aa, Homo sapiens
MARAAPLLAALTALLAAAAAGGDAPPGKIGAGRTRGGWGWDWGLCCGPFSPAALWTSGADRRVREGNRGWPLGHHLSQQAAL

SEQ ID NO: 14919 - protein, 127 aa, Homo sapiens
MQTAGALFISPALIRCCTRGLIRPVSASFLNSPVNSSKQVARREFQTSVVSRDIDTAAKFIGAGAATVGVAGSGAGIGTVFGSLIIGYARNPSLKQQLFSYAILGFALSEAMGLFCLMVAFLILFAM

SEQ ID NO: 14920 - protein, 402 aa, Homo sapiens
MVGQRVLLLVAFLLSGVLLSEAAKILTISTLDIKEEEKSYQVIRWFSPEDHQKRIKKHFDSYIETALDGRKESEALVKLMEIFGTQCSYLLSRKDIMDSLKNENYDLVFVEAFDFCSFLIAEKLVKPFVAILPTTFGSLDFGLPSPLSYVPVFPSLLTDHMDFWGRVKNFLMFFSFSRSQWDMQSTFDNTIKEHFPEGSRPVLSHLLLKAELWFVNSDFAFDFARPLLPNTVYIGGLMEKPIKPVPQDLDNFIANFGDAGFVLVAFGSMLNTHQSQEVLKKMHNAFAHLPQGVIWTCQSSHWPRDVHLATNVKIVDWLPQSDLLAHPSIRLFVTHGGQNSVMEAIRHGVPMVGLPVNGDQHGNMVRVVAKNYGVSIRLNQVTADTLTLTMKQVIEDKRYVAL

SEQ ID NO: 14921 - protein, 137 aa, Homo sapiens
MYGKIIFVLLLSEIVSISALSTTEVAMHTSTSSSVTKSYISSQTNDTHKRDTYAATPRAHEVSEISVRTVYPPEEETEITLIIFGVMAGVIGTILLISYGIRRLIKKSPSDVKPLPSPDTDVPLSSVEIENPETSDQ

SEQ ID NO: 14922 - protein, 226 aa, Homo sapiens
MLLRSKPALPPPLMLLLLGPLGPLSPGALPRPAQAQDVVDLDFFTQEPLHLVSPSFLSVTIDANLATDPRFLILLGSPKLRTLARGLSPAYLRFGGTKTDFLIFDPKKESTFEERSYWQSQVNQDICKYGSIPPDVEEKLRLEWPYQEQLLLREHYQKKFKNSTYSRSSVDVLYTFANCSGLDLIFGLNALLRTADLQWNSSNAQLLLDYCSSKGYNISWELGNAS

SEQ ID NO: 14923 - protein, 609 aa, Homo sapiens
MDFLLALVLVSSLYLQAAAEFDGRWPRQIVSSIGLCRYGGRIDCCWGWARQSWGQCQPFYVLRQRIARIRCQLKAVCQPRCKHGECIGPNKCKCHPGYAGKTCNQDEHIPAPLDQGSEQPLFQPLDHQATSLPSRDLNECGLKPRPCKHRCMNTYGSYKCYCLNGYMLMPDGSCSSALTCSMANCQYGCDVVKGQIRCQCPSPGLQLAPDGRTCVDVDECATGRASCPRFRQCVNTFGSYICKCHKGFDLMYIGGKYQCHDIDECSLGQYQCSSFARCYNIRGSYKCKCKEGYQGDGLTCVYIPKVMIEPSGPIHVPKGNGTILKGDTGNNNWIPDVGSTWWPPKTPYIPPIITNRPTSKPTTRPTPKPTPIPTPPPPPPLPTELRTPLPPTTPERPTTGLTTIAPAASTPPGGITVDNRVQTDPQKPRGDVFIPRQPSNDLFEIFEIERGVSADDEAKDDPGVLVHSCNFDHGLCGWIREKDNDLHWEPIRDPAGGQYLTVSAAKAPGGKAARLVLPLGRLMHSGDLCLSFRHKVTGLHSGTLQVFVRKHGAHGAALWGRNGGHGWRQTQITLRGADIKSVVFKGEKRRGHTGEIGLDDVSLKKGHCS

SEQ ID NO: 14924 - protein, 698 aa, Homo sapiens
MQAHELFRYFRMPELVDFRQYVRTLPTNTLMGFGAFAALTTFWYATRPKPLKPPCDLSMQSVEVAGSGGARRSALLDSDEPLVYFYDDVTTLYEGFQRGIQVSNNGPCLGSRKPDQPYEWLSYKQVAELSECIGSALIQKGFKTAPDQFIGIFAQNRPEWVIIEQGCFAYSMVIVPLYDTLGNEAITYIVNKAELSLVFVDKPEKAKLLLEGVENKLIPGLKIIVVMDAYGSELVERGQRCGVEVTSMKAMEDLGRANRRKPKPPAPEDLAVICFTSGTTGNPKGAMVTHRNIVSDCSAFVKATEKALPLSASDTHISYLPLAHIYEQLLKCVMLCHGAKIGFFQGDIRLLMDDLKVLQPTVFPVVPRLLNRMFDRIFGQANTTLKRWLLDFASKRKEAELRSGIIRNNSLWDRLIFHKVQSSLGGRVRLMVTGAAPVSATVLTFLRAALGCQFYEGYGQTECTAGCCLTMPGDWTAGHVGAPMPCNLIKLVDVEEMNYMAAEGEGEVCVKGPNVFQGYLKDPAKTAEALDKDGWLHTGDIGKWLPNGTLKIIDRKKHIFKLAQGEYIAPEKIENIYMRSEPVAQVFVHGESLQAFLIAIVVPDVETLCSWAQKRGFEGSFEELCRNKDVKKAILEDMVRLGKDSGLKPFEQVKGITLHPELFSIDNGLLTPTMKAKRPELRNYFRSQIDDLYSTIKV

SEQ ID NO: 14925 - protein, 171 aa, Homo sapiens
METLYRVPFLVLECPNLKLKKPPWLHMPSAMTVYALVVVSYFLITGGIIYDVIVEPPSVGSMTDEHGHQRPVAFLAYRVNGQYIMEGLASSFLFTMGGLGFIILDRSNAPNIPKLNRFLLLFIGFVCVLLSFFMARVFMRMKLPRSLALLPRLECSGVISAHYKLCLPGAI

SEQ ID NO: 14926 - protein, 313 aa, Homo sapiens
MLKVSAVLCVCAAAWCSQSLAAAAAVAAAGGRSDGGNFLDDKQWLTTISQYDKEVGQWNKFRDDDYFRTWSPGKPFDQALDPAKDPCLKMKCSRHKVCIAQDSQTAVCISHRRLTHRMKEAGVDHRQWRGPILSTCKQCPVVYPSPVCGSDGHTYSFQCKLEYQACVLGKQISVKCEGHCPCPSDKPTSTSRNVKRACSDLEFREVANRLRDWFKALHESGSQNKKTKTLLRPERSRFDTSILPICKDSLGWMFNRLDTNYDLLLDQSELRSIYLDKNEQCTKAFFNSCDTYKDSLISNNEWCYCFQRQQGKR

SEQ ID NO: 14927 - protein, 331 aa, Homo sapiens
MYGKGKSNSSAVPSDSQAREKLALYVYEYLLHVGAQKSAQTFLSEIRWEKNITLGEPPGFLHSWWCVFWDLYCAAPERRETCEHSSEAKAFHDYPFMSPRYPGGPRPPLRIPNQALGGVPGSQPLLPSGMDPTRQQGHPNMGGPMQRMTPPRGMVPLGPQNYGGAMRPPLNALGGPGMPGMNMGPGGGRPWPNPTNANSIPYSSASPGNYVGPPGGGGPPGTPIMPSPADSTNSGDNMYTLMNAVPPGPNRPNFPMGPGSDGPMGGLGGMESHHMNGSLGSGDMDSISKNSPNNMSLSNQPGTPRDDGEMGGNFLNPFQSESYSPSMTMSV

SEQ ID NO: 14928 - protein, 333 aa, Homo sapiens
MLTLQTWLVQALFIFLTTESTGELLDPCGYISPESPVVQLHSNFTAVCVLKEKCMDYFHVNANYIVWKTNHFTIPKEQYTIINRTASSVTFTDIASLNIQLTCNILTFGQLEQNVYGITIISGLPPEKPKNLSCIVNEGKKMRCEWDGGRETHLETNFTLKSEWATHKFADCKAKRDTPTSCTVDYSTVYFVNIEVWVEAENALGKVTSDHINFDPVYKVKPNPPHNLSVINSEELSSILKLTWTNPSIKSVIILKYNIQYRTKDASTWSQIPPEDTASTRSSFTVQDLKPFTEYVFRIRCMKEDGKGYWSDWSEEASGITYEDTLDKPLGSG

SEQ ID NO: 14929 - protein, 170 aa, Homo sapiens
MGPEALSSLLLLLLVASGDADMKGHFDPAKCRYALGMQDRTIPDSDISASSSWSDSTAARHSRLESSDGDGAWCPAGSVFPKEEEYLQVDLQRLHLVALVGTQGRHAGGLGKEFSRSYRLRYSRDGRRWMGWKDRWGQEVISGNEDPEGVVLKDLGPPMVARLVRFYPRA

SEQ ID NO: 14930 - protein, 461 aa, Homo sapiens
MSAQCCAGQLACCCGSAGCSLCCDCCPRIRQSLSTRFMYALYFILVVVLCCIMMSTTVAHKMKEHIPFFEDMCKGIKAGDTCEKLVGYSAVYRVCFGMACFFFIFCLLTLKINNSKSCRAHIHNGFWFFKLLLLGAMCSGAFFIPDQDTFLNAWRYVGAVGGFLFIGIQLLLLVEFAHKWNKNWTAGTASNKLWYASLALVTLIMYSIATGGLVLMAVFYTQKDSCMENKILLGVNGGLCLLISLVAISPWVQNRQPHSGLLQSGVISCYVTYLTFSALSSKPAEVVLDEHGKNVTICVPDFGQDLYRDENLVTILGTSLLIGCILYSCLTSTTRSSSDALQGRYAAPELEIARCCFCFSPGGEDTEEQQPGKEGPRVIYDEKKGTVYIYSYFHFVFFLASLYVMMTVTNWFNYESANIESFFSGSWSIFWVKMASCWICVLLYLCTLVAPLCCPTREFSV

SEQ ID NO: 14931 - protein, 132 aa, Homo sapiens
MRTYHYIPLFIWTYMFHTVDTILLQEKPNSYLSSKKIAGLTKDDGKMLRRTKRGWMWNQFFLLEEYTGTDTQYVGKLHTDQDKGDGNLKYILTGDGAGSLFVIDENTGDIHAAKKLDREEKSLYILRAKAID

SEQ ID NO: 14932 - protein, 664 aa, Homo sapiens
MQAHELFRYFRMPELVDFRQYVRTLPTNTLMGFGAFAALTTFWYATRPKPLKPPCDLSMQSVEVAGSGGARRSALLDSDEPLVYFYDDVTTLYEGFQRGIQVSNNGPCLGSRKPDQPYEWLSYKQWVIIEQGCFAYSMVIVPLYDTLGNEAITYIVNKAELSLVFVDKPEKAKLLLEGVENKLIPGLKIIVVMDAYGSELVERGQRCGVEVTSMKAMEDLGRANRRKPKPPAPEDLAVICFTSGTTGNPKGAMVTHRNIVSDCSAFVKATENTVNPCPDDTLISFLPLAHMFERVVECVMLCHGAKIGFFQGDIRLLMDDLKVLQPTVFPVVPRLLNRMFDRIFGQANTTLKRWLLDFASKRKEAELRSGIIRNNSLWDRLIFHKVQSSLGGRVRLMVTGAAPVSATVLTFLRAALGCQFYEGYGQTECTAGCCLTMPGDWTAGHVGAPMPCNLIKLVDVEEMNYMAAEGEGEVCVKGPNVFQGYLKDPAKTAEALDKDGWLHTGDIGKWLPNGTLKIIDRKKHIFKLAQGEYIAPEKIENIYMRSEPVAQVFVHGESLQAFLIAIVVPDVETLCSWAQKRGFEGSFEELCRNKDVKKAILEDMVRLGKDSGLKPFEQVKGITLHPELFSIDNGLLTPTMKAKRPELRNYFRSQIDDLYSTIKV

SEQ ID NO: 14933 - protein, 749 aa, Homo sapiens
MSNEVETSATNGQPDQQAAPKAPSKKEKKKGPEKTDEYLLARFKGDGVKYKAKLIGIDDVPDARGDKMSQDSMMKLKGMAAAGRSQGQHKQRIWVNISLSGIKIIDEKTGVIEHEHPVNKISFIARDVTDNRAFGYVCGGEGQHQFFAIKTGQQAEPLVVDLKDLFQVIYNVKKKEEEKKKIEEASKAVENGSEALMILDDQTNKLKSESKDILLVDLNSEIDTNQNSLRENPFLTNGITSCSLPRPTPQASFLPENAFSANLNFFPTPNPDPFRDDPFTQPDQSTPSSFDSLKSPDQKKENSSSSSTPLSNGPLNGDVDYFGQQFDQISNRTGKQEAQAGPWPFSSSQTQPAVRTQNGVSEREQNGFSVKSSPNPFVGSPPKGLSIQNGVKQDLESSVQSSPHDSIAIIPPPQSTKPGRGRRTAKSSANDLLASDIFAPPVSEPSGQASPTGQPTALQPNPLDLFKTSAPAPVGPLVGLGGVTVTLPQAGPWNTASLVFNQSPSMAPGAMMGGQPSGFSQPVIFGTSPAVSGWNQPSPFAASTPPPVPVVWGPSASVAPNAWSTTSPLGNPFQSNIFPAPAVSTQPPSMHSSLLVTPPQPPPRAGPPKDISSDAFTALDPLGDKEIKDVKEMFKDFQLRQPPAVPARKGEQTSSGTLSAFASYFNSKVGIPQENADHDDFDANQLLNKINEPPKPAPRQVSLPVTKSTDNAFENPFFKDSFGSSQASVASSQPVSSEMYRDPFGNPFA

SEQ ID NO: 14934 - protein, 90 aa, Homo sapiens
MDRLKSHLTVCFLPSVPFLILVSTLATAKSVTNSTLNGTNVVLGSVPVIIARTDHIIVKEGNSALINCSVYGIPDPQFKWYNSIGKLLKE

SEQ ID NO: 14935 - protein, 1240 aa, Homo sapiens
MFINIKSILWMCSTLIVTHALHKVKVGKSPPVRGSLSGKVSLPCHFSTMPTLPPSYNTSEFLRIKWSKIEVDKNGKDLKETTVLVAQNGNIKIGQDYKGRVSVPTHPEAVGDASLTVVKLLASDAGLYRCDVMYGIEDTQDTVSLTVDGVVFHYRAATSRYTLNFEAAQKACLDVGAVIATPEQLFAAYEDGFEQCDAGWLADQTVRYPIRAPRVGCYGDKMGKAGVRTYGFRSPQETYDVYCYVDHLDGDVFHLTVPSKFTFEEAAKECENQDARLATVGELQAAWRNGFDQCDYGWLSDASVRHPVTVARAQCGGGLLGVRTLYRFENQTGFPPPDSRFDAYCFKRRMSDLSVIGHPIDSESKEDEPCSEETDPVHDLMAEILPEFPDIIEIDLYHSEENEEEEEECANATDVTTTPSVQYINGKHLVTTVPKDPEAAEARRGQFESVAPSQNFSDSSESDTHPFVIAKTELSTAVQPNESTETTESLEVTWKPETYPETSEHFSGGEPDVFPTVPFHEEFESGTAKKGAESVTERDTEVGHQAHEHTEPVSLFPEESSGEIAIDQESQKIAFARATEVTFGEEVEKSTSVTYTPTIVPSSASAYVSEEEAVTLIGNPWPDDLLSTKESWVEATPRQVVELSGSSSIPITEGSGEAEEDEDTMFTMVTDLSQRNTTDTLITLDTSRIITESFFEVPATTIYPVSEQPSAKVVPTKFVSETDTSEWISSTTVEEKKRKEEEGTTGTASTFEVYSSTQRSDQLILPFELESPNVATSSDSGTRKSFMSLTTPTQSEREMTDSTPVFTETNTLENLGAQTTEHSSIHQPGVQEGLTTLPRSPASVFMEQGSGEAAADPETTTVSSFSLNVEYAIQAEKEVAGTLSPHVETTFSTEPTGLVLSTVMDRVVAENITQTSREIVISERLGEPNYGAEIRGFSTGFPLEEDFSGDFREYSTVSHPIAKEETVMMEGSGDAAFRDTQTSPSTVPTSVHISHISDSEGPSSTMVSTSAFPWEEFTSSAEGSGEQLVTVSSSVVPVLPSAVQKFSGTASSIIDEGLGEVGTVNEIDRRSTILPTAEVEGTKAPVEKEEVKVSGTVSTNFPQTIEPAKLWSRQEVNPVRQEIESETTSEEQIQEEKSFESPQNSPATEQTIFDSQTFTETELKTTDYSVLTTKKTYSDDKEMKEEDTSLVNMSTPDPDANGLESYTTLPEATEKSHFFLATALVTESIPAEHVVTDSPI

SEQ ID NO: 14936 - protein, 255 aa, Homo sapiens
LGLLLLLLGAACLIPRSAQVRRLARCPATCSCTKESIICVGSSWVPRIVPGDISSLSLVNGTFSEIKDRMFSHLPSLQLLLLNSNSFTIIRDDAFAGLFHLEYLFIEGNKIETISRNAFRGLRDLTHLSLANNHIKALPRDVFSDLDSLIELDLRGNKFECDCKAKWLYLWLKMTNSTVSDVLCIGPPEYQEKKLNDVTSFDYECTTTDKQEEICEGKIQNLNARVVMNCSRPSSAFRKHTGNGRVAFFLPHGVR

SEQ ID NO: 14937 - protein, 952 aa, Homo sapiens
QLCWLPLLAPLLLLRPPGVQSAGPIRAFVVPHSHMDVGWVYTVQESMRAYAANVYTSVVEELARGQQRRFIAVEQEFFRLWWDGVASDQQKYQVRQLLEEGRLEFVIGGQVMHDEAVTHLDDQILQLTEGHGFLYETFGIRPQFSWHVDPFGASATTPTLFALAGFNAHLGSRIDYDLKAAMQEARGLQFVWRGSPSLSERQEIFTHIMDQYSYCTPSHIPFSNRSGFYWNGVAVFPKPPQDGVYPNMSEPVTPANINLYAEALVANVKQRAAWFRTPHVLWPWGCDKQFFNASVQFANMDPLLDHINSHAAELGVSVQYATLGDYFRALHALNVTWRVRDHHDFLPYSTEPFQAWTGFYTSRSSLKGLARRASALLYAGESMFTRYLWPAPRGHLDPTWALQQLQQLRWAVSEVQHHDAITGTESPKVRDMYATHLASGMLGMRKLMASIVLDELQPQAPMAASSDAGPAGHFASVYNPLAWTVTTIVTLTVGFPGVRVTDEAGHPVPSQIQNSTETPSAYDLLILTTIPGLSYRHYNIRPTAGAQEGTQEPAATVASTLQFGRRLRRRTSHAGRYLVPVANDCYIVLLDQDTNLMHSIWERQSNRTVRVTQEFLEYHVNGDVKQGPISDNYLFTPGKAAVPAWEAVEMEIVAGQLVTEIRQYFYRNMTAQNYTYAIRSRLTHVPQGHDGELLCHRIEQEYQAGPLELNREAVLRTSTNLNSQQVIYSDNNGYQMQRRPYVSYVNNSIARNYYPMVQSAFMEDGKSRLVLLSERAHGISSQGNGQVEVMLHRRLWNNFDWDLGYNLTLNDTSVVHPVLWLLLGSWSLTTALRQRSALALQHRPVVLFGDLAGTAPKLPGPQQQEAVTLPPNLHLQILSIPGWRYSSNHTEHSQNLRKGHRGEAQADLRRVLLRLYHLYEVGEDPVLSQPVTVNLEVNFPTPIQTISQGSKP

SEQ ID NO: 14938 - protein, 429 aa, Homo sapiens
MMLGTEGGEGFVVKVRGLPWSCSADEVQRFFSDCKIQNGAQGIRFIYTREGRPSGEAFVELESEDEVKLALKKDRETMGHRYVEVFKSNNVEMDWVLKHTGPNSPDTANDGFVRLRGLPFGCSKEEIVQFFSGLEIVPNGITLPVDFQGRSTGEAFVQFASQEIAEKALKKHKERIGHRYIEIFKSSRAEVRTHYDPPRKLMAMQRPGPYDRPGAGRGYNSIGRGAGFERMRRGAYGGGYGGYDDYNGYNDGYGFGSDRFGRDLNYCFSGMSDHRYGDGGSTFQSTTGHCVHMRGLPYRATENDIYNFFSPLNPVRVHIEIGPDGRVTGEADVEFATHEDAVAAMSKDKANMQHRYVELFLNSTAGASGGAYGSQMLGGMGLSNQSSYGGPASQQLSGGYGGGYGGQSSMSGYDQVLQENSSDFQSNIA

SEQ ID NO: 14939 - protein, 168 aa, Homo sapiens
MQKSEGSGGTQLKNRATGNYDQRTSSSTQLKHRNAVQGSKSSLSTSSPESARKLHPRPSDKLNPKTINPGLRETKHPYTFVSKEGFRELLLVKGAPEKAIPLLPRLIPVLKAALVHSDDEVFERGLNALVQLSVVVGPSLNDHLKHLLTSGSLSIIKSKIPTYCSICC

SEQ ID NO: 14940 - protein, 148 aa, Homo sapiens
MKRSLQALYCQLLSFLLILALTEALAFAIQEPSPRESLQVLPSGTPPGTMVTAPHSSTRHTSVVMLTPNPDGPPSQAAAPMATPTPRAEGHPPTHTISTIAATVTAPHSESSLSTGPAPAAMATTSSKPEGRPRGQAAPTILLTKPPG

SEQ ID NO: 14941 - protein, 161 aa, Homo sapiens
MWKVSALLFVLGSASLWVLAEGASTGQPEDDTETTGLEGGVAMPGAEDDVVTPGTSEDRYKSGLTTLVATSVNSVTGIRIEDLPTSESTVHAQEQSPSATASNVATSHSTEKVDGDTQTTVEKDGLSTVTLVGIIVGVLLAIGFIGAIIVVVMRKMSGRYS

SEQ ID NO: 14942 - protein, 153 aa, Homo sapiens
MKIPWGSIPVLMLLLLLGLIDISQAQLSCTGPPAIPGIPGIPGTPGPDGQPGTPGIKGEKGLPGLAGDHGEFGEKGDPGIPGNPGKVGPKGPMGPKGGPGAPGAPGPKGESGDYKATQKIAFSATRTINVPLRRDQTIRFDHVITNMNNNYEP

SEQ ID NO: 14943 - protein, 338 aa, Homo sapiens
MLKVSAVLCVCAAAWCSQSLAAAAAVAAAGGRSDGGNFLDDKQWLTTISQYDKEVGQWNKFRDCKLEYQACVLGKQISVKCEGHCPCPSDKPTSTSRNVKRACSDLEFREVANRLRDWFKALHESGSQNKKTKTLLRPERSRFDTSILPICKDSLGWMFNRLDTNYDLLLDQSELRSIYLDKNEQCTKAFFNSCDTYKDSLISNNEWCYCFQRQQDPPCQTELSNIQKRQGVKKLLGQYIPLCDEDGYYKPTQCHGSVGQCWCVDRYGNEVMGSRINGVADCAIDFEISGDFASGDFHEWTDDEDDEDDIMNDEDEIEDDDEDEGDDDDGGDDHDVYI

SEQ ID NO: 14944 - protein, 126 aa, Homo sapiens
MVKFPALTHYWPLIRFLVPLGITNIAIDFGEQVSPGPAPHARSPCLGLTRPDTGAEGSHLLRVPLYPETFGRVCSLSRVTFPAPHSLPPSPQLFSRLFQPSLENVKKTGWCEASPMEGFLVHGSIM

SEQ ID NO: 14945 - protein, 286 aa, Homo sapiens
MGPEALSSLLLLLLVASGDADMKGHFDPAKCRYALGMQDRTIPDSDISASSSWSDSTAARHSRLESSDGDGAWCPAGSVFPKEEEYLQVDLQRLHLVALVGTQGRHAGGLGKEFSRSYRLRYSRDGRRWMGWKDRWGQEVISGNEDPEGVVLKDLGPPMVARLVRFYPRADRVMSVCLRVELYGCLWRDGLLSYTAPVGQTMYLSEAVYLNDSTYDGHTVGGLQYGGLGQLADGVVGLDDFRKSQELRVWPGYDYVGWSNHSFSSGYVEMEFEFDRLRAFQAMQVH

SEQ ID NO: 14946 - protein, 61 aa, Homo sapiens
MEGKWLLCMLLVLGTAIVEAHDGHDDDVIDIEDDLDDVIEEVEDSKPDTTAPPSSPKESGR

SEQ ID NO: 14947 - protein, 59 aa, Homo sapiens
MTILGTTFGMVFSLLQVVSGESGYAQNGDLEDAELDDYSFSCYSQLEVNGSQHSLTCAF

SEQ ID NO: 14948 - protein, 216 aa, Homo sapiens
MAAKVFESIGKFGLALAVAGGVVNSALYNVDAGHRAVIFDRFRGVQDIVVGEGTHFLIPWVQKPIIFDCRSRPRNVPVITGSKDLQNVNITLRILFRPVASQLPRIFTSIGEDYDERVLPSITTEILKSVVARFDAGELITQRELVSRQVSDDLTERAATFGLILDDVSLTHLTFGKEFTEAVEAKQVAQQEAERARFVVEKAEQQKKAAIISAEG

SEQ ID NO: 14949 - protein, 47 aa, Homo sapiens
MDLIRGVLLRLLLLASSLGPGAVSLRAAIRKPGRCWRMTVTKTWTEP

SEQ ID NO: 14950 - protein, 68 aa, Homo sapiens
MAGRVPSLLVLLVFPSSCLAFRSPLSVFKRFKETTRPFSNECLGTTRPVVPIDSSDFALDIRMPGVTP

SEQ ID NO: 14951 - protein, 255 aa, Homo sapiens
MPRSVVGTACMYFKRFYLNNSVMEYHPRIIMLTCAFLACKVDEFNVSSPQFVGNLRESPLGQEKALEQILEYELLLIQQLNFHLIVHNPYRPFEGFLIDLKTRYPILENPEILRKTADDFLNRIALTDAYLLYTPSQIALTAILSSASRAGITMESYLSESLMLKENRTCLSQLLDIMKSMRNLVKKYEPPRSEEVAVLKQKLERCHSAELALNVITKKRKGYEDDDYVSKKSKHEEVCFTPKMNSKLFLLYILV

SEQ ID NO: 14952 - protein, 158 aa, Homo sapiens
MGTSHPAFLVLGCLLTGLSLILCQLSLPSILPNENEKVVQLNSSFSLRCFGESEVSWQYPMSEEESSDVEIRNEENNSGLFVTVLEVSSASAAHTGLYTCYYNHTQTEENELEGRHIYIYVPDPDVAFVPLGMTDYLVIVEDDDSAIIPCRTTDPETP

SEQ ID NO: 14953 - protein, 175 aa, Homo sapiens
MGPERTGAAPLPLLLVLALSQGILNCCLAYNVGLPEAKIFSGPSSEQFGYAVQQFINPKGNWLLVGSPWSGFPENRMGDVYKCPVDLSTATCEKLNLQTSTSIPNVTEMKTNMSLGLILTRNMGTGGFLTCGPLWAQQCGNQYYTTGVCSDISPDFQLSASFSPATQRGVNSVCQ

SEQ ID NO: 14954 - protein, 114 aa, Homo sapiens
MRLLLALLGVLLSVPGPPVLSLEASEEVELEPCLAPSLEQQEQELTVALGQPVRLCCGRAERGGHWYKEGSRLAPAGRVRGWRGRLEIASFLPEDAGRYLCLARGSMIVLQNLT

SEQ ID NO: 14955 - protein, 238 aa, Homo sapiens
MPGPWLLLALALTLNLTGVPGGRAQPEAAQQEAVTAAEHPGLDDFLRQVERLLFLRENIQRLQGDQASQIFQSDWLSKRQHPGKREEEEEEGVEEEEEEEGGAVGPHKRQHPGRREDEASWSVDVTQHKRQHPGRRSPWLAYAVPKRQHPGRRLADPKAQRSWEEEEEEEEREEDLMPEKRQHPGKRALGGPCGPQGAYGQAGLLLGLLDDLSRSQGAEEKRQHPGRRAAWVREPLEE

SEQ ID NO: 14956 - protein, 213 aa, Homo sapiens
MERASCLLLLLLPLVHVSATTPEPCELDDEDFRCVCNFSEPQPDWSEAFQCVSAVEVEIHAGGLNLEPFLKRVDADADPRQYADTVKALRVRRLTVGAAQVPAQLLVGALRVLAYSRLKELTLEDLKITGTMPPLPLEATGLALSSLRLRNVSWATGRSWLAELQQWLKPGLKVLSIAQAHSPAFSCEQVRAFPALTSLDLSDNPGLGERGLM

SEQ ID NO: 14957 - protein, 103 aa, Homo sapiens
MALGVPISVYLLFNAMTALTEEAAVTVTPPITAQQADNIEGPIALKFSHLCLEDHNSYCINGACAFHHELEKAICRCFTGYTGERCLKLKSPYNVCSGERRPL

SEQ ID NO: 14958 - protein, 298 aa, Homo sapiens
MAETLFWTPLLVVLLAGLGDTEAQQTTLHPLVGRVFVHTLDHETFLSLPEHVAVPPAVHITYHAHLQGHPDLPRWLRYTQRSPHHPGFLYGSATPEDRGLQVIEVTAYNRDSFDTTRQRLVLEIGDPEGPLLPYQAEFLVRSHDAEEVLPSTPASRFLSALGGLWEPGELQLLNVTSALDRGGRVPLPIEGRKEGVYIKVGSASPFSTCLKMVASPDSHARCAQGQPPLLSCYDTLAPHFRVDWCNVTLAEERPGYLRHPDGPPLHHPREHRGAAADGGQPRGAPATLHPAHVQCAHR

SEQ ID NO: 14959 - protein, 205 aa, Homo sapiens
MPFYSASLIETVQSEIIRDNTGILECVKEGIGRVIGMGVPHSKRLLPLLSLIFPTVLHGVLHYIISSVIQKFVLLILKRKTYNSHLAESTSPVQSMLDAYFPELIANFAASLCSDVILYPLETVLHRLHIQGTRTIIDNTDLGYEVLPINTQYEGMRDCINTIRQEEGVFGFYKGFGAVIIQYTLHAAVLQITKIIYSTLLQNNI

SEQ ID NO: 14960 - protein, 182 aa, Homo sapiens
MKSLLLLVLISICWADHLSDNYTLDHDRAIHIQENGPHLLVEAEQAKVFSHRGGNVTLPCKFYRDPTAFGSGIHKIRIKWTKLTSDYLKEVDVFVSMGYHKKTYGGYQGRVFLKGGSDSDASLVITDLTLEDYGRYKCEVIEGLEDDTVVVALDLQGVVFPYFPRLGRYNLNFHEAQQACLD

SEQ ID NO: 14961 - protein, 617 aa, Homo sapiens
MLVPLAKLSCLAYQCFHALKIKKNYLPLCATRWSSTSTVPRITTHYTIYPRDKDKRWEGVNMERFAEEADVVIVGAGPAGLSAAVRLKQLAVAHEKDIRVCLVEKAAQIGAHTLSGACLDPGAFKELFPDWKEKGAPLNTPVTEDRFGILTEKYRIPVPILPGLPMNNHGNYIVRLGHLVSWMGEQAEALGVEVYPGYAAAEVLFHDDGSVKGIATNDVGIQKDGAPKATFERGLELHAKVTIFAEGCHGHLAKQLYKKFDLRANCEPQTYGIGLKELWVIDEKNWKPGRVDHTVGWPLDRHTYGGSFLYHLNEGEPLVALGLVVGLDYQNPYLSPFREFQRWKHHPSIRPTLEGGKRIAYGARALNEGGFQSIPKLTFPGGLLIGCSPGFMNVPKIKGTHTAMKSGILAAESIFNQLTSENLQSKTIGLHVTEYEDNLKNSWVWKELYSVRNIRPSCHGVLGVYGGMIYTGIFYWILRGMEPWTLKHKGSDFERLKPAKDCTPIEYPKPDGQISFDLLSSVALSGTNHEHDQPAHLTLRDDSIPVNRNLSIYDGPEQRFCPAGVYEFVPVEQGDGFRLQINAQNCVHCKTCDIKDPSQNINWVVPEGGGGPAYNGM

SEQ ID NO: 14962 - protein, 809 aa, Homo sapiens
MLRFPTCFPSFRVVGEKQLPQEIIFLVWSPKRDLIALANTAGEVLLHRLASFHRVWSFPPNENTGKEVTCLAWRPDGKLLAFALADTKKIVLCDVEKPESLHSFSVEAPVSCMHWMEVTVESSVLTSFYNAEDESNLLLPKLPTLPKNYSNTSKIFSEENSDEIIKLLGDVRLNILVLGGSSGFIELYAYGMFKIARVTGIAGTCLALCLSSDLKSLSVVTEVSTNGASEVSYFQLETNLLYSFLPEVTRMARKFTHISALLQYINLSLTCMCEAWEEILMQMDSRLTKFVQEKNTTTSVQDEFMHLLLWGKASAELQTLLMNQLTVKGLKKLGQSIESSYSSIQKLVISHLQSGSESLLYHLSELKGMASWKQKYEPLGLDAAGIEEAITAVGSFILKANELLQVIDSSMKNFKAFFRWLYVAMLRMTEDHVLPELNKVMTQKDITFVAEFLTEHFNEAPDLYNRKGKYFNVERVGQYLKDEDDDLVSPPNTEGNQWYDFLQNSSHLKESPLLFPYYPRKSLHFVKRRMENIIDQCLQKPADVIGKSMNQAICIPLYRDTRSEDSTRRLFKFPFLWNNKTSNLHYLLFTILEDSLYKMCILRRHTDISQSVSNGLIAIKFGSFTYATTEKVRRSIYSCLDAQFYDDETVTVVLKDTVGREGRDRLLVQLPLSLVYNSEDSAEYQFTGTYSTRLDEQCSAIPTRTMHFEKHWRLLESMKAQYVAGNGFRKVSCVLSSNLRHVRVFEMDIDDEWELDESSDEEEEASNKPVKIKEEVLSESEAENQQAGAAALAPEIVIKVEKLDPELDS

SEQ ID NO: 14963 - protein, 103 aa, Homo sapiens
MALGVPISVYLLFNAMTALTEEAAVTVTPPITAQQGNWTVNKTEADNIEGPIALKFSHLCLEDHNSYCINGACAFHHELEKAICRCLKLKSPYNVCSGERRPL

SEQ ID NO: 14964 - protein, 476 aa, Homo sapiens
MKRVLVLLLAVAFGHALERGRDYEKNKVCKEFSHLGKEDFTSLSLVLYSRKFPSGTFEQVSQLVKEVVSLTEACCAEGADPDCYDTRTSALSAKSCESNSPFPVHPGTAECCTKEGLERKLCMAALKHQPQEFPTYVEPTNDEICEAFRKDPKEYANQFMWEYSTNYGQAPLSLLVSYTKSYLSMVGSCCTSASPTVCFLKERLQLKHLSLLTTLSNRVCSQYAAYGEKKSRLSNLIKLAQKVPTADLEDVLPLAEDITNILSKCCESASEDCMAKELPEHTVKLCDNLSTKNSKFEDCCQEKTAMDVFVCTYFMPAAQLPELPDVELPTNKDVCDPGNTKVMDKYTFELSRRTHLPEVFLSKVLEPTLKSLGECCDVEDSTTCFNAKGPLLKKELSSFIDKGQELCADYSENTFTEYKKKLAERLKAKLPDATPTELAKLVNKHSDFASNCCSINSPPLYCDSETRVGATQGNDL

SEQ ID NO: 14965 - protein, 169 aa, Homo sapiens
MRLLILTCLVAVALARPKLPLRYPERLQNPSESSEPIPLESREEYMNGMNRQRNILREKQTDEIKNCVVAEPEKMESSISSSSEEQFCRLNEYNQLQLQAAHAQEQIRRMNENSHVQVPFQQLNQLAAYPYAVWYYPQIMQYVPFPPFSDISNPTAHENYEKNNVMLQW

SEQ ID NO: 14966 - protein, 465 aa, Homo sapiens
MTSMASLFSFTSPAVKRLLGWKQGDEEEKWAEKAVDALVKKLKKKKGAMEELEKALSSPGQPSKCVTIPRSLDGRLQVSHRKGLPHVIYCRVWRWPDLQSHHELKPLDICEFPFGSKQKEVCINPYHYKRVESPVLPPVLVPRHNEFNPQHSLLVQFRNLSHNEPHMPQNATFPDSFHQPNNTPFPLSPNSPYPPSPASSTYPNSPASSGPGSPFQLPADTPPPAYMPPDDQMGQDNSQPMDTSNNMIPQIMPSISSRDVQPVAYEEPKHWCSIVYYELNNRVGEAFHASSTSVLVDGFTDPSNNKSRFCLGLLSNVNRNSTIENTRRHIGKGVHLYYVGGEVYAECLSDSSIFVQSRNCNFHHGFHPTTVCKIPSSCSLKIFNNQEFAQLLAQSVNHGFEAVYELTKMCTIRMSFVKGWGAEYHRQDVTSTPCWIEIHLHGPLQWLDKVLTQMGSPLNPISSVS

SEQ ID NO: 14967 - protein, 48 aa, Homo sapiens
MAAVETRVCETDGCSSEAKLQCPTCIKLGIQGSYFCSQQRGRNQRLLF

SEQ ID NO: 14968 - protein, 354 aa, Homo sapiens
MFINIKSILWMCSTLIVTHALHKVKVGKSPPVRGSLSGKVSLPCHFSTMPTLPPSYNTSEFLRIKWSKIEVDKNGKDLKETTVLVAQNGNIKIGQDYKGRVSVPTHPEAVGDASLTVVKLLASDAGLYRCDVMYGIEDTQDTVSLTVDGVVFHYRAATSRYTLNFEAAQKACLDVGAVIATPEQLFAAYEDGFEQCDAGWLADQTVRYPIRAPRVGCYGDKMGKAGVRTYGFRSPQETYDVYCYVDHLDGDVFHLTVPSKFTFEEAAKECENQDARLATVGELQAAWRNGFDQCDYGWLSDASVRHPVTVARAQCGGGLLGVRTLYRFENQTGFPPPDSRFDAYCFKRKCLIPF

SEQ ID NO: 14969 - protein, 393 aa, Homo sapiens
MLKVSAVLCVCAAAWCSQSLAAAAAVAAAGGRSDGGNFLDDKQWLTTISQYDKEVGQWNKFRDDDYFRTWSPGKPFDQALDPAKDPCLKMKCSRHKVCIAQDSQTAVCISHRRLTHRMKEAGVDHRQWRGPILSTCKQCPVVYPSPVCGSDGHTYSFQCKLEYQACVLGKQISVKCEGHCPCPSDKPTSTSRNVKRGFDTSILPICKDSLGWMFNRLDTNYDLLLDQSELRSIYLDKNEQCTKAFFNSCDTYKDSLISNNEWCYCFQRQQDPPCQTELSNIQKRQGVKKLLGQYIPLCDEDGYYKPTQCHGSVGQCWCVDRYGNEVMGSRINGVADCAIDFEISGDFASGDFHEWTDDEDDEDDIMNDEDEIEDDDEDEGDDDDGGDDHDVYI

SEQ ID NO: 14970 - protein, 145 aa, Homo sapiens
MKRVLVLLLAVAFGHALERGRDYEKNKVCKEFSHLGKEDFTSLSLVLYSRKFPSGTFEQVSQLVKEVVSLTEACCAEGADPDCYDTRTSALSAKSCESNSPFPVHPGTAECCTKEGLERKLCMAALKHQPQEFPTYVEPTNDEIC

SEQ ID NO: 14971 - protein, 116 aa, Homo sapiens
MVLLHWCLLWLLFPLSSRTQKLPTRDEELFQMQIRDKAFFHDSSVIPDGAEISSYLFRDTPKRYFFVVEEDNTPLSVTVTPCDAPLEWKLSLQELPEDRSGEGSGDLEPLEQQKQQ

SEQ ID NO: 14972 - protein, 466 aa, Homo sapiens
MPYEIKKVFASLPQVERGVSKIIGGDPKGNNFLYTNGKCVILRNIDDHSRFVNCVRFSPDGNRFATASADGQIYIYDGKTGEKVCALGGSKAHDGGIYAISWSPDSTHLLSASGDKTSKIWDVSVNSVVSTFPMGSTVLDQQLGCLWQKDHLLSVSLSGYINYLDRNNPSKPLHVIKGHSKSIQCLTVHKNGGKSYIYSGSHDGHINYWDSETGENDSFAGKGHTNQVSRMTVDESGQLISCSMDDTVRYTSLMLRDYSGQGVVKLDVQPKCVAVGPGGYAVVVCIGQIVLLKDQRKCFSIDNPGYEPEVVAVHPGGDTVAIGGVDGNVRLYSILGTTLKDEGKLLEAKGPVTDVAYSHDGAFLAVCDASKVVTVFSVADGYSENNVFYGHHAKIVCLAWSPDNEHFASGGMDMMVYVWTLSDPETRVKIQDAHRLHHVSSLAWLDEHTLVTTSHDASVKEWTITY

SEQ ID NO: 14973 - protein, 62 aa, Homo sapiens
MDLWQLLLTLALAGSSDAFSGSEATAAILSRAPWSLQSVNPGLKTRWGPCSHIKKMESYMQA

SEQ ID NO: 14974 - protein, 80 aa, Homo sapiens
MTPSPLLLLLLPPLLLGAFPPAAAARGPPKMADKVVPRQVARLGRTVRLQCPVEGDPPPLTMWTKDGRTIHSGWSRFRVL

SEQ ID NO: 14975 - protein, 233 aa, Homo sapiens
MRLLPLLRTVLWAAFLGSPLRGGSSLRHVVYWNSSNPSLRREGYTVQVNVNDYLDIYCPHYNSSGVGPGAGPGPGGGAEQYVLYMVSRNGYRTCNASQGFKRWECNRPHAPHSPIKFSEKFQRYSAFSLGYEFHAGHEYYYISTPTHNLHWKCLRMKVFVCCASTSHSGEKPVPTLPQFTMGPNVKINVLEDFEGENPQVPKLEKSISGTSPKREHLPLAVGIAFFLMTFLAS

SEQ ID NO: 14976 - protein, 794 aa, Homo sapiens
MSKSFQQSSLSRDSQGHGRDLSAAGIGLLAAATQSLSMPASLGRMNQGTARLASLMNLGMSSSLNQQGAHSALSSASTSSHNLQSIFNIGSRGPLPLSSQHRGDADQASNILASFGLSARDLDELSRYPEDKITPENLPQILLQLKRRRTEEGPTLSYGRDGRSATREPPYRVPRDDWEEKRHFRRDSFDDRGPSLNPVLDYDHGSRSQESGYYDRMDYEDDRLRDGERCRDDSFFGETSHNYHKFDSEYERMGRGPGPLQERSLFEKKRGAPPSSNIEDFHGLLPKGYPHLCSICDLPVHSNKEWSQHINGASHSRRCQLLLEIYPEWNPDNDTGHTMGDPFMLQQSTNPAPGILGPPPPSFHLGGPAVGPRGNLGAGNGNLQGPRHMQKGRVETSRVVHIMDFQRGKNLRYQLLQLVEPFGVISNHLILNKINEAFIEMATTEDAQAAVDYYTTTPALVFGKPVRVHLSQKYKRIKKPEGKPDQKFDQKQELGRVIHLSNLPHSGYSDSAVLKLAEPYGKIKNYILMRMKSQAFIEMETREDAMAMVDHCLKKALWFQGRCVKVDLSEKYKKLVLRIPNRGIDLLKKDKSRKRSYSPDGKESPSDKKSKTDGSQKTESSTEGKEQEEKSGEDGEKDTKDDQTEQEPNMLLESEDELLVDEEEAAALLESGSSVGDETDLANLGDVASDGKKEPSDKAVKKDGSASAAAKKKLKKVDKIEELDQENEAALENGIKNEENTEPGAESSENADDPNKDTSENADGQSDENKDDYTIPDEYRIGPYQPNVPVEISE

SEQ ID NO: 14977 - protein, 59 aa, Homo sapiens
MYGKIIFVLLLSGIVSISASSTTGVAMHTSTSSSVTKSYISSQTNGCVIGNIICSDKSK

SEQ ID NO: 14978 - protein, 87 aa, Homo sapiens
MWTVQNRESLGLLSFPVMITMVCCAHSTNEPSNMSYVKETVDRLLKGYDIRLRPDFGGLYTHHVFPAVLERQKAFLFWNPTEPHPRQ

SEQ ID NO: 14979 - protein, 57 aa, Homo sapiens
MIGEPTNFVHTAHVGSGDLFSGMNSVSSIQNQMQSKGGYGGGMPANVQMQLVDTKAG

SEQ ID NO: 14980 - protein, 91 aa, Homo sapiens
MIFWSFVAGVVTFYCSLGPDSLLPNIFFTIKYKPKQLGLQELFPQGHSCAVCGKVKCKRHRPSLLLENYQPWLDLKISSKVDASLSEGCDR

SEQ ID NO: 14981 - protein, 395 aa, Homo sapiens
MWTLRATGREVGSSSCEDTVAPVPYETLNKRFRAAQKNIDRETSHVTMVVAELEKTLSGCPAVDSVVSLLDGVVEKLSVLKRKAVESIQAEDESAKLCKRRIEHLKEHSSDQPAAASVWKRKRMDRMMVEHLLRCGYYNTAVKLARQSGIEDLVNIEMFLTAKEVEESLERRETATCLAWCHDNKSRLRKMKSCLEFSLRIQEFIELIRQNKRLDAVRHARKHFSQAEGSQLDEVRQAMGMLAFPPDTHISPYKDLLDPARWRMLIQQFRYDNYRLHQLGNNSVFTLTLQAGLSAIKTPQCYKEDGSSKSPDCPVCSRSLNKLAQPLPMAHCANSRLVCKISGDVMNENNPPMMLPNGYVYGYNSLLSIRQDDKVVCPRTKEVFHFSQAEKVYIM

SEQ ID NO: 14982 - protein, 1043 aa, Homo sapiens
MVLGTVLLPPNSYGRDQDTSLCCLCTEASESALPDLTEALHRPYGCDVEPQALNEAIRWSSKENLLGATESDPNLFVALYDFVASGDNTLSITKGEKLRVLGYNQNGEWSEVRSKNGQGWVPSNYITPVNSLEKHSWYHGPVSRSAAEYLLSSLINGSFLVRESESSPGQLSISLRYEGRVYHYRINTTADGKVYVTAESRFSTLAELVHHHSTVADGLVTTLHYPAPKCNKPTVYGVSPIHDKWEMERTDITMKHKLGGGQYGEVYVGVWKKYSLTVAVKTLKEDTMEVEEFLKEAAVMKEIKHPNLVQLLGVCTLEPPFYIVTEYMPYGNLLDYLRECNREEVTAVVLLYMATQISSAMEYLEKKNFIHRDLAARNCLVGENHVVKVADFGLSRLMTGDTYTAHAGAKFPIKWTAPESLAYNTFSIKSDVWAFGVLLWEIATYGMSPYPGIDLSQVYDLLEKGYRMEQPEGCPPKVYELMRACWKWSPADRPSFAETHQAFETMFHDSSISEEVAEELGRAASSSSVVPYLPRLPILPSKTRTLKKQVENKENIEGAQDATENSASSLAPGFIRGAQASSGSPALPRKQRDKSPSSLLEDAKETCFTRDRKGGFFSSFMKKRNAPTPPKRSSSFREMENQPHKKYELTGLPEQDRMAMTLPRNCQRSKLQLERTVSTSSQPEENVDRANDMLPKKSEESAAPSRERPKAKLLPRGATALPLRTPSGDLAITEKDPPGVGVAGVAAAPKGKEKNGGARLGMAGVPEDGEQPGWPSPAKAAPVLPTTHNHKVPVLISPTLKHTPADVQLIGTDSQGNKFKLLSEHQVTSSGDKDRPRRVKPKCAPPPPPVMRLLQHPSICSDPTEEPTALTAGQSTSETQEGGKKAALGAVPISGKAGRPVMPPPQVPLPTSSISPAKMANGTAGTKVALRKTKQAAEKISADKISKEALLECADLLSSALTEPVPNSQLVDTGHQLLDYCSGYVDCIPQTRNKFAFREAVSKLELSLQELQVSSAAAGVPGTNPVLNNLLSCVQEISDVVQR

SEQ ID NO: 14983 - protein, 62 aa, Homo sapiens
MAQLWLSCFLLPALVVSVAANVAPKFLANMTSVILPEDLPVVQNGIQECRKLPDETRDTKGY

SEQ ID NO: 14984 - protein, 78 aa, Homo sapiens
MADEIAKAQVARPGGDTIFGKIIRKEIPAKIIFEDDRCLAFHDISPQAPTHFLVIPKKHISQISVAEDDDESVSTFLT

SEQ ID NO: 14985 - protein, 463 aa, Homo sapiens
MDVLTALLLVHLIPVSTPKNGMSSKSRKRIMPDPVTEPPVTDPVYEALLYCNIPSVAERSMEGHAPHHFKLVSVHVFIRHGDRYPLYVIPKTKRPEIDCTLVANRKPYHPKLEAFISHMSKGSGASFESPLNSLPLYPNHPLCEMGELTQTGVVQHLQNGQLLRDIYLKKHKLLPNDWSADQLYLETTGKSRTLQSGLALLYGFLPDFDWKKIYFRHQPSALFCSGSCYCPVRNQYLEKEQRRQYLLRLKNSQLEKTYGEMAKIVDVPTKQLRAANPIDSMLCHFCHNVSFPCTRNGCVDMEHFKVIKTHQIEDERERREKKLYFGYSLLGAHPILNQTIGRMQRATEGRKEELFALYSAHDVTLSPVLSALGLSEARFPRFAARLIFELWQDREKPSEHSVRILYNGVDVTFHTSFCQDHHKRSPKPMCPLENLVRFVKRDMFVALGGSGTNYYDACHREGF

SEQ ID NO: 14986 - protein, 178 aa, Homo sapiens
MKILILGIFLFLCSTPAWAKEKHYYIGIIETTWDYASDHGEKKLISVDTGFQNKWYSEDVTISRPNDQEEITAQILTKKLDNKEHSTLREHSNIYLQNGPDRIGRLYKKALYLQYTDETFRTTIEKPVWLGFLGPIIKAETGDKVYVHLKNLASRPYTFHSHGITYYKEHEGAIYPDN

SEQ ID NO: 14987 - protein, 317 aa, Homo sapiens [sequence omitted]

SEQ ID NO: 14988 - protein, 428 aa, Homo sapiens
MAASIVRRGMLLARQVVLPQLSPAGKRYLLSSAYVDSHKWEAREKEHYCLADLASLMDKTFERKLPVSSLTISRLIDNISSREEIDHAEYYLYKKGECSSSNPQNYSRFRHSPNCWYLRNWTIHTWIRQCLKYDAQDKALYTLVNKVQYGIFPDNFTFNLLMDSFIKKENYKDALSVVFEVMMQEAFEVPSTQLLSLYVLFHCLAKKTDFSWEEERNFGASLLLPGLKQKNSVGFSSQLYGYALLGKVELQQGLRAVYHNMPLIWKPGYLDRALQVMEKVAASPEDIKLCREALDVLGAVLKALTSADGASEEQSQNDEDNQGSEKLVEQLDIEETEQSKLPQYLERFKALHSKLQALGKIESEGLLSLTTQLVKEKLSTCEAEDIATYEQNLQQWHLDLVQLIQREQQQREQAKQEYQAQKAAKASA

SEQ ID NO: 14989 - protein, 673 aa, Homo sapiens
MNPTETKAVKTEPEKKSQSTKLSVVHEKKSQEGKPKEHTEPKSLPKQASDTGSNDAHNKKAVSRSAEQQPSEKSTEPKTKPQDMISAGGESVAGITAISGKPGDKKKEKKSLTPAVPVESKPDKPSGKSGMDAALDDLIDTLGGPEETEEENTTYTGPEVSDPMSSTYIEELGKREVTIPPKYRELLAKPIGPDDAIDALSSDFTCGSPTAAGKKTEKEESTEVLKAQSAGTVRSAAPPQEKKRKVEKDTMSDQALEALSASLGTRQAEPELDLRSIKEVDEAKAKEEKLEKCGEDDETIPSEYRLKPATDKDGKPLLPEPEEKPKPRSESELIDELSEDFDRSECKEKPSKPTEKTEESKAAAPAPVSEAVCRTSMCSIQSAPPEPATLKGTVPDDAVEALADSLGKKEADPEDGKPVMDKVKEKAKEEDREKLGEKEETIPPDYRLEEVKDKDGKPLLPKESKEQLPPMSEDFLLDALSEDFSGPQNASSLKFEDAKLAAAISEVVSQTPASTTQAGAPPRDTSQSDKDLDDALDKLSDSLGQRQPDPDENKPMEDKVKEKAKAEHRDKLGERDDTIPPEYRHLLDDNGQDKPVKPPTKKSEDSKKPADDQDPIDALSGDLDSCPSTTETSQNTAKDKCKKAASSSKAPKNGGKAKDSAKTTEETSKPKDD

SEQ ID NO: 14990 - protein, 777 aa, Homo sapiens
MPQAQKKTTSVSLTIGSSSPKTGVTTAVIQPLSVPVQQVHSPTSYLCRPDGTTTAYFPPVFTKELQNTAVAEGQVVVLECRVRGAPPLQVQWFRQGSEIQDSPDFRILQKKPRSTAEPEEICTLVIAETFPEDAGIFTCSARNDYGSATSTAQLVVTSANTENCSYESMGESNNDHFQHFPPPPPILETSSLELASKKPSEIQQVNNPELGLSRAALQMQFNAAERETNGVHPSRGVNGLINGKANSNKSLPTPAVLLSPTKEPPPLLAKPKLGFPKKASRTARIASDEEIQGTKDAVIQDLERKLRFKEDLLNNGQPRLTYEERMARRLLGADSATVFNIQEPEEETANQEYKVSSCEQRLISEIEYRLERSPVDESGDEVQYGDVPVENGMAPFFEMKLKHYKIFEGMPVTFTCRVAGNPKPKIYWFKDGKQISPKSDHYTIQRDLDGTCSLHTTASTLDDDGNYTIMAANPQGRISCTGRLMVQAVNQRGRSPRSPSGHPHVRRPRSRSRDSGDENEPIQERFFRPHFLQAPGDLTVQEGKLCRMDCKVSGLPTPDLSWQLDGKPVRPDSAHKMLVRENGVHSLIIEPVTSRDAGIYTCIATNRAGQNSFSLELVVAAKEAHKPPVFIEKLQNTGVADGYPVRLECRVLGVPPPQIFWKKENESLTHSTDRVSMHQDNHGYICLLIQGATKEDAGWYTVSAKNEAGIVSCTARLDVYTQWHQQSQSTKPKKVRPSASRYAALSDQGLDIKAAFQPEANPSHLTLNTALVESEDL

SEQ ID NO: 14991 - protein, 1651 aa, Homo sapiens
MAPTLFQKLFSKRTGLGAPGRDARDPDCGFSWPLPEFDPSQIRLIVYQDCERRGRNVLFDSSVKRRNEDISVSDLNTIYSYLHGMEILSNLREHQLRLMSARARYERYSGNQVLFCSETIARCWYILLSGSVLVKGSMVLPPCSFGKQFGGKRGCDCLVLEPSEMIVVENAKDNEDSILQREIPARQSRRRFRKINYKGERQTITDDVEVNSYLSLPADLTKMHLTENPHPQVTHVSSSQSGCSIASDSGSSSLSDIYQATESEVGDVDLTRLPEGPVDSEDDEEEDEEIDRTDPLQGRDLVRECLEKEPADKTDDDIEQLLEFMHQLPAFANMTMSVRRELCSVMIFEVVEQAGAIILEDGQELDSWYVILNGTVEISHPDGKVENLFMGNSFGITPTLDKQYMHGIVRTKVDDCQFVCIAQQDYWRILNHVEKNTHKVEEEGEIVMVHEHRELDRSGTRKGHIVIKATPERLIMHLIEEHSIVDPTYIEDFLLTYRTFLESPLDVGIKLLEWFKIDSLRDKVTRIVLLWVNNHFNDFEGDPAMTRFLEEFEKNLEDTKMNGHLRLLNIACAAKAKWRQVVLQKASRESPLQFSLNGGSEKGFGIFVEGVEPGSKAADSGLKRGDQIMEVNGQNFENITFMKAVEILRNNTHLALTVKTNIFVFKELLFRTEQEKSGVPHIPKIAEKKSNRHSIQHVPGDIEQTSQEKGSKKVKANTVSGGRNKIRKILDKTRFSILPPKLFSDGGLSQSQDDSIVGTRHCRHSLAIMPIPGTLSSSSPDLLQPTTSMLDFSNPSDIPDQVIRVFKVDQQSCYIIISKDTTAKEVVFHAVHEFGLTGASDTYSLCEVSVTPEGVIKQRRLPDQFSKLADRIQLNGRYYLKNNMETETLCSDEDAQELVKESQLSMLQLSTIEVATQLSMRDFDLFRNIEPTEYIDDLFKLNSKTGNTHLKRFEDIVNQETFWVASEILTEANQLKRMKIIKHFIKIALHCRECKNFNSMFAIISGLNLASVARLRGTWEKLPSKYEKHLQDLQDIFDPSRNMAKYRNILSSQSMQPPIIPLFPVVKKDMTFLHEGNDSKVDGLVNFEKLRMISKEIRQVVRMTSANMDPAMMFRQRSLSQGSTNSNMLDVQGGAHKKRARRSSLLNAKKLYEDAQMARKVKQYLSSLDVETDEEKFQMMSLQWEPAYGTLTKNLSEKRSAKSSEMSPVPMRSAGQTTKAHLHQPHRVSQVLQVPAVNLHPIRKKGQTKDPALNTSLPQKVLGTTEEISGKKHTEDTISVASSLHSSPPASPQGSPHKGYTLIPSAKSDNLSDSSHSEISSRSSIVSNCSVDSMSAALQDERCSSQALAVPESTGALEKTEHASGIGDHSQHGPGWTLLKPSLIKCLAVSSSVSNEEISQEHIIIEAADSGRGSWTSCSSSSHDNFQSLPNPKSWDFLNSYRHTHLDDPIAEVEPTDSEPYSCSKSCSRTCGQCKGSLERKSWTSSSSLSDTYEPNYGTVKQRVLESTPAESSEGLDPKDATDPVYKTVTSSTEKGLIVYCVTSPKKDDRYREPPPTPPGYLGISLADLKEGPHTHLKPPDYSVAVQRSKMMHNSLSRLPPASLSSNLVACVPSKIVTQPQRHNLQPFHPKLGDVTDADSEADENEQVSAV

SEQ ID NO: 14992 - protein, 201 aa, Homo sapiens
MLHVEMLTLVFLVLWMCVFSQDPGSKAVADRYAVYWNSSNPRFQRGDYHIDVCINDYLDVFCPHYEDSVPEDKTERYVLYMVNFDGYSACDHTSKGFKRWECNRPHSPNGPLKFSEKFQLFTPFSLGFEFRPGREYFYISSAIPDNGRRSCLKLKVFVRPTNDTVHESAEPSRGENAAQTPRIPSRLLAILLFLLAMLLTL

SEQ ID NO: 14993 - protein, 89 aa, Homo sapiens
MLKVSAVLCVCAAAWCSQSLAAAAAVAAAGGRSDGGNFLDDKQWLTTISQYDKEVGQWNKFRDDDYFRTWSPGKPFDQALSFHDLGIFV

SEQ ID NO: 14994 - protein, 521 aa, Homo sapiens
MATSLHEGPTNQLDLLIRAVEASVHSSNAHCTDKTIEAAEALLHMESPTCLRDSRSPEFIHAAMRPDVITETVVEVSTEESEPMDTSPIPTSPDSHEPMKKKKVGRKPKTQQSPISNGSPELGIKKKPREGKGNTTYLWEFLLDLLQDKNTCPRYIKWTQREKGIFKLVDSKAVSKLWGKHKNKPDMNYETMGRALRYYYQRGILAKVEGQRLVYQFKDMPKNIVVIDDDKSETCNEDLAGTTDEKSLERVSLSAESLLKAASSVRSGKNSSPINCSRAEKGVARVVNITSPGHDASSRSPTTTASVSATAAPRTVRVAMQVPVVMTSLGQKISTVAVQSVNAGAPLITSTSPTTATSPKVVIQTIPTVMPASTENGDKITMQPAKIITIPATQLAQCQLQTKSNLTGSGSINIVGTPLAVRALTPVSIAHGTPVMRLSMPTQQASGQTPPRVISAVIKGPEVKSEAVAKKQEHDVKTLQLVEEKPADGNKTVTHVVVVSAPSAIALPVTMKTEGLVTCEK

SEQ ID NO: 14995 - protein, 103 aa, Homo sapiens
MADEIAKAQVARPGGDTIFGKIIRKEIPAKIIFEDDRCLAFHDISPQAPTHFLVIPKKHISQISVAEDDDESVITKEKPEKPLGLQLPSCFPKLLHHFVSHQQ

SEQ ID NO: 14996 - protein, 91 aa, Homo sapiens
MKMASFLAFLLLNFRVCLLLLQLLMPHSAQFSVLGPSGPILAMVGEDADLPCHLFPTMSAETMELKWVSSSLRQVVNVYADGKEVEDRQSA

SEQ ID NO: 14997 - protein, 111 aa, Homo sapiens
MKENVASATVFTLLLFLNTCLLNGQLPPGKPEIFKCRSPNKETFTCWWRPGTDGGLPTNYSLTYHREGETLMHECPDYITGGPNSCHFGKQYTSMWRTYIMMVNATNQMGS

SEQ ID NO: 14998 - protein, 436 aa, Homo sapiens
MVGQRVLLLVAFLLSGVLLSEAAKILTISTLGGSHYLLLDRVSQILQEHGHNVTMLHQSGKFLIPDIKEEEKSYQVIRWFSPEDHQKRIKKHFDSYIETALDGRKESEALVKLMEIFGTQCSYLLSRKDIMDSLKNENYDLVFVEAFDFCSFLIAEKLVKPFVAILPTTFGSLDFGLPSPLSYVPVFPSLLTDHMDFWGRVKNFLMFFSFSRSQWDMQSTFDNTIKEHFPEGSRPVLSHLLLKAELWFVNSDFAFDFARPLLPNTVYIGGLMEKPIKPVPQDLDNFIANFGDAGFVLVAFGSMLNTHQSQEVLKKMHNAFAHLPQGVIWTCQSSHWPRDVHLATNVKIVDWLPQSDLLAHPSIRLFVTHGGQNSVMEAIRHGVPMVGLPVNGDQHGNMVRVVAKNYGVSIRLNQVTADTLTLTMKQVIEDKRYVAL

SEQ ID NO: 14999 - protein, 107 aa, Homo sapiens
MRMEKIVLEKVCWKVKATTAFQFLQLYYSLLQENLPLERRNSINFERLEAQLKACHCRIIFSKAKPSVLALSIIALEIQAQKCVELTEGIECLQKHSKDYYSTKKLL

SEQ ID NO: 15000 - protein, 51 aa, Homo sapiens
MKCVFVTVGTTSFDDLIACVSAPDSLQVSEGGEQAAAWLATRHLRPYCQPR

SEQ ID NO: 15001 - protein, 113 aa, Homo sapiens
MEAALTLPRRPFLHCSTVIPVVVLTLKFTMHLFKLKDSWCFLPWMLFISWTSHHIRDGIRHGLWICPFGKTSPLPFWLYVIITSSLPHICSFVMYLTGTRQMMSSKHGVRIDV

SEQ ID NO: 15002 - protein, 580 aa, Homo sapiens
MAQEVSEYLSQNPRVAAWVEALRCDGETDKHWRHRRDFLLRNAGDLAPAGGAASASTDEAADAESGTRNRQLQQLISFSMAWANHVFLGCRYPQKVMDKILSMAEGIKVTDAPTYTTRDELVAKVKKRGISSSNEGVEEPSKKRVIEGKNSSAVEQDHAKTSAKTERASAQQENSSTCIGSAIKSESGNSARSSGISSQNSSTSDGDRSVSSQSSSSVSSQVTTAGSGKASEAEAPDKHGSASFVSLLKSSVNSHMTQSTDSRQQSGSPKKSALEGSSASASQSSSEIEVPLLGSSGSSEVELPLLSSKPSSETASSGLTSKTSSEASVSSSVAKNSSSSGTSLLTPKSSSSTNTSLLTSKSTSQVAASLLASKSSSQTSGSLVSKSTSLASVSQLASKSSSQTSTSQLPSKSTSQSSESSVKFSCKLTNEDVKQKQPFFNRLYKTVAWKLVAVGGFSPNVNHGELLNAAIEALKATLDVFFVPLKELADLPQNKSSQESIVCELRCKSVYLGTGCGKSKENAKAVASREALKLFLKKKVVVKICKRKYRGSEIEDLVLLDEESRPVNLPPALKHPQELL

SEQ ID NO: 15003 - protein, 157 aa, Homo sapiens
MKNHLLFWGVLAVFIKAVHVKENGIHSEFRAQEDERIVLVDNKCKCARITSRIIRSSEDPNEDIVERNIRIIVPLNNRENISDPTSPLRTRFVYHLSDLCKKCDPTEVELDNQIVTATQSNICDEDSATETCYTYDRNKCYTAVVPLVYGGETKMVE

SEQ ID NO: 15004 - protein, 96 aa, Homo sapiens
MEGKWLLCMLLVLGTAIVEAHDGHDDDVIDIEDDLDDVIEEVEDSKPDTTAPPSSPKVTYKAPVPTGEVYFADSFDRGTLSGKVGGRGNEGVKASR

SEQ ID NO: 15005 - protein, 71 aa, Homo sapiens
MCGLQFSLPCLRLFLVVTCYLLLLLHKEILGCSSVCQLCTGRQINCRNLGLSSIPKNFPESTVFLLASKGP

SEQ ID NO: 15006 - protein, 605 aa, Homo sapiens
MAGPGPTFPLHRLVWANRHRELEAALHSHQHDIEQEDPRGRTPLELAVSLGNLESVRVLLRHNANVGKENRQGWAVLQEAVSTGDPEMVQLVLQYRDYQRATQRLAGIPELLNKLRQAPDFYVEMKWEFTSWVPLVSKMCPSDVYRVWKRGESLRVDTSLLGFEHMTWQRGRRSFIFKGQEAGALVMEVDHDRQVVHVETLGLTLQEPETLLAAMRPSEEHVASRLTSPIVSTHLDTRNVAFERNKCGIWGWRSEKMETVSGYEAKVYSATNVELVTRTRTEHLSDQDKSRSKAGKTPFQSFLGMAQQHSSHTGAPVQQAASPTNPTAISPEEYFDPNFSLESRNIGRPIEMSSKVQRFKATLWLSEEHPLSLGDQVTPIIDLMAISNAHFAKLRDFITLRLPPGFPVKIEIPLFHVLNARITFSNLCGCDEPLSSVWVPAPSSAVAASGNPFPCEVDPTVFEVPNGYSVLGMERNEPLRDEDDDLLQFAIQQSLLEAGTEAEQVTVWEALTNTRPGARPPPQATVYEEQLQLERALQESLQLSTEPRGPGSPPRTPPAPGPPSFEEQLRLALELSSREQEERERRGQQEEEDLQRILQLSLTEH

SEQ ID NO: 15007 - protein, 114 aa, Homo sapiens
MAAVVAVCGGLGRKKLTHLVTAAVSLTHPGTHTVLWRRGCSQQVSSNEDLLLSQFVSPFTGCIYGRHITGLCGKKQKEITKAIKRAQIMGFMPVTYKDPAYLKDPKVCNIRYRE

SEQ ID NO: 15008 - protein, 759 aa, Homo sapiens
MSEVLPADSGVDTLAVFMASSGTTDVTNRNSPATPPNTLNLRSSHNELLNAEIKHTETKNSTPPKCRKKYALTNIQAAMGLSDPAAQPLLGNGSANIKLVKNGENQLRKAAEQGQQDPNKNLSPTAVINITSEKLEGKEPHPQDSSSCEILPSQPRRTKSFLNYYADLETSARELEQNRGNHHGTAEEKSQPVQGQASTIIGNGDLLLQKPNRPQSSPEDGQVATVSSSPETKKDHPKTGAKTDCALHRIQNLAPSDEESSWTTLSQDSASPSSPDETADIWSDHSFQTDPDLPPGWKRVSDIAGTYYWHIPTGTTQWERPVSIPADLQGSRKGSLSSVTPSPTPENEKQPWSDFAVLNGGKINSDIWKDLHAATVNPDPSLKEFEGATLRYASLKLRNAPHPDDDDSCSINSDPEAKCFAVRSLGWVEMAEEDLAPGKSSVAVNNCIRQLSYCKNDIRDTVGIWGEGKDMYLILENDMLSLVDPMDRSVLHSQPIVSIRVWGVGRDNGRDFAYVARDKDTRILKCHVFRCDTPAKAIATSLHEICSKIMAERKNAKALACSSLQERANVNLDVPLQVDFPTPKTELVQKFHVQYLGMLPVDKPVGMDILNSAIENLMTSSNKEDWLSVNMNVADATVTVISEKNEEEVLVECRVRFLSFMGVGKDVHTFAFIMDTGNQRFECHVFWCEPNAGNVSEAVQAACMLRYQKCLVARPPSQKVRPPPPPADSVTRRVTTNVKRGVLSLIDTLKQKRPVTEMP

SEQ ID NO: 15009 - protein, 76 aa, Homo sapiens
MAAAAASRGVGAKLGLREIRIHLCQRSPGSQGVRDFIEKRYVELKKANPDLPILIRECSDVQPKLWARYASRVQNS

SEQ ID NO: 15010 - protein, 87 aa, Homo sapiens
MRLLLALLGVLLSVPGPPVLSLEASEEVELEPCLAPSLEQQEQELTVALGQPVRLCCGRAERGGHWYKEGSRLAPAGRVRGWRGRLE

SEQ ID NO: 15011 - protein, 33 aa, Homo sapiens
MKENVASATVFTLLLFLNTCLLNDPFCWAANRV

SEQ ID NO: 15012 - protein, 187 aa, Homo sapiens
METLCLRASFWLALVGCVISDNPERYSTNLSNHVDDFTTFRGTELSFLVTTHQPTNLVLPSNGSMHNYCPQQTKITSAFKYINTVISCTIFIVGMVGNATLLRIIYQNKCMRNGPNALIASLALGDLIYVVIDLPINVFKLLAGRWPFDHNDFGVFLCKLFPFLQKSSVGITVLNLCALSVDSSTKM

SEQ ID NO: 15013 - protein, 107 aa, Homo sapiens
MARATLSAAPSNPRLLRVALLLLLLVAASRRAAGAPLATELRCQCLQTLQGIHLKNIQSVKVKSPGPHCAQTEVIATLKNGQKACLNPASPMVKKIIEKMLKNGKSN

SEQ ID NO: 15014 - protein, 157 aa, Homo sapiens
MERRAWSLQCTAFVLFCAWCALNSAKAKRQFVNEWAAEIPGGPEAASAIAEELGYDLLGQIGSLENHYLFKHKNHPRRSRRSAFHITKRLSDDDRVIWAEQQYEKERSKRSALRDSALNLFNDPMWNQQWYLQDTRMTAALPKLDLHVIPVWQKGIT

SEQ ID NO: 15015 - protein, 69 aa, Homo sapiens
MKDEVALLAAVTLLGVLLQGDLGAQGLPRVAAAHHRPTRVRARLPSPGELQRVLPAVPRHALGRRHLLS

SEQ ID NO: 15016 - protein, 188 aa, Homo sapiens
MKKAVSLINAIDTGRFPRLLTRILQKLHLKAESSFSEEEEEKLQAAFSLEKQDLHLVLETISFILEQAVYHNVKPAALQQQLENIHLRQDKAEAFVNTWSSMGQETVEKFRQRILAPCKLETVGWQLNLQMAHSAQAKLKSPQAVLQLGVNNEDSKSLEKVLVEFSHKELFDFYNKLETIQAQLDSLT

SEQ ID NO: 15017 - protein, 822 aa, Homo sapiens
MRLHLLLLLALCGAGTTAAELSYSLRGNWSICNGNGSLELPGAVPGCVHSALFQQGLIQDSYYRFNDLNYRWVSLDNWTYSKEFKIPFEISKWQKVNLILEGVDTVSKILFNEVTIGETDNMFNRYEQCSFSWDWGPSFPTQGIWKDVRIEAYNICHLNYFTFSPIYDKSAQEWNLEIESTFDVVSSKPVGGQVIVAIPKLQTQQTYSIELQPGKRIVELFVNISKNITVETWWPHGHGNQTGYNMTVLFELDGGLNIEKSAKVYFRTVELIEEPIKGSPGLSFYFKINGFPIFLKGSNWIPADSFQDRVTSELLRLLLQSVVDANMNTLRVWGGGIYEQDEFYELCDELGIMVWQDFMFACALYPTDQGFLDSVTAEVAYQIKRLKSHPSIIIWSGNNENEEALMMNWYHISFTDRPIYIKDYVTLYVKNIRELVLAGDKSRPFITSSPTNGAETVAEAWVSQNPNSNYFGDVHFYDYISDCWNWKVFPKARFASEYGYQSWPSFSTLEKVSSTEDWSFNSKFSLHRQHHEGGNKQMLYQAGLHFKLPQSTDPLRTFKDTIYLTQVMQAQCVKTETEFYRRSRSEIVDQQGHTMGALYWQLNDIWQAPSWASLEYGGKWKMLHYFAQNFFAPLLPVGFENENTFYIYGVSDLHSDYSMTLSVRVHTWSSLEPVCSRVTERFVMKGGEAVCLYEEPVSELLRRCGNCTRESCVVSFYLSADHELLSPTNYHFLSSPKEAVGLCKAQITAIISQQGDIFVFDLETSAVAPFVWLDVGSIPGRFSDNGFLMTEKTRTILFYPWEPTSKNELEQSFHVTSLTDIY

SEQ ID NO: 15018 - protein, 126 aa, Homo sapiens
MGPEALSSLLLLLLVASGDADMKGHFDPAKCRYALGMQDRTIPDSDISASSSWSDSTAARHSRLESSDGDGAWCPAGSVFPKEEEYLQVDLQRLHLVALVGTQGRHAGGLGKEFSRSYRLRYSRDG

SEQ ID NO: 15019 - protein, 14 aa, Homo sapiens
MKMLLLLHCLGVFL

SEQ ID NO: 15020 - protein, 65 aa, Homo sapiens
MKVTGIFLLSALALLSLSGNTGADSLGREAKCYNELNGCTKIYDPVCGTDGNTYPNECVLCFENR

SEQ ID NO: 15021 - protein, 894 aa, Homo sapiens
MIFWSFVAGVVTFYCSLGPDSLLPNIFFTIKYKPKQLGLQELFPQGHSCAVCGKVKCKRHRPSLLLENYQPWLDLKISSKVDASLSEVLELVLENFVYPWYRDVTDDESFVDELRITLRFFASVLIRRIHKVDIPSIITKKLLKAAMKHIEVIVKARQKVKNTEFLQQAALEEYGPELHVALRSRRDELHYLRKLTELLFPYILPPKATDCRSLTLLIREILSGSVFLPSLDFLADPDTVNHLLIIFIDDSPPEKATEPASPLVPFLQKFAEPRNKKPSVLKLELKQIREQQDLLFRFMNFLKQEGAVHVLQFCLTVEEFNDRILRPELSNDEMLSLHEELQKIYKTYCLDESIDKIRFDPFIVEEIQRIAEGPYIDVVKLQTMRCLFEAYEHVLSLLENVFTPMFCHSDEYFRQLLRGAESPTRNSKLNRGSLSLDDFRNTQKRGESFGISRIGSKIKGVFKSTTMEGAMLPNYGVAEGEDDFIEEGIVVMEDDSPVEAVSTPNTPRNLAAWKISIPYVDFFEDPSSERKEKKERIPVFCIDVERNDRRAVGHEPEHWSVYRRYLEFYVLESKLTEFHGAFPDAQLPSKRIIGPKNYEFLKSKREEFQEYLQKLLQHPELSNSQLLADFLSPNGGETQFLDKILPDVNLGKIIKSVPGKLMKEKGQHLEPFIMNFINSCESPKPKPSRPELTILSPTSENNKKLFNDLFKNNANRAENTERKQNQNYFMEVMTVEGVYDYLMYVGRVVFQVPDWLHHLLMGTRILFKNTLEMYTDYYLQCKLEQLFQEHRLVSLITLLRDAIFCENTEPRSLQDKQKGAKQTFEEMMNYIPDLLVKCIGEETKYESIRLLFDGLQQPVLNKQLTYVLLDIVIQELFPELNKVQKEVTSVTSWM

SEQ ID NO: 15022 - protein, 335 aa, Homo sapiens
MALKWTSVLLLIHLGCYFSSGSCGKVLVWTGEYSHWMNMKTILKELVQRGHEVTVLASSASILFDPNDAFTLKLEVYPTSLTKTEFENIIMQQVKRWSDIQKDSFWLYFSQEQEILWEFHDIFRNFCKDVVSNKKVMKKLQESRFDIIFADAFFPCGELLAALLNIPFVYSLCFTPGYTIERHSGGLIFPPSYIPVVMSKLSDQMTFMERVKNMIYVLYFDFWFQMCDMKKWDQFYSEVLGRPTTLFETMGKADIWLMRNSWSFQFPHPFLPNIDFVGGLHCKPAKPLPKEMEEFVQSSGENGVVVFSLGSVISNMTAERANVIATALAKIPQKI

SEQ ID NO: 15023 - protein, 155 aa, Homo sapiens
MAVPGCNKDSVRAGCKKCGYPGHLTFECRNFLRVDPKRDIVLDVSSTSSEDSDEENEELNKLQALQEKRINEEEEKKKEKSKEKIKLKKKRKRSYSSSSTEEDTSKQKKQKYQKKEKKKEKKSKSKKGKHHKKEKKKRKKEKHSSTPNSSEFSRK

SEQ ID NO: 15024 - protein, 623 aa, Homo sapiens
MSDEVFSTTLAYTKSPKVTKRTTFQDELIRAITARSARQRSSEYSDDFDSDEIVSLGDFSDTSADENSVNKKMNDFHISDDEEKNPSKLLFLKTNKSNGNITKDEPVCAIKNEEEMAPDGCEDIVVKSFSESQNKDEEFEKDKIKMKPKPRILSIKSTSSAENNSLDTDDHFKPSPRPRSMLKKKSHMEEKDGLEDKETALSEELELHSAPSSLPTPNGIQLEAEKKAFSENLDPEDSCLTSLASSSLKQILGDSFSPGSEGNASGKADHVTTAVEKSKESQVTADDLEEEKAKAELIMDDDRTVDPLLSKSQSILISTSATASSKKTIEDRNIKNKKSTNNRASSASARLMTSEFLKKSSSKRRTPSTTTSSHYLGTLKVLDQKPSQKQSIEPDRADNIRAAVYQEWLEKKNVYLHEMHRIKRIESENLRIQNEQKKAAKREEALASFEAWKAMKEKEAKKIAAKKRLEEKNKKKTEEENAARKGEALQAFEKWKEKKMEYLKEKNRKEREYERAKKQKEEETVAEKKKDNLTAVEKWNEKKEAFFKQKEKEKINEKRKEELKRAEKKDKDKQAINEYEKWLENKEKQERIERKQKKRHSFLESEALPPWSPPSRTVFAKVF

SEQ ID NO: 15025 - protein, 489 aa, Homo sapiens
MAGQRVLLLVGFLLPGVLLSEAAKILTISTVDFKKEEKSYQVISWLAPEDHQREFKKSFDFFLEETLGGRGKFENLLNVLEYLALQCSHFLNRKDIMDSLKNENFDMVIVETFDYCPFLIAEKLGKPFVAILSTSFGSLEFGLPIPLSYVPVFRSLLTDHMDFWGRVKNFLMFFSFCRRQQHMQSTFDNTIKEHFTEGSRPVLSHLLLKAELWFINSDFAFDFARPLLPNTVYVGGLMEKPIKPVPQDLENFIAKFGDSGFVLVTLGSMVNTCQNPEIFKEMNNAFAHLPQGVIWKCQCSHWPKDVHLAANVKIVDWLPQSDLLAHPSIRLFVTHGGQNSIMEAIQHGVPMVGIPLFGDQPENMVRVEAKKFGVSIQLKKLKAETLALKMKQIMEDKRYKSAAVAASVILRSHPLSPTQRLVGWIDHVLQTGGATHLKPYVFQQPWHEQYLLDVFVFLLGLTLGTLWLCGKLLGMAVWWLRGARKVKET

SEQ ID NO: 15026 - protein, 67 aa, Homo sapiens
MSRNLRTALIFGGFISLIGAAFYPIYFRPLMRLEEYKKEQAINRAGIVQEDVQPPGLKVWSDPFGRK

SEQ ID NO: 15027 - protein, 209 aa, Homo sapiens
MWRSLGLALALCLLPSGGTESQDQSSLCKQPPAWSIRDQDPMLNSNGSVTVVALLQASUYLCILQASKLEDLRVKLKKEGYSNISYIVVNHQGISSRLKYTHLKNKVSEHIPVYQQEENQTDVWTLLNGSKDDFLIYDRCGRLVYHLGLPFSFLTFPYVEEAIKIAYCEKKCGNCSLTTLKDEDFCKRVSLATVDKTVETPSPHYHHEH

SEQ ID NO: 15028 - protein, 206 aa, Homo sapiens
MDEYVGLPRNHPESYHSYMWNNFFKHIDIDPNNAHILDGNAADLQAECDAFENKIKEAGGIDLFVGGIGPDGHIAFNEPGSSLVSRTRLKTLAMDTILANAKYFDGDLSKVPTMALTVGVGTVMDAREVMILITGAHKAFALYKAIEEGVNHMWTVSAFQQHPRTIFVCDEDATLELRVKTVKYFKGLMHVHNKLVDPLFSMKDGN

SEQ ID NO: 15029 - protein, 576 aa, Homo sapiens
MKLLHVFLLFLCFHLRFCKVTYTSQEDLVEKKCLAKKYTHLSCDKVFCQPWQRCIEGTCVCKLPYQCPKNGTAVCATNRRSFPTYCQQKSLECLHPGTKFLNNGTCTAEGKFSVSLKHGNTDSEGIVEVKLVDQDKTMFICKSSWSMREANVACLDLGFQQGADTQRRFKLSDLSINSTECLHVHCRGLETSLAECTFTKRRTMGYQDFADVVCYTQKADSPMDDFFQCVNGKYISQMKACDGINDCGDQSDELCCKACQGKGFHCKSGVCIPSQYQCNGEVDCITGEDEVGCAEETEILTADMDAERRRIKSLLPKLSCGVKNRMHIRRKRIVGGKRAQLGDLPWQVAIKDASGITCGGIYIGGCWILTAAHCLRASKTHRYQIWTTVVDWIHPDLKRIVIEYVDRIIFHENYNAGTYQNDIALIEMKKDGNKKDCELPRSIPACVPWSPYLFQPNDTCIVSGWGREKDNERVFSLQWGEVKLISNCSKFYGNRFYEKEMECAGTYDGSIDACKGDSGGPLVCMDANNVTYVWGVVSWGENCGKPEFPGVYTKVANYFDWISYHVGRPFISQYNV

SEQ ID NO: 15030 - protein, 283 aa, Homo sapiens
MPHSSLHPSIPCPRGHGAQKAALVLLSACLVTLWGLGEPPEHTLRYLVLHLASLQLGLLLNGVCSLAEELRHIHSRYRGSYWRTVRACLGCPLRRGALLLLSIYFYYSLPNAVGPPFTWMLALLGLSQALNILLGLKGLAPAEISAVCEKGNFNVAHGLAWSYYIGYLRLILPELQARIRTYNQHYNNLLRGAVSQRLYILLPLDCGVPDNLSMADPNIRFLDKLPQQTGDHAGIKDRVYSNSIYELLENGQRNLQMTAASRCPRRFSGTCGRRKRKRLLWAA

SEQ ID NO: 15031 - protein, 180 aa, Homo sapiens
MNTVLSRANSLFAFSLSVMAALTFGCFITTAFKDRSVPVRLHVSRIMLKNVEDFTGPRERSDLGFITFDITADLENIFDWNVKQLFLYLSAEYSTKNNALNQVVLWDKIVLRGDNPKLLLKDMKTKYFFFDDGNGLKGNRNVTLTLSWNVVPNAGILPLVTGSGHVSVPFPDTYEITKSY

SEQ ID NO: 15032 - protein, 158 aa, Homo sapiens
MEPLAAYPLKCSGPRAKVSLVVNVASDCQLTDRNYLGLKELHKEFGPSHFSVLAFPCNQFGESEPRPSKEVESFARKNYGVTFPIFHKIKILGSEGEPAFRFLVDSSKKEPRWNFWKYLVNPEGQVVKFWKPEEPIEVIRPDIAALVRQVIIKKKEDL

SEQ ID NO: 15033 - protein, 150 aa, Homo sapiens
MPKAKGKTRRQKFGYSVNRKRLNRNARRKAAPRIECSHIRHAWDHAKSVRQNLAEMGLAVDPNRAVPLRKRKVKAMEVDIEERPKELVRKPYVLNDLEAEASLPEKKGNTLSRDLIDYVRYMVENHGEDYKVSGSGPVGWLGRRPGPFAA

SEQ ID NO: 15034 - protein, 177 aa, Homo sapiens
MRLLILTCLVAVALARPKLPLRYPERLQNPSESSEPIPLESREEYMNGMNRQRNILREKQTDEIKDTRNESTQNCVVAEPEKMESSISSSSEEQFCRLNEYNQLQLQAAHAQEQIRRMNENSHVQVPFQQLNQLAAYPYAVWYYPQIMQYVPFPPFSDISNPTAHENYEKNNVMLQW

SEQ ID NO: 15035 - protein, 157 aa, Homo sapiens
MSRLSRSLLWAATCLGVLCVLSADKNTTQHPNVTTLAPISNVTSAPVTSLPLVTTPAPETCEGRNSCVSCFNVSVVNTTCFWIECKDESYCSHNSTVSDCQVGNTTDFCSVSTATPVPTANSTAKPTVQPSPSTTSKTVTTSEIRCHTRNYIPDLKK

SEQ ID NO: 15036 - protein, 1521 aa, Homo sapiens
MRGVGWQMLSLSLGLVLAILNKVAPQACPAQCSCSGSTVDCHGLALRSVPRNIPRNTERLDLNGNNITRITKTDFAGLRHLRVLQLMENKISTIERGAFQDLKELERLRLNRNHLQLFPELLFLGTAKLYRLDLSENQIQAIPRKAFRGAVDIKNLQLDYNQISCIEDGAFRALRDLEVLTLNNNNITRLSVASFNHMPKLRTFRLHSNNLYCDCHLAWLSDWLRQRPRVGLYTQCMGPSHLRGHNVAEVQKREFVCSGHQSFMAPSCSVLHCPAACTCSNNIVDCRGKGLTEIPTNLPETITEIRLEQNTIKVIPPGAFSPYKKLRRIDLSNNQISELAPDAFQGLRSLNSLVLYGNKITELPKSLFEGLFSLQLLLLNANKINCLRVDAFQDLHNLNLLSLYDNKLQTIAKGTFSPLRAIQTMHLAQNPFICDCHLKWLADYLHTNPIETSGARCTSPRRLANKRIGQIKSKKFRCSGTEDYRSKLSGDCFADLACPEKCRCEGTTVDCSNQKLNKIPEHIPQYTAELRLNNNEFTVLEATGIFKKLPQLRKINFSNNKITDIEEGAFEGASGVNEILLTSNRLENVQHKMFKGLESLKTLMLRSNRITCVGNDSFIGLSSVRLLSLYDNQITTVAPGAFDTLHSLSTLNLLANPFNCNCYLAWLGEWLRKKRIVTGNPRCQKPYFLKEIPIQDVAIQDFTCDDGNDDNSCSPLSRCPTECTCLDTVVRCSNKGLKVLPKGIPRDVTELYLDGNQFTLVPKELSNYKHLTLIDLSNNRISTLSNQSFSNMTQLLTLILSYNRLRCIPPRTFDGLKSLRLLSLHGNDISVVPEGAFNDLSALSHLAIGANPLYCDCNMQWLSDWVKSEYKEPGIARCAGPGEMADKLLLTTPSKKFTCQGPVDVNILAKCNPCLSNPCKNDGTCNSDPVDFYRCTCPYGFKGQDCDVPIHACISNPCKHGGTCHLKEGEEDGFWCICADGFEGENCEVNVDDCEDNDCENNSTCVDGINNYTCLCPPEYTGELCEEKLDFCAQDLNPCQHDSKCILTPKGFKCDCTPGYVGEHCDIDFDDCQDNKCKNGAHCTDAVNGYTCICPEGYSGLFCEFSPPMVLPRTSPCDNFDCQNGAQCIVRINEPICQCLPGYQGEKCEKLVSVNFINKESYLQIPSAKVRPQTNITLQIATDEDSGILLYKGDKDHIAVELYRGRVRASYDTGSHPASAIYSVETINDGNFHIVELLALDQSLSLSVDGGNPKIITNLSKQSTLNFDSPLYVGGMPGKSNVASLRQAPGQNGTSFHGCIRNLYINSELQDFQKVPMQTGILPGCEPCHKKVCAHGTCQPSSQAGFTCECQEGWMGPLCDQRTNDPCLGNKCVHGTCLPINAFSYSCKCLEGHGGVLCDEEEDLFNPCQAIKCKHGKCRLSGLGQPYCECSSGYTGDSCDREISCRGERIRDYYQKQQGYAACQTTKKVSRLECRGGCAGGQCCGPLRSKRRKYSFECTDGSSFVDEVEKVVKCGCTRCVS

SEQ ID NO: 15037 - protein, 2537 aa, Homo sapiens
MEDFRGIAEESFPSFLTNSLFGNSGILENVTLSSNLGLPVAVSTLARDRSSTDNRYPDIQASYLVEGRFSVPSGSSPGSQSDAEPRERLQLSFQDDDSISRKKSYVESQRLSNALSKQSALQMETAGPEEEPAGATESLQGQDLFNRASPLEQAQDSPIDFHLQSWMNNKEPKIVVLDAGKHFEDKTLKSDLSHTSLLENEKLILPTSLEDSSDDDIDDEMFYDDHLEAYFEQLAIPGMIYEDLEGPEPPEKGFKLPTNGLRQANENGSLNCKFQSENNSSLISLDSHSSETTHKESEESQVICLPGTSNSIGTGDSRRYTDGMLPFSSGTWGTEKEIENLKGIVPDLNSECASKDVLVKTLRAIDVKLNSDNFHDANANRGGFDLTDPVKQGAECPHQNKTVLHMDGCLDTETPTVSIQENVDVASLKPISDSGINFTDAIWSPTCERRTCECHESIEKNKDKTDLPQSVVYQNEEGRWVTDLAYYTSFNSKQNLNVSLSDEMNEDFRSGSEAFDLIAQDEEEFNKEHQFIQEENIDAHNTSVALGDTSWGATINYSLLRKSRSTSDLDKDDASYLRLSLGEFFAQRSEALGCLGGGNNVKRPSFGYFIRSPEKREPIALIRKSDVSRGNLEKEMAHLNHDLYSGDLNEQSQAQLSEGSITLQVEAVESTSQVDENDVTLTADKGKTEDTFFMSNKPQRYKDKLPDSGDSMLRISTIASAIAEASVNTDPSQLAAMIKALSNKTRDKTFQEDEKQKDYSHVRHFLPNDLEKSNGSNALDMEKYLKKTEVSRYESALENFSRASMSDTWDLSLPKEQTTQDIHPVDLSATSVSVRAPEENTAAIVYVENGESENQESFRTINSSNSVTNRENNSAVVDVKTCSIDNKLQDVGNDEKATSISTPSDSYSSVRNPRITSLCLLKDCEEIRDNRENQRQNECVSEISNSEKHVTFENHRIVSPKNSDLKNTSPEHGGRGSEDEQESFRPSTSPLSHSSPSEISGTSSSGCALESFGSAAQQQQPPCEQELSPLVCSPAGVSRLTYVSEPESSYPTTATDDALEDRKSDITSELSTTIIQGSPAALEERAMEKLREKVPFQNRGKGTLSSIIQNNSDTRKATETTSLSSKPEYVKPDFRWSKDPSSKSGNLLETSEVGWTSNPEELDPIRLALLGKSGLSCQVGSATSHPVSCQEPIDEDQRISPKDKSTAGREFSGQVSHQTTSENQCTPIPSSTVHSSVADMQNMPAAVHALLTQPSLSAAPFAQRYLGTLPSTGSTTLPQCHAGNATVCGFSGGLPYPAVAGEPVQNSVAVGICLGSNIGSGWMGTSSLCNPYSNTLNQNLLSTTKPFPVPSVGTNCGIEPWDSGVTSGLGSVRVPEELKLPHACCVGIASQTLLSVLNPTDRWLQVSIGVLSISVNGEKVDLSTYRCLVFKNKAIIRPHATEEIKVLFIPSSPGVFRCTFSVASWPCSTDAETIVQAEALASTVTLTAIAESPVIEVETEKKDVLDFGDLTYGGWKALPLKLINRTHATVPIRLIINANAVAWRCFTFSKESVRAPVEVAPCADVVTRLAGPSVVNHMMPASYDGQDPEFLMIWVLFHSPKKQISSSDILDSAEEFSAKVDIEVDSPNPTPVLRSVSLRARAGIARIHAPRDLQTMHFLAKVASSRKQHLPLKNAGNIEVYLDIKVPEQGSHFSVDPKNLLLKPGEEHEVIVSFTPKDPEACEERILKIFVQPFGPQYEVVLKGEVISSGSKPLSPGPCLDIPSILSNKQFLAWGGVPLGRTQLQKLALRNNSASTTQHLRLLIRGQDQDCFQLQNTFGSEQRLTSNCEIRIHPKEDIFISVLFAPTRLSCMLARLEIKQLGNRSQPGIKFTIPLSGYGGTSNLILEGVKKLSDSYMVTVNGLVPGKESKIVFSVRNTGSRAAFVKAVGFKDSQKKVLLDPKVLRIFPDKFVLKERTQENVTLIYNPSDRGINNKTATELSTVYLFGGDEISRQQYRRALLHKPEMIKQILPEHSVLQNINFVEAFQDELLVTEVYDLPQRPNDVQLFYGSMCKIILSVIGEFRDCISSREFLQPSSKASLESTSDLGASGKHGGNVSLDVLPVKGPQGSPLLSRAARPPLDQLASEEPWTVLPEHLILVAPSPCDMAKTGRFQIVNNSVRLLRFELCWPAHCLTVTPQHGCVAPESKLQILVSPNSSLSTKQSMFPWSGLIYIHCDDGQKKIVKVQIREDLTQVELLTRLTSKPFGILSPVSEPSVSHLVKPMTKPPSTKVEIRNKSITFPTTEPGETSESCLELENHGTTDVKWHLSSLAPPYVKGVDESGDVFRATYAAFRCSPISGLLESHGIQKVSITFLPRGRGDYAQFWDVECHPLKEPHMKHTLRFQLSGQSIEAENEPENACLSTDSLIKIDHLVKPRRQAVSEASARIPEQLDVTARGVYAPEDVYRFRPTSVGESRTLKVNLRNNSFITHSLKFLSPREPFYVKHSKYSLRAQHYINMPVQFKPKSAGKFEALLVIQTDEGKSIAIRLIGEALGKN

SEQ ID NO: 15038 - protein, 919 aa, Homo sapiens
MGPEALSSLLLLLLVASGDADMKGHFDPAKCRYALGMQDRTIPDSDISASSSWSDSTAARHSRLESSDGDGAWCPAGSVFPKEEEYLQVDLQRLHLVALVGTQGRHAGGLGKEFSRSYRLRYSRDGRRWMGWKDRWGQEVISGNEDPEGVVLKDLGPPMVARLVRFYPRADRVMSVCLRVELYGCLWRDGLLSYTAPVGQTMYLSEAVYLNDSTYDGHTVGGLQYGGLGQLADGVVGLDDFRKSQELRVWPGYDYVGWSNHSFSSGYVEMEFEFDRLRAFQAMQVHCNNMHTLGARLPGGVECRFRRGPAMAWEGEPMRHNLGGNLGDPRARAVSVPLGGRVARFLQCRFLFAGPWLLFSEISFISDVVNNSSPALGGTFPPAPWWPPGPPPTNFSSLELEPRGQQPVAKAEGSPTAILIGCLVAIILLLLLIIALMLWRLHWRRLLSKAERRVLEEELTVHLSVPGDTILINNRPGPREPPPYQEPRPRGNPPHSAPCVPNGSALLLSNPAYRLLLATYARPPRGPGPPTPAWAKPTNTQAYSGDYMEPEKPGAPLLPPPPQNSVPHYAEADIVTLQGVTGGNTYAVPALPPGAVGDGPPRVDFPRSRLRFKEKLGEGQFGEVHLCEVDSPQDLVSLDFPLNVRKGHPLLVAVKILRPDATKNASFSLFSRNDFLKEVKIMSRLKDPNIIRLLGVCVQDDPLCMITDYMENGDLNQFLSAHQLEDKAAEGAPGDGQAAQGPTISYPMLLHVAAQIASGMRYLATLNFVHRDLATRNCLVGENFTIKIADFGMSRNLYAGDYYRVQGRAVLPIRWMAWECILMGKFTTASDVWAFGVTLWEVLMLCRAQPFGQLTDEQVIENAGEFFRDQGRQVYLSRPPACPQGLYELMLRCWSRESEQRPPFSQLHRFLAEDALNTV

SEQ ID NO: 15039 - protein, 1182 aa, Homo sapiens
MGQQVGRVGEAPGLQQPQPRGIRGSSAARPSGRRRDPAGRTTETGFNIFTQHDHFASCVEDGFEGDKTGGSSPEALHRPYGCDVEPQALNEAIRWSSKENLLGATESDPNLFVALYDFVASGDNTLSITKGEKLRVLGYNQNGEWSEVRSKNGQGWVPSNYITPVNSLEKHSWYHGPVSRSAAEYLLSSLINGSFLVRESESSPGQLSISLRYEGRVYHYRINTTADGKVYVTAESRFSTLAELVHHHSTVADGLVTTLHYPAPKCNKPTVYGVSPIHDKWEMERTDITMKHKLGGGQYGEVYVGVWKKYSLTVAVKTLKEDTMEVEEFLKEAAVMKEIKHPNLVQLLGVCTLEPPFYIVTEYMPYGNLLDYLRECNREEVTAVVLLYMATQISSAMEYLEKKNFIHRDLAARNCLVGENHVVKVADFGLSRLMTGDTYTAHAGAKFPIKWTAPESLAYNTFSIKSDVWAFGVLLWEIATYGMSPYPGIDLSQVYDLLEKGYRMEQPEGCPPKVYELMRACWKWSPADRPSFAETHQAFETMFHDSSISEEVAEELGRAASSSSVVPYLPRLPILPSKTRTLKKQVENKENIEGAQDATENSASSLAPGFIRGAQASSGSPALPRKQRDKSPSSLLEDAKETCFTRDRKGGFFSSFMKKRNAPTPPKRSSSFREMENQPHKKYELTGNFSSVASLQHADGFSFTPAQQEANLVPPKCYGGSFAQRNLCNDDGGGGGGSGTAGGGWSGITGFFTPRLIKKTLGLRAGKPTASDDTSKPFPRSNSTSSMSSGLPEQDRMAMTLPRNCQRSKLQLERTVSTSSQPEENVDRANDMLPKKSEESAAPSRERPKAKLLPRGATALPLRTPSGDLAITEKDPPGVGVAGVAAAPKGKEKNGGARLGMAGVPEDGEQPGWPSPAKAAPVLPTTHNHKVPVLISPTLKHTPADVQLIGTDSQGNKFKLLSEHQVTSSGDKDRPRRVKPKCAPPPPPVMRLLQHPSICSDPTEEPTALTAGQSTSETQEGGKKAALGAVPISGKAGRPVMPPPQVPLPTSSISPAKMANGTAGTKVALRKTKQAAEKISADKISKEALLECADLLSSALTEPVPNSQLVDTGHQLLDYCSGYVDCIPQTRNKFAFREAVSKLELSLQELQVSSAAAGVPGTNPVLNNLLSCVQEISDVVQR

SEQ ID NO: 15040 - protein, 475 aa, Homo sapiens
MELENIVANTVLLKAREGGGGNRKGKSKKWRQMLQFPHISQCEELRLSLERDYHSLCERQPIGRLLFREFCATRPELSRCVAFLDGVAEYEVTPDDKRKACGRQLTQNFLSHTGPDLIPEVPRQLVTNCTQRLEQGPCKDLFQELTRLTHEYLSVAPFADYLDSIYFNRFLQWKWLERQPVTKNTFRQYRVLGKGGFGEVCACQVRATGKMYACKKLEKKRIKKRKGEAMALNEKQILEKVNSRFVVSLAYAYETKDALCLVLTLMNGGDLKFHIYHMGQAGFPEARAVFYAAEICCGLEDLHRERIVYRDLKPENILLDDHGHIRISDLGLAVHVPEGQTIKGRVGTVGYMAPEVVKNERYTFSPDWWALGCLLYEMIAGQSPFQQRKKKIKREEVERLVKEVPEEYSERFSPQARSLCSQLLCKDPAERLGCRGGSAREVKEHPLFKKLNFKRLGAGMLEPPFKPDVSAAHSC

SEQ ID NO: 15041 - protein, 129 aa, Homo sapiens
MARQPPPPWVHAAFLLCLLSLGGAIEIPMDPSIQNELTQPPTITKQSAKDHIVDPRDNILIECEAKGNPAPSFHWTRNSRFFNIAKDPRVSMRRRSGTLVIDFRSGGRPEEYEGEYQCFARNKFGTALS

SEQ ID NO: 15042 - protein, 136 aa, Homo sapiens
MKTLPLFVCICALSACFSFSEGRERDHELRHRRHHHQSPKSHFELPHYPGLLAHQKPFIRKSYKCLHKRCRPKLPPSPNNPPKFPNPHQPPKHPDKNSSVVNPTLVATTQIPSVTFPSASTKITTLPNVTFLPQNA

SEQ ID NO: 15043 - protein, 323 aa, Homo sapiens
MHFHKLFLSVPTEEPLKQSFTCALQKEILYQGKLFVSENWICFHSKVFGKDTKISIPAFSVTLIKKTKTALLVPNALIIATVTDRYIFVSLLSRDSTYKLLKSVCGHLENTSVGNSPNPSSAENSFRADRPSSLPLDFNDEFSDLDGVVQQRRQDMEGYSSSGSQTPESENSRDFHATESQTVLNVSKGEAKPTRADAHVNRVPEGKAKSLPVQGLSETVGILHKVKSQKCPMLHHILIFYAIVVCALIISTFYMRYRINTLEEQLGLLTSIVDTHNTEQAAPSGLRSQVQFNVEVLCQELTANIVKLEKIQNNLQKLLENGD

SEQ ID NO: 15044 - protein, 160 aa, Homo sapiens
MGPEALSSLLLLLLVASGDADMKGHFDPAKCRYALGMQDRTIPDSDISASSSWSDSTAARHSRLESSDGDGAWCPAGSVFPKEEEYLQVDLQRLHLVALVGTQGRHAGGLGKEFSRSYRLRYSRDGRRWMGWKDRWGQEVISGNEDPEGVVLKDLGPPMV

SEQ ID NO: 15045 - protein, 511 aa, Homo sapiens
MKTKLNIYNMQFLLFVFLVWDPARLVLANIQEDEAKNNITIFTRILDRLLDGYDNRLRPGLGDSITEVFTNIYVTSFGPVSDTDMEYTIDVFFRQKWKDERLKFKGPMNILRLNNLMASKIWTPDTFFHNGKKSVAHNMTMPNKLLRIQDDGTLLYTMRLTVQAECPMHLEDFPMDAHSCPLKFGSYAYTTSEVTYIWTYNASDSVQVAPDGSRLNQYDLLGQSIGKETIKSSTGEYTVMTAHFHLKRKIGYFVIQTYLPCIMTVILSQVSFWLNRESVPARTVFGVTTVLTMTTLSISARNSLPKVAYATAMDWFIAVCYAFVFSALIEFATVNYFTKRGWAWDGKSVVNDKSPSIKAEGITLTYNSVKAILQGAKLIWSKYIAFSWPSLFQEKTLEYLEKWMDCLTFKQSSKKEKASVMIQNNAYAVAVANYAPNLSKDPVLSTISKSATTPEPNKKPENKPAEAKKTFNSVSKIDRMSRIVFPVLFGTFNLVYWATYLNREPVLGVSP

SEQ ID NO: 15046 - protein, 165 aa, Homo sapiens
MELLQVTILFLLPSICSSNSTGVLEAANNSLVVTTTKPSITTPNTESLQKNVVTPTTGTTPKGTITNELLKMSLMSTATFLTSKDEGLKATTTDVRKNDSIISNVTVTSVTLPNAVSTLQSSKPKTETQSSIKTTEIPGIILPVVIALIVITLSVFVLVGLYRMC

SEQ ID NO: 15047 - protein, 322 aa, Homo sapiens
MQQLLSQPQHEREKEVVLLRRSMAEGERARAASDVLCRSLANETHQLRRTLTATAHMCQHLAKCLDERQHAQRNVGERSPDQSEHTDGHTSVQSVIEKLQEENRLLKQKVTHVEDLNAKWQRYNASRDEYVRGLHAQLRGLQIPHEPELMRKEISRLNRQLEEKINDCAEVKQELAASRTARDAALERVQMLEQQILAYKDDFMSERADRERAQSRIQELEEKVASLLHQVSWRQDSREPDAGRIHAGSKTAKYLAADALELMVPGGWRPGTGSQQPEPPAEGGHPGAAQRGQGDLQCPHCLQCFSDEQGEELLRHVAECCQ

SEQ ID NO: 15048 - protein, 57 aa, Homo sapiens
MVGQRVLLLVAFLLSGVLLSEAAKILTISTLGECLAGEFPDRRVPDPRTARAPANGD

SEQ ID NO: 15049 - protein, 323 aa, Homo sapiens
MRTADREARPGLPSLLLLLLAGAGLSAASPPAAPRFNVSLDSVPELRWLPVLRHYDLDLVRAAMAQVIGDRVPKWVHVLIGKVVLELERFLPQPFTGEIRGMCDFMNLSLADCLLVNLAYESSVFCTSIVAQDSRGHIYHGRNLDYPFGNVLRKLTVDVQFLKNGQIAFTGTTFIGYVGLWTGQSPHKFTVSGDERDKGWWWENAIAALFRRHIPVSWLIRATLSESENFEAAVGKLAKTPLIADVYYIVGGTSPREGVVITRNRDGPADIWPLDPLNGAWFRVETNYDHWKPAPKEDDRRTSAIKALNATGQANLSLEALFQ

SEQ ID NO: 15050 - protein, 1214 aa, Homo sapiens
MEKYVRLQKIGEGSFGKAILVKSTEDGRQYVIKEINISRMSSKEREESRREVAVLANMKHPNIVQYRESFEENGSLYIVMDYCEGGDLFKRINAQKGVLFQEDQILDWFVQICLALKHVHDRKILHRDIKSQNIFLTKDGTVQLGDFGIARVLNSTVELARTCIGTPYYLSPEICENKPYNNKSDIWALGCVLYELCTLKHAFEAGSMKNLVLKIISGSFPPVSLHYSYDLRSLVSQLFKRNPRDRPSVNSILEKGFIAKRIEKFLSPQLIAEEFCLKTFSKFGSQPIPAKRPASGQNSISVMPAQKITKPAAKYGIPLAYKKYGDKKLHEKKPLQKHKQAHQTPEKRVNTGEERRKISEEAARKRRLEFIEKEKKQKDQIISLMKAEQMKRQEKERLERINRAREQGWRNVLSAGGSGEVKAPFLGSGGTIAPSSFSSRGQYEHYHAIFDQMQQQRAEDNEAKWKREIYGRGLPERQKGQLAVERAKQVEEFLQRKREAMQNKARAEGHMVYLARLRQIRLQNFNERQQIKAKLRGEKKEANHSEGQEGSEEADMRRKKIESLKAHANARAAVLKEQLERKRKEAYEREKKVWEEHLVAKGVKSSDVSPPLGQHETGGSPSKQQMRSVISVTSALKEVGVDSSLTDTRETSEEMQKTNNAISSKREILRRLNENLKAQEDEKGKQNLSDTFEINVHEDAKEHEKEKSVSSDRKKWEAGGQLVIPLDELTLDTSFSTTERHTVGEVIKLGPNGSPRRAWGKSPTDSVLKILGEAELQLQTELLENTTIRSEISPEGEKYKPLITGEKKVQCISHEINPSAIVDSPVETKSPEFSEASPQMSLKLEGNLEEPDDLETEILQEPSGTNKDESLPCTITDVWISEEKETKETQSADRITIQENEVSEDGVSSTVDQLSDIHIEPGTNDSQHSKCDVDKSVQPEPFFHKVVHSEHLNLVPQVQSVQCSPEESFAFRSHSHLPPKNKNKNSLLIGLSTGLFDANNPKMLRTCSLPDLSKLFRTLMDVPTVGDVRQDNLEIDEIEDENIKEGPSDSEDIVFEETDTDLQELQASMEQLLREQPGEEYSEEEESVLKNSDVEPTANGTDVADEDDNPSSESALNEEWHSDNSDGEIASECECDSVFNHLEELRLHLEQEMGFEKFFEVYEKIKAIHEDEDENIEICSKIVQNILGNEHQHLYAKILHLVMADGAYQEDNDE

SEQ ID NO: 15051 - protein, 369 aa, Homo sapiens
MSVKWTSVILLIQLSFCFSSGNCGKVLVWAAEYSHWMNIKTILDELIQRGHEVTVLASSASILFDPNNSSALKIEIYPTSLTKTELENFIMQQIKRWSDLPKDTFWLYFSQVQEIMSIFGDITRKFCKDVVSNKKFMKKVQESRFDVIFADAIFPCSELLAELFNIPFVYSLSFSPGYTFEKHSGGFIFPPSYVPVVMSELTDQMTFMERVKNMIYVLYFDFWFEIFDMKKWDQFYSEVLGRPTTLSETMGKADVWLIRNSWNFQFPYPLLPNVDFVGGLHCKPAKPLPKEMEDFVQSSGENGVVVFSLGSMVSNMTEERANVIASALAQIPQKVLWRFDGNKPDTLGLNTRLYKWIPQNDLLDIKRML

SEQ ID NO: 15052 - protein, 89 aa, Homo sapiens
MKMLLLLHCLGVFLSCSGHIQDEHPQYHSPPDVVIPVRITGTTRGMTPPGWLSYILPFGGQKHIIHIKVKKLLFSKHLPVFTYTDQGAI

SEQ ID NO: 15053 - protein, 606 aa, Homo sapiens
MPYEIKKVFASLPQVERGVSKIIGGDPKGNNFLYTNGKCVILRNIDNPALADIYTEHAHQVVVAKYAPSGFYIASGDVSGKLRIWDTTQKEHLLKYEYQPFAGKIKDIAWTEDSKRIAVVGEGREKFGAVFLWDSGSSVGEITGHNKVINSVDIKQSRPYRLATGSDDNCAAFFEGPPFKFKFTIGDHSRFVNCVRFSPDGNRFATASADGQIYIYDGKTGEKVCALGGSKAHDGGIYAISWSPDSTHLLSASGDKTSKIWDVSVNSVVSTFPMGSTVLDQQLGCLWQKDHLLSVSLSGYINYLDRNNPSKPLHVIKGHSKSIQCLTVHKNGGKSYIYSGSHDGHINYWDSETGENDSFAGKGHTNQVSRMTVDESGQLISCSMDDTVRYTSLMLRDYSGQGVVKLDVQPKCVAVGPGGYAVVVCIGQIVLLKDQRKCFSIDNPGYEPEVVAVHPGGDTVAIGGVDGNVRLYSILGTTLKDEGKLLEAKGPVTDVAYSHDGAFLAVCDASKVVTVFSVADGYSENNVFYGHHAKIVCLAWSPDNEHFASGGMDMMVYVWTLSDPETRVKIQDAHRLHHVSSLAWLDEHTLVTTSHDASVKEWTITY

SEQ ID NO: 15054 - protein, 180 aa, Homo sapiens
MTILGTTFGMVFSLLQVVSGESGYAQNGDLEDAELDDYSFSCYSQLEVNGSQHSLTCAFEDPDVNITNLEFEICGALVEVKCLNFRKLQEIYFIETKKFLLIGKSNICVKVGEKSLTCKKIDLTTIVKPEAPFDLSVVYREGANDFVVTFNTSHLQKKYVKVLMHDVAYRQEKDENKWTD

SEQ ID NO: 15055 - protein, 42 aa, Homo sapiens
MVFYFTSSSVNSSAYTIYMGKDKYENEDLIKHGWPEDIWERI

SEQ ID NO: 15056 - protein, 881 aa, Homo sapiens
MAVVIRLLGLPFIAGPVDIRHFFTGLTIPDGGVHIIGGEIGEAFIIFATDEDARRAISRSGGFIKDSSVELFLSSKAEMQKTIEMKRTDRVGRGRPGSGTSGVDSLSNFIESVKEEASNSGYGSSINQDAGFHTNGTGHGNLRPRKTRPLKAENPYLFLRGLPYLVNEDDVRVFFSGLCVDGVIFLKHHDGRNNGDAIVKFASCVDASGGLKCHRSFMGSRFIEVMQGSEQQWIEFGGNAVKEGDVLRRSEEHSPPRGINDRHFRKRSHSKSPRRTRSRSPLGFYVHLKNLSLSIDERDLRNFFRGTDLTDEQIRFLYKDENRTRYAFVMFKTLKDYNTALSLHKTVLQYRPVHIDPISRKQMLKFIARYEKKRSGSLERDRPGHVSQKYSQEGNSGQKLCIYIRNFPFDVTKVEVQKFFADFLLAEDDIYLLYDDKGVGLGEALVKFKSEEQAMKAERLNRRRFLGTEVLLRLISEAQIQEFGVNFSVMSSEKMQARSQSRERGDHSHLFDSKDPPIYSVGAFENFRHQLEDLRQLDNFKHPQRDFRQPDRHPPEDFRHSSEDFRFPPEDFRHSPEDFRRPREEDFRRPSEEDFRRPWEEDFRRPPEDDFRHPREEDWRRPPPEHFRRPPPEHFRRPPPEHFRRPPPEHFRRPPPEHFRRPPQEHFRRPPQEHFRRSREEDFRHPPDEDFRGPPDEDFRHPPDEDFRSPQEEDFRCPSDEDFRQLPEEDLREAPEEDPRLPDNFRPPGEDFRSPPDDFRSHRPFVNFGRPEGGKFDFGKHNMGSFPEGRFMPDPKINCGSGRVTPIKIMNLPFKANVNEILDFFHGYRIIPDSVSIQYNEQGLPTGEAIVAMINYNEAMAAIKDLNDRPVGPRKVKLTLL

SEQ ID NO: 15057 - protein, 71 aa, Homo sapiens
MLGLRPPLLALVGLLSLGCGRPRAPTHQPASSLSPLSGVHEVQGQQLPGMHRVGARLHLVPEAELHRAGGS

SEQ ID NO: 15058 - protein, 60 aa, Homo sapiens
MEMFTFLLTCIFLPLLRGHSLFTCEPITVPRCMKMAYNMTFFPNLMGHYDQSIAAVEMEL

SEQ ID NO: 15059 - protein, 155 aa, Homo sapiens
MRWFLPWTLAAVTAAAASTVLATALSPAPTTMDFTPAPLEDTSSRPQFCKWPCECPPSPPRCPLGVSLITDGCECCKMCAQQLGDNCTEAAICDPHRGLYCDYSGDRPRYAIGVCARREEVSGCVPARGIHELHTCGLHQHTLLSTQVLWSLHGQ

SEQ ID NO: 15060 - protein, 100 aa, Homo sapiens
MALLALLLVVALPRVWTDANLTARQRDPEDSQRTDEGDNRVWCHVCERENTFECQNPRRCKWTEPYCVIAAVRRSSGLVNSDSAQQSLSSPSVSTKLVGC

SEQ ID NO: 15061 - protein, 133 aa, Homo sapiens
MFHVSFRYIFGLPPLILVLLPVASSDCDIEGKDGKQYESVLMVSIDQLLDSMKEIGSNCLNNEFNFFKRHICDANKVKGRKPAALGEAQPTKSLEENKSLKEQKKLNDLCFLKRLLQEIKTCWNKILMGTKEH

SEQ ID NO: 15062 - protein, 370 aa, Homo sapiens
MPGRSCVALVLLAAAVSCAVAQHAPPWTEDCRKSTYPPSGPTYRGAVPWYTINLDLPPYKRWHELMLDKAPVLKVIVNSLKNMINTFVPSGKIMQVVDEKLPGLLGNFPGPFEEEMKGIAAVTDIPLGHLIHGRNMDFGVFLGWNINNDTWVITEQLKPLTVNLDFQRNNKTVFKASSFAGYVGMLTGFKPGLFSLTLNERFSINGGYLGILEWILGKKDVMWIGFLTRTVLENSTSYEEAKNLLTKTKILAPAYFILGGNQSGEGCVITRDRKESLDVYELDAKQGRWYVVQTNYDRWKHPFFLDDRRTPAKMCLNRTSQENISFETMYDVLSTKPVLNKLTVYTTLIDVTKGQFETYLRDCPDPCIGW

SEQ ID NO: 15063 - protein, 1159 aa, Homo sapiens
MRGQAAAPGPVWILAPLLLLLLLLGRRARAAAGADAGPGPEPCATLVQGKFFGYFSAAAVFPANASRCSWTLRNPDPRRYTLYMKVAKAPVPCSGPGRVRTYQFDSFLESTRTYLGVESFDEVLRLCDPSAPLAFLQASKQFLQMRRQQPPQHDGLRPRAGPPGPTDDFSVEYLVVGNRNPSRAACQMLCRWLDACLAGSRSSHPCGIMQTPCACLGGEAGGPAAGPLAPRGDVCLRDAVAGGPENCLTSLTQDRGGHGATGGWKLWSLWGECTRDCGGGLQTRTRTCLPAPGVEGGGCEGVLEEGRQCNREACGPAGRTSSRSQSLRSTDARRREELGDELQQFGFPAPQTGDPAAEEWSPWSVCSSTCGEGWQTRTRFCVSSSYSTQCSGPLREQRLCNNSAVCPVHGAWDEWSPWSLCSSTCGRGFRDRTRTCRPPQFGGNPCEGPEKQTKFCNIALCPGRAVDGNWNEWSSWSACSASCSQGRQQRTRECNGPSYGGAECQGHWVETRDCFLQQCPVDGKWQAWASWGSCSVTCGAGSQRRERVCSGPFFGGAACQGPQDEYRQCGTQRCPEPHEICDEDNFGAVIWKETPAGEVAAVRCPRNATGLILRRCELDEEGIAYWEPPTYIRCVSIDYRNIQMMTREHLAKAQRGLPGEGVSEVIQTLVEISQDGTSYSGDLLSTIDVLRNMTEIFRRAYYSPTPGDVQNFVQILSNLLAEENRDKWEEAQLAGPNAKELFRLVEDFVDVIGFRMKDLRDAYQVTDNLVLSIHKLPASGATDISFPMKGWRATGDWAKVPEDRVTVSKSVFSTGLTEADEASVFVVGTVLYRNLGSFLALQRNTTVLNSKVISVTVKPPPRSLRTPLEIEFAHMYNGTTNQTCILWDETDVPSSSAPPQLGPWSWRGCRTVPLDALRTRCLCDRLSTFAILAQLSADANMEKATLPSVTLIVGCGVSSLTLLMLVIIYVSVWRYIRSERSVILINFCLSIISSNALILIGQTQTRNKVVCTLVAAFLHFFFLSSFCWVLTEAWQSYMAVTGHLRNRLIRKRFLCLGWGLPALVVAISVGFTKAKGYSTMNYCWLSLEGGLLYAFVGPAAAVVLGLPVELLRGAAAAGADLDVGCARRHRPPLRPLPDPLRCLRLAGGLRHRHGALYPP

SEQ ID NO: 15064 - protein, 37 aa, Homo sapiens
MFHVSFRYIFGLPPLILVLLPVASSDCDIEGQHERNW

SEQ ID NO: 15065 - protein, 2792 aa, Homo sapiens
MTSIHFVVHPLPGTEDQLNDRLREVSEKLNKYNLNSHPPLNVLEQATIKQCVVGPNHAAFLLEDGRVCRIGFSVQPDRLELGKPDNNDGSKLNSNSGAGRTSRPGRTSDSPWFLSGSETLGRLAGNTLGSRWSSGVGGSGGGSSGRSSAGARDSRRQTRVIRTGRDRGSGLLGSQPQPVIPASVIPEELISQAQVVLQGKSRSVIIRELQRTNLDVNLAVNNLLSRDDEDGDDGDDTASESYLPGEDLMSLLDADIHSAHPSVIIDADAMFSEDISYFGYPSFRRSSLSRLGSSRERDSELLRERESVLRLRERRWLDGASFDNERGSTSKEGEPNLDKKNTPVQSPVSLGEDLQWWPDKDGTKFICIGALYSELLAVSSKGELYQWKWSESEPYRNAQNPSLHHPRATFLGLTNEKIVLLSANSIRATVATENNKVATWVDETLSSVASKLEHTAQTYSELQGERIVSLHCCALYTCAQLENSLYWWGVVPFSQRKKMLEKARAKNKKPKSSAGISSMPNITVGTQVCLRNNPLYHAGAVAFSISAGIPKVGVLMESVWNMNDSCRFQLRSPESLKNMEKASKTTEAKPESKQEPVKTEMGPPPSPASTCSDASSIASSASMPYKRRRSTPAPKEEEKVNEEQWSLREVVFVEDVKNVPVGKVLKVDGAYVAVKFPGTSSNTNCQNSSGPDADPSSLLQDCRLLRIDELQVVKTGGTPKVPDCFQRTPKKLCIPEKTEILAVNVDSKGVHAVLKTGNWVRYCIFDLATGKAEQENNFPTSSIAFLGQNERNVAIFTAGQESPIILRDGNGTIYPMAKDCMGGIRDPDWLDLPPISSLGMGVHSLINLPANSTIKKKAAVIIMAVEKQTLMQHILRCDYEACRQYLMNLEQAVVLEQNLQMLQTFISHRCDGNRNILHACVSVCFPTSNKETKEEEEAERSERNTFAERLSAVEAIANAISVVSSNGPGNRAGSSSSRSLRLREMMRRSLRAAGLGRHEAGASSSDHQDPVSPPIAPPSWVPDPPAMDPDGDIDFILAPAVGSLTTAATGTGQGPSTSTIPGPSTEPSVVESKDRKANAHFILKLLCDSVVLQPYLRELLSAKDARGMTPFMSAVSGRAYPAAITILETAQKIAKAEISSSEKEEDVFMGMVCPSGTNPDDSPLYVLCCNDTCSFTWTGAEHINQDIFECRTCGLLESLCCCTECARVCHKGHDCKLKRTSPTAYCDCWEKCKCKTLIAGQKSARLDLLYRLLTATNLVTLPNSRGEHLLLFLVQTVARQTVEHCQYRPPRIREDRNRKTASPEDSDMPDHDLEPPRFAQLALERVLQDWNALKSMIMFGSQENKDPLSASSRIGHLLPEEQVYLNQQSGTIRLDCFTHCLIVKCTADILLLDTLLGTLVKELQNKYTPGRREEAIAVTMRFLRSVARVFVILSVEMASSKKKNNFIPQPIGKCKRVFQALLPYAVEELCNVAESLIVPVRMGIARPTAPFTLASTSIDAMQGSEELFSVEPLPPRPSSDQSSSSSQSQSSYIIRNPQQRRISQSQPVRGRDEEQDDIVSADVEEVEVVEGVAGEEDHHDEQEEHGEENAEAEGQHDEHDEDGSDMELDLLAAAETESDSESNHSNQDNASGRRSVVTAATAGSEAGASSVPAFFSEDDSQSNDSSDSDSSSSQSDDIEQETFMLDEPLERTTNSSHANGAAQAPRSMQWAVRNTQHQRAASTAPSSTSTPAASSAGLIYIDPSNLRRSGTISTSAAAAAAALEASNASSYLTSASSLARAYSIVIRQISDLMGLIPKYNHLVYSQIPAAVKLTYQDAVNLQNYVEEKLIPTWNWMVSIMDSTEAQLRYGSALASAGDPGHPNHPLHASQNSARRERMTAREEASLRTLEGRRRATLLSARQGMMSARGDFLNYALSLMRSHNDEHSDVLPVLDVCSLKHVAYVFQALIYWIKAMNQQTTLDTPQLERKRTRELLELGIDNEDSEHENDDDTNQSATLNDKDDDSLPAETGQNHPFFRRSDSMTFLGCIPPNPFEVPLAEAIPLADQPHLLQPNARKEDLFGRPSQGLYSSSASSGKCLMEVTVDRNCLEVLPTKMSYAANLKNVMNMQNRQKKEGEEQPVLPEETESSKPGPSAHDLAAQLKSSLLAEIGLTESEGPPLTSFRPQCSFMGMVISHDMLLGRWRLSLELFGRVFMEDVGAEPGSILTELGGFEVKESKFRREMEKLRNQQSRDLSLEVDRDRDLLIQQTMRQLNNHFGRRCATTPMAVHRVKVTFKDEPGEGSGVARSFYTAIAQAFLSNEKLPNLECIQNANKGTHTSLMQRLRNRGERDREREREREMRRSSGLRAGSRRDRDRDFRRQLSIDTRPFRPASEGNPSDDPEPLPAHRQALGERLYPRVQAMQPAFASKITGMLLELSPAQLLLLLASEDSLRARVDEAMELIIAHGRENGADSILDLGLVDSSEKVQENRKRHGSSRSVVDMDLDDTDDGDDNAPLFYQPGKRGFYTPRPGKNTEARLNCFRNIGRILGLCLLQNELCPITLNRHVIKVLLGRKVNWHDFAFFDPVMYESLRQLILASQSSDADAVFSAMDLAFAIDLCKEEGGGQVELIPNGVNIPVTPQNVYEYVRKYAEHRMLVVAEQPLHAMRKGLLDVLPKNSLEDLTAEDFRLLVNGCGEVNVQMLISFTSFNDESGENAEKLLQFKRWFWSIVEKMSMTERQDLVYFWTSSPSLPASEEGFQPMPSITIRPPDDQHLPTANTCISRLYVPLYSSKQILKQKLLLAIKTKNFGFV

SEQ ID NO: 15066 - protein, 47 aa, Homo sapiens
MPPFLITLFLFHSCCLRANGHLREGMTLLKTEFALHLYQSVAACRNE

SEQ ID NO: 15067 - protein, 1231 aa, Homo sapiens
MCKCCNLFSPNQSELLSHVSEKHMEEGVNVDEIIIPLRPLSTPEPPNSSKTGDEFLVMKRKRGRPKGSTKKSSTEEELAENIVSPTEDSPLAPEEGNSLPPSSLECSKCCRKFSNTRQLRKHICIIVLNLGEEEGEAGNESDLELEKKCKEDDREKASKRPRSQKTEKVQKISGKEARQLSGAKKPIISVVLTAHEAIPGATKIVPVEAGPPETGATNSETTSADLVPRRGYQEYAIQQTPYEQPMKSSRLGPTQLKIFTCEYCNKVFKFKHSLQAHLRIHTNEKPYKCPQCSYASAIKANLNVHLRKHTGEKFACDYCSFTCLSKGHLKVHIERVHKKIKQHCRFCKKKYSDVKNLIKHIRDAHDPQDKKVKEALDELCLMTREGKRQLLYDCHICERKFKNELDRDRHMLVHGDKWPFACELCGHGATKYQALELHVRKHPFVYVCAVCRKKFVSSIRLRTHIKEVHGAAQEALVFTSSINQSFCLLEPGGDIQQEALGDQLQLVEEEFALQGVNALKEEACPGDTQLEEGRKEPEAPGEMPAPAVHLASPQAESTALPPCELETTVVSSSDLHSQEVVSDDFLLKNDTSSAEAHAAPEKPPDMQHRSSVQTQGEVITLLLSKAQSAGSDQESHGAQSPLGEGQNMAVLSAGDPDPSRCLRSNPAEASDLLPPVAGGGDTITHQPDSCKAAPEHRSGITAFMKVLNSLQKKQMNTSLCERIRKVYGDLECEYCGKLFWYQVHFDMHVRTHTREHLYYCSQCHYSSITKNCLKRHVIQKHSNILLKCPTDGCDYSTPDKYKLQAHLKVHTALDKRSYSCPVCEKSFSEDRLIKSHIKTNHPEVSMSTISEVLGRRVQLKGLIGKRAMKCPYCDFYFMKNGSDLQRHIWAHEGVKPFKCSLCEYATRSKSNLKAHMNRHSTEKTHLCDMCGKKFKSKGTLKSHKLLHTADGKQFKCTVCDYTAAQKPQLLRHMEQHVSFKPFRCAHCHYSCNISGSLKRHYNRKHPNEEYANVGTGELAAEVLIQQGGLKCPVCSFVYGTKWEFNRHLKNKHGLKVVEIDGDPKWETATEAPEEPSTQYLHITEAEEDVQGTQAAVAALQDLRYTSESGDRLDPTAVNILQQIIELGAETHDATALASVVAMAPGTVTVVKQVTEEEPSSNHTVMIQETVQQASVELAEQHHLVVSSDDVEGIETVTVYTQGGEASEFIVYVQEAMQPVEEQAVEQPAQEL

SEQ ID NO: 15068 - protein, 206 aa, Homo sapiens
MAQLGAVVAVASSFFCASLFSAVHKIEEGHIGVYYRGGALLTSTSGPGFHLMLPFITSYKSVQTTLQTDEVKNVPCGTSGGVMIYFDRIEVVNFLVPNAVYDIVKNYTADYDKALIFNKIHHELNQFCSVHTLQEVYIELFGKKVSPEHAVLKQGSWNPASLHCLKPGCLQGVMVTYGQEMLKNLVLRSWSQRSSWRMLIAMQQDP

SEQ ID NO: 15069 - protein, 174 aa, Homo sapiens
MASLQRSRVLRCCSCRLFQAHQVKKSVKWTCKACGEKQSFLQEKSQPSESRWLKYLEKDSQELELEGTGVCFSKQPSSKMEEPGPRFSQDLPRKRKWSRSTVQPPCSRGVQDSGGSEVAWGPQKGQAGLTWKVKQGSSPCLQENSADCSAGELRGPGKELWSPIQQDGYKEILF

SEQ ID NO: 15070 - protein, 54 aa, Homo sapiens
MGRKDAATIKLPVDQYRKQIGKQDYKKTKPILRATKLKAEAKKTAIGIKTHHGC

SEQ ID NO: 15071 - protein, 82 aa, Homo sapiens
MMKTLLLFVGLLLTWESGQVLGDQTVSDNELQEMSNQGSKYVNKEIQNAVNGVKQIKTLIEKTNEERKTLLSNLEEAKKKKE

SEQ ID NO: 15072 - protein, 59 aa, Homo sapiens
MALVLEIFTLLASICWVSANIFEYQVDAQPLRPCELQRETAFLKQADYVPQCAEDGSFQ

SEQ ID NO: 15073 - protein, 138 aa, Homo sapiens
MARLLQASCLLSLLLAGFVSQSRGQEKSKAPRQMGNPQMDCHGGISGTIYEYGALTIDGEEYIPFKQYAGKYVLFVNVASYUGLTGQYIELNALQEELAPFGLVILGFPCNQFGKQEPGENSEILPTLKYVRPGGGFV

SEQ ID NO: 15074 - protein, 2535 aa, Homo sapiens
MVSPPLLIISVAGTIECKPDHLLWRPGSTSPQSVSFLHGKVVMESLGPPNHHSQSTLRPPLPPPHNHTLSHHHSSANSLNRNSLTNRRSQIHAPAPAPNDLATTPESVQLQDSWVLNSNVPLETRHFLFKTSSGSTPLFSSSSPGYPLTSGTVYTPPPRLLPRNTFSRKAFKLKKPSKYCSWKCAALSAIAAALLLAILLAYFIVPWSLKNSSIDSGEAEVGRRVTQEVPPGVFWRSQIHISQPQFLKFNISLGKDALFGVYIRRGLPPSHAQYDFMERLDGKEKWSVVESPRERRSIQTLVQNEAVFVQYLDVGLWHLAFYNDGKDKEMVSFNTVVLDSVQDCPRNCHGNGECVSGVCHCFPGFLGADCAKAACPVLCSGNGQYSKGTCQCYSGWKGAECDVPMNQCIDPSCGGHGSCIDGNCVCSAGYKGEHCEEVDCLDPTCSSHGVCVNGECLCSPGWGGLNCELARVQCPDQCSGHGTYLPDTGLCSCDPNWMGPDCSVEVCSVDCGTHGVCIGGACRCEEGWTGAACDQRVCHPRCIEHGTCKDGKCECREGWNGEHCTIGRQTAGTETDGCPDLCNGNGRCTLGQNSWQCVCQTGWRGPGCNVAMETSCADNKDNEGDGLVDCLDPDCCLQSACQNSLLCRGSRDPLDIIQQGQTDWPAVKSFYDRIKLLAGKDSTHIIPGENPFNSSLVSLIRGQVVTTDGTPLVGVNVSFVKYPKYGYTITRQDGTFDLIANGGASLTLHFERAPFMSQERTVWLPWNSFYAMDTLVMKTEENSIPSCDLSGFVRPDPIIISSPLSTFFSAAPGQNPIVPETQVLHEEIELPGSNVKLRYLSSRTAGYKSLLKITMTQSTVPLNLIRVHLMVAVEGHLFQKSFQASPNLAYTFIWDKTDAYGQRVYGLSDAVVSVGFEYETCPSLILWEKRTALLQGFELDPSNLGGWSLDKHHILNVKSGILHKGTGENQFLTQQPAIITSIMGNGRRRSISCPSCNGLAEGNKLLAPVALAVGIDGSLYVGDFNYIRRIFPSRNVTSILELRNNPAHKYYLAVDPVSGSLYVSDTNSRRIYRVKSLSGTKDLAGNSEVVAGTGEQCLPFDEARCGDGGKAIDATLMSPRGIAVDKNGLMYFVDATMIRKVDQNGIISTLLGSNDLTAVRPLSCDSSMDVAQVRLEWPTDLAVNPMDNSLYVLENNVILRITENHQVSIIAGRPMHCQVPGIDYSLSKLAIHSALESASAIAISHTGVLYITETDEKKINRLRQVTTNGEICLLAGAASDCDCKNDVNCNCYSGDDAYATDAILNSPSSLAVAPDGTIYIADLGNIRIRAVSKNKPVLNAFNQYEAASPGEQELYVFNADGIHQYTVSLVTGEYLYNFTYSTDNDVTELIDNNGNSLKIRRDSSGMPRHLLMPDNQIITLTVGTNGGLKVVSTQNLELGLMTYDGNTGLLATKSDETGWTTFYDYDHEGRLTNVTRPTGVVTSLHREMEKSITIDIENSNRDDDVTVITNLSSVEASYTVVQDQVRNSYQLCNNGTLRVMYANGMGISFHSEPHVLAGTITPTIGRCNISLPMENGLNSIEWRLRKEQIKGKVTIFGRKLRVHGRNLLSIDYDRNIRTEKIYDDHRKFTLRIIYDQVGRPFLWLPSSGLAAVNVSYFFNGRLAGLQRGAMSERTDIDKQGRIVSRMFADGKVWSYSYLDKSMVLLLQSQRQYIFEYDSSDRLLAVTMPSVARHSMSTHTSIGYIRNIYNPPESNASVIFDYSDDGRILKTSFLGTGRQVFYKYGKLSKLSEIVYDSTAVTFGYDETTGVLKMVNLQSGGFSCTIRYRKIGPLVDKQIYRFSEEGMVNARFDYTYHDNSFRIASIKPVISETPLPVDLYRYDEISGKVEHFGKFGVIYYDINQIITTAVMTLSKHFDTHGRIKEVQYEMFRSLMYWMTVQYDSMGRVIKRELKLGPYANTTKYTYDYDGDGQLQSVAVNDRPTWRYSYDLNGNLHLLNPGNSVRLMPLRYDLRDRITRLGDVQYKIDDDGYLCQRGSDIFEYNSKGLLTRAYNKASGWSVQYRYDGVGRRASYKTNLGHHLQYFYSDLHNPTRITHVYNHSNSEITSLYYDLQGHLFAMESSSGEEYYVASDNTGTPLAVFSINGLMIKQLQYTAYGEIYYDSNPDFQMVIGFHGGLYDPLTKLVHFTQRDYDVLAGRWTSPDYTMWKNVGKEPAPFNLYMFKSNNPLSSELDLKNYVTDVKSWLVMFGFQLSNIIPGFPRAKMYFVPPPYELSESQASENGQLITGVQQTTERHNQAFMALEGQVITKKLHASIREKAGHWFATTTPIIGKGIMFAIKEGRVTTGVSSIASEDSRKVASVLNNAYYLDKMHYSIEGKDTHYFVKIGSADGDLVTLGTTIGRKVLESGVNVTVSQPTLLVNGRTRRFTNIEFQYSTLLLSIRYGLTPDTLDEEKARVLDQARQRALGTAWAKEQQKARDGREGSRLWTEGEKQQLLSTGRVQGYEGYYVLPVEQYPELADSSSNIQFLRQNEMGKR

SEQ ID NO: 15075 - protein, 121 aa, Homo sapiens
MAAAYLDPNLNHTPNSSTKTHLGTGMERSPGAMERVLKVFHYFESNSEPTTWASIIRHGDATDVRGIIQKIVDSHKVKHVACYGFRLSHLRSEEVHWLHVDMGVSSVREKYELAHPPEEWK

SEQ ID NO: 15076 - protein, 1306 aa, Homo sapiens
MDQREPLPPAPAENEMKYDTNNNEEEEGEQFDFDSGDEIPEADRQAPSAPETGGAGASEAPAPTGGEDGAGAETTPVAEPTKLVLPMKVNPYSVIDITPFQEDQPPTPVPSAEEENVGLHVPCGYLVPVPCGYAVPSNLPLLLPAYSSPVIICATSLDEEAETPEVTEDRQPNSLSSEEPPTSEDQVGREDSALARWAADPANTAWMENPEEAIYDDVPRENSDSEPDEMIYDDVENGDEGGNSSLEYGWSSSEFESYEEQSDSECKNGIPRSFLRSNHKKQMQKLVKAAKDGTKDGLERTRAAVKRGRSFIRTKSLIAQDHRSSLEEEQNLFIDVDCKHPEAILTPMPEGLSQQQVVRRYILGSVVDSEKNYVDALKRILEQYEKPLSEMEPKVLSERKLKTVFYRVKEILQCHSLFQIALASRVSEWDSVEMIGDVFVASFSKSMVLDAYSEYVNNFSTAVAVLKKTCATKPAFLEFLKQEQEASPDRTTLYSLMMKPIQRFPQFILLLQDMLKNTSKGHPDRLPLQMALTELETLAEKLNERKRDADQRCEVKQIAKAINERYLNKLLSSGSRYLIRSDDMIETVYNDRGEIVKTKERRVFMLNDVLMCATVSSRPSHDSRVMSSQRYLLKWSVPLGHVDAIEYGSSAGTGEHSRHLAVHPPESLAVVANAKPNKVYMGPGQLYQDLQNLLHDLNVIGQITQLIGNLKGNYQNLNQSVAHDWTSGLQRLILKKEDEIRAADCCRIQLQLPGKQDKSGRPTFFTAVFNTFTPAIKESWVNSLQMAKLALEEENHMGWFCVEDDGNHIKKEKHPLLVGHMPVMVAKQQEFKIECAAYNPEPYLNNESQPDSFSTAHGFLWIGSCTHQMGQIAIVSFQNSTPKVIECFNVESRILCMLYVPVEEKRREPGAPPDPETPAVRASDVPTICVGTEEGSISIYKSSQGSKKVRLQHFFTPEKSTVMSLACTSQSLYAGLVNGAVASYARAPDGSWDSEPQKVIKLGVLPVRSLLMMEDTLWAASGGQVFIISVETHAVEGQLEAHQEEGMVISHMAVSGVGIWIAFTSGSTLRLFHTETLKHLQDINIATPVHNMLPGHQRLSVTSLLVCHGLLMVGTSLGVLVALPVPRLQGIPKVTGRGMVSYHAHNSPVKFIVLATALHEKDKDKSRDSLAPGPEPQDEDQKDALPSGGAGSSLSQGDPDAAIWLGDSLGSMTQKSDLSSSSGSLSLSHGSSSLEHRSEDSTIYDLLKDPVSLRSKARRAKKAKASSALVVCGGQGHRRVHRKARQPHQEELAPTVMVWQIPLLNI

SEQ ID NO: 15077 - protein, 826 aa, Homo sapiens
MQHIFAFFCTGFLGAVVGANFPNNIQIGGLFPNQQSQEHAAFRFALSQLTEPPKLLPQIDIVNISDSFEMTYRCLSVLQKVLDTAAEKNWQVTAVNILTTTEEGYRMLFQDLEKKKERLVVVDCESERLNAILGQIIKLEKNGIGYHYILANLGFMDIDLNKFKESGANVTGFQLVNYTDTIPAKIMQQWKNSDARDHTRVDWKRPKYTSALTYDGVKVMAEAFQSLRRQRIDISRRGNAGDCLANPAVPWGQGIDIQRALQQVRFEGLTGNVQFNEKGRRTNYTLHVIEMKHDGIRKIGYWNEDDKFVPAATDAQAGGDNSSVQNRTYIVTTILEDPYVMLKKNANQFEGNDRYEGYCVELAAEIAKHVGYSYRLEIVSDGKYGARDPDTKAWNGMVGELVYGRADVAVAPLTITLVREEVIDFSKPFMSLGISIMIKKPQKSKPGVFSFLDPLAYEIWMCIVFAYIGVSVVLFLVSRFSPYEWHSEEFEEGRDQTTSDQSNEFGIFNSLWFSLGAFMQQGCDISPRSLSGRIVGGVWWFFTLIIISSYTANLAAFLTVERMVSPIESAEDLAKQTEIAYGTLEAGSTKEFFRRSKIAVFEKMWTYMKSAEPSVFVRTTEEGMIRVRKSKGKYAYLLESTMNEYIEQRKPCDTMKVGGNLDSKGYGIATPKGSALRNPVNLAVLKLNEQGLLDKLKNKWWYDKGECGSGGGDSKDKTSALSLSNVAGVFYILIGGLGLAMLVALIEFCYKSRSESKRMKGFCLIPQQSINEAIRTSTLPRNSGAGASSGGSGENGRVVSHDFPKSMQSIPCMSHSSGMPLGATGL

SEQ ID NO: 15078 - protein, 145 aa, Homo sapiens
MNNLLCCALVFLDISIKWTTQETFPPKYLHYDEETSHQLLCDKCPPGTYLKQHCTAKWKTVCAPCPDHYYTDSWHTSDECLYCSPVCKELQYVKQECNRTHNRVCECKEGRYLEIEFCLKHRSCPPGFGVVQAGCRRRPKPQICI

SEQ ID NO: 15079 - protein, 179 aa, Homo sapiens
MQFRLFSFALIILNCMDYSHCQGNRWRRSKRGCRIENCDSCFSKDFCTKCKVGFYLHRGRCFDECPDGFAPLEETMECVGCEVGHWSEWGTCSRNNRTCGFKWGLETRTRQIVKKPVKDTILCPTIAESRRCKMTMRHCPGGKRTPKAKEKRNKKKKRKLIERAQEQHSVFLATDRANQ

SEQ ID NO: 15080 - protein, 81 aa, Homo sapiens [sequence omitted]

SEQ ID NO: 15081 - protein, 201 aa, Homo sapiens
MKIATVSVLLPLALCLIQDAASKNEDQEMCHEFQAFMKNGKLFCPQDKKFFQSLDGIMFINKCATCKMILEKEAKSQKRARHLARAPKATAPTELNCDDFKKGERDGDFICPDYYEAVCGTDGKTYDNRCALCAENAKTGSQIGVKSEGECKSSNPEQFCEPVMVGEGEGRKDLIHVTLVFFQEIGSKLMARTVLCLSSGT

SEQ ID NO: 15082 - protein, 677 aa, Homo sapiens
MAERKQSGKAAEDEEVPAFFKNLGSGSPKPRQKFCGMFCPVEGSSENKTIDFDSLSVGRGSGQVVAQQRDVAHLGPDPQPPYSRQGRRAGGEPSVESGRKVEIRRASGKEALQNINDQSDRLLIKGGKIVNDDQSFYADIYMEDGLIKQIGENLIVPGGVKTIEAHSRMVIPGGIDVHTRFQMPDQGMTSADDFFQGTKAALAGGTTMIIDHVVPEPGTSLLAAFDQWREWADSKSCCDYSLHVDISEWHKGIQEEMEALVKDHGVNSFLVYMAFKDRFQLTDCQIYEVLSVIRDIGAIAQVHAENGDIIAEEQQRILDLGITGPEGHVLSRPEEVEAEAVNRAITIANQTNCPLYITKVMSKSSAEVIAQARKKGTVVYGEPITASLGTDGSHYWSKNWAKAAAFVTSPPLSPDPTTPDFLNSLLSCGDLQVTGSAHCTFNTAQKAVGKDNFTLIPEGTNGTEERMSVIWDKAVVTGKMDENQFVAVTSTNAAKVFNLYPRKGRIAVGSDADLVIWDPDSVKTISAKTHNSSLEYNIFEGMECRGSPLVVISQGKIVLEDGTLHVTEGSGRYIPRKPFPDFVYKRIKARSRLAELRGVPRGLYDGPVCEVSVTPKTVTPASSAKTSPAKQQAPPVRNLHQSGFSLSGAQIDDNIPRRTTQRIVAPPGGRANITSLG

SEQ ID NO: 15083 - protein, 692 aa, Homo sapiens
MAKRSRSEDEDDDLQYADHDYEVPQQKGLKKLWNRVKWTRDEDDKLKKLVEQHGTDDWTLIASHLQNRSDFQCQHRWQKVLNPELIKGPWTKEEDQRVIELVQKYGPKRWSLIAKHLKGRIGKQCRERWHNHLNPEVKKSSWTEEEDRIIYEAHKRLGNRWAEIAKLLPGRTDNSIKNHWNSTMRRKVEQEGYLQDGIKSERSSSKLQHKPCAAMDHMQTQNQFYIPVQIPGYQYVSPEGNCIEHVQPTSAFIQQPFIDEDPDKEKKIKELEMLLMSAENEVRRKRIPSQPGSFSSWSGSFLMDDNMSNTLNSLDEHTSEFYSMDENQPVSAQQNSPTKFLAVEANAVLSSLQTIPEFAETLELIESDPVAWSDVTSFDISDAAASPIKSTPVKLMRIQHNEGAMECQFNVSLVLEGKKNTCNGGNSEAVPLTSPNIAKFSTPPAILRKKRKMRVGHSPGSELRDGSLNDGGNMALKHTPLKTLPFSPSQFFNTCPGNEQLNIENPSFTSTPICGQKALITTPLHKETTPKDQKENVGFRTPTIRRSILGTTPRTPTPFKNALAAQEKKYGPLKIVSQPLAFLEEDIREVLKEETGTDLFLKEEDEPAYKSCKQENTASGKKVRKSLVLDNWEKEESGTQLLTEDISDMQSNCEWETVVYGKTEDQLIMTEQARRYLSTYTATSSTSRALIL

SEQ ID NO: 15084 - protein, 105 aa, Homo sapiens
MARFLTLCTWLLLLGPGLLATVRAECSQDCATCSYRLVRPADINFLACVMECEGKLPSLKIWETCKELLQLSKPELPQDGTSTLRENSKPEESHLLAKRYGGFMK

SEQ ID NO: 15085 - protein, 459 aa, Homo sapiens
MWQIVFFTLSCDLVLAAAYNNFRKSMDSIGKKQYQVQHGSCSYTFLLPEMDNCRSSSSPYVSNAVQRDAPLEYDDSVQRLQVLENIMENNTQWLMKLENYIQDNMKKEMVEIQQNAVQNQTAVMIEIGTNLLNQTAEQTRKLTDVEAQVLNQTTRLELQLLEHSLSTNKLEKQILDQTSEINKLQDKNSFLEKKVLAMEDKHIIQLQSIKEEKDQLQVLVSKQNSIIEELEKKIVTATVNNSVLQKQQHDLMETVNNLLTMMSTSNSKDPTVAKEEQISFRDCAEVFKSGHTTNGIYTLTFPNSTEEIKAYCDMEAGGGGWTIIQRREDGSVDFQRTWKEYKVGFGNPSGEYWLGNEFVSQLTNQQRYVLKIHLKDWEGNEAYSLYEHFYLSSEELNYRIHLKGLTGTAGKISSISQPGNDFSTKDGDNDKCICKCSQMLTGGRDDFLSSYLYWQGMIS

SEQ ID NO: 15086 - protein, 142 aa, Homo sapiens
FCVAFAYWAGSVHTALVFLGLNAGGKGSPKNVESFASMLRHSPLTQMGPAKDKLVIGRIFHIVENDLYIDFGGKFHCVCRRPEVDGEKYQKGTRVRLRLLDLELTSRFLGATTDTTVLEANAVLLGIQESKDSRSKEEHHEK

SEQ ID NO: 15087 - protein, 724 aa, Homo sapiens
MSAEGYQYRALYDYKKEREEDIDLHLGDILTVNKGSLVALGFSDGQEARPEEIGWLNGYNETTGERGDFPGTYVEYIGRKKISPPTPKPRPPRPLPVAPGSSKTEADVEQQALTLPDLAEQFAPPDIAPPLLIKLVEAIEKKGLECSTLYRTQSSSNLAELRQLLDCDTPSVDLEMIDVHVLADAFKRYLLDLPNPVIPAAVYSEMISLAPEVQSSEEYIQLLKKLIRSPSIPHQYWLTLQYLLKHFFKLSQTSSKNLLNARVLSEIFSPMLFRFSAASSDNTENLIKVIEILISTEWNERQPAPALPPKPPKPTTVANNGMNNNMSLQDAEWYWGDISREEVNEKLRDTADGTFLVRDASTKMHGDYTLTLRKGGNNKLIKIFHRDGKYGFSDPLTFSSVVELINHYRNESLAQYNPKLDVKLLYPVSKYQQDQVVKEDNIEAVGKKLHEYNTQFQEKSREYDRLYEEYTRTSQEIQMKRTAIEAFNETIKIFEEQCQTQERYSKEYIEKFKREGNEKEIQRIMHNYDKLKSRISEIIDSRRRLEEDLKKQAAEYREIDKRMNSIKPDLIQLRKTRDQYLMWLTQKGVRQKKLNEWLGNENTEDQYSLVEDDEDLPHHDEKTWNVGSSNRNKAENLLRGKRDGTFLVRESSKQGCYACSVVVDGEVKHCVINKTATGYGFAEPYNLYSSLKELVLHYQHTSLVQHNDSLNVTLAYPVYAQQRR

SEQ ID NO: 15088 - protein, 154 aa, Homo sapiens
MKVLLCDLLLLSLFSSVFSSCQRDCLTCQEKLHPALDSFDLEVCILECEEKVFPSPLWTPCTKVMARSSWQLSPAAPEHVAAALYQPRASEMQHLRRMPRVRSLFQEQEEPEPGMEEAGEMEQKQLQKRFGGFTGARKSARKLANQKRFSEFMR

SEQ ID NO: 15089 - protein, 945 aa, Homo sapiens
MSERAADDVRGEPRRAAAAAGGAAAAAARQQQQQQQQQQPPPPQPQRQQHPPPPPRRTRPEDGGPGAASTSAAAMATVGERRPLPSPEVMLGQSWNLWVEASKLPGKDGTELDESFKEFGKNREVMGLCREDMPIFGFCPAHDDFYLVVCNDCNQVVKPQAFQSHYERRHSSSSKPPLAVPPTSVFSFFPSLSKSKGGSASGSNRSSSGGVLSASSSSSKLLKSPKEKLQLRGNTRPMHPIQQSRVPHGRIMTPSVKVEKIHPKMDGTLLKSAVGPTCPATVSSLVKPGLNCPSIPKPTLPSPGQILNGKGLPAPPTLEKKPEDNSNNRKFLNKRLSEREFDPDIHCGVIDLDTKKPCTRSLTCKTHSLTQRRAVQGRRKRFDVLLAEHKNKTREKELIRHPDSQQPPQPLRDPHPAPPRTSQEPHQNPHGVIPSESKPFVASKPKPHTPSLPRPPGCPAQQGGSAPIDPPPVHESPHPPLPATEPASRLSSEEGEGDDKEESVEKLDCHYSGHHPQPASFCTFGSRQIGRGYYVFDSRWNRLRCALNLMVEKHLNAQLWKKIPPVPSTTSPISTRIPHRTNSVPTSQCGVSYLAAATVSTSPVLLSSTCISPNSKSVPAHGTTLNAQPAASGAMDPVCSMQSRQVSSSSSSPSTPSGLSSVPSSPMSRKPQKLKSSKSLRPKESSGNSTNCQNASSSTSGGSGKKRKNSSPLLVHSSSSSSSSSSSSHSMESFRKNCVAHSGPPYPSTVTSSHSIGLNCVTNKANAVNVRHDQSGRGPPTGSPAESIKRMSVMVNSSDSTLSLGPFIHQSNELPVNSHGSFSHSHTPLDKLIGKKRKCSPSSSSINNSSSKPTKVAKVPAVNNVHMKHTGTIPGAQGLMNSSLLHQDISSPCLRTGISATSPQSPDLKSKGTSLTAENSTGRNNADTFEDKLHLHSALWTPRCL

SEQ ID NO: 15090 - protein, 115 aa, Homo sapiens
MFLLLALLTELGRLQAHEGSEGIFLHVTVPRKIKSNDSEVSERKMIYIITIDGQPYTLHLGKQSFLPQNFLVYTYNETGSLHSVSPYFMMHCHYQGYAAEFPNSFVTLSICSGLR

SEQ ID NO: 15091 - protein, 92 aa, Homo sapiens
MNYSLHLAFVCLSLFTERMCIQGSQFNVEVGRSDKLSLPGFENLTAGYNKFLRPNFGGEPVQIALTLDIASISSISESNMDYTATIYLRQRW

SEQ ID NO: 15092 - protein, 61 aa, Homo sapiens
MAFKDTGKTPVEPEVAIHRIRITLTSRNVKSLEKVCADLIRGAKEKNLKVKGPVRMPTKVK

SEQ ID NO: 15093 - protein, 51 aa, Homo sapiens
MIKKTEFSNVCSIFYLILQAMLKGLLQLSCPGIASDAGDRRSKFSAGTTFR

SEQ ID NO: 15094 - protein, 339 aa, Homo sapiens
MAQLGAVVAVASSFFCASLFSAVHKIEEGHIGVYYRGGALLTSTSGPGFHLMLPFITSYKSVQTTLQTDEVKNVPCGTSGGVMIYFDRIEVVNFLVPNAVYDIVKNYTADYDKALIFNKIHHELNQFCSVHTLQEVYIELFDQIDENLKLALQQDLTSMAPGLVIQAVRVTKPNIPEAIRRNYELMESEKTKLLIAAQKQKVVEKEAETERKKALIEAEKVAQVAEITYGQKVMEKETEKKISEIEDAAFLAREKAKADAECYTAMKIAEANKLKLTPEYLQLMKYKAIASNSKIYFGKDIPNMFMDSAGSVSKQFEGLADKLSFGLEDEPLETATKEN

SEQ ID NO: 15095 - protein, 718 aa, Homo sapiens
MDELHSLDPRRQELLEARFTGVASGSTGSTGSCSVGAKASTNNESSNHSFGSLGSLSDKESETPEKKQSESSRGRKRKAENQNESSQGKSIGGRGHKISDYFEYQGGNGSSPVRGIPPAIRSPQNSHSHSTPSSSVRPNSPSPTALAFGDHPIVQPKQLSFKIIQTDLTMLKLAALESNKIQDLEKKEGRIDDLLRANCDLRRQIDEQQKLLEKYKERLNKCISMSKKLLIEKSTQEKLSSREKSMQDRLRLGHFTTVRHGASFTEQWTDGFAFQNLVKQQEWVNQQREDIERQRKLLAKRKPPTANNSQAPSTNSEPKQRKNKAVNGAENDPFVRPNLPQLLTLAEYHEQEEIFKLRLGHLKKEEAEIQAELERLERVRNLHIRELKRINNEDNSQFKDHPTLNERYLLLHLLGRGGFSEVYKAFDLYEQRYAAVKIHQLNKSWRDEKKENYHKHACREYRIHKELDHPRIVKLYDYFSLDTDTFCTVLEYCEGNDLDFYLKQHKLMSEKEARSIVMQIVNALRYLNEIKPPIIHYDLKPGNILLVDGTACGEIKITDFGLSKIMDDDSYGVDGMDLTSQGAGTYWYLPPECFVVGKEPPKISNKVDVWSVGVIFFQCLYGRKPFGHNQSQQDILQENTILKATEVQFPVKPVVSSEAKAFIRRCLAYRKEDRFDVHQLANDPYLLPHMRRSNSSGNLHMAGLTASPTPPSSSIITY

SEQ ID NO: 15096 - protein, 161 aa, Homo sapiens
MAATQKLVKDIIDSKTGETASKRWKGAKNSETAAKVALMKLKMHADGDKSLPQTERIYFQVFLPKGSKEKSKPMFFCHRWSIGKAIDFAASLARLKNDNNKFTAKKLRLCHITSGEALPLDHTLETWIAKEDCPLYNGGNIILEYLNDEEQFCKNVESYLE

SEQ ID NO: 15097 - protein, 520 aa, Homo sapiens
MAAVAAEAAATAASPGEGGAGEAEPEMEPIPGSEAGTDPLPVTATEASVPDGETDGQQSAPQADEPPLPPPPPPPGELARSPEAVGPELEAEEKLSVRVAESAAAAPQGGPELPPSPASPPEQPPAPEEREEPPLPQPVAPALVPPAGGDSTVSQLIPGSEVRVTLDHIIEDALVVSFRFGEKLFSGVLMDLSKRFGPHGIPVTVFPKREYKDKPEAMPLQSNTFQEGTEVKCEANGAVPDDPSPVPHPELSLAESLWTSKPPPLFHEGAPYPPPLFIRDTYNQSIPQPPPRKIKRPKRKMYREEPTSIMNAIKLRPRQVLCDKCKNSVVAEKKEIRKGSSATDSSKYEDKKRRNESVTTVNKKLKTDHKVDGKNQNESQKRNAVVKVSNIAHSRGRVVKVSAQANTSKAQLSTKKVLQSKNMDHAKAREVLKIAKEKAQKKQNETSTSKNAHSKVHFTRRYQNPSSGSLPPRVRLKPQRYRNEENDSSLKTGLEKMRSGKMAPKPQSRCTSTRSAAQRH

SEQ ID NO: 15098 - protein, 64 aa, Homo sapiens
MGNPGTFKRGLLLSALSYLGFETYQVISQAAVVHATAKESRCVTEGRVWRCDLSSLQPLPPGFK

SEQ ID NO: 15099 - protein, 526 aa, Homo sapiens
MLSVGLGFLRTELGLDLGLEPKRYPGWVILVGTGALGLLLLFLLGYGWAAACAGARKKRRSPPRKREEAAAVPAAAPDDLALLKNLRSEEQKKKNRKKLSEKPKPNGRTVEVAEGEAVRTPQSVTAKQPPEIDKKNEKSKKNKKKSKSDAKAVQNSSRHDGKEVDEGAWETKISHREKRQQRKRDKVLTDSGSLDSTIPGIENTITVTTEQLTTASFPVGSKKNKGDSHLNVQVSNFKSGKGDSTLQVSSGLNENLTVNGGGWNEKSVKLSSQISAGEEKWNSVSPASAGKRKTEPSAWSQDTGDANTNGKDWGRSWSDRSIFSGIDGLSSADPNSDWNAPAEEWGNWVDEERASLLKSQEPIPDDQKVSDDDKEKGEGALPTGKSKKKKKKKKKQGEDNSTAQDTEELEKEIREDLPVNTSKTRPKQEKAFSLKTISTSDPAEVLVKNSQPIKTLPPATSTEPSVILSKSDSDKSSSQVPPILQETDKSKSNTKQNSVPPSQTKSETSWESPKQIKKKKKARRET

SEQ ID NO: 15100 - protein, 64 aa, Homo sapiens
MEMFTFLLTCIFLPLLRGHSLFTCEPITVPRCMKMAYNMTFFPNLMGHYDQSIAAVEMEGTQTG

SEQ ID NO: 15101 - protein, 147 aa, Homo sapiens
MILQAHLHSLCLLMLYLATGYGQEGKFSGPLKPMTFSIYEGQEPSQIIFQFKANPPAVTFELTGETDNIFVIEREGLLYYNRALDRETRSTHNLQVAALDANGIIVEGPVPITIKVKDINDNRPTFLQSKYEGSVRQNSRPGKPFLY

SEQ ID NO: 15102 - protein, 355 aa, Homo sapiens
MPFLGQDWRSPGQNWVKTADGWKRFLDEKSGSFVSDLSSYCNKEVYNKENLFNSLNYDVAAKKRKKDMLNSKTKTQYFHQEKWIYVHKGSTKERHGYCTLGEAFNRLDFSTAILDSRRFNYVVRLLELIAKSQLTSLSGIAQKNFMNILEKVVLKVLEDQQNIRLIRELLQTLYTSLCTLVQRVGKSVLVGNINMWVYRMETILHWQQQLNNIQITRPAFKGLTFTDLPLCLQLNIMQRLSDGRDLVSLGQAAPDLHVLSEDRLLWKKLCQYHFSERQIRKRLILSDKGQLDWKKMYFKLVRCYPRKEQYGDTLQLCKHCHILSWKGTDHPCTANNPESCSVSLSPQDFINLFKF

SEQ ID NO: 15103 - protein, 72 aa, Homo sapiens
MAASRLPPATLTLKQFVRRQQVLLLYRRILQTIRQVPNDSDRKYLKDWAREEFRRNKSATEEVRTKSWIQSG

SEQ ID NO: 15104 - protein, 145 aa, Homo sapiens
MAVSTGVKVPRNFRLLEELEEGQKGVGDGTVSWGLEDDEDMTLTRWTGMIIGPPRTNYENRIYSLKVECGPKYPEAPPSVRFVTKINMNGINNSSGMVDARSIPVLAKWQNSYSIKVVLQELRRLMMSKENMKLPQPPEGQTYNN

SEQ ID NO: 15105 - protein, 67 aa, Homo sapiens
MARIPKTLKFVVVIVAVLLPDLIDQNILEPVTRAQRVWITPTLPTMNLLASHVQFVNQIKNIKVPAP

SEQ ID NO: 15106 - protein, 129 aa, Homo sapiens
MESKALLVLTLAVWLQSLTASRGGVAAADQRRDFIDIESKFALRTPEDTAEDTCHLIPGVAESVATCHFNHSSKTFMVIHGWTVTGMYESWVPKLVAALYKREPDSNVIVVDWLSRAQEHYPVSAGYTK

SEQ ID NO: 15107 - protein, 191 aa, Homo sapiens
MSLALRSELVVDKTKRKKRRELSEEQKQEIKDAFELFDTDKDEAIDYHELKVAMRALGFDVKKADVLKILKDYDREATGKITFEDFNEVVTDWILERDPHEEILKAFKLFDDDDSGKISLRNLRRVARELGENMSDEELRAMIEEFDKDGDGEILKNILLLPIWSRCLSLNREFFSEVNQEEFIAIMTGDI

SEQ ID NO: 15108 - protein, 143 aa, Homo sapiens
MAVVIRLLGLPFIAGPVDIRHFFTGLTIPDGGVHIIGGEIGEAFIIFATDEDARRAISRSGGFIKDSSVELFLSSKAEMQKTIEMKRTDRVGRGRPGSGTSGVDSLSNFIESVKEEASNSGYGSSINQDAGFHTNGTGHGNLR

SEQ ID NO: 15109 - protein, 923 aa, Homo sapiens
MGSGAGELGRAERLPVLFLFLLSLFCPALCEQIRYRIPEEMPKGSVVGNLATDLGFSVQELPTRKLRVSSEKPYFTVSAESGELLVSSRLDREEICGKKPACALEFEAVAENPLNFYHVNVEIEDINDHTPKFTQNSFELQISESAQPGTRFILGSAHDADIGSNTLQNYQLSPSDHFSLINKEKSDGSKYPEMVLKTPLDREKQKSYHLTLTALDFGAPPLSSTAQIHVLVTDANDNAPVFSQDVYRVSLSENVYPGTTVLQVTATDQDEGVNAEITFSFSEASQITQFDLNSNTGEITVLNTLDFEEVKEYSIVLEARDGGGMIAQCTVEVEVIDENDNAPEVIFQSLPNLIMEDAELGTHIALLKVRDKDSRHNGEVTCKLEGDVPFKILTSSRNTYKLVTDAVLDREQNPEYNITVTATDRGKPPLSSSSSITLHIGDVNDNAPVFSQSSYIVHVAENNPPGASISQVRASDPDLGPNGQVSYCIMASDLEQRELSSYVSISAESGVVFAQRAFDHEQLRAFELTLQARDQGSPALSANVSLRVLVDDRNDNAPRVLYPALGPDGSALFDMVPHAAEPGYLVTKVVAVDADSGHNAWLSYHVLQASEPGLFSLGLRTGEVRTARALGDRDAVRQRLLVAVRDGGQPPLSATATLHLVFADSLQEVLPDITDRPDPSDLQAELQFYLVVALALISVLFLVAMILAIALRLRRSSSPASWSCFQPGLCVKSESVVPPNYSEGTLPYSYNLCVAHTGKTEFNFLKCSEQLSSGQDILCGDSSGALFPLCNSSELTSHQQAPPNTDWRFSQAQRPGTSGSQNGDDTGTWPNNQFDTEMLQAMILASASEAADGSSTLGGGAGTMGLSARYGPQFTLQHVPDYRQNVYIPGSNATLTNAAGKRDGKAPAGGNGNKKKSGKKEKK

SEQ ID NO: 15110 - protein, 467 aa, Homo sapiens
MEMFTFLLTCIFLPLLRGHSLFTCEPITVPRCMKMAYNMTFFPNLMGHYDQSIAAVEMEHFLPLANLECSPNIETFLCKAFVPTCIEQIHVVPPCRKLCEKVYSDCKKLIDTFGIRWPEELECDRLQYCDETVPVTFDPHTEFLGPQKKTEQVQRDIGFWCPRHLKTSGGQGYKFLGIDQCAPPCPNMYFKSDELEFAKSFIGTVSIFCLCATLFTFLTFLIDVRRFRYPERPIIYYSVCYSIVSLMYFIGFLLGDSTACNKADEKLELGDTVVLGSQNKACTVLFMLLYFFTMAGTVWWVILTITWFLAAGRKWSCEAIEQKAVWFHAVAWGTPGFLTVMLLAMNKVEGDNISGVCFVGLYDLDASRYFVLLPLCLCVFVGLSLLLAGIISLNHVRQVIQHDGRNQEKLKKFMIRIGVFSGLYLVPLVTLLGCYVYEQVNRITWEITWVSDHCRQYHIPCPYQSNQ

SEQ ID NO: 15111 - protein, 424 aa, Homo sapiens
MPPFLITLFLFHSCCLRANGHLREGMTLLKTEFALHLYQSVAACRNETNFVISPAGVSLPLEILQFGAEGSTGQQLADALGYTVHDKRVKDFLHAVYATLPTSSQGTEMELACSLFVQVGTPLSPCFVEHVSWWANSSLEPADLSEPNSTAIQTSEGASRETAGGGPSEGPGGWPWEQVSAAFAQLVLVSTMSFQGTWRKRFSSTDTQILPFTCAYGLVLQVPMMHQTTEVNYGQFQDTAGHQVGVLELPYLGSAVSLFLVLPRDKDTPLSHIEPHLTASTIHLWTTSLRRARMDVFLPRFRIQNQFNLKSILNSWGVTDLFDPLKANLKGISGQDGFYVSEAIHKAKIEVLEEGTKASGATALLLLKRSRIPIFKADRPFIYFLREPNTGITVFFDRIQIIYQCLSSNKGSFVHYPLKNKHSF

SEQ ID NO: 15112 - protein, 215 aa, Homo sapiens
MNFLLSWVHWSLALLLYLHHAKWSQAAPMAEGGGQNHHEVVKFMDVYQRSYCHPIETLVDIFQEYPDEIEYIFKPSCVPLMRCGGCCNDEGLECVPTEESNITMQIMRIKPHQGQHIGEMSFLQHNKCECRPKKDRARQEKKSVRGKGKGQKRKRKKSRYKSWSVPCGPCSERRKHLFVQDPQTCKCSCKNTDSRCKARQLELNERTCRCDKPRR

SEQ ID NO: 15113 - protein, 750 aa, Homo sapiens
MANRLQRGDRSRLLLLLCIFLGTLRGFRARQIRYSVPEETEKGSFVGNISKDLGLEPRELAKRGVRIVSRGKTQLFAVNPRSGSLITAGRIDREELCETVSSCFLNMELLVEDTLKIYGVEVEIIDINDNAPSFQEDEVEIKVSEHAIPGARFALPNARDPDVGVNSLQSYQLSPNNYFSLQLRGRTDGAKNPELVLEGSLDREKEAAHLLLLTALDGGDPIRKGAVPIRVVVLDVNDHIPMFTQSVYRVSVPENISSGTRVLMVNATDPDEGINGEVMYSFRNMESKASEIFQLDSQTGEVQVRGSLDFEKYRFYEMEIQGQDGGGLFTTTTMLITVVDVNDNAPEITITSSINSILENSPPGTVIALLNVQDQDSGENGQVSCFIPNHLPFKLEKTYGNYYKLITSRVLDRELVQSYNITLTATDQGSPPLSAETHVWLNVADDNDNPPVFPHSSYSAYIPENNPRGASIFSVTALDPDSKQNALVTYSLTDDTVQGVPLSSYVSINSNTGVLYALQSFDYEQFRDLELRVIARDSGDPPLSSNVSLSLFVLDQNDNAPEILYPALPTDGSTGVELAPRSAEPGYLVTKVVAVDKDSGQNAWLSYRLLKASEPGLFAVGEHTGEQAPPNTDWRFSQAQRPGTSGSQNGDDTGTWPNNQFDTEMLQAMILASASEAADGSSTLGGGAGTMGLSARYGPQFTLQHVPDYRQNVYIPGSNATLTNAAGKRDGKAPAGGNGNKKKSGKKEKK

SEQ ID NO: 15114 - protein, 468 aa, Homo sapiens
MDSLASLVLCGVSLLLSVPRHEVPDILEVHLPHAQPQDAGVYSARYIGGNLFTSAFTRLIVRRCEAQKWGPECNHLCTACMNNGVCHEDTGECICPPGFMGRTCEKACELHTFGRTCKERCSGQEGCKSYVFCLPDPYGCSCATGWKGLQCNEGIQRMTPKIVDLPDHIEVNSGKFNPICKASGWPLPTNEEMTLVKPDGTVLHPKDFNHTDHFSVAIFTIHRILPPDSGVWVCSVNTVAGMVEKPFNISVKVLPKPLNAPNVIDTGHNFAVINISSEPYFGDGPIKSKKLLYKPVNHYEAWQHIQVTNEIVTLNYLEPRTEYELCVQLVRRGEGGEGHPGPVRRFTTASIGLPPPRGLNLLPKSQTTLNLTWQPIFPSSEDDFYVEVERRSVQKSDQQNIKVPGNLTSVLLNNLHPREQYVVRARVNTKAQGEWSEDLTAWTLSDILPPQPENIKISNITHSSAVIS

SEQ ID NO: 15115 - protein, 498 aa, Homo sapiens
MTVFLSFAFLAAILTHIGCSNQRRSPENSGRRYNRIQHGQCAYTFILPEHDGNCRESTTDQYNTNALQRDAPHVEPDFSSQKLQHLEHVMENYTQWLQKLENYIVENMKSEMAQIQQNAVQNHTATMLEIGTSLLSQTAEQTRKLTDVETQVLNQTSRLEIQLLENSLSTYKLEKQLLQQTNEILKIHEKNSLLEHKILEMEGKHKEELDTLKEEKENLQGLVTRQTYIIQELEKQLNRATTNNSVLQKQQLELMDTVHNLVNLCTKEGVLLKGGKREEEKPFRDCADVYQAGFNKSGIYTIYINNMPEPKKVFCNMDVNGGGWTVIQHREDGSLDFQRGWKEYKMGFGNPSGEYWLGNEFIFAITSQRQYMLRIELMDWEGNRAYSQYDRFHIGNEKQNYRLYLKGHTGTAGKQSSLILHGADFSTKDADNDNCMCKCALMLTGGWWFDACGPSNLNGMFYTAGQNHGKLNGIKWHYFKGPSYSLRSTTMMIRPLDF

SEQ ID NO: 15116 - protein, 41 aa, Homo sapiens
MKIFLPVLLAALLGVEREEQSVLPEADHLLRPGQLLRDCVC

SEQ ID NO: 15117 - protein, 826 aa, Homo sapiens
MFAGFLQFLLLHTLHSGTGDLDYYWLDPATWHSRETSPISSHPVTWQPSKEGDRLIGRVILNKRTTMPKDSGALLGLKVVGGKMTDLGRLGAFITKVKKGSLADVVGHLRAGDEVLEWNGKPLPGATNEEVYNIILESKSEPQVEIIVSRPIGDIPRIPESSHPPLESSSSSFESQKMERPSISVISPTSPGALKDAPQVLPGQLSVKLWYDKVGHQLIVNVLQATDLPARVDGRPRNPYVKMYFLPDRSDKSKRRTKTVKKILEPKWNQTFVYSHVHRRDFRERMLEITVWDQPRVQEEESEFLGEILIELETALLDDEPHWYKLQTHDESSLPLPQPSPFMPRRHIHGESSSKKLQRSQRISDSDISDYEVDDGIGVVPPVGYRSSARESKSTTLTVPEQQRTTHHRSRSVSPHRGNDQGKPRSRLPNVPLQRSLDEIHPTRRSRSPTRHHDASRSPVDHRTRDVDSQYLSEQDSELLMLPRAKRGRSAECLHTTSELQPFLDRARSASTNCLRPDTSLHSPERERHSRKSERSSIQKQTRKGTASDAERMHRQRSPTQSPPADTSFSSRRGRQLPQVPVRSGSIEQESGHKKLKSTIQRSTETGMAAEMRKMVRQPSRESTDGSINSYSSEGNLIFPGVRLGADSQFSDFLDGLGPAQLVGRQTLATPAMGDIQIGMEDKKGQLEVEVIRARSLTQKPGSKSTPAPYVKVYLLENGACIAKKKTRIARKTLDPLYQQSLVFDESPQGKVLQVIVWGDYGRMDHKCFMGVAQILLEELDLSSMVIGWYKLFPPSSLVDPTLTPLTRRASQSSLESSTGPPCIRS

SEQ ID NO: 15118 - protein, 272 aa, Homo sapiens
MPGGAGAARLCLLAFALQPLRPRAAREPGWTRGSEEGSPKLQHELIIPQWKTSESPVREKHPLKAELRVMAEGRELILDLEKNEQLFAPSYTETHYTSSGNPQTTTRKLEDHCFYHGTVRETELSSVTLSTCRGIRGLITVSSNLSYVIEPLPDSKGQHLIYRSEHLKPPPGNCGFEHSKPTTRDWALQFTQQTKKRPRRMKREDLNSMKYVELYLVADYLEFQKNRRDQDATKHKLIEIANYVDKVRPVLPILEHPDCSRGLGSVDPREHV

SEQ ID NO: 15119 - protein, 120 aa, Homo sapiens
MKKCLLPVLITCMQTAICKDRMMMIMILLVNYRPDEFIECEDPVDHVGNATASQELGYGCLKFGGQAYSDVEHTSVQCHALDGIECASPRTFLRENKPCIKYTGHYFITTLLYSFFLGCF

SEQ ID NO: 15120 - protein, 477 aa, Homo sapiens
MELDSALEAPSQEDSNLSEELSHSAFGQAFSKILHCLARPEARRGNVKDAVLKDLGDLIEATEFDRLFEGTGARLRGMPETLGQVAKALEKYAAPSKEEEGGGDGHSEAAEKAAQVGLLFLKLLGKVETAKNSLVGPAWQTGLHHLAGPVYIFAITHSLEQPWTTPRSREVAREVLTSLLQVTECGSVAGFLHGENEDEKGRLSVILGLLKPDLYKESWKNNPAIKHVFSWTLQQVTRPWLSQHLERVLPASLVISDDYQTENKILGVHCLHHIVLNVAVLLCLLDLFPILEKTLHWKGDGARPTTHCDEVLRLILTHMEPEHRLLLRRTYARNLPAFVNRLGILTVRHLKRLERVIIGYLEVYDGPEEEARLKILETLKLLMQHTWPRVSCRLVVLLKALLKLICDVARDPNLTPESVKSALLQEATDCLILLDRCSQGRVKGLLAKIPQSCEDRKVVNYIRKVQQVSEGAPYNGT

SEQ ID NO: 15121 - protein, 226 aa, Homo sapiens
MKMVAPWTRFYSNSCCLCCHVRTGTILLGVWYLIINAVVLLILLSALADPDQYNFSSSELGGDFEFMDDANMCIAIAISLLMILICAMATYGAYKQRAAWIIPFFCYQIFDFALNMLVAITVLIYPNSIQEYIRQLPPNFPYRDDVMSVNPTCLVLIILLFISIILTFKGYLISCVWNCYRYINGRNSSDVLVYVTSNDTTVLLPPYDDATVNGAAKEPPPPYVSA

SEQ ID NO: 15122 - protein, 120 aa, Homo sapiens
MLGLRPPLLALVGLLSLGCVLSQECTKFKVSSCRECIESGPGCTWCQKLNFTGPGDPDSIRCDTRPQLLMRGCAADDIMDPTSLAETQEDHNGGQKQLSPQKVTLYLRPGQAAAFNVTFR

SEQ ID NO: 15123 - protein, 1692 aa, Homo sapiens
MSSAVGPRGPRPPTVPPPMQELPDLSHLTEEERNIIMAVMDRQKEEEEKEEAMLKCVVRDMAKPAACKTPRNAENQPHQPSPRLHQQFESYKEQVRKIGEEARRYQGEHKDDAPTCGICHKTKFADGCGHLCSYCRTKFCARCGGRVSLRSNNEDKVVMWVCNLCRKQQEILTKSGAWFFGSGPQQTSQDGTLSDTATGAGSEVPREKKARLQERSRSQTPLSTAAASSQDAAPPSAPPDRSKGAEPSQQALGPEQKQASSRSRSEPPRERKKTPGLSEQNGKGALKSERKRVPKTSAQPVEGAVEERERKERRESRRLEKGRSQDYPDTPEKRDEGKAADEEKQRKEEDYQTRYRSDPNLARYPVKPPPEEQQMRMHARVSRARHERRHSDVALPRTEAGAALPEGKAGKRAPAAARASPPDSPRAYSAERTAETRAPGAKQLTNHSPPAPRHGPVPAEAPELKAQEPLRKQSRLDPSSAVLMRKAKREKVETMLRNDSLSSDQSESVRPSPPKPHRSKRGGKKRQMSVSSSEEEGVSTPEYTSCEDVELESESVSEKGDLDYYWLDPATWHSRETSPISSHPVTWQPSKEGDRLIGRVILNKRTTMPKDSGALLGLKVVGGKMTDLGRLGAFITKVKKGSLADVVGHLRAGDEVLEWNGKPLPGATNEEVYNIILESKSEPQVEIIVSRPIGDIPRIPESSHPPLESSSSSFESQKMERPSISVISPTSPGALKDAPQVLPGQLSVKLWYDKVGHQLIVNVLQATDLPARVDGRPRNPYVKMYFLPDRSDKSKRRTKTVKKILEPKWNQTFVYSHVHRRDFRERMLEITVWDQPRVQEEESEFLGEILIELETALLDDEPHWYKLQTHDESSLPLPQPSPFMPRRHIHGESSSKKLQRSQRISDSDISDYEVDDGIGVVPPVGYRSSARESKSTTLTVPEQQRTTHHRSRSVSPHRGNDQGKPRSRLPNVPLQRSLDEIHPTRRSRSPTRHHDASRSPVDHRTRDVDSQYLSEQDSELLMLPRAKRGRSAECLHTTRHLVRHYKTLPPKMPLLQSSSHWNIYSSILPAHTKTKSVTRQDISLHHECFNSTVLRFTDEILVSELQPFLDRARSASTNCLRPDTSLHSPERERGRWSPSLDRRRPPSPRIQIQHASPENDRHSRKSERSSIQKQTRKGTASDAERVLPTCLSRRGHAAPRATDQPVIRGKHPARSRSSEHSSIRTLCSMHHLVPGGSAPPSPLLTRMHRQRSPTQSPPADTSFSSRRGRQLPQVPVRSGSIEQASLVVEERTRQMKMKVHRFKQTTGSGSSQELDREQYSKYNIHKDQYRSCDNVSAKSSDSDVSDVSAISRTSSASRLSSTSFMSEQSERPRGRISSFTPKMQGRRMGTSGRSIMKSTSVSGEMYTLEHNDGSQSDTAVGTVGAGGKKRRSSLSAKVVAIVSRRSRSTSQLSQTESGHKKLKSTIQRSTETGMAAEMRKMVRQPSRESTDGSINSYSSEGNLIFPGVRLGADSQFSDFLDGLGPAQLVGRQTLATPAMGDIQIGMEDKKGQLEVEVIRARSLTQKPGSKSTPAPYVKVYLLENGACIAKKKTRIARKTLDPLYQQSLVFDESPQGKVLQVIVWGDYGRMDHKCFMGVAQILLEELDLSSMVIGWYKLFPPSSLVDPTLTPLTRRASQSSLESSTGPPCIRS

SEQ ID NO: 15124 - protein, 223 aa, Homo sapiens
MHPQVVILSLILHLADSVAGSVKVGGEAGPSVTLPCHYSGAVTSMCWNRGSCSLFTCQNGIVWTNGTHVTYRKDTRYKLLGDLSRRDVSLTIENTAVSDSGVYCCRVEHRGWFNDMKITVSLEIVPPKVTTTPIVTTVPTVTTVRTSTTVPTTTTVPMTTVPTTTVPTTMSIPTTTTVLTTMTVSTTTSVPTTTSIPTTTSVPVTTTVSTFVPPMPLPRQNHE

SEQ ID NO: 15125 - protein, 85 aa, Homo sapiens
MALLALLLVVALPRVWTDANLTARQRDPEDSQRTDEGDNRVWCHVCERENTFECQNPRRCKWTEPYCVIAAVSEYLRSCWGPKGR

SEQ ID NO: 15126 - protein, 93 aa, Homo sapiens
MLGLRPPLLALVGLLSLGCVLSQECTKFKVSSCRECIESGPGCTWCQKLGAALGPPAHATAASSPRRRSRVAPVCPRTEQGGQAPELHRAGGS

SEQ ID NO: 15127 - protein, 307 aa, Homo sapiens
MTAGSPEECGEVRRSPEGRVSRLGRRLGRRRRPRSPPEPLRVRARLRLRSPSGAFAALGALVVLVGMGIAVAGYWPHRAGAPGSRAANASSPQMSELRREGRGGGRAHGPHERLRLLGPVIMGVGLFVFICANTLLYENRDLETRRLRQGVLRAQALRPPDGPGWDCALLPSPGPRSPRAVGCAEPEIWDPSPRRGTSPVPSVRSLRSEPANPRLGLPALLNSYPLKGPGLPPPWGPRTQTGHVIITVQPSGSCIEHSKSLDLGLGELLLGAPAARDCAHRSWPRLDRLSLGGYAKLGGGGDLGARV

SEQ ID NO: 15128 - protein, 66 aa, Homo sapiens
MKIFLPVLLAALLGVERASSLMCFSCLNQKSNLYCLKPTICSDQDNYCVTVSASAGIASFPMQGIS

SEQ ID NO: 15129 - protein, 139 aa, Homo sapiens
MERPLCSHLCSCLAMLALLSPLSLAQYDSWPHYPEYFQQPAPEYHQPQAPANVAKIQLRLAGQKRKHSEGRVEVYYDGQWGTVCDDDFSIHAAHVVCRELGYVEAKSWTASSSYGKGEGPIWLDNLHCTGNEATLAACT

SEQ ID NO: 15130 - protein, 166 aa, Homo sapiens
MLGLRPPLLALVGLLSLGCVLSQECTKFKVSSCRECIESGPGCTWCQKLNFTGPGDPDSIRCDTRPQLLMRGCAADDIMDPTSLAETQEDHNGGQKQLSPQKVTLYLRPGQAAAFNVTFRRAKGYPIDLYYLMDLSYSMLDDLRNVKKLGGDLLRALNEITESGRI

SEQ ID NO: 15131 - protein, 92 aa, Homo sapiens
MVFYFTSSSVNSSAYTIYMGKDKYENEDLIKHGWPEDIWFHVDKLSSAHVYLRLHKGENIEDIPKEVLMDCAHLVKANSIQGKNCDSGEESK

SEQ ID NO: 15132 - protein, 404 aa, Homo sapiens
MQDFVKLLGLRHRREVVGRSAIFGGEHFMLEETDWYLLNLFRLWWHYGISFLRLQMWVEEVMEKFMRIYKYQAHGYAFSGVEELLYSLGESTFVNMTQHSVAESLLQVGVTQRFIDDVVSAVLRASYGQSAAMPAFAGAMSLAGAQGSLWSVEGGNKLVCSGLLKLTKANVIHATVTSVTLHSTEGKALYQVAYENEVGNSSDFYDIVVIATPLHLDNSSSNLTFAGFHPPIDDVQGSFQPTVVSLVHGYLNSSYFGFPDPKLFPFANILTTDFPSFFCTLDNICPVNISASFRRKQPQEAAVWRVQSPKPLFRTQLKTLFRSYYSVQTAEWQAHPLYGSRPTLPRFALHDQLFYLNALEWAASSVEVMAVAAKNVALLAYNRWYQDLDKIDQKDLMHKVKTEL

SEQ ID NO: 15133 - protein, 51 aa, Homo sapiens
MNKDAQMRAAINQKLIETGERERLKELLRAKLIECGWKDQLKAHCKDNDFK

SEQ ID NO: 15134 - protein, 464 aa, Homo sapiens
MILANVFCLFFFLDETLRSLASPSSLQGPELHGWRPPVDCVRANELCAAESNCSSRYRTLRQCLAGRDRNTMLANKECQAALEVLQESPLYDCRCKRGMKKELQCLQIYWSIHLGLTEGEEFYEASPYEPVTSRLSDIFRLASIFSGTGADPVVSAKSNHCLDAAKACNLNDNCKKLRSSYISICNREISPTERCNRRKCHKALRQFFDRVPSEYTYRMLFCSCQDQACAERRRQTILPSCSYEDKEKPNCLDLRGVCRTDHLCRSRLADFHANCRASYQTVTSCPADNYQACLGSYAGMIGFDMTPNYVDSSPTGIVVSPWCSCRGSGNMEEECEKFLRDFTENPCLRNAIQAFGNGTDVNVSPKGPSFQATQAPRVEKTPSLPDDLSDSTSLGTSVITTCTSVQEQGLKANNSKELSMCFTELTTNIIPGSNKVIKPNSGPSRARPSAALTVLSVLMLKLAL

SEQ ID NO: 15135 - protein, 401 aa, Homo sapiens
MHPQVVILSLILHLADSVAGSVKVGGEAGPSVTLPCHYSGAVTSMCWNRGSCSLFTCQNGIVWTNGTHVTYRKDTRYKLLGDLSRRDVSLTIENTAVSDSGVYCCRVEHRGWFNDMKITVSLEIVPPKVTTTPIVTTVPTVTTVRTSTTVPTTTTVPMTTVPTTTVPTTMSIPTTTTVLTTMTVSTTTSVPTTTSIPTTTSVPVTTTVSTFVPPMPLPRQNHEPVATSPSSPQPAETHPTTLQGAIRREPTSSPLYSYTTDGNDTVTESSDGLWNNNQTQLFLEHSLLTANTTKGIYAGVCISVLVLLALLGVIIAKMFHLAAFKLKLCKMQLKRKSKQKTISTLRIVFMPRTKTQWCSLRVYAHECRRLNRHQHIRRLLDPKTIFLFQFHLAFQHVSDTG

SEQ ID NO: 15136 - protein, 161 aa, Homo sapiens
MKILVAFLVVLTIFGIQSHGYEVFNIISPSNNGGNVQETVTIDNEKNTAIINIHAGSCSSTTIFDYKHGYIASRVLSRRACFILKMDHQNIPPLNNLQWYIYEKQALDNMFSSKYTWVKYNPLESLIKDVDWFLLGSPIEKLCKHIPLYKGEVVENTREYQ

SEQ ID NO: 15137 - protein, 92 aa, Homo sapiens
MWPVFWTVVRTYAPYVTFPVAFVVGAVGYHLEWFIRGKDPQPVEEEKSISERREDRKLDELLGKDHTQVVSLKDKLEFAPKAVLNRNRPEKN

SEQ ID NO: 15138 - protein, 105 aa, Homo sapiens
MESKALLVLTLAVWLQSLTASRGGVAAADQRRDFIDIESKFALRTPEDTAEDTCHLIPGVAESVATCHFNHSSKTFMVIHGWTVTGMYESWVPKLVAALYKREPD

SEQ ID NO: 15139 - protein, 202 aa, Homo sapiens
MRRKEKRLLQAVALVLAALVLLPNVGLWALYRERQPDGTPGGSGAAVAPAAGQGSHSRQKKTFFLGDGQKLKDWHDKEAIRRDAQRVGNGEQGRPYPMTDAERVDQAYRENGFNIYVSDKISLNRSLPDIRHPNCNSKRYLETLPNTSIIIPFHNEGWSSLLRTVHSVLNRSPPELVAEIVLVDDFSDRDLPTASTPSPFVC

SEQ ID NO: 15140 - protein, 106 aa, Homo sapiens
MALSSAWRSVLPLWLLWSAACSRAASGDDNAFPFDIEGSSAVGRQDPPETSEPRVALGRLPPAAEKCNAGFFHTLSGECVPCDCNGNSNECLDGSGYCVHCQRNTT

SEQ ID NO: 15141 - protein, 930 aa, Homo sapiens
MGGSCAQRRRAGPRQVLFPLLLPLFYPTLSEPIRYSIPEELAKGSVVGNLAKDLGLSVLDVSARKLRVSAEKLHFSVDAESGDLLVKNRIDREQICKERRRCELQLEAVVENPLNIFHVIVVIEDVNDHAPQFDKKEIHLEIFESASAGTRLSLDPATDPDININSIKDYKINSNPYFSLMVRVNSDGGKYPELSLEKLLDREEQRSHSLILTALDGGDPPRSATAHIEISVKDTNDNPPVFSRDEYRISLSENLPPGSPVLQVTATDQDEGVNAEINYYFRSTAQSTKHMFSLDEKTGMIKNNQSFDFEDVERYTMEVEAKDGGGLSTQCKVIIEILDENDNSPEIIITSLSDQILENSPPGMVVALFKTRDLDFGGNGEVRCNIETDIPFKIYSSSNNYYKLVTDGALDREQTPEYNVTIVATDRGKPPLSSSRSITLYVADINDNAPVFDQTSYVVHVAENNPPGASIAQVSASDPDLGLNGHISYSIVASDLEPLAVSSYVSVSAQSGVVFAQRAFDHEQLRAFALTLQARDHGSPTLSANVSLRVLVGDRNDNAPRVLYPALGPDGSAFFDMVPRSAEPGYLVTKVVAVDADSGHNAWLSYHVLQASEPGLFSLGLRTGEVRTARALGDRDAARQRLLVAVRDGGQPPLSATATLHLVFADNLQEILPDLSDRPVLSDPQAELQFYLVVALALISVLFLLAVILAIALRLRRSLSPATWDCFHPGLCVKSGPVVPPNYSEGTLPYSYNLCIAHTGTKEFNFLKCSVPLHSNEDMVCSVSPGALIPPHGGEDLTSHPETLTSQAPPNTDWRFSQAQRPGTSGSQNGDDTGTWPNNQFDTEMLQAMILASASEAADGSSTLGGGAGTMGLSARYGPQFTLQHVPDYRQNVYIPGSNATLTNAAGKRDGKAPAGGNGNKKKSGKKEKK

SEQ ID NO: 15142 - protein, 173 aa, Homo sapiens
MKTSVIALMVSDTLLAIQAPSGTQLEVPIPEMGQNGQKKYQINLKSHSGPIHVLLINKESSSSKPVVFPVPPPDDLTQPSSQSLTPVTPQKSSMATQNLPEQHVSERSQALQQTSATDISSAGSISGDIIDELMSSDVFPLLRLSPTPADDYNFNLDDNEGVCDLFDVQILNY

SEQ ID NO: 15143 - protein, 438 aa, Homo sapiens
MIRKLFIVLLLLLVTIEEARMSSLSFLNIEKTEILFFTKTEETILVSSSYENKRPNSSHLFVKIEDPKILQMVNVAKKISSDATNFTINLVTDEEGETNVTIQLWDSEGRQERLIEEIKNVKVKVLKQKDSLLQAPMHIDRNILMLILPLILLNKCAFGCKIELQLFQTVWKRPLPVILGAVTQFFLMPFCGFLLSQIVALPEAQAFGVVMTCTCPGGGGGYLFALLLDGDFTLAILMTCTSTLLALIMMPVNSYIYSRILGLSGTFHIPVSKIVSTLLFILVPVSIGIVIKHRIPEKASFLERIIRPLSFILMFVGIYLTFTVGLVFLKTDNLEVILLGLLVPALGLLFGYSFAKVCTLPLPVCKTVAIESGMLNSFLALAVIQLSFPQSKANLASVAPFTVAMCSGCEMLLIILVYKAKKRCIFFLQDKRKRNFLI

SEQ ID NO: 15144 - protein, 766 aa, Homo sapiens
MNVNQVAENLALSHQEELVDLPKNYPLSENEDEGDSDGERKHQKLLEAIISLDGKNRRKLAERSEASLKVSEFSVSSEGSGEKLGLADLLEPVKTSSSLATVKKQLNRVKSKKVVELPLNKEKIEQIHREVAFSKTSQVLSKWDPIILKNQQAEQLVFPLGKEQPAIAPIEHALSGWKARTPLEQEIFNLLHKNKQPVTDPLLTPMEKASLQAMSLEEAKMHRAELQRARALQSYYEAKARKEKKIKSKKYHKVVKKGKAKKALKEFEQLQKVNPTVALEEMEKIENARMMERMSLKHQNSGKWAKSKAIMAKYDLEARQAMQEQLAKNKELTQKLQVASESEEEEGGTEVEELLVPHVANEVQMNVDGPNPWMFRSCTSDTKEAATQEDPEQVPELAAHEVSASEAEERPVAEEEILLREFEERQSLRKRSELNQDAEPASSQETKDSSSQEVLSELRALSQKLKEKHQSRKQKASSEGTVPQVQREEPAPEEAEPLLLQRSERVQTLEELEELGKEDCFQNKELPRPVLEGQQSERTPNNRPDAPKEKKEKEQLINLQNFLTTQSPSVRSLAVPTIIEELEDEEERDQRQMIKEAFAGDDVIRDFLKEKREAVEASKPKDVDLTLPGWGEWGGVGLKPSAKKRRQFLIKAPEGPPRKDKNLPNVIISEKRNIHAAAHQVQVLPYPFTHHRQFERTIQTPIGSTWNTQRAFQKLTTPKVVTKPGHIIKPIKAEDVGYQSSSRSDLPVIQRNPKRITTRHNKEEKL

SEQ ID NO: 15145 - protein, 955 aa, Homo sapiens
MPGGAGAARLCLLAFALQPLRPRAAREPGWTRGSEEGSPKLQHELIIPQWKTSESPVREKHPLKAELRVMAEGRELILDLEKNEQLFAPSYTETHYTSSGNPQTTTRKLEDHCFYHGTVRETELSSVTLSTCRGIRGLITVSSNLSYVIEPLPDSKGQHLIYRSEHLKPPPGNCGFEHSKPTTRDWALQFTQQTKKRPRRMKREDLNSMKYVELYLVADYLEFQKNRRDQDATKHKLIEIANYVDKFYRSLNIRIALVGLEVWTHGNMCEVSENPYSTLWSFLSWRRKLLAQKYHDNAQLITGMSFHGTTIGLAPLMAMCSVYQSGGVNMDHSENAIGVAATMAHEMGHNFGMTHDSADCCSASAADGGCIMAAATGHPFPKVFNGCNRRELDRYLQSGGGMCLSNMPDTRMLYGGRRCGNGYLEDGEECDCGEEEECNNPCCNASNCTLRPGAECAHGSCCHQCKLLAPGTLCREQARQCDLPEFCTGKSPHCPTNFYQMDGTPCEGGQAYCYNGMCLTYQEQCQQLWGPGARPAPDLCFEKVNVAGDTFGNCGKDMNGEHRKCNMRDAKCGKIQCQSSEARPLESNAVPIDTTIIMNGRQIQCRGTHVYRGPEEEGDMLDPGLVMTGTKCGYNHICFEGQCRNTSFFETEGCGKKCNGHGVCNNNQNCHCLPGWAPPFCNTPGHGGSIDSGPMPPESVGPVVAGVLVAILVLAVLMLMYYCCRQNNKLGQLKPSALPSKLRQQFSCPFRVSQNSGTGHANPTFKLQTPQGKRKVINTPEILRKPSQPPPRPPPDYLRGGSPPAPLPAHLSRAARNSPGPGSQIERTESSRRPPPSRPIPPAPNCIVSQDFSRPRPPQKALPANPVPGRRSLPRPGGASPLRPPGAGPQQSRPLAALAPKVSPREALKVKAGTRGLQGGRCRVEKTKQFMLLVVWTELPEQKPRAKHSCFLVPA

SEQ ID NO: 15146 - protein, 622 aa, Homo sapiens
MPGVARLPLLLGLLLLPRPGRPLDLADYTYDLAEEDDSEPLNYKDPCKAAAFLGDIALDEEDLRAFQVQQAVDLRRHTARKSSIKAAVPGNTSTPSCQSTNGQPQRGACGRWRGRSRSRRAATSRPERVWPDGVIPFVIGGNFTGSQRAVFRQAMRHWEKHTCVTFLERTDEDSYIVFTYRPCGCCSYVGRRGGGPQAISIGKNCDKFGIVVHELGHVVGFWHEHTRPDRDRHVSIVRENIQPGQEYNFLKMEPQEVESLGETYDFDSIMHYARNTFSRGIFLDTIVPKYEVNGVKPPIGQRTRLSKGDIAQARKLYKCPACGETLQDSTGNFSSPEYPNGYSAHMHCVWRISVTPGEKIILNFTSLDLYRSRLCWYDYVEVRDGFWRKAPLRGRFCGSKLPEPIVSTDSRLWVEFRSSSNWVGKGFFAVYEAICGGDVKKDYGHIQSPNYPDDYRPSKVCIWRIQVSEGFHVGLTFQSFEIERHDSCAYDYLEVRDGHSESSTLIGRYCGYEKPDDIKSTSSRLWLKFVSDGSINKAGFAVNFFKEVDECSRPNRGGCEQRCLNTLGSYKCSCDPGYELAPDKRRCEGCYDLQVGKPLLWDRHCFRLSTHGPEMLGTALRG

SEQ ID NO: 15147 - protein, 224 aa, Homo sapiens
MNNGGKAEKENTPSEANLQEEEVRTLFVSGLPLDIKPRELYLLFRPFKGYEGSLIKLTSKQPVGFVSFDSRSEAEAAKNALNGIRFDPEIPQTLRLEFAKANTKMAKNKLVGTPNPSTPLPNTVPQFIAREPYELTVPALYPSSPEVWAPYPLYPAELAPALPPPAFTYPASLHAQVIDTHRPGLHSLHHQSFQTWFPRAHHTTNTYPANRSTLKRLMIPSKSS

SEQ ID NO: 15148 - protein, 513 aa, Homo sapiens
MTGKGLGEDTEDRWGAGALGPCGRSGLKGGGCVWEAEAGGSRGQEIETILANMETSLRSGQIPTLDSSEHNLSPEPLELDRMPHSPLISIPHVWCHPEEEERMHDELLQAVSKGPVMFRDVSIDFSQEEWECLDADQMNLYKEVMLENFSNLVSVGLSNSKPAVISLLEQGKEPWMVDRELTRGLCSDLESMCETKILSLKKRHFSQVIITREDMSTFIQPTFLIPPQKTMSEEKPWECKICGKTFNQNSQFIQHQRIHFGEKHYESKEYGKSFSRGSLVTRHQRIHTGKKPYECKECGKAFSCSSYFSQHQRIHTGEKPYECKECGKAFKYCSNLNDHQRIHTGEKPYECKVCGKAFTKSSQLFLHLRIHTGEKPYECKECGKAFTQHSRLIQHQRMHTGEKPYECKQCGKAFNSASTLTNHHRIHAGEKLYECEECRKAFIQSSELIQHQRIHTDEKPYECNECGKAFNKGSNLTRHQRIHTGEKPYDCKECGKAFGSRSDLIRHEGIHTG

SEQ ID NO: 15149 - protein, 542 aa, Homo sapiens
MGEEQSTVSGGGGPQESQTLASGTAGHPEPPRPQGDSARAPPLRAASAEPSGGGCGSDWGCADTSAPEPARSLGPPGWSKSRAPAQPAGLALTGPLNPQTLPLQLELEEEEEEAGDRKEGGDEQQEAPPGEELEPRTRVGAADGLVLDVLGQRRPSLAKRQVFCSVYCVESDLPEAPASEQLSPPASPPGAPPVLNPPSTRSSFPSPRLSLPTDSLSPDGGSIELEFYLAPEPFSMPSLLGAPPYSGLGGVGDPYVPLMVLMCRVCLEDKPIKPLPCCKKAVCEECLKVYLSAQVQLGQVEIKCPITECFEFLEETTVVYNLTHEDSIKYKYFLELGRIDSSTKPCPQCKHFTTFKKKGHIPTPSRSESKYKIQCPTCQFVWCFKCHSPWHEGVNCKEYKKGDKLLRHWASEIEHGQRNAQKCPKCKIHIQRTEGCDHMTCSQCNTNFCYRCGERYRQLRFFGDHTSNLSIFGCKYRYLPERPHLRRLVRGSVCAGKLFIAPLIMVLGLALGAIAVVIGLFVFPIYCLCKKQRKRSRTGMHW

SEQ ID NO: 15150 - protein, 41 aa, Homo sapiens
MKLPARVFFTLGSRLPCGLAPRREDGCFESYRRTNFFSNWK

SEQ ID NO: 15151 - protein, 251 aa, Homo sapiens
MVSWMICRLVVLVFGMLCPAYASYKAVKTKNIREYVRWMMYWIVFALFMAAEIVTDIFISWFPFYYEIKMAFVLWLLSPYTKGASLLYRKFVHPSLSRHEKEIDAYIVQAKERSYETVLSFGKRGLNIAASAAVQAATKSQGALAGRLRSFSMQDLRSISDAPAPAYHDPLYLEDQVSHRRPPIGHLALPEGSDEEKDCALRRGQLGSAASAPFLPRALQGSRAIWRDLGLHIWPACTSCLGPTLLTPADG

SEQ ID NO: 15152 - protein, 82 aa, Homo sapiens
MTPLLTLILVVLMGLPLAQALDCHVCAYNGDNCFNPMRCPAMVAYCMTTRTYYTPTRMKLQPKPYGVTSARASEGAPMDPDA

SEQ ID NO: 15153 - protein, 264 aa, Homo sapiens
MILANVFCLFFFLDETLRSLASPSSLQGPELHGWRPPVDCVRANELCAAESNCSSRYRTLRQCLAGRDRNTMLANKECQAALEVLQESPLYDCRCKRGMKKELQCLQIYWSIHLGLTEGEEFYEASPYEPVTSRLSDIFRLASIFSGTGADPVVSAKSNHCLDAAKACNLNDNCKKLRSSYISICNREISPTERCNRRKCHKALRQFFDRVPSEYTYRMLFCSCQDQACAERRRQTILPSCSYEDKEKPNCLDLRGVCRTDHLC

SEQ ID NO: 15154 - protein, 95 aa, Homo sapiens
MGNPGTFKRGLLLSALSYLGFETYQVISQAAVVHATAKVEEILEQADYLYESGETEKLYQLLTQYKESEDAELLWRLARASRDVAQLSRTSEEEK

SEQ ID NO: 15155 - protein, 513 aa, Homo sapiens
MSYGSIARGGGLGSRGPFGGPSRQGCQPLECARCWTEYGIRHFPCPSPESKLQNRCVGKDGEGDLGPAGTPIVPRARKRGPGVAPEGSRMPEPTSSPTIGPRKDSAAGPHGRMAGPSTTRAKKRKPNFCPQETEVLVSKVSKHHQLLFGTGLLKAEPTRRYRVWSRILQAVNALGYCRRDVVDLKHKWRDLRAVVRRKLGDLRKAAHGPSPGSGKPQALALTPVEQVVAKTFSCQALPSEGFSLEPPRATQVDPCNLQELFQEMSANVFRINSSVTSLERSLQSLGTPSDTQELRDSLHTAQQETNKTIAASASSVKQMAELLRSSCPQERLQQERPQLDRLKTQLSDAIQCYGVVQKKIAEKSRALLPMAQRGSKQSPQAPFAELADDEKVFNGSDNMWQGQEQALLPDITEEDLEAIRLREEAILQMESNLLDVNQIIKDLASMVSEQGEAVDSIEASLEAASSHAEAARQLLAGASRHQLQRHKIKCCFLSAGVTALLVIIIIIATSVRK

SEQ ID NO: 15156 - protein, 247 aa, Homo sapiens
MHLARLVGSCSLLLLLGALSGWAASDDPIEKVIEGINRGLSNAEREVGKALDGINSGITHAGREVEKVFNGLSNMGSHTGKELDKGVQGLNHGMDKVAHEINHGIGQAGKEAEKLGHGVNNAAGQAGKEADKAVQGFHTGVHQAGKEAEKLGQGVNHAADQAGKEVEKLGQGAHHAAGQAGKELQNAHNGVNQASKEANQLLNGNHQSGSSSHQGGATTTPLASGASVNTPFINLPALWRSVANIMP

SEQ ID NO: 15157 - protein, 129 aa, Homo sapiens
MMKTLLLFVGLLLTWESGQVLGDQTVSDNELQEMSNQGSKYVNKEIQNAVNGVKQIKTLIEKTNEERKTLLSNLEEAKKKKEDALNETRESETKLKELPGVCNETMMALWEECKPCLKQTCMKFYARVC

SEQ ID NO: 15158 - protein, 754 aa, Homo sapiens
MLTRNCLSLLLWVLFDGGLLTPLQPQPQQTLATEPRENVIHLPGQRSHFQRVKRGWVWNQFFVLEEYVGSEPQYVGKLHSDLDKGEGTVKYTLSGDGAGTVFTIDETTGDIHAIRSLDREEKPFYTLRAQAVDIETRKPLEPESEFIIKVQDINDNEPKFLDGPYVATVPEMSPVGVIRTALPNMDREVKEQYQVLIQAKDMGGQLGGLAGTTIVNITLTDVNDNPPRFPKSIFHLKVPESSPIGSAIGRIRAVDPDFGQNAEIEYNIVPGDGGNLFDIVTDEDTQEGVIKLKKPLDFETKKAYTFKVEASNLHLDHRFHSAGPFKDTATVKISVLDVDEPPVFSKPLYTMEVYEDTPVGTIIGAVTAQDLDVGSSAVRYFIDWKSDGDSYFTIDGNEGTIATNELLDRESTAQYNFSIIASKVSNPLLTSKVNILINVLDVNEFPPEISVPYETAVCENAKPGQIIQIVSAADRDLSPAGQQFSFRLSPEAAIKPNFTVRDFRNNTAGIETRRNGYSRRQQELYFLPVVIEDSSYPVQSSTNTMTIRVCRCDSDGTILSCNVEAIFLPVGLSTGALIAILLCIVILLAIVVLYVALRRQKKKDTLMTSKEDIRDNVIHYDDEGGGEEDTQAFDIGALRNPKVIEENKIRRDIKPDSLCLPRQRPPMEDNTDIRDFIHQRLQENDVDPTAPPYDSLATYAYEGSGSVAESLSSIDSLTTEADQDYDYLTDWGPRFKVLADMFGEEESYNPDKVT

SEQ ID NO: 15159 - protein, 90 aa, Homo sapiens
MKLLLLHPAFQSCLLLTLLGLWRTTPEAHASSLGAPAISAASFLQDLIHRYGEGDSLTLQQLKALLNHLDVGVGRGNVTQHVQGHRNLST

SEQ ID NO: 15160 - protein, 178 aa, Homo sapiens
MDAMKRGLCCVLLLCGAVFVSPSQEIHARFRRGARSYQVICRDEKTQMIYQQHQSWLRPVLRSNRVEYCWCNSGRAQCHSVPVKSCSEPRCFNGGTCQQALYFSDFVCQCPEGFAGKCCEIDTRATCYEDQGISYRGTWSTAESGAECTNWNSSALAQKPYSGRRPDAIRLGLGNHNY

SEQ ID NO: 15161 - protein, 171 aa, Homo sapiens
MNYSLHLAFVCLSLFTERMCIQGSQFNVEVGRSDKLSLPGFENLTAGYNKFLRPNFGGEPVQIALTLDIASISSISESNMDYTATIYLRQRWMDQRLVFEGNKSFTLDARLVEFLWVPDTYIVESKKSFLHEVTVGNRLIRLFSNGTVLYALRITTTVACNMDLSKYPMDT

SEQ ID NO: 15162 - protein, 352 aa, Homo sapiens
MPGGACVLVIALMFLAWGEAQECSPGGHQFLRSPYRSVRFDSWHLQQSAVQDLICDHSLSPGWYRFLILDRPAEMPTKCVEMNHCGTQAPIWLSLRDSETLPSPGEIKQLTACATWQFLFSTTKDCCLFQIPVSVRNCGNFSVYLLQPTQGCMGYCAEAISDARLHPCGSDETETGGDCVRQLAASLPPPPAGRPEVLVELIESRLFCRCSFDVPATKNSVGFHIAWSRLSSQEVKEELTQETTVQAFSLLELDGINLRLGDRIFCSASVFFLENPHVQSVAIESQEFFAGFKLQPELSTISEDGKEYYLRIESTVPIICSEFSELDQECKISLKLKTIGQDLVFFWGIYPC

SEQ ID NO: 15163 - protein, 105 aa, Homo sapiens
MTLTRWTGMIIGPPRTNYENRIYSLKVECGPKYPEAPPSVRFVTKINMNGINNSSGMVDARSIPVLAKWQNSYSIKVVLQELRRLMMSKENMKLPQPPEGQTYNN

SEQ ID NO: 15164 - protein, 46 aa, Homo sapiens
MRSIRKRWTICTISLLLIFYKTKEIARTEEHQETQLIGASGGGVDS

SEQ ID NO: 15165 - protein, 462 aa, Homo sapiens
MSERKEGRGKGKGKKKERGSGKKPESAAGSQSPALPPRLKEMKSQESAAGSKLVLRCETSSEYSSLRFKWFKNGNELNRKNKPQNIKIQKKPGKSELRINKASLADSGEYMCKVISKLGNDSASANITIVESNEIITGMPASTEGAYVSSESPIRISVSTEGANTSSSTSTSTTGTSHLVKCAEKEKTFCVNGGECFMVKDLSNPSRYLCKCQPGFTGARCTENVPMKVQNQEKAEELYQKRVLTITGICIALLVVGIMCVVAYCKTKKQRKKLHDRLRQSLRSERNNMMNIANGPHHPNPPPENVQLVNQYVSKNVISSEHIVEREAETSFSTSHYTSTAHHSTTVTQTPSHSWSNGHTESILSESHSVIVMSSVENSRHSSPTGGPRGRLNGTGGPRECNSFLRHARETPDSYRDSPHSERHNLIAELRRNKAHRSKCMQIQLSATHLRSSSIPHLGFIL

SEQ ID NO: 15166 - protein, 147 aa, Homo sapiens
MAAACGPGAAGYCLLLGLHLFLLTAGPALGWNDPALTLHYDRYTTSRRLDPIPQLKCVGGTAGCDSYTPKVIQCQNKGWDGYDVQWECKTDLDIAYKFGKTVVSCEGYESSEDQYVLRGSCGLEYNLDYTELGLQKLKESGKQHGFA

SEQ ID NO: 15167 - protein, 284 aa, Homo sapiens
MCNTPTYCDLGKAAKDVFNKGYGFGMVKIDLKTKSCSGVMEFSTSGHAYTDTGKASGNLETKYKVCNYGLTFTQKWNTDNTLGTEISWENKLAEGLKLTLDTIFVPNTGKKSGKLKASYKRDCFSVGSNVDIDFSGPTIYGWAVLAFEGWLAGYQMSFDTAKSKLSQNNFALGYKAADFQLHTHVNDGTEFGGSIYQKVNEKIETSINLAWTAGSNNTRFGIAAKYMLDCRTSLSAKVNNASLIGLGYTQTLRPGVKLTLSALIDGKNFSAGGHKVGLGFELEA

SEQ ID NO: 15168 - protein, 1286 aa, Homo sapiens
MTGEVGSEVHLEINDPNVISQEEADSPSDSGQGSYETIGPLSEGDSDEEIFVSKKLKNRKVLQDSDSETEDTNASPEKTTYDSAEEENKENLYAGKNTKIKRIYKTVADSDESYMEKSLYQENLEAQVKPCLELSLQSGNSTDFTTDRKSSKKHIHDKEGTAGKAKVKSKRRLEKEERKMEKIRQLKKKETKNQEDDVEQPFNDSGCLLVDKDLFETGLEDENNSPLEDEESLESIRAAVKNKVKKHKKKEPSLESGVHSFEEGSELSKGTTRKERKAARLSKEALKQLHSETQRLIRESALNLPYHMPENKTIHDFFKRKPRPTCHGNAMALLKSSKYQSSHHKEIIDTANTTEMNSDHHSKGSEQTTGAENEVETNALPVVSKETQIITGSDESCRKDLVKNEELEIQEKQKQSDIRPSPGDSSVLQQESNFLGNNHSEECQVGGLVAFEPHALEGEGPQNPEETDEKVEEPEQQNKSSAVGPPEKVRRFTLDRLKQLGVDVSIKPRLGADEDSFVILEPETNRELEALKQRFWKHANPAAKPRAGQTVNVNVIVKDMGTDGKEELKADVVPVTLAPKKLDGASHTKPGEKLQVLKAKLQEAMKLRRFEERQKRQALFKLDNEDGFEEEEEEEEEMTDESEEDGEEKVEKEEKEEELEEEEEKEEEEEEEGNQEDSSSKMGYFPTEEKSETDENSGKQPSKLDEDDSCSLLTKESSHNSSFELIGSTIPSYQPCNRQTGRGTSFFPTAGGFRSPSPGLFRASLVSSASKSSGKLSEPSLPIEDSQDLYNASPEPKTLFLGAGDFQFCLEDDTQSQLLDADGFLNVRNHRNQYQALKPRLPLASMDENAMDANMDELLDLCTGKFTSQAEKHLPRKSDKKENMEELLNLCSGKFTSQDASTPASSELNKQEKESSMGDPMEEALALCSGSFPTDKEEEDEEEEFGDFRLVSNDNEFDSDEDEHSDSGNDLALEDHEDDDEEELLKRSEKLKRQMRLRKYLEDEAEVSGSDVGSEDEYDGEEIDEYEEDVIDEVLPSDEELQSQIKKIHMKTMLDDDKRQLRLYQERYLADGDLHSDGPGRMRKFRWKNIDDASQMDLFHRDSDDDQTEEQLDESEARWRKERIEREQWLRDMAQQGKITAEEEEEIGEDSQFMILAKKVTAKALQKNASRPMVIQESKSLLRNPFEAIRPGSAQQVKTGSLLNQPKAVLQKLAALSDHNPSAPRNSRNFVFHTLSPVKAEAAKESSKSQVKKRGPSFMTSPSPKHLKTDDSTSGLTRSIFKYLES

SEQ ID NO: 15169 - protein, 174 aa, Homo sapiens
MSMLAERRRKQKWAVDPQNTAWSNDDSKFGQRMLEKMGWSKGKGLGAQEQGATDHIKVQVKNNHLGLGATINNEDNWIAHQDDFNQLLAELNTCHGQETTDSSDKKEKKSFSLEEKSKISKNRVHYMKFTKGRCQSLHSRGERNHDNQRLHHPGVLCQADGSTEEQAPGSSSRV

SEQ ID NO: 15170 - protein, 70 aa, Homo sapiens
MLGLRPPLLALVGLLSLGCVLSQECTKFKVSSCRECIESGPGCTWCQKLNFTGPGDPDSIRCDTRPQLLM

SEQ ID NO: 15171 - protein, 499 aa, Homo sapiens
MDAMKRGLCCVLLLCGAVFVSPSQEIHARFRRGARSYQVICRDEKTQMIYQQHQSWLRPVLRSNRVEYCWCNSGRAQCHSVPVKSCSEPRCFNGGTCQQALYFSDFVCQCPEGFAGKCCEIDSKPWCYVFKAGKYSSEFCSTPACSEGNSDCYFGNGSAYRGTHSLTESGASCLPWNSMILIGKVYTAQNPSAQALGLGKHNYCRNPDGDAKPWCHVLKNRRLTWEYCDVPSCSTCGLRQYSQPQFRIKGGLFADIASHPWQAAIFAKHRRSPGERFLCGGILISSCWILSAAHCFQERFPPHHLTVILGRTYRVVPGEEEQKFEVEKYIVHKEFDDDTYDNDIALLQLKSDSSRCAQESSVVRTVCLPPADLQLPDWTECELSGYGKHEALSPFYSERLKEAHVRLYPSSRCTSQHLLNRTVTDNMLCAGDTRSGGPQANLHDACQGDSGGPLVCLNDGRMTLVGIISWGLGCGQKDVPGVYTKVTNYLDWIRDNMRP

SEQ ID NO: 15172 - protein, 545 aa, Homo sapiens
MSGNWVHPGQILIWAIWVLAAPTKGPSAEGPQRNTRLGWIQGKQVTVLGSPVPVNVFLGVPFAAPPLGSLRFTNPQPASPWDNLREATSYPNLCLQNSEWLLLDQHMLKVLVWFPGGAFKTGSASIFDGSALAAYEDVLVVVVQYRLGIFGFFTTWDQHAPGNWAFKDQVAALSWVQKNIEFFGGDPSSVTIFGESAGAISVSSLILSPMAKGLFHKAIMESGVAIIPYLEAHDYEKSEDLQVVAHFCGNNASDSEALLRCLRTKPSKELLTLSQKTKSFTRVVDGAFFPNEPLDLLSQKAFKAIPSIIGVNNHECGFLLPMKEAPEILSGSNKSLALHLIQNILHIPPQYLHLVANEYFHDKHSLTEIRDSLLDLLGDVFFVVPALITARYHRDAGAPVYFYEFRHRPQCFEDTKPAFVKADHADEVRFVFGGAFLKGDIVMFEGATEEEKLLSRKMMKYWATFARTGNPNGNDLSLWPAYNLTEQYLQLDLNMSLGQRLKEPRVDFWTSTIPLILSASDMLHSPLSSLTFLSLLQPFFFFCAP

SEQ ID NO: 15173 - protein, 522 aa, Homo sapiens
MWGRLWPLLLSILTATAVPGPSLRRPSRELDATPRMTIPYEELSGTRHFKGQAQNYSTLLLEEASARLLVGARGALFSLSANDIGDGAHKEIHWEASPEMQSKCHQKGKNNQTECFNHVRFLQRLNSTHLYACGTHAFQPLCAAIDAEAFTLPTSFEEGKEKCPYDPARGFTGLIIDGGLYTATRYEFRSIPDIRRSRHPHSLRTEETPMHWLNDAEFVFSVLVRESKASAVGDDDKVYYFFTERATEEGSGSFTQSRSSHRVARVARVCKGDLGGKKILQKKWTSFLKARLICHIPLYETLRGVCSLDAETSSRTHFYAAFTLSTQWKTLEASAICRYDLAEIQAVFAGPYMEYQDGSRRWGRYEGGVPEPRPGSCITDSLRSQGYNSSQDLPSLVLDFVKLHPLMARPVVPTRGRPLLLKRNIRYTHLTGTPVTTPAGPTYDLLFLGTADGWIHKAVVLGSGMHIIEETQVFRESQSVENLVISLLQHSLYVGAPSGVIQLPLSSCSRYRSCYDCILARD

SEQ ID NO: 15174 - protein, 848 aa, Homo sapiens
MVWDRQTKMEYEWKPDEQGLQQILQLLKESQSPDTTIQRTVQQKLEQLNQYPDFNNYLIFVLTKLKSEGILITTIASKGELQNWPDLLPKLCSLLDSEDYNTCEGAFGALQKICEDSAEILDSDVLDRPLNIMIPKFLQFFKHSSPKIRSHAVACVNQFIISRTQALMLHIDSFIENLFALAGDEEPEVRKNVCRALVMLLEVRMDRLLPHMHNIVEYMLQRTQDQDENVALEACEFWLTLAEQPICKDVLVRHLPKLIPVLVNGMKYSDIDIILLKGDVEEDETIPDSEQDIRPRFHRSRTVAQQHDEDGIEEEDDDDDEIDDDDTISDWNLRKCSAAALDVLANVYRDELLPHILPLLKELLFHHEWVVKESGILVLGAIAEGCMQGMIPYLPELIPHLIQCLSDKKALVRSITCWTLSRYAHWVVSQPPDTYLKPLMTELLKRILDSNKRVQEAACSAFATLEEEACTELVPYLAYILDTLVFAFSKYQHKNLLILYDAIGTLADSVGHHLNKPEYIQMLMPPLIQKWNMLKDEDKDLFPLLECLSSVATALQSGFLPYCEPVYQRCVNLVQKTLAQAMLNNAQPDQYEAPDKDFMIVALDLLSGLAEGLGGNIEQLVARSNILTLMYQCMQDKMPEVRQSSFALLGDLTKACFQHVKPCIADFMPILGTNLNPEFISVCNNATWAIGEISIQMGIEMQPYIPMVLHQLVEIINRPNTPKTLLENTAITIGRLGYVCPQEVAPMLQQFIRPWCTSLRNIRDNEEKDSAFRGICTMISVNPSGVIQDFIFFCDAVASWINPKDDLRDMFCKILHGFKNQVGDENWRRFSDQFPLPLKERLAAFYGV

SEQ ID NO: 15175 - protein, 53 aa, Homo sapiens
MKLLLLHPAFQSCLLLTLLGLWRTTPEAHASSLGAPAISAASFLQDLIHRYGE

SEQ ID NO: 15176 - protein, 168 aa, Homo sapiens
MRSIRKRWTICTISLLLIFYKTKEIARTEEHQETQLIGDGELSLSRSLVNSSDKIIRKAGSSIFQHNVEGWKINSSLVLEIRKNILRFLDAERDVSVVKSSFKPGDVIHYVLDRRRTLNISHDLHSLLPEVSPMKNRRFKTCAVVGNSGILLDSECGKEIDSHNFVIR

SEQ ID NO: 15177 - protein, 512 aa, Homo sapiens
MGCIKSKGKDSLSDDGVDLKTQPVRNTERTIYVRDPTSNKQQRPVPESQLLPGQRFQTKDPEEQGDIVVALYPYDGIHPDDLSFKKGEKMKVLEEHGEWWKAKSLLTKKEGFIPSNYVAKLNTLETEEWFFKDITRKDAERQLLAPGNSAGAFLIRESETLKGSFSLSVRDFDPVHGDVIKHYKIRSLDNGGYYISPRITFPCISDMIKHYQKQADGLCRRLEKACISPKPQKPWDKDAWEIPRESIKLVKRLGAGQFGEVWMGYYNNSTKVAVKTLKPGTMSVQAFLEEANLMKTLQHDKLVRLYAVVTREEPIYIITEYMAKGSLLDFLKSDEGGKVLLPKLIDFSAQIAEGMAYIERKNYIHRDLRAANVLVSESLMCKIADFGLARVIEDNEYTAREGAKFPIKWTAPEAINFGCFTIKSDVWSFGILLYEIVTYGKIPYPGRTNADVMTALSQGYRMPRVENCPDELYDIMKMCWKEKAEERPTFDYLQSVLDDFYTATEGQYQQQP

SEQ ID NO: 15178 - protein, 95 aa, Homo sapiens
MERPLCSHLCSCLAMLALLSPLSLAQYDSWPHYPEYFQQPAPEYHQPQAPANVAKIQLRLAGQKRKHSEGRVEVYYDGQWGTVCDDDFSIHAAHV

SEQ ID NO: 15179 - protein, 195 aa, Homo sapiens
MALRWGIVSVGLISSDFTAVLQTLPRSEHQVVAVAARDLSRAKEFAQKHDIPKAYGSYEELAKDPSVGVDDTVTVLLQYPGEVHGSFTCSITVQLSNTASVSGTKGMVQLLNPCWCPTELVVKGEHKEFPLPPVPKDCNFDNGAGMSYEAKHVWECLRKGMKESPVIPLSESELLADILEEVRKAIGVTFPQDKR

SEQ ID NO: 15180 - protein, 389 aa, Homo sapiens
MKNYKAIGKIGEGTFSEVMKMQSLRDGNYYACKQMKQRFESDRKSGSLALICELMDMNIYELIRGRRYPLSEKKIMHYMYQLCKSLDHIHRNGIFHRDVKPENILIKQDVLKLGDFGSCRSVYSKQPYTEYISTRWYRAPECLLTDGFYTYKMDLWSAGCVFYEIASLQPLFPGVNELDQISKIHDVIGTPAQKILTKFKQSRAMNFDFPFKKGSGIPLLTTNLSPQCLSLLHAMVAYDPDERIAAHQALQHPYFQEQRKTEKRALGSHRKAGFPEHPVAPEPLSNSCQISKEGRKQKQSLKQEEDRPKRRGPAYVMELPKLKLSGVVRLSSYSSPTLQSVLGSGTNGRVPVLRPLKCIPASKKTDPQKDLKPAPQQCRLPTIVRKGGR

SEQ ID NO: 15181 - protein, 2653 aa, Homo sapiens
MVSPPLLIISVAGTIECKPDHLLWRPGSTSPQSVSFLHGKVVMESLGRPIPPTSSPSLLPSAQLPSSHNPPPVSCQMPLLDSNTSHQIMDTNPDEEFSPNSYLLRACSGPQQASSSGPPNHHSQSTLRPPLPPPHNHTLSHHHSSANSLNRNSLTNRRSQIHAPAPAPNDLATTPESVQLQDSWVLNSNVPLETRHFLFKTSSGSTPLFSSSSPGYPLTSGTVYTPPPRLLPRNTFSRKAFKLKKPSKYCSWKCAALSAIAAALLLAILLAYFIAMHLLGLNWQLQPADGHTFNNGIRTGLPGNDDVATMPSGGKVPWSLKNSSIDSGEAEVGRRVTQEVPPGVFWRSQIHISQPQFLKFNISLGKDALFGVYIRRGLPPSHAQYDFMERLDGKEKWSVVESPRERRSIQTLVQNEAVFVQYLDVGLWHLAFYNDGKDKEMVSFNTVVLDSVQDCPRNCHGNGECVSGVCHCFPGFLGADCAKAACPVLCSGNGQYSKGTCQCYSGWKGAECDVPMNQCIDPSCGGHGSCIDGNCVCSAGYKGEHCEEVDCLDPTCSSHGVCVNGECLCSPGWGGLNCELARVQCPDQCSGHGTYLPDTGLCSCDPNWMGPDCSVEVCSVDCGTHGVCIGGACRCEEGWTGAACDQRVCHPRCIEHGTCKDGKCECREGWNGEHCTIGRQTAGTETDGCPDLCNGNGRCTLGQNSWQCVCQTGWRGPGCNVAMETSCADNKDNEGDGLVDCLDPDCCLQSACQNSLLCRGSRDPLDIIQQGQTDWPAVKSFYDRIKLLAGKDSTHIIPGENPFNSSLVSLIRGQVVTTDGTPLVGVNVSFVKYPKYGYTITRQDGTFDLIANGGASLTLHFERAPFMSQERTVWLPWNSFYAMDTLVMKTEENSIPSCDLSGFVRPDPIIISSPLSTFFSAAPGQNPIVPETQVLHEEIELPGSNVKLRYLSSRTAGYKSLLKITMTQSTVPLNLIRVHLMVAVEGHLFQKSFQASPNLAYTFIWDKTDAYGQRVYGLSDAVVSVGFEYETCPSLILWEKRTALLQGFELDPSNLGGWSLDKHHILNVKSGILHKGTGENQFLTQQPAIITSIMGNGRRRSISCPSCNGLAEGNKLLAPVALAVGIDGSLYVGDFNYIRRIFPSRNVTSILELRNKEFKHSNNPAHKYYLAVDPVSGSLYVSDTNSRRIYRVKSLSGTKDLAGNSEVVAGTGEQCLPFDEARCGDGGKAIDATLMSPRGIAVDKNGLMYFVDATMIRKVDQNGIISTLLGSNDLTAVRPLSCDSSMDVAQVRLEWPTDLAVNPMDNSLYVLENNVILRITENHQVSIIAGRPMHCQVPGIDYSLSKLAIHSALESASAIAISHTGVLYITETDEKKINRLRQVTTNGEICLLAGAASDCDCKNDVNCNCYSGDDAYATDAILNSPSSLAVAPDGTIYIADLGNIRIRAVSKNKPVLNAFNQYEAASPGEQELYVFNADGIHQYTVSLVTGEYLYNFTYSTDNDVTELIDNNGNSLKIRRDSSGMPRHLLMPDNQIITLTVGTNGGLKVVSTQNLELGLMTYDGNTGLLATKSDETGWTTFYDYDHEGRLTNVTRPTGVVTSLHREMEKSITIDIENSNRDDDVTVITNLSSVEASYTVVQDQVRNSYQLCNNGTLRVMYANGMGISFHSEPHVLAGTITPTIGRCNISLPMENGLNSIEWRLRKEQIKGKVTIFGRKLRVHGRNLLSIDYDRNIRTEKIYDDHRKFTLRIIYDQVGRPFLWLPSSGLAAVNVSYFFNGRLAGLQRGAMSERTDIDKQGRIVSRMFADGKVWSYSYLDKSMVLLLQSQRQYIFEYDSSDRLLAVTMPSVARHSMSTHTSIGYIRNIYNPPESNASVIFDYSDDGRILKTSFLGTGRQVFYKYGKLSKLSEIVYDSTAVTFGYDETTGVLKMVNLQSGGFSCTIRYRKIGPLVDKQIYRFSEEGMVNARFDYTYHDNSFRIASIKPVISETPLPVDLYRYDEISGKVEHFGKFGVIYYDINQIITTAVMTLSKHFDTHGRIKEVQYEMFRSLMYWMTVQYDSMGRVIKRELKLGPYANTTKYTYDYDGDGQLQSVAVNDRPTWRYSYDLNGNLHLLNPGNSVRLMPLRYDLRDRITRLGDVQYKIDDDGYLCQRGSDIFEYNSKGLLTRAYNKASGWSVQYRYDGVGRRASYKTNLGHHLQYFYSDLHNPTRITHVYNHSNSEITSLYYDLQGHLFAMESSSGEEYYVASDNTGTPLAVFSINGLMIKQLQYTAYGEIYYDSNPDFQMVIGFHGGLYDPLTKLVHFTQRDYDVLAGRWTSPDYTMWKNVGKEPAPFNLYMFKSNNPLSSELDLKNYVTDVKSWLVMFGFQLSNIIPGFPRAKMYFVPPPYELSESQASENGQLITGVQQTTERHNQAFMALEGQVITKKLHASIREKAGHWFATTTPIIGKGIMFAIKEGRVTTGVSSIASEDSRKVASVLNNAYYLDKMHYSIEGKDTHYFVKIGSADGDLVTLGTTIGRKVLESGVNVTVSQPTLLVNGRTRRFTNIEFQYSTLLLSIRYGLTPDTLDEEKARVLDQARQRALGTAWAKEQQKARDGREGSRLWTEGEKQQLLSTGRVQGYEGYYVLPVEQYPELADSSSNIQFLRQNEMGKR

SEQ ID NO: 15182 - protein, 42 aa, Homo sapiens
MNSGGGFGLGLGFGLTPTSVIQSSDSCSLCRSDAANTNGCHV

SEQ ID NO: 15183 - protein, 160 aa, Homo sapiens
MLGLRPPLLALVGLLSLGCVLSQECTKFKVSSCRECIESGPGCTWCQKLNFTGPGDPDSIRCDTRPQLLMRGCAADDIMDPTSLAETQEDHNGGQKQLSPQKVTLYLRPGQAAAFNVTFRRAKGYPIDLYYLMDLSYSMLDDLRNVKKLGGDLLRALNEI

SEQ ID NO: 15184 - protein, 283 aa, Homo sapiens
MAGNFWQSSHYLQWILDKQDLLKERQKDLKFLSEEEYWKLQIFFTNVIQALGEHLKLRQQVIATATVYFKRFYARYSLKSIDPVLMAPTCVFLASKVEEFGVVSNTRLIAAATSVLKTRFSYAFPKEFPYRMNHILECEFYLLELMDCCLIVYHPYRPLLQYVQDMGQEDMLLPLAWRIVNDTYRTDLCLLYPPFMIALACLHVACVVQQKDARQWFAELSVDMEKILEIIRVILKLYEQWKNFDERKEMATILSKMPKPKPPPNSEGEQGPNGSQNSSYSQS

SEQ ID NO: 15185 - protein, 174 aa, Homo sapiens
MNFLLSWVHWSLALLLYLHHAKWSQAAPMAEGGGQNHHEVVKFMDVYQRSYCHPIETLVDIFQEYPDEIEYIFKPSCVPLMRCGGCCNDEGLECVPTEESNITMQIMRIKPHQGQHIGEMSFLQHNKCECRPKKDRARQENPCGPCSERRKHLFVQDPQTCKCSCKNTDSRCKM

SEQ ID NO: 15186 - protein, 931 aa, Homo sapiens
MKASSGRCGLVRWLQVLLPFLLSLFPGALPVQIRYSIPEELAKNSVVGNLAKDLGLSVRDLPARKLRVSAEKEYFTVNPESGDLLVSDRIDREQICGKQPLCVLDFDTVAENPLNIFYIAVIVQDINDNTPLFKQTKINLKIGESTKPGTTFPLDPALDSDVGPNSLQRYHLNDNEYFDLAEKQTPDGRKYPELILKHSLDREEHSLHQLVLTAVDGGDPPQSGTTQIRIKVTDANDNPPVFSQDVYRVTLREDVPPGFFVLQVTATDRDEGINAEITYSFHNVDEQVKHFFNLNEKTGEITTKDDLDFEIASSYTLSIEAKDPGDLAAHCSIQVEILDDNDCAPEVIVTSVSTPLPEDSPPGTVIALIKTRDRDSGENGEVYCQVLGNAKFILKSSSKNYYKLVTDGALDREEIPEYNLTITATDGGKPPLSSSIIVTLHISDVNDNAPVFQQTSYMVHVAENNPPGASIAQISASDPDLGPSGQVSYSIVASDLKPREILSYVSVSAQSGVVFAQRAFDHEQLRAFELTLQARDQGSPALSANVSLRVLVGDLNDNAPRVLYPALGPDGSALFDMVPRAAEPGYLVTKVVAVDADSGHNAWLSYHVLQASEPGLFSLGLRTGEVRTARALGDRDAARQRLLVAVRDGGQPPLSATATLHLIFADSLQEVLPDLSDRREPSDPQAKLQFYLVVALALISVLFFLAVILAISLRLRLSSRSDAWDCFQPGLSSKPGPGVLPNYSEGTLPYSYNLCVASQSAKTEFNFLNITPELVPAQDLVCDNASWEQNTNHGAAGVPFASDTILKQAPPNTDWRFSQAQRPGTSGSQNGDDTGTWPNNQFDTEMLQAMILASASEAADGSSTLGGGAGTMGLSARYGPQFTLQHVPDYRQNVYIPGSNATLTNAAGKRDGKAPAGGNGNKKKSGKKEKK

SEQ ID NO: 15187 - protein, 165 aa, Homo sapiens
MRRAWILLTLGLVACVSAESVRADEDVESPELTTSRPLPKILLTSAAPKVETTTLNIQNKIPAQTKSPEETDKEKVHLSDSERKMDPAEEDTNVYTEKHSDSLFKRTEVLAAVIAGGVIGFLFAIFLILLLVYRMRKKDEGSYDLGERKPSSAAYQKAPTKEFYA

SEQ ID NO: 15188 - protein, 639 aa, Homo sapiens
MGDYGFGVLVQSNTGNKSAFPVRFHPHLQPPHHHQNATPSPAAFINNNTAANGSSAGSAWLFPAPATHNIQDEILGSEKAKSQQQEQQDPLEKQQLSPSPGQEAGILPETEKAKSEENQGDNSSENGNGKEKIRIESPVLTGFDYQEATGLGTSTQPLTSSASSLTGFSNWSAAIAPSSSTIINEDASFFHQGGVPAASANNGALLFQNFPHHVSPGFGGSFSPQIGPLSQHHPHHPHFQHHHSQHQQQRRSPASPHPPPFTHRNAAFNQLPHLANNLNKPPSPWSSYQSPSPTPSSSWSPGGGGYGGWGGSQGRDHRRGLNGGITPLNSISPLKKNFASNHIQLQKYARPSSAFAPKSWMEDSLNRADNIFPFPDRPRTFDMHSLESSLIDIMRAENDTIKGQSSLFPMEDGFLDDGRGDQPLHSGLGSPHCFSHQNGERVERYSRKVFVGGLPPDIDEDEITASFRRFGPLIVDWPHKAESKSYFPPKGYAFLLFQDESSVQALIDACIEEDGKLYLCVSSPTIKDKPVQIRPWNLSDSDFVMDGSQPLDPRKTIFVGGVPRPLRAVELAMIMDRLYGGVCYAGIDTDPELKYPKGAGRVAFSNQQSYIAAISARFVQLQHGEIDKRVSLILHFGKF

SEQ ID NO: 15189 - protein, 717 aa, Homo sapiens
MGKASPASGLSRPKTLVSPLRSNQWSLQKGLPEQYYSLTWFLSPILGLIFTPLIGSASDRCTLSWGRRRPFILALCVGVLFGVALFLNGSAIGLALGDVPNRQPIGIVLTVLGVVVLDFSADATEGPIRAYLLDVVDSEEQDMALNIHAFSAGLGGAIGYVLGGLDWTQTFLGSWFRTQNQVLFFFAAIIFTVSVALHLFSIDEEQYSPQQERSAEEPGALDGGEPHGVPAFPDEVQSEHELALDYPDVDIMRSKSDSALHVPDTALDLEPELLFLHDIEPSIFHDASYPATPRSTSQELAKTKLPRLATFLKEAAKEDETLLDNHLNEAKVPNGSGSPTKDALGGYTRVDTKPSATSSSMRRRRHAFRRQASSTFSYYGKLGSHCYRYRRANAVVLIKPSRSMSDLYDMQKRQRQHRHRNQSGATTSSGDTESEEGEGETTVRLLWLSMLKMPRELMRLCLCHLLTWFSVIAEAVFYTDFMGQVIFEGDPKAPSNSTAWQAYNAGVKMGCWGLVIYAATGAICSALLQKYLDNYDLSVRVIYVLGTLGFSVGTAVMAMFPNVYVAMVTISTMGIVSMSISYCPYALLGQYHDIKQYIHHSPGNSKRGFGIDCAILSCQVYISQILVASALGGVVDAVGTVRVIPMVASVGSFLGFLTATFLVIYPNVSEEAKEEQKGLSSPLAGEGRAGGNSEKPTVLKLTRKEGLQGPVETESVV

SEQ ID NO: 15190 - protein, 206 aa, Homo sapiens
MHSYVRSRKRLREEEAARLFKQIVSAVAHCHQSAIVLGDLKLRKFVFSTEERTQLRLESLEDTHIMKGEDDALSDKHGCPAYVSPEILNTTGTYSGKAADVWSLGVMLYTLLVGRYPFHDSDPSALFSKIRRGQFCIPEHISPKARCLIRSLLRREPSERLTAPEILLHPWFESVLEPGYIDSEIGTSDQIVPEYQEDSDISSFFC

SEQ ID NO: 15191 - protein, 755 aa, Homo sapiens
MEAVIEKECSALGGLFQTIISDMKGSYPVWEDFINKAGKLQSQLRTTVVAAAAFLDAFQKVADMATNTRGGTREIGSALTRMCMRHRSIEAKLRQFSSALIDCLINPLQEQMEEWKKVANQLDKDHAKEYKKARQEIKKKSSDTLKLQKKAKKGRGDIQPQLDSALQDVNDKYLLLEETEKQAVRKALIEERGRFCTFISMLRPVIEEEISMLGEITHLQTISEDLKSLTMDPHKLPSSSEQVILDLKGSDYSWSYQTPPSSPSTTMSRKSSVCSSLNSVNSSDSRSSGSHSHSPSSHYRYRSSNLAQQAPVRLSSVSSHDSGFISQDAFQSKSPSPMPPEAPNQLSNGFSHYSLSSESHVGPTGAGLFPHCLPASRLLPRVTSVHLPDYAHYYTIGPGMFPSSQIPSWKDWAKPGPYDQPLVNTLQRRKEKREPDPNGGGPTTASGPPAAAEEAQRPRSMTVSAATRPGEEMEACEELALALSRGLQLDTQRSSRDSLQCSSGYSTQTTTPCCSEDTIPSQVSDYDYFSVSGDQEADQQEFDKSSTIPRNSDISQSYRRMFQAKRPASTAGLPTTLGPAMVTPGVATIRRTPSTKPSVRRGTIGAGPIPIKTPVIPVKTPTVPDLPGVLPAPPDGPEERGEHSPESPSVGEGPQGVTSMPSSMWSGQASVNPPLPGPKPSIPEEHRQAIPESEAEDQEREPPSATVSPGQIPESDPADLSPRDTPQGEDMLNAIRRGVKLKKTTTNDRSAPRFS

SEQ ID NO: 15192 - protein, 658 aa, Homo sapiens
MKLYCLSGHPTLPCNVLKFKSTTIMLDCGLDMTSTLNFLPLPLVQSPRLSNLPGWSLKDGNAFLDKELKECSGHVFVDSVPEFCLPETELIDLSTVDVILISNYHCMMALPYITEHTGFTGTVYATEPTVQIGRLLMEELVNFIERVPKAQSASLWKNKDIQRLLPSPLKDAVEVSTWRRCYTMQEVNSALSKIQLVGYSQKIELFGAVQVTPLSSGYALGSSNWIIQSHYEKVSYVSGSSLLTTHPQPMDQASLKNSDVLVLTGLTQIPTANPDGMVGEFCSNLALTVRNGGNVLVPCYPSGVIYDLLECLYQYIDSAGLSSVPLYFISPVANSSLEFSQIFAEWLCHNKQSKVYLPEPPFPHAELIQTNKLKHYPSIHGDFSNDFRQPCVVFTGHPSLRFGDVVHFMELWGKSSLNTVIFTEPDFSYLEALAPYQPLAMKCIYCPIDTRLNFIQVSKLLKEVQPLHVVCPEQYTQPPPAQSHRMDLMIDCQPPAMSYRRAEVLALPFKRRYEKIEIMPELADSLVPMEIKPGISLATVSAVLHTKDNKHLLQPPPRPAQPTSGKKRKRVSDDVPDCKVLKPLLSGSIPVEQFVQTLEKHGFSDIKVEDTAKGHIVLLQEAETLIQIEEDSTHIICDNDEMLRVRLRDLVLKFLQKF

SEQ ID NO: 15193 - protein, 184 aa, Homo sapiens
MFRLWLLLAGLCGLLASRPGFQNSLLQIVIPEKIQTNTNDSSEIEYEQISYIIPIDEKLYTVHLKQRYFLADNFMIYLYNQGSMNTYSSDIQTQCYYQGNIEGYPDSMVTLSTCSGLRGILQFENVSYGIEPLESAVEFQHVLYKLKNEDNDIAIFIDRSLKEQPMDDNIFISEKYDYWGSDSM

SEQ ID NO: 15194 - protein, 32 aa, Homo sapiens
MMKTLLLFVGLLLTWESGQVLGDQTVSDNELQ

SEQ ID NO: 15195 - protein, 704 aa, Homo sapiens
MGDYGFGVLVQSNTGNKSAFPVRFHPHLQPPHHHQNATPSPAAFINNNTAANGSSAGSAWLFPAPATHNIQDEILGSEKAKSQQQEQQDPLEKQQLSPSPGQEAGILPETEKAKSEENQGDNSSENGNGKEKIRIESPVLTGFDYQEATGLGTSTQPLTSSASSLTGFSNWSAAIAPSSSTIINEDASFFHQGGVPAASANNGALLFQNFPHHVSPGFGGSFSPQIGPLSQHHPHHPHFQHHHSQHQQQRRSPASPHPPPFTHRNAAFNQLPHLANNLNKPPSPWSSYQSPSPTPSSSWSPGGGGYGGWGGSQGRDHRRGLNGGITPLNSISPLKKNFASNHIQLQKYARPSSAFAPKSWMEDSLNRADNIFPFPDRPRTFDMHSLESSLIDIMRAENDTIKGQSSLFPMEDGFLDDGRGDQPLHSGLGSPHCFSHQNGERVERYSRKVFVGGLPPDIDEDEITASFRRFGPLIVDWPHKAESKSYFPPKGYAFLLFQDESSVQALIDACIEEDGKLYLCVSSPTIKDKPVQIRPWNLSDSDFVMDGSQPLDPRKTIFVGGVPRPLRAVELAMIMDRLYGGVCYAGIDTDPELKYPKGAGRVAFSNQQSYIAAISARFVQLQHGEIDKRVEVKPYVLDDQLCDECQGARCGGKFAPFFCANVTCLQYYCEYCWAAIHSRAGREFHKPLVKEGGDRPRHISFRWN

SEQ ID NO: 15196 - protein, 244 aa, Homo sapiens
MPAATVDHSQRICEVWACNLDEEMKKIRQVIRKYNYVAMDTEFPGVVARPIGEFRSNADYQYQLLRCNVDLLKIIQLGLTFMNEQGEYPPGTSTWQFNFKFNLTEDMYAQDSIELLTTSGIQFKKHEEEGIETQYFAELLMTSGVVLCEGVKWLSFHSGYDFGYLIKILTNSNLPEEELDFFEILRLFFPVIYDVKYLMKSCKNLKGGLQEVAEQLELERIGPQHQAGSDSLLTGMAFFKMREV

SEQ ID NO: 15197 - protein, 23 aa, Homo sapiens
MMQLLQLLLGLLGPGGYLFLLGD

SEQ ID NO: 15198 - protein, 42 aa, Homo sapiens
MGNPGTFKRGLLLSALSYLGFETYQVISQAAVVHATAKVRQY

SEQ ID NO: 15199 - protein, 721 aa, Homo sapiens
MTEGTCLRRRGGPYKTEPATDLGRWRLNCERGRQTWTYLQDERAGREQTGLEAYALGLDTKNYFKDLPKAHTAFEGALNGMTFYVGLQAEDGHWTGDYGGPLFLLPGLLITCHVARIPLPAGYREEIVRYLRHIEDKSTVFGTALNYVSLRILGVGPDDPDLVRARNILHKKGGAVAIPSWGKFWLAVLNVYSWEGLNTLFPEMWLFPDWAPAHPSTLWCHCRQVYLPMSYCYAVRLSAAEDPLVQSLRQELYVEDFASIDWLAQRNNVAPDELYTPHSWLLRVVYALLNLYEHHHSAHLRQRAVQKLYEHIVADDRFTKSISIGPISKTINMLVRWYVDGPASTAFQEHVSRIPDYLWMGLDGMKMQGTNGSQIWDTAFAIQALLEAGGHHRPEFSSCLQKAHEFLRLSQVPDNPPDYQKYYRQMRKGGFSFSTLDCGWIVSDCTAEALKAVLLLQEKCPHVTEHIPRERLCDAVAVLLNMRNPDGGFATYETKRGGHLLELLNPSEVFGDIMIDYTYVECTSAVMQALKYFHKRFPEHRAAEIRETLTQGLEFCRRQQRADGSWEGSWGVCFTYGTWFGLEAFACMGQTYRDGTACAEVSRACDFLLSRQMADGGWGEDFESCEERRYLQSAQSQIHNTCWAMMGLMAVRHPDIEAQERGVRCLLEKQLPNGDWPQENIAGVFNKSCAISYTSYRNIFPIWALGRFSQLYPERALAGHP

SEQ ID NO: 15200 - protein, 186 aa, Homo sapiens
MKFLIFAFFGGVHLLSLCSGKAICKNGISKRTFEEIKEEIASCGDVAKAIINLAVYGKAQNRSYERLALLVDTVGPRLSGSKNLEKAIQIMYQNLQQDGLEKVHLEPVRIPHWERGEESAVMLEPRIHKIAILGLGSSIGTPPEGITAEVLVVTSFDELQRRASEARGKIVVYNQPYINYSRTVQY

SEQ ID NO: 15201 - protein, 53 aa, Homo sapiens
MRAWIFFLLCLAGRALAAPQQEALPDETEVVEETVAEVTEVSVGANPVQVEVG

SEQ ID NO: 15202 - protein, 291 aa, Homo sapiens
MSALNWKPFVYGGLASITAECGTFPIDLTKTRLQIQGQTNDAKFKEIRYRGMLHALVRIGREEGLKALYSGIAPAMLRQASYGTIKIGTYQSLKRLFIERPEDETLPINVICGILSGVISSTIANPTDVLKIRMQAQSNTIQGGMIGNFMNIYQQEGTRGLWKGVSLTAQRAAIVVGVELPVYDITKKHLILSGLMGDTVYTHFLSSFTCGLAGALASNPVDVVRTRMMNQRVLRDGRCSGYTGTLDCLLQTWKNEGFFALYKGFWPNWLRLGPWNIIFFVTYEQLKKLDL

SEQ ID NO: 15203 - protein, 122 aa, Homo sapiens
MRWFLPWTLAAVTAAAASTVLATAGKKCLAVYQPEASMNFTLAGCISTRSYQPKYCGVCMDNRCCIPYKSKTIDVSFQCPDGLGFSRQVLWINACFCNLSCRNPNDIFADLESYPDFSEIAN

SEQ ID NO: 15204 - protein, 143 aa, Homo sapiens
MRHSKRTHCPDWDSRESWGHESYRGSHKRKRRSHSSTQENRHCKPHHQFKESDCHYLEARSLNERDYRDRRYVDEYRNDYCEGYVPRHYHRDIESGYRIHCSKSSVRSRRSSPKRKRNRHCSSHQSRSMKSWTLWVKEPLAKL

SEQ ID NO: 15205 - protein, 331 aa, Homo sapiens
MILANVFCLFFFLGTGADPVVSAKSNHCLDAAKACNLNDNCKKLRSSYISICNREISPTERCNRRKCHKALRQFFDRVPSEYTYRMLFCSCQDQACAERRRQTILPSCSYEDKEKPNCLDLRGVCRTDHLCRSRLADFHANCRASYQTVTSCPADNYQACLGSYAGMIGFDMTPNYVDSSPTGIVVSPWCSCRGSGNMEEECEKFLRDFTENPCLRNAIQAFGNGTDVNVSPKGPSFQATQAPRVEKTPSLPDDLSDSTSLGTSVITTCTSVQEQGLKANNSKELSMCFTELTTNIIPGSNKVIKPNSGPSRARPSAALTVLSVLMLKLAL

SEQ ID NO: 15206 - protein, 227 aa, Homo sapiens
MPGCRISACGPGAQEGTAEQRSPPPPWDPMPSSQPPPPTPTLTPTPTPGQSPPLPDAAGASAGAAEDQELQRWRQGASGIAGLAGPGGGSGAAAGAGGRALELAEARRRLLEVEGRRRLVSELESRVLQLHRVFLAAELRLAHRAESLSRLSGGVAQAELYLAAHGSRLKKGPRRGRRGRPPALLASALGLGGCVPWGAGRLRRGHGPEPDSPFRRSPPRGPASPQR

SEQ ID NO: 15207 - protein, 197 aa, Homo sapiens
MAQLGAVVAVASSFFCASLFSAVHKIEEGHIGVYYSGGVMIYFDRIEVVNFLVPNAVYDIVKNYTADYDKALIFNKIHHELNQFCSVHTLQEVYIELFDQIDENLKLALQQDLTSMAPGLVIQAVRVTKPNIPEAIRRNYELMESEKTKLLIAAQKQKVVEKEAETERKKALIEAEKVAQVAEITYGQKVMEKETEK

SEQ ID NO: 15208 - protein, 44 aa, Homo sapiens
MWVLLFCLVMASCQYSLLKSVQPDPASPIHGPKPGTLPVTLCMA

SEQ ID NO: 15209 - protein, 927 aa, Homo sapiens
MQRAREAEMMKSQVLFPFLLSLFCGAISQQIRYTIPEELANGSRVGKLAKDLGLSVRELPTRKLRVSAEDYFNVSLESGDLLVNGRIDREKICGRKLECALEFETVAENPMNVFHVVVVIQDINDNAPRFVAKGIDLEICESALPGVKFSLDSAQDADVEGNSLKLYTINPNQYFSLSTKESPDGSKYPVLLLEKPLDREHQSSHRLILTAMDGGDPPLSGTTHIWIRVTDANDNAPVFSQEVYRVSLQENVPWGTSVLRVMATDQDEGINAEITYAFLNSPISTSLFNLNPNTGDITTNGTLDFEETSRYVLSVEAKDGGVHTAHCNVQIEIVDENDNAPEVTFMSFSNQIPEDSDLGTVIALIKVRDKDSGQNGMVTCYTQEEVPFKLESTSKNYYKLVIAGALNREQTADYNVTIIATDKGKPALSSRTSITLHISDINDNAPVFHQASYVVHVSENNPPGASIAQVSASDPDLGPNGRVSYSILASDLEPRELLSYVSVSPQSGVVFAQRAFDHEQLRAFELTLQARDQGSPALSANVSLRVLVGDLNDNAPRVLYPALGPDGSALFDMVPRAAEPGYLVTKVVAVDADSGHNAWLSYHVLQASEPGLFSLGLRTGEVRTARALGDRDAARQRLLVAVRDGGQPPLSATATLHLIFADSLQEVLPDLSDRPEPSDPQTELQFYLVVALALISVLFLLAVILAIALRLRRSSSLDTEGCFQTGLCSKSGPGVPPNHSEGTLPYSYNLCIASHSAKTEFNSLNLTPEMAPPQDLLCDDPSMVVCASNEDHKIAYDPSLSSHQAPPNTDWRFSQAQRPGTSGSQNGDDTGTWPNNQFDTEMLQAMILASASEAADGSSTLGGGAGTMGLSARYGPQFTLQHVPDYRQNVYIPGSNATLTNAAGKRDGKAPAGGNGNKKKSGKKEKK

SEQ ID NO: 15210 - protein, 195 aa, Homo sapiens
MAGARRLELGEALALGSGWRHACHALLYAPDPGMLFGRIPLRYAILMQMRFDGRLGFPGGFVDTQDRSLEDGLNRELREELGEAAAAFRVERTDYRSSHVGSGPRVVAHFYAKRLTLEELLAVEAGATRAKDHGLEVLGLVRVPLYTLRDGVGGLPTFLENSFIGSAREQLLEALQDLGLLQSGSISGLKIPAHH

SEQ ID NO: 15211 - protein, 84 aa, Homo sapiens
MYEKEAKQQEEKIEKMRAEDGENYDIKKQAEILQESRMMIPDCQRRLEAAYLDLQRILENEKDLEEAEEYKEARLVLDSVKLEA

SEQ ID NO: 15212 - protein, 79 aa, Homo sapiens
MARFLTLCTWLLLLGPGLLATVRAECSQDCATCSYRLVRPADINFLDCGGGEEEGCSFQNFPYCFLCSCCYHLLLLSLL

SEQ ID NO: 15213 - protein, 155 aa, Homo sapiens
MKLLLLHPAFQSCLLLTLLGLWRTTPEAHASSLGAPAISAASFLQDLIHRYGEGDSLTLQQLKALLNHLDVGVGRGNVTQHVQGHRNLSTCFSSGDLFTAHNFSEQSRIGSSELQEFCPTILQQLDSRACTSENQENEENEQTEEGRPSAVEVWG

SEQ ID NO: 15214 - protein, 62 aa, Homo sapiens
MFLLLALLTELGRLQAHEGSEGIFLHVTVPRKIKSNDSEVSERKVFGEQVVFGYMNDLHHYN

SEQ ID NO: 15215 - protein, 204 aa, Homo sapiens
MMKTLLLFVGLLLTWESGQVLGDQTVSDNELQEMSNQGSKYVNKEIQNAVNGVKQIKTLIEKTNEERKTLLSNLEEAKKKKEDALNETRESETKLKELPGVCNETMMALWEECKPCLKQTCMKFYARVCRSGSGLVGRQLEEFLNQSSPFYFWMNGDRIDSLLENDRQQTHMLDVMQDHFSRASSIIDELFQDRFFTREPQDTY

SEQ ID NO: 15216 - protein, 364 aa, Homo sapiens
MALALLEDWCRIMSVDEQKSLMVTGIPADFEEAEIQEVLQETLKSLGRYRLLGKIFRKQENANAVLLELLEDTDVSAIPSEVQGKGGVWKVIFKTPNQDTEFLERLNLFLEKEGQTVSGMFRALGQEGVSPATVPCISPELLAHLLGQAMAHAPQPLLPMRYRKLRVFSGSAVPAPEEESFEVWLEQATEIVKEWPVTEAEKKRWLAESLRGPALDLMHIVQADNPSISVEECLEAFKQVFGSLESRRTAQVRYLKTYQEEGEKVSAYVLRLETLLRRAVEKRAIPRRIADQVRLEQVMAGATLNQMLWCRLRELKDQGPPPSFLELMKVIREEEEEEASFENESIEEPEERDGYGRWNHEGDD

SEQ ID NO: 15217 - protein, 625 aa, Homo sapiens
MNYSEIESKVREATNDDPWGPSGQLMGEIAKATFMYEQFPELMNMLWSRMLKDNKKNWRRVYKSLLLLAYLIRNGSERVVTSAREHIYDLRSLENYHFVDEHGKDQGINIRQKVKELVEFAQDDDRLREERKKAKKNKDKYVGVSSDSVGGFRYSERYDPEPKSKWDEEWDKNKSAFPFSDKLGELSDKIGSTIDDTISKFRRKDREDSPERCSDSDEEKKARRGRSPKGEFKDEEETVTTKHIHITQATETTTTRHKRTANPSKTIDLGAAAHYTGDKASPDQNASTHTPQSSVKTSVPSSKSSGDLVDLFDGTSQSTGGSADLFGGFADFGSAAASGSFPSQVTATSGNGDFGDWSAFNQAPSGPVASSGEFFGSASQPAVELVSGSQSALGPPPAASNSSDLFDLMGSSQATMTSSQSMNFSMMSTNTVGLGLPMSRSQPLQNVSTVLQKPNPLYNQNTDMVQKSVSKTLPSTWSDPSVNISLDNLLPGMQPSKPQQPSLNTMIQQQNMQQPMNVMTQSFGAVNLSSPSNMLPVRPQTNALIGGPMPMSMPNVMTGTMGMAPLGNTPMMNQSMMGMNMNIGMSAAGMGLTGTMGMGMPNIAMTSGTVQPKQDAFANFANFSK

SEQ ID NO: 15218 - protein, 672 aa, Homo sapiens
MWRVLFLLSGLGGLRMDSNFDSLPVQITVPEKIRSIIKEGIESQASYKIVIEGKPYTVNLMQKNFLPHNFRVYSYSGTGIMKPLDQDFQNFCHYQGYIEGYPKSVVMVSTCTGLRGVLQFENVSYGIEPLESSVGFEHVIYQVKHKKADVSLYNEKDIESRDLSFKLQSVEPQQDFAKYIEMHVIVEKQLYNHMGSDTTVVAQKVFQLIGLTNAIFVSFNITIILSSLELWIDENKIATTGEANELLHTFLRWKTSYLVLRPHDVAFLLVYREKSNYVGATFQGKMCDANYAGGVVLHPRTISLESLAVILAQLLSLSMGITYDDINKCQCSGAVCIMNPEAIHFSGVKIFSNCSFEDFAHFISKQKSQCLHNQPRLDPFFKQQAVCGNAKLEAGEECDCGTEQDCALIGETCCDIATCRFKAGSNCAEGPCCENCLFMSKERMCRPSFEECDLPEYCNGSSASCPENHYVQTGHPCGLNQWICIDGVCMSGDKQCTDTFGKEVEFGPSECYSHLNSKTDVSGNCGISDSGYTQCEVCRNQRCVSSSYLGYDCTTDKCNDRGVCNNKKHCHCSASYLPPDCSVQSDLWPGGSIDSGNFPPVAIPARLPERRYIENIYHSKPMRWPFFLFIPFFIIFCVLIAIMVKVNFQRKKWRTEDYSSDEQPESESEPKG

SEQ ID NO: 15219 - protein, 609 aa, Homo sapiens
MTSGATRYRLSCSLRGHELDVRGLVCCAYPPGAFVSVSRDRTTRLWAPDSPNRSFTEMHCMSGHSNFVSCVCIIPSSDIYPHGLIATGGNDHNICIFSLDSPMPLYILKGHKNTVCSLSSGKFGTLLSGSWDTTAKVWLNDKCMMTLQGHTAAVWAVKILPEQGLMLTGSADKTVKLWKAGRCERTFSGHEDCVRGLAILSETEFLSCANDASIRRWQITGECLEVYYGHTNYIYSISVFPNCRDFVTTAEDRSLRIWKHGECAQTIRLPAQSIWCCCVLDNGDIVVGASDGIIRVFTESEDRTASAEEIKAFEKELSHATIDSKTGDLGDINAEQLPGREHLNEPGTREGQTRLIRDGEKVEAYQWSVSEGRWIKIGDVVGSSGANQQTSGKVLYEGKEFDYVFSIDVNEGGPSYKLPYNTSDDPWLTAYNFLQKNDLNPMFLDQVAKFIIDNTKGQMLGLGNPSFSDPFTGGGRYVPGSSGSSNTLPTADPFTGAGRYVPGSASMGTTMAGVDPFTGNSAYRSAASKTMNIYFPKKEAVTFDQANPTQILGKLKELNGTAPEEKKLTEDDLILLEKILSLICNSSSEKPTVQQLQILWKAINCPEGK

SEQ ID NO: 15220 - protein, 142 aa, Homo sapiens
MAFKDTGKTPVEPEVAIHRIRITLTSRNVKSLEKVCADLIRGAKEKNLKVKGPVRMPTKTLRITTRKTPCGEGSKTWDRFQMRIHKRLIDLHSPSEIVKQITSISIEPGVELIESTDAEPMDTEGQQYTLRSVFESPGTCPF

SEQ ID NO: 15221 - protein, 256 aa, Homo sapiens
MMPQEQYTHHRSTMPGSVGPQVYKVGIYGWRKRCLYFFVLLLMILILVNLAMTIWILKVMNFTIDGMGNLRITEKGLKLEGDSEFLQPLYAKEIQSRPGNALYFKSARNVTVNILNDQTKVLTQLITGPKAVEAYGKKFEVKTVSGKLLFSADNNEVVVGAERLRVLGAEGTVFPKSIETPNVRADPFKELRLESPTRSLVMEAPKGVEINAEAGNMEATCRTELRLESKDGEVRDEKDRSSKSYSFNRPTLPITG

SEQ ID NO: 15222 - protein, 296 aa, Homo sapiens
MDNSWRLGPAIGLSAGQSQLLVSLLLLLTRVQPGTDVAAPEHISYVPQLSNDTLAGRLTLSTFTLEQPLGQFSSHNISDLDTIWLVVALSNATQSFTAPRTNQDIPAPANFSQRGYYLTLRANRVLYQTRGQLHVLRVGNDTHCQPTKIGCNHPLPGPGPYRVKFLVMNDEGPVAETKWSSDTRLQQAQALRAVPGPQSPGTVVIIAILSILLAVLLTVLLAVLIYTCPSSSPSSPAQVPPLPGSPLGPSPVSVGAVCPWLLPESIAEIWTQDSGLPALGWQHWQQRPLLHREGGQ

SEQ ID NO: 15223 - protein, 473 aa, Homo sapiens
MDAMKRGLCCVLLLCGAVFVSPSQEIHARFRRGARSYQVICRDEKTQMIYQQHQSWLRPVLRSNRVEYCWCNSGRAQCHSVPVKSCSEPRCFNGGTCQQALYFSDFVCQCPEGFAGKCCEIGNSDCYFGNGSAYRGTHSLTESGASCLPWNSMILIGKVYTAQNPSAQALGLGKHNYCRNPDGDAKPWCHVLKNRRLTWEYCDVPSCSTCGLRQYSQPQFRIKGGLFADIASHPWQAAIFAKHRRSPGERFLCGGILISSCWILSAAHCFQERFPPHHLTVILGRTYRVVPGEEEQKFEVEKYIVHKEFDDDTYDNDIALLQLKSDSSRCAQESSVVRTVCLPPADLQLPDWTECELSGYGKHEALSPFYSERLKEAHVRLYPSSRCTSQHLLNRTVTDNMLCAGDTRSGGPQANLHDACQGDSGGPLVCLNDGRMTLVGIISWGLGCGQKDVPGVYTKVTNYLDWIRDNMRP

SEQ ID NO: 15224 - protein, 629 aa, Homo sapiens
MFRLWLLLAGLCGLLASRPGFQNSLLQIVIPEKIQTNTNDSSEIEYEQISYIIPIDEKLYTVHLKQRYFLADNFMIYLYNQGSMNTYSSDIQTQCYYQGNIEGYPDSMVTLSTCSGLRGILQFENVSYGIEPLESAVEFQHVLYKLKNEDNDIAIFIDRSLKEQPMDDNIFISEKSEPAVPDLFPLYLEMHIVVDKTLYDYWGSDSMIVTNKVIEIVGLANSMFTQFKVTIVLSSLELWSDENKISTVGEADELLQKFLEWKQSYLNLRPHDIAYLLIYMDYPRYLGAVFPGTMCITRYSAGVALQCGPASCCDFRTCVLKDGAKCYKGLCCKDCQILQSGVECRPKAHPECDIAENCNGTSPECGPDITLINGLSCKNNKFICYDGDCHDLDARCESVFGKGSRNAPFACYEEIQSQSDRFGNCGRDRNNKYVFCGWRNLICGRLVCTYPTRKPFHQENGDVIYAFVRDSVCITVDYKLPRTVPDPLAVKNGSQCDIGRVCVNRECVESRIIKASAHVCSQQCSGHGVCDSRNKCHCSPGYKPPNCQIRSKGFSIFPEEDMGSIMERASGKTENTWLLGFLIALPILIVTTAIVLARKQLKKWFAKEEEFPSSESKSQDSTQTQSSSN

SEQ ID NO: 15225 - protein, 564 aa, Homo sapiens
MPFTLHLRSRLPSAIRSLILQKKPNIRNTSSMAGELRPASLVVLPRSLAPAFERFCQVNTGPLPLLGQSEPEKWMLPPQGAISETRMGHPQFWKYEFGACTGSLASLEQYSEQLKDMVAFFLGCSFSLEEALEKAGLPRRDPAGHSQTTVPCVTHAGFCCPLVVTMRPIPKDKLEGLVRACCSLGELLGIKELSKPAYGDAMVCPPGEVPVFWPSPLTSLGAVSSCETPLAFASIPGCTVMTDLKDAKAPPGCLTPERIPEVHHISQDPLHYSIASVSASQKIRELESMIGIDPGNRGIGHLLCKDELLKASLSLSHARSVLITTGFPTHFNHEPPEETDGPPGAVALVAFLQALEKEVAIIVDQRAWNLHQKIVEDAVEQGVLKTQIPILTYQGGSVEAAQAFLCKNGDPQTPRFDHLVAIERAGRAADGNYYNARKMNIKHLVDPIDDLFLAAKKIPGISSTGVSNWGGYALACALYILYSCAVHSQYLRKAVGPSRAPGDQAWTQALPSVIKEEKMLGILVQHKVRSGVSGIVGMEVDGLPFHNTHAEMIQKLVDVTTAQV

SEQ ID NO: 15226 - protein, 1052 aa, Homo sapiens
MAAAYLDPNLNHTPNSSTKTHLGTGMERSPGAMERVLKVFHYFESNSEPTTWASIIRHGDATDVRGIIQKIVDSHKVKHVACYGFRLSHLRSEEVHWLHVDMGVSSVREKYELAHPPEEWKYELRIRYLPKGFLNQFTEDKPTLNFFYQQVKSDYMLEIADQVDQEIALKLGCLEIRRSYWEMRGNALEKKSNYEVLEKDVGLKRFFPKSLLDSVKAKTLRKLIQQTFRQFANLNREESILKFFEILSPVYRFDKECFKCALGSSWIISVELAIGPEEGISYLTDKGCNPTHLADFTQVQTIQYSNSEDKDRKGMLQLKIAGAPEPLTVTAPSLTIAENMADLIDGYCRLVNGTSQSFIIRPQKEGERALPSIPKLANSEKQGMRTHAVSVSETDDYAEIIDEEDTYTMPSTRDYEIQRERIELGRCIGEGQFGDVHQGIYMSPENPALAVAIKTCKNCTSDSVREKFLQEALTMRQFDHPHIVKLIGVITENPVWIIMELCTLGELRSFLQVRKYSLDLASLILYAYQLSTALAYLESKRFVHRDIAARNVLVSSNDCVKLGDFGLSRYMEDSTYYKASKGKLPIKWMAPESINFRRFTSASDVWMFGVCMWEILMHGVKPFQGVKNNDVIGRIENGERLPMPPNCPPTLYSLMTKCWAYDPSRRPRFTELKAQLSTILEEEKAQQEERMRMESRRQATVSWDSGGSDEAPPKPSRPGYPSPRSSEGFYPSPQHMVQTNHYQVSGYPGSHGITAMAGSIYPGQASLLDQTDSWNHRPQEIAMWQPNVEDSTVLDLRGIGQVLPTHLMEERLIRQQQEMEEDQRWLEKEERFLKPDVRLSRGSIDREDGSLQGPIGNQHIYQPVGKPDPAAPPKKPPRPGAPGHLGSLASLSSPADSYNEGVKLQPQEISPPPTANLDRSNDKVYENVTGLVKAVIEMSSKIQPAPPEEYVPMVKEVGLALRTLLATVDETIPLLPASTHREIEMAQKLLNSDLGELINKMKLAQQYVMTSLQQEYKKQMLTAAHALAVDAKNLLDVIDQARLKMLGQTRPH

SEQ ID NO: 15227 - protein, 498 aa, Homo sapiens
MEDVTCDRTEFLSNYLTNVDDITLVPGTLGRIRSKFSNNAKYDPKAIIANLTCKKPDQHFKPYLKQHLPKRLHYANNRRIEDIHLLVERRWHVARKPLDVYKKPSGKCFFQGDHGFDNKVNSMQTVFVGYGSTFKYKTKVPPFENIELYNVMCDLLGLKPAPNNGTHGSLNHLLRTNTFRPTMPEEVTRPNYPGIMYLQSDFDLGCTCDDKNKLDELNKRLHTKGSTEERHLLYGRPAVLYRTRYDILYHTDFESGYSEIFLMPLWTSYTVSKQAEVSSVPDHLTSCVRPDVRVSPSFSQNCLAYKNDKQMSYGFLFPPYLSSSPEAKYDAFLVTNMVPMYPAFKRVWNYFQRVLVKKYASERNGVNVISGPIFDYDYDGLHDTEDKIKQYVEGSSIPVPTHYYSIITSCLDFTQPADKCDGPLSVSSFILPHRPDNEESCNSSEDESKWVEELMKMHTARVRDIEHLTSLDFFRKTSRSYPEILTLKTYLHTYESEI

SEQ ID NO: 15228 - protein, 876 aa, Homo sapiens
MAQSLTAEEKTITEKHLELCPRPKQETTTSKSTSGLTDITWSSSGSDLSDEDKTLSQLQRDELQFIDWEIDSDRAEASDCDEFEDDEGAVEISDCASCASNQSLTSDEKLSELPKPSSIEILEYSSDSEKEDDLENVLLIDSESPHKYHVQFASDARQIMERLIDPRTKSTETILHTPQKPTAKFPRTPENSAKKKLLRGGLAERLNGLQNRERSAISLWRHQCISYQKTLSGRKSGVLTVKILELHEECAMQVAMCEQLLGSPATSSSQSVAPRPGAGLKVLFTKETAGYLRGRPQDTVRIFPPWQKLIIPSGSCPVILNTYFCEKVVAKEDSEKTCEVYCPDIPLPRRSISLAQMFVIKGLTNNSPEIQVVCSGVATTGTAWTHGHKEAKQRIPTSTPLRDSLLDVVESQGAASWPGAGVRVVVQRVYSLPSRDSTRGQQGASSGHTDPAGTRACLLVQDACGMFGEVHLEFTMSKARQLEGKSCSLVGMKVLQKVTRGRTAGIFSLIDTLWPPAIPLKTPGRDQPCEEIKTHLPPPALCYILTAHPNLGQIDIIDEDPIYKLYQPPVTRCLRDILQMNDLGTRCSFYATVIYQKPQLKSLLLLEQREIWLLVTDVTLQTKEERDPRLPKTLLVYVAPLCVLGSEVLEALAGAAPHSLFFKDALRDQGRIVCAERTVLLLQKPLLSVVSGASSCELPGPVMLDSLDSATPVNSICSVQGTVVGVDESTAFSWPVCDMCGNGRLEQRPEDRGAFSCGDCSRVVTSPVLKRHLQVFLDCRSRPQCRVKVKVGARPEHARTPSSLQHSEELRSEECPRKGSGVVKLFCPVRNRPPDQLHWIGGNRASECRRGLCRTLAVAAGSVNFAMWLQGWWWWW

SEQ ID NO: 15229 - protein, 789 aa, Homo sapiens
MNIDVEFHIRHNYPWNKLPANVRQSLGNSQREYEKQVVLYSIRNQLRYRNNLVKHVKKDERRYYEELLKYSRDHLMLYPYHLSDIMVKGLRITPFSYYTGIMEDIMNSEKSYDSLPNFTAADCLRLLGIGRNQYIDLMNQCRSSKKFFRRKTARDLLPIKPVEIAIEAWWVVQAGYITEDDIKICTLPEKCAVDKIIDSGPQLSGSLDYNVVHSLYNKGFIYLDVPISDDSCIAVPPLEGFVMNRVQGDYFETLLYKIFVSIDEHTNVAELANVLEIDLSLVKNAVSMYCRLGFAHKKGQVINLDQLHSSWKNVPSVNRLKSTLDPQKMLLSWDGGESRSPVQEASSATDTDTNSQEDPADTASVSSLSLSTGHTKRIAFLFDSTLTAFLMMGNLSPNLKSHAVTMFEVGKLSDESLDSFLIELEKVQSTGEGEAQRYFDHALTLRNTILFLRHNKDLVAQTAQPDQPNYGFPLDLLRCESLLGLDPATCSRVLNKNYTLLVSMAPLTNEIRPVSSCTPQHIGPAIPEVSSVWFKLYIYHVTGQGPPSLLLSKGTRLRKLPDIFQSYDRLLITSWGHDPGVVPTSNVLTMLNDALTHSAVLIQGHGLHGIGETVHVPFPFDETELQGEFTRVNMGVHKALQILRNRVDLQHLCGYVTMLNASSQLADRKLSDASDERGEPDLASGSDVNGSTESFEMVIEEATIDSATKQTSGATTEADWVPLELCFGIPLFSSELNRKVCRKIAAHGLCRKESLQNLLHSSRKLSLQVLNFVHSFQVTKTKKSKWYLY

SEQ ID NO: 15230 - protein, 419 aa, Homo sapiens
MSCAGRAGPARLAALALLTCSLWPARADNASQEYYTALINVTVQEPGRGAPLTFRIDRGRYGLDSPKAEVRGQVLAPLPLHGVADHLGCDPQTRFFVPPNIKQWIALLQRGNCTFKEKISRAAFHNAVAVVIYNNKSKEEPVTMTHPGTGDIIAVMITELRGKDILSYLEKNISVQMTIAVGTRMPPKNFSRGSLVFVSISFIVLMIISSAWLIFYFIQKIRYTNARDRNQRRLGDAAKKAISKLTTRTVKKGDKETDPDFDHCAVCIESYKQNDVVRILPCKHVFHKSCVDPWLSEHCTCPMCKLNILKALGIVPNLPCTDNVAFDMERLTRTQAVNRRSALGDLAGDNSLGLEPLRTSGISPLPQDGELTPRTGEINIAVTSGHFFHRNSLSPRSLVYESEFSTIEPSLDMYDENKT

SEQ ID NO: 15231 - protein, 932 aa, Homo sapiens
MAPPQRHPQRSEQVLLLTLLGTLWGAAAAQIRYSIPEELEKGSFVGNIVKDLGLEPQELAEHGVRIVSRGRMQLFSLNPRNGSLVTAGRIDREELCAQSPRCLVSFNILVEDKLNLYPVEVEIVDINDNTPRFLKEELEVKILENAAPSSRFPLMEVYDPDVGMNSLQGFKLSGNSHFSVDVQSEAHGPKYPELVLEGTLDREGEAVYRLVLTAMDGGDPVRSSVAQILVTVLDVNDNTPMFTQPVYRVSVPENLPVGTPVLAVTATDQDEGVHGEVTYSFVKITEKISQIFCLNVLTGEISTSANLDYEDSSFYELGVEARDGPGLRDRAKVLITILDVNDNVPEVVVTSGSRTIAESAPPGTVIALFQVFDRDSGLNGLVTCSIPRSLPFELEKSVGNYYRLVTNAALDREEVFLYNITVTATDKGTPPLSTETIISLNVADTNDNPPTFPHSSYSVYVLENNPRGASIFSVNALDPDVDQNAQVSYSLAEDTLQGAPLSSYVSINSDTGILYALRSFDYEQLRDLQLWVTASDSGDPPLSSNVSLSLFVLDQNDNAPEILYPALPTDGSTGVELAPRSAEPGYLVTKVVAVDRDSGQNAWLSYRLLKASEPGLFSVGLHTGEVRTARALLDRDALKQSLVVAVQDHGQPPLSATVTLTVAVADRIPDILADLGSLEPSAKPNDSDLTLYLVVAVAAVSCVFLAFVIVLLALRLQRWHKSRLLQASGGGLASMPGSHFVGVEGVRAFLQTYSHEVSLTADSRKSHLIFPQPNYADTLINQESYEKSEPLLITQDLLETKGEPRQLQQAPPNTDWRFSQAQRPGTSGSQNGDDTGTWPNNQFDTEMLQAMILASASEAADGSSTLGGGAGTMGLSARYGPQFTLQHVPDYRQNVYIPGSNATLTNAAGKRDGKAPAGGNGNKKKSGKKEKK

SEQ ID NO: 15232 - protein, 131 aa, Homo sapiens
MFSTKALLLAGLISTALAGPWANICAGKSSNEIRTCDRHGCGQYSAQRSQRPHQGVDILCSAGSTVYAPFTGMIVGQEKPYQNKNAINNGVRISGREITTDTPIFNNYYPDQSAAVNIKTRSSTSKKMMTH

SEQ ID NO: 15233 - protein, 338 aa, Homo sapiens
MAQLGAVVAVASSFFCASLFSAVHKIEEGHIGVYYRGGALLTSTSGPGFHLMLPFITSYKSVQTTLQTDEVKNVPCGTSGGVMIYFDRIEVVNFLVPNAVYDIVKNYTADYDKALIFNKIHHELNQFCSVHTLQEVYIELFDQIDENLKLALQQDLTSMAPGLVIQAVRVTKPNIPEAIRRNYELMESEKTKLLIAAQKQKVVEKEAETERKKALIEAEKVAQVAEITYGQKVMEKETEKKISEIEDAAFLAREKAKADAECYTAMKIAEANKLKLTPEYLQLMKYKAIASNSKIYFGKDIPNMFMDSAGSVSKQFEGLADKLSFGLEDEPLETATKE

SEQ ID NO: 15234 - protein, 752 aa, Homo sapiens
MAKRSRSEDEDDDLQYADHDYEVPQQKGLKKLWNRVKWTRDEDDKLKKLVEQHGTDDWTLIASHLQNRSDFQCQHRWQKVLNPELIKGPWTKEEDQRVIELVQKYGPKRWSLIAKHLKGRIGKQCRERWHNHLNPEVKKSSWTEEEDRIIYEAHKRLGNRWAEIAKLLPGRTDNSIKNHWNSTMRRKVEQEGYLQDGIKSERSSSKLQHKPCAAMDHMQTQNQFYIPVQIPGYQYVSPEGNCIEHVQPTSAFIQQPFIDEDPDKEKKIKELEMLLMSAENEVRRKRIPSQPGSFSSWSGSFLMDDNMSNTLNSLDEHTSEFYSMDENQPVSAQQNSPTKFLAVEANAVLSSLQTIPEFAETLELIESDPVAWSDVTSFDISDAAASPIKSTPVKLMRIQHNEGAMECQFNVSLVLEGKKNTCNGGNSEAVPLTSPNIAKFSTPPAILRKKRKMRVGHSPGSELRDGSLNDGGNMALKHTPLKTLPFSPSQFFNTCPGNEQLNIENPSFTSTPICGQKALITTPLHKETTPKDQKENVGFRTPTIRRSILGTTPRTPTPFKNALAAQEKKYGPLKIVSQPLAFLEEDIREVLKEETGTDLFLKEEDEPAYKSCKQENTASGKKVRKSLVLDNWEKEESGTQLLTEDISDMQSENRFTTSLLMIPLLEIHDNRCNLIPEKQDINSTNKTYTLTKKKPNPNTSKVVKLEKNLQSNCEWETVVYGKTEDQLIMTEQARRYLSTYTATSSTSRALIL

SEQ ID NO: 15235 - protein, 191 aa, Homo sapiens
MNFLLSWVHWSLALLLYLHHAKWSQAAPMAEGGGQNHHEVVKFMDVYQRSYCHPIETLVDIFQEYPDEIEYIFKPSCVPLMRCGGCCNDEGLECVPTEESNITMQIMRIKPHQGQHIGEMSFLQHNKCECRPKKDRARQENPCGPCSERRKHLFVQDPQTCKCSCKNTDSRCKARQLELNERTCRCDKPRR

SEQ ID NO: 15236 - protein, 59 aa, Homo sapiens
MNYSLHLAFVCLSLFTERMCIQGSQFNVEVGRSDKLSLPGFENLTAGYNKFLRPNFGGE

SEQ ID NO: 15237 - protein, 53 aa, Homo sapiens
MVVSKMNKDAQMRAAINQKLIETGERERLKELLRAKLIECGWKDQLKAHCKGN

SEQ ID NO: 15238 - protein, 49 aa, Homo sapiens
MLGLRPPLLALVGLLSLGCVLSQECTKFKVSSCRECIESGPGCTWCQKL

SEQ ID NO: 15239 - protein, 105 aa, Homo sapiens
MALLALLLVVALPRVWTDANLTARQRDPEDSQRTDEGDNRVWCHVCERENTFECQNPRRCKWTEPYCVIAAVTVLRWLCSDGETQARGEAVSPGRAHALLLPQVL

SEQ ID NO: 15240 - protein, 100 aa, Homo sapiens
MARLLQASCLLSLLLAGFVSQSRGQEKSKNUMHYRKSLHHSVWSFWAFPATNLENRNQERTQRSFLPSSMSDQVEALSLISSSLRKGMSMERKSRNSTLS

SEQ ID NO: 15241 - protein, 96 aa, Homo sapiens
MNKDAQMRAAINQKLIETGERERLKELLRAKLIECGWKDQLKAHCKEVIKEKGLEHVTVDDLVAEITPKGRALVPDSVKKELLQRIRTFLAQHASL

SEQ ID NO: 15242 - protein, 86 aa, Homo sapiens
MPPPRTGRGLLWLGLVLSSVCVALGSETQANSTTDALNVLLIIVDDLRPSLGCYGDKLVRSPNIDQLASHSLLFQNAFAQQAVCAP

SEQ ID NO: 15243 - protein, 131 aa, Homo sapiens
MADPRVRQIKIKTGVVKRLVKEKVMYEKEAKQQEEKIEKMRAEDGENYDIKKQAGLQLLASSDPPTPASQSPGMISAEILQESRMMIPDCQRRLEAAYLDLQRILENEKDLEEAEEYKEARLVLDSVKLEA

SEQ ID NO: 15244 - protein, 157 aa, Homo sapiens
MDAMKRGLCCVLLLCGAVFVSPSQEIHARFRRGARSYQVICRDEKTQMIYQQHQSWLRPVLRSNRVEYCWCNSGRAQCHSVPVKSCSEPRCFNGGTCQQALYFSDFVCQCPEGFAGKCCEIDTRATCYEDQGISYRGTWSTAESGAECTNWNSSALA

SEQ ID NO: 15245 - protein, 122 aa, Homo sapiens
MAVVIRLLGLPFIAGPVDIRHFFTGLTIPDGGVHIIGGEIGEAFIIFATDEDARRAISRSGGFIKDSSVELFLSSKAEMQKTIEMKRTDRVGRGRPGSGTSGVDSLSNFIESVKEEASNSGY

SEQ ID NO: 15246 - protein, 950 aa, Homo sapiens
MLFSWREDPGAQCLLLSLLLLAASEVGSGQLHYSVSEEAKHGTFVGRIAQDLGLELAELVPRLFRVASKRHGDLLEVNLQNGILFVNSRIDREELCGRSAECSIHLEVIVDRPLQVFHVEVEVKDINDNAPVFPMAVKNLFISESRQPGSRFSLEGASDADIGTNSLLTYSLDSTEYFTLDVKRNDEEIKSLGLVLKKNLNREDTPKHYLLITAIDGGKPELTGTTQLKITVLDVNDNAPAFERTIYKVRLLENAPNGTLVVTVNATDLDEGVNKDIAYSFNTDMSADILSKFHLDPVNGQISVKGNIDFEESKSYEIQVEATDKGNPPMSDHCTVLLEIVDINDNVPELVIQSLSLPVLEDSPLSTVIALISVSDRDSGVNGQVTCSLTPHVPFKLVSTFKNYYSLVLDSPLDRESVSAYELVVTARDGGSPSLWATASVSVEVADVNDNAPAFSQSEYTVFVKENNPPGCHIFTVSARDADAQENALVSYSLVERRVGERALSSYVSVHAESGKVYALQPLDHEELELLQFQVSARDAGVPPLGSNVTLQVFVLDENDNAPALLMPRVGGIGGAVSELVPRSVGAGHVVAKVRAVDADSGYNAWLSYELQPGTGGARIPFRVGLYTGEISTTRALDEVDAPRHRLLVLVKDHGEPSLTATATVLVSLVESGQAPKASSQASAGATGPEAALVDVNVYLIVAICAVSSLLVLTLLLYTALRCSAPPTEGDCGPGKPTLVCSSAVGSWSYSQQRQQRVCSGEGLPKTDLMAFSPSLPPCPISRDREEKQDVDVDLSAKPRQPNPDWRYSASLRAGMHSSVHLEEAGILRAGPGGPDQQWPTVSSATPEPEAGEVSPPVGAGVNSNSWTFKYGPGNPKQSGPGELPDKFIIPGSPAIISIRQEPTNSQIDKSDFITFGKKEETKKKKKKKKGNKTQEKKEKGNSTTDNSDQ

SEQ ID NO: 15247 - protein, 52 aa, Homo sapiens
MNYSLHLAFVCLSLFTERMCIQGSQFNVEVGRSDKLSLPGFENLTAGYNKFL

SEQ ID NO: 15248 - protein, 643 aa, Homo sapiens
MLNMWKVRELVDKATNVVMNYSEIESKVREATNDDPWGPSGQLMGEIAKATFMYEQFPELMNMLWSRMLKDNKKNWRRVYKSLLLLAYLIRNGSERVVTSAREHIYDLRSLENYHFVDEHGKDQGINIRQKVKELVEFAQDDDRLREERKKAKKNKDKYVGVSSDSVGGFRYSERYDPEPKSKWDEEWDKNKSAFPFSDKLGELSDKIGSTIDDTISKFRRKDREDSPERCSDSDEEKKARRGRSPKGEFKDEEETVTTKHIHITQATETTTTRHKRTANPSKTIDLGAAAHYTGDKASPDQNASTHTPQSSVKTSVPSSKSSGDLVDLFDGTSQSTGGSADLFGGFADFGSAAASGSFPSQVTATSGNGDFGDWSAFNQAPSGPVASSGEFFGSASQPAVELVSGSQSALGPPPAASNSSDLFDLMGSSQATMTSSQSMNFSMMSTNTVGLGLPMSRSQPLQNVSTVLQKPNPLYNQNTDMVQKSVSKTLPSTWSDPSVNISLDNLLPGMQPSKPQQPSLNTMIQQQNMQQPMNVMTQSFGAVNLSSPSNMLPVRPQTNALIGGPMPMSMPNVMTGTMGMAPLGNTPMMNQSMMGMNMNIGMSAAGMGLTGTMGMGMPNIAMTSGTVQPKQDAFANFANFSK

SEQ ID NO: 15249 - protein, 931 aa, Homo sapiens
MASPPRGWGCGELLLPFMLLGTLCEPGSGQIRYSMPEELDKGSFVGNIAKDLGLEPQELAERGVRIVSRGRTQLFALNPRSGSLVTAGRIDREELCAQSPLCVVNFNILVENKMKIYGVEVEIIDINDNFPRFRDEELKVKVNENAAAGTRLVLPFARDADVGVNSLRSYQLSSNLHFSLDVVSGTDGQKYPELVLEQPLDREKETVHDLLLTALDGGDPVLSGTTHIRVTVLDANDNAPLFTPSEYSVSVPENIPVGTRLLMLTATDPDEGINGKLTYSFRNEEEKISETFQLDSNLGEISTLQSLDYEESRFYLMEVVAQDGGALVASAKVVVTVQDVNDNAPEVILTSLTSSISEDCLPGTVIALFSVHDGDSGENGEIACSIPRNLPFKLEKSVDNYYHLLTTRDLDREETSDYNITLTVMDHGTPPLSTESHIPLKVADVNDNPPNFPQASYSTSVTENNPRGVSIFSVTAHDPDSGDNARVTYSLAEDTFQGAPLSSYVSINSDTGVLYALRSFDYEQLRDLQLWVTASDSGNPPLSSNVSLSLFVLDQNDNTPEILYPALPTDGSTGVELAPRSAEPGYLVTKVVAVDKDSGQNAWLSYRLLKASEPGLFAVGLHTGEVRTARALLDRDALKQSLVVAVEDHGQPPLSATFTVTVAVADRIPDILADLGSIKTPIDPEDLDLTLYLVVAVAAVSCVFLAFVIVLLVLRLRRWHKSRLLQAEGSRLAGVPASHFVGVDGVRAFLQTYSHEVSLTADSRKSHLIFPQPNYADTLLSEESCEKSEPLLMSDKVDANKEERRVQQAPPNTDWRFSQAQRPGTSGSQNGDDTGTWPNNQFDTEMLQAMILASASEAADGSSTLGGGAGTMGLSARYGPQFTLQHVPDYRQNVYIPGSNATLTNAAGKRDGKAPAGGNGNKKKSGKKEKK

SEQ ID NO: 15250 - protein, 451 aa, Homo sapiens
MVELGKFERKEFKSSSLQDGHTKMEEAPTHLNSFLKKEGLTFNRKRKWELDSYPIMLWWSPLTGETGRLGQCGADACFFTINRTYLHHHMTKAFLFYGTDFNIDSLPLPRKAHHDWAVFHEESPKNNYKLFHKPVITLFNYTATFSRHSHLPLTTQYLESIEVLKSLRYLVPLQSKNKLRKRLAPLVYVQSDCDPPSDRDSYVRELMTYIEVDSYGECLRNKDLPQQLKNPASMDADGFYRIIAQYKFILAFENAVCDDYITEKFWRPLKLGVVPVYYGSPSITDWLPSNKSAILVSEFSHPRELASYIRRLDSDDRLYEAYVEWKLKGEISNQRLLTALRERKWGVQDVNQDNYIDAFECMVCTKVWANIRLQEKGLPPKRWEAEDTHLSCPEPTVFAFSPLRTPPLSSLREMWISSFEQSKKEAQALRWLVDRNQNFSSQEFWGLVFKD

SEQ ID NO: 15251 - protein, 200 aa, Homo sapiens
MAEEVISDFDMTLSRFAYNGKRCPSSYNILDNSKIISEECRKELTALLHHYYPIEIDPHRTVKEKLPHMVEWWTKAHNLLCQQKIQKFQIAQVVRESNAMLREGYKTFFNTLYHNNIPLFIFSAGIGDILEEIIRQMKVFHPNIHIVSNYMDFNEDVEERRERYMDSYDIVLEKDETLDVVNGLLQHILCQGVQLEMQGP

SEQ ID NO: 15252 - protein, 135 aa, Homo sapiens
MMKTLLLFVGLLLTWESGQVLGDQTVSDNELQEMSNQGSKYVNKEIQNAVNGVKQIKTLIEKTNEERKTLLSNLEEAKKKKEDALNETRESETKLKELPGVCNETMMALWEECKPCLKQTCMKFYARVCRSGSGL

SEQ ID NO: 15253 - protein, 248 aa, Homo sapiens
MGNPGTFKRGLLLSALSYLGFETYQVISQAAVVHATAKVEEILEQADYLYESGETEKLYQLLTQYKESEDAELLWRLARASRDVAQLSRTSEEEKKLLVYEALEYAKRALEKNESSFASHKWYAICLSDVGDYEGIKAKIANAYIIKEHFEKAIELNPKDATSIHLMGIWCYTFAEMPWYQRRIAKMLFATPPSSTYEKALGYFHRAEQGKTYLKLHNKKLAAFWLMKAKDYPAHTEEDKQVKRNRSS

SEQ ID NO: 15254 - protein, 1129 aa, Homo sapiens
MRSSASRLSSFSSRDSLWNRMPDQISVSEFIAETTEDYNSPTTSSFTTRLHNCRNTVTLLEEALDQDRTALQKVKKSVKAIYNSGQDHVQNEENYAQVLDKFGSNFLSRDNPDLGTAFVKFSTLTKELSTLLKNLLQGLSHNVIFTLDSLLKGDLKGVKGDLKKPFDKAWKDYETKFTKIEKEKREHAKQHGMIRTEITGAEIAEEMEKERRLFQLQMCEYLIKVNEIKTKKGVDLLQNLIKYYHAQCNFFQDGLKTADKLKQYIEKLAADLYNIKQTQDEEKKQLTALRDLIKSSLQLDQKEDSQSRQGGYSMHQLQGNKEYGSEKKGYLLKKSDGIRKVWQRRKCSVKNGILTISHATSNRQPAKLNLLTCQVKPNAEDKKSFDLISHNRTYHFQAEDEQDYVAWISVLTNSKEEALTMAFRGEQSAGENSLEDLTKAIIEDVQRLPGNDICCDCGSSEPTWLSTNLGILTCIECSGIHREMGVHISRIQSLELDKLGTSELLLAKNVGNNSFNDIMEANLPSPSPKPTPSSDMTVRKEYITAKYVDHRFSRKTCSTSSAKLNELLEAIKSRDLLALIQVYAEGVELMEPLLEPGQELGETALHLAVRTADQTSLHLVDFLVQNCGNLDKQTALGNTVLHYCSMYSKPECLKLLLRSKPTVDIVNQAGETALDIAKRLKATQCEDLLSQAKSGKFNPHVHVEYEWNLRQEEIDESDDDLDDKPSPIKKERSPRPQSFCHSSSISPQDKLALPGFSTPRDKQRLSYGAFTNQIFVSTSTDSPTSPTTEAPPLPPRNAGKGPTGPPSTLPLSTQTSSGSSTLSKKRPPPPPPGHKRTLSDPPSPLPHGPPNKGAVPWGNDGGPSSSSKTTNKFEGLSQQSSTSSAKTALGPRVLPKLPQKVALRKTDHLSLDKATIPPEIFQKSSQLAELPQKPPPGDLPPKPTELAPKPQIGDLPPKPGELPPKPQLGDLPPKPQLSDLPPKPQMKDLPPKPQLGDLLAKSQTGDVSPKAQQPSEVTLKSHPLDLSPNVQSRDAIQKQASEDSNDLTPTLPETPVPLPRKINTGKNKVRRVKTIYDCQADNDDELTFIEGEVIIVTGEEDQEWWIGHIEGQPERKGVFPVSFVHILSD

SEQ ID NO: 15255 - protein, 182 aa, Homo sapiens
MFLLLALLTELGRLQAHEGSEGIFLHVTVPRKIKSNDSEVSERKMIYIITIDGQPYTLHLGKQSFLPQNFLVYTYNETGSLHSVSPYFMMHCHYQGYAAEFPNSFVTLSICSGLRGFLQFENISYGIEPVESSARFEHIIYQMKNNDPNVSILAVNYSHIWQKDQPYKVPLNSQVTVIILML

SEQ ID NO: 15256 - protein, 352 aa, Homo sapiens
MASRKEGTGSTATSSSSTAGAAGKGKGKGGSGDSAVKQVQIDGLVVLKIIKHYQEEGQGTEVVQGVLLGLVVEDRLEITNCFPFPQHTEDDADFDEVQYQMEMMRSLRHVNIDHLHVGWYQSTYYGSFVTRALLDSQFSYQHAIEESVVLIYDPIKTAQGSLSLKAYRLTPKLMEVCKEKDFSPEALKKANITFEYMFEEVPIVIKNSHLINVLMWELEKKSAVADKHELLSLASSNHLGKNLQLLMDRVDEMSQDIVKYNTYMRNTSKQQQQKHQYQQRRQQENMQRQSRGEPPLPEEDLSKLFKPPQPPARMDSLLIAGQINTYCQNIKEFTAQNLGKLFMAQALQEYNN

SEQ ID NO: 15257 - protein, 130 aa, Homo sapiens
MKFLIFAFFGGVHLLSLCSGKAICKNGISKRTFEEIKEEIASCGDVAKAIINLAVYGKAQNRSYERLALLVDTVGPRLSGSKNLEKAIQIMYQNLQQDGLEKVHLEPVRIPHWERGEESAVMLEPRIHKI

SEQ ID NO: 15258 - protein, 443 aa, Homo sapiens
MISAEDCEFIQRFEMKRSPEEKQEMLQTEGSQCAKTFINLMTHICKEQTVQYILTMVDDMLQENHQRVSIFFDYARCSKNTAWPYFLPMLNRQDPFTVHMAARIIAKLAAWGKELMEGSDLNYYFNWIKTQLSSQKLRGSGVAVETGTVSSSDSSQYVQCVAGCLQLMLRVNEYRFAWVEADGVNCIMGVLSNKCGFQLQYQMIFSIWLLAFSPQMCEHLRRYNIIPVLSDILQESVKEKVTRIILAAFRNFLEKSTERETRQEYALAMIQCKVLKQLENLEQQKYDDEDISEDIKFLLEKLGESVQDLSSFDEYSSELKSGRLEWSPVHKSEKFWRENAVRLNEKNYELLKILTKLLEVSDDPQVLAVAAHDVGEYVRHYPRGKRVIEQLGGKQLVMNHMHHEDQQVRYNALLAVQKLMVHNWEYLGKQLQSEQPQTAAARS

SEQ ID NO: 15259 - protein, 50 aa, Homo sapiens
MGPSCPVFLSFTKLSLWWLLLTPAGGEEAKRPPPRAPGDPLSSPSPTALP

SEQ ID NO: 15260 - protein, 1475 aa, Homo sapiens
MSSAVGPRGPRPPTVPPPMQELPDLSHLTEEERNIIMAVMDRQKEEEEKEEAMLKCVVRDMAKPAACKTPRNAENQPHQPSPRLHQQFESYKEQVRKIGEEARRYQGEHKDDAPTCGICHKTKFADGCGHLCSYCRTKFCARCGGRVSLRSNNEDKVVMWVCNLCRKQQEILTKSGAWFFGSGPQQTSQDGTLSDTATGAGSEVPREKKARLQERSRSQTPLSTAAASSQDAAPPSAPPDRSKGAEPSQQALGPEQKQASSRSRSEPPRERKKTPGLSEQNGKGALKSERKRVPKTSAQPVEGAVEERERKERRESRRLEKGRSQDYPDTPEKRDEGKAADEEKQRKEEDYQTRYRSDPNLARYPVKPPPEEQQMRMHARVSRARHERRHSDVALPRTEAGAALPEGKAGKRAPAAARASPPDSPRAYSAERTAETRAPGAKQLTNHSPPAPRHGPVPAEAPELKAQEPLRKQSRLDPSSAVLMRKAKREKVETMLRNDSLSSDQSESVRPSPPKPHRSKRGGKKRQMSVSSSEEEGVSTPEYTSCEDVELESESVSEKGDLDYYWLDPATWHSRETSPISSHPVTWQPSKEGDRLIGRVILNKRTTMPKDSGALLGLKVVGGKMTDLGRLGAFITKVKKGSLADVVGHLRAGDEVLEWNGKPLPGATNEEVYNIILESKSEPQVEIIVSRPIGDIPRIPESSHPPLESSSSSFESQKMERPSISVISPTSPGALKDAPQVLPGQLSVKLWYDKVGHQLIVNVLQATDLPARVDGRPRNPYVKMYFLPDRSDKSKRRTKTVKKILEPKWNQTFVYSHVHRRDFRERMLEITVWDQPRVQEEESEFLGEILIELETALLDDEPHWYKLQTHDESSLPLPQPSPFMPRRHIHGESSSKKLQRSQRISDSDISDYEVDDGIGVVPPGYRSSARESKSTTLTVPEQQRTTHHRSRSVSPHRGNDQGKPRSRLPNVPLQRSLDEIHPTRRSRSPTRHHDASRSPVDHRTRDVDSQYLSEQDSELLMLPRAKRGRSAECLHTTRMHRQRSPTQSPPADTSFSSRRGRQLPQVPVRSGSIEQASLVVEERTRQMKMKVHRFKQTTGSGSSQELDREQYSKYNIHKDQYRSCDNVSAKSSDSDVSDVSAISRTSSASRLSSTSFMSEQSERPRGRIRRMGTSGRSIMKSTSVSGEMYTLEHNDGSQSDTAVGTVGAGGKKRRSSLSAKVVAIVSRRSRSTSQLSQTESGHKKLKSTIQRSTETGMAAEMRKMVRQPSRESTDGSINSYSSEGNLIFPGVRLGADSQFSDFLDGLGPAQLVGRQTLATPAMGDIQIGMEDKKGQLEVEVIRARSLTQKPGSKSTPAPYVKVYLLENGACIAKKKTRIARKTLDPLYQQSLVFDESPQGKVLQVIVWGDYGRMDHKCFMGVAQILLEELDLSSMVIGWYKLFPPSSLVDPTLTPLTRRASQSSLESSTGPPCIRS

SEQ ID NO: 15261 - protein, 971 aa, Homo sapiens
MGVAGRNRPGAAWAVLLLLLLLPPLLLLAGAVPPGRGRAAGPQEDVDECAQGLDDCHADALCQNTPTSYKCSCKPGYQGEGRQCEDIDECGNELNGGCVHDCLNIPGNYRCTCFDGFMLAHDGHNCLDVDECLENNGGCQHTCVNVMGSYECCCKEGFFLSDNQHTCIHRSEEGLSCMNKDHGCSHICKEAPRGSVACECRPGFELAKNQRDCILTCNHGNGGCQHSCDDTADGPECSCHPQYKMHTDGRSCLEREDTVLEVTESNTTSVVDGDKRVKRRLLMETCAVNNGGCDRTCKDTSTGVHCSCPVGFTLQLDGKTCKDIDECQTRNGGCDHFCKNIVGSFDCGCKKGFKLLTDEKSCQDVDECSLDRTCDHSCINHPGTFACACNRGYTLYGFTHCGDTNECSINNGGCQQVCVNTVGSYECQCHPGYKLHWNKKDCVEVKGLLPTSVSPRVSLHCGKSGGGDGCFLRCHSGIHLSSGLQGAYSVTCGSSSPLRNKQQKSNDSAFGDVTTIRTSVTFKLNEGKCSLKNAELFPEGLRPALPEKHSSVKESFRYVNLTCSSGKQVPGAPGRPSTPKEMFITVEFELETNQKEVTASCDLSCIVKRTEKRLRKAIRTLRKAVHREQFHLQLSGMNLDVAKKPPRTSERQAESCGVGQGHAENQCGLCQPGEYSADGFAPCQLCALGTFQPEAGRTSCFPCGGGLATKHQGATSFQDCETRVQCSPGHFYNTTTHRCIRCPVGTYQPEFGKNNCVSCPGNTTTDFDGSTNITQCKNRRCGGELGDFTGYIESPNYPGNYPANTECTWTINPPPKRRILIVVPEIFLPIEDDCGDYLVMRKTSSSNSVTTYETCQTYERPIAFTSRSKKLWIQFKSNEGNSARGFQVPYVTYDEDYQELIEDIVRDGRLYASENHQEILKDKKLIKALFDVLAHPQNYFKYTAQESREMFPRSFIRLLRSKVSRFLRPYK

SEQ ID NO: 15262 - protein, 937 aa, Homo sapiens
MEKMLAGCFLLILGQIVLLPAEARERSRGRSISRGRHARTHPQTALLESSCENKRADLVFIIDSSRSVNTHDYAKVKEFIVDILQFLDIGPDVTRVGLLQYGSTVKNEFSLKTFKRKSEVERAVKRMRHLSTGTMTGLAIQYALNIAFSEAEGARPLRENVPRVIMIVTDGRPQDSVAEVAAKARDTGILIFAIGVGQVDFNTLKSIGSEPHEDHVFLVANFSQIETLTSVFQKKLCTAHMCSTLEHNCAHFCINIPGSYVCRCKQGYILNSDQTTCRIQDLCAMEDHNCEQLCVNVPGSFVCQCYSGYALAEDGKRCVAVDYCASENHGCEHECVNADGSYLCQCHEGFALNPDKKTCTKIDYCASSNHGCQHECVNTDDSYSCHCLKGFTLNPDKKTCRRINYCALNKPGCEHECVNMEESYYCRCHRGYTLDPNGKTCSRVDHCAQQDHGCEQLCLNTEDSFVCQCSEGFLINEDLKTCSRVDYCLLSDHGCEYSCVNMDRSFACQCPEGHVLRSDGKTCAKLDSCALGDHGCEHSCVSSEDSFVCQCFEGYILREDGKTCRRKDVCQAIDHGCEHICVNSDDSYTCECLEGFRLAEDGKRCRRKDVCKSTHHGCEHICVNNGNSYICKCSEGFVLAEDGRRCKKCTEGPIDLVFVIDGSKSLGEENFEVVKQFVTGIIDSLTISPKAARVGLLQYSTQVHTEFTLRNFNSAKDMKKAVAHMKYMGKGSMTGLALKHMFERSFTQGEGARPLSTRVPRAAIVFTDGRAQDDVSEWASKAKANGITMYAVGVGKAIEEELQEIASEPTNKHLFYAEDFSTMDEISEKLKKGICEALEDSDGRQDSPAGELPKTVQQPTVQHRYLFEEDNLLRSTQKLSHSTKPSGSPLEEKHDQCKCENLIMFQNLANEEVRKLTQRLEEMTQRMEALENRLRYR

SEQ ID NO: 15263 - protein, 178 aa, Homo sapiens
MTNPAIQNDFSYYRRTLSRMRINNVPAEGENEVNNELANRMSLFYAEATPMLKTLSDATTKFVSENKNLPIENTTDCLSTMASVCRVMLETPEYRSRFTNEETVSFCLRVMVGVIILYDHVHPVGAFAKTSKIDMKGCIKVLKDQPPNSVEGLLNALRYTTKHLNDETTSKQIKSMLQ

SEQ ID NO: 15264 - protein, 359 aa, Homo sapiens
MILANVFCLFFFLGEEFYEASPYEPVTSRLSDIFRLASIFSGTGADPVVSAKSNHCLDAAKACNLNDNCKKLRSSYISICNREISPTERCNRRKCHKALRQFFDRVPSEYTYRMLFCSCQDQACAERRRQTILPSCSYEDKEKPNCLDLRGVCRTDHLCRSRLADFHANCRASYQTVTSCPADNYQACLGSYAGMIGFDMTPNYVDSSPTGIVVSPWCSCRGSGNMEEECEKFLRDFTENPCLRNAIQAFGNGTDVNVSPKGPSFQATQAPRVEKTPSLPDDLSDSTSLGTSVITTCTSVQEQGLKANNSKELSMCFTELTTNIIPGSNKVIKPNSGPSRARPSAALTVLSVLMLKLAL

SEQ ID NO: 15265 - protein, 101 aa, Homo sapiens
MVVSKMNKDAQMRAAINQKLIETGERERLKELLRAKLIECGWKDQLKAHCKEVIKEKGLEHVTVDDLVAEITPKGRALVPDSVKKELLQRIRTFLAQHASL

SEQ ID NO: 15266 - protein, 97 aa, Homo sapiens
MEEISLANLDTNKLEAIAQEIYVDLIEDSCLGFCFEVHRAVKCGYFYLEFAETGSVKDFGIQPVEDKGACRLPLCSLPGEPGNGPDQQLQRSPPEFQ

SEQ ID NO: 15267 - protein, 191 aa, Homo sapiens
MNFLLSWVHWSLALLLYLHHAKWSQAAPMAEGGGQNHHEVVKFMDVYQRSYCHPIETLVDIFQEYPDEIEYIFKPSCVPLMRCGGCCNDEGLECVPTEESNITMQIMRIKPHQGQHIGEMSFLQHNKCECRPKKDRARQENPCGPCSERRKHLFVQDPQTCKCSCKNTDSRCKARQLELNERTCRSLTRKD

SEQ ID NO: 15268 - protein, 158 aa, Homo sapiens
MESWWGLPCLAFLCFLMHARDIYPKPKPPYYPQPENPDSGGNIYPRPKPRPQPQPGNSGNSGGYFNDVDRDDGRYPPRPRPRPPAGGGGGGYSSYGNSDNTHGGDHHSTYGNPEGNMVAKIVSPIVSVVVVTLLGAAASYFKLNNRRNCFRTHEPENV

SEQ ID NO: 15269 - protein, 121 aa, Homo sapiens
MQFRLFSFALIILNCMDYSHCQGNRWRRSKRASYVSNPICKGCLSCSKDNGCSRCQQKLFFFLRREGMRQYGECLHSCPSGYYGHRAPDMNRCARCRIENCDSCFSKDFCTKCKVGFYLHR

SEQ ID NO: 15270 - protein, 198 aa, Homo sapiens
MAPTCVFLASKVEEFGVVSNTRLIAAATSVLKTRFSYAFPKEFPYRMNHILECEFYLLELMDCCLIVYHPYRPLLQYVQDMGQEDMLLPLAWRIVNDTYRTDLCLLYPPFMIALACLHVACVVQQKDARQWFAELSVDMEKILEIIRVILKLYEQWKNFDERKEMATILSKMPKPKPPPNSEGEQGPNGSQNSSYSQS

SEQ ID NO: 15271 - protein, 63 aa, Homo sapiens
MPGVARLPLLLGLLLLPRPGRPLDLADYTYDLAEEDDSEPLNYKDPCKAAAFLGDIALDEEDL

SEQ ID NO: 15272 - protein, 932 aa, Homo sapiens
MAAQPRGGDYRGFFLLSILLGTPWEAWAGRILYSVSEETDKGSFVGDIAKDLGLEPRELAERGVRIISRGRTQLFALNQRSGSLVTAGRIDREEICAQSARCLVNFNILMEDKMNLYPIDVEIIDINDNVPRFLTEEINVKIMENTAPGVRFPLSEAGDPDVGTNSLQSYQLSPNRHFSLAVQSGDDETKYPELVLERVLDREEERVHHLVLTASDGGDPPRSSTAHIQVTVVDVNDHTPVFSLPQYQVTVPENVPVGTRLLTVHAIDLDEGVNGEVTYSFRKITPKLPKMFHLNSLTGEISTLEGLDYEETAFYEMEVQAQDGPGSLTKAKVLITVLDVNDNAPEVTMTSLSSSIPEDTPLGTVIALFYLQDRDSGKNGEVTCTIPENLPFKLEKSIDNYYRLVTTKNLDRETLSLYNITLKATDGGTPPLSRETHIFMQVADTNDNPPTFPHSSYSVYIAENNPRGASIFLVTAQDHDSEDNAQITYSLAEDTIQGAPVSSYVSINSDTGVLYALQSFDYEQLRELQLRVTAHDSGDPPLSSNMSLSLFVLDQNDNPPEILYPALPTDGSTGMELAPRSAEPGYLVTKVVAVDKDSGQNAWLSYLLLKASEPGLFAVGLYTGEVRTARALLDRDALKQSLVVAVQDHGQPPLSATVTLTVAVADSIPEVLADLGSLEPSDGPYNYDLTLYLVVAVATVSCVFLAFVLVLLALRLRRWHKSRLLQASEGGLANVPTSHFVGMDGVQAFLQTYSHEVSLTADSRKSHLIFPQPNYVDMLISQESCEKNDSLLTSVDFQECKENLPSIQQAPPNTDWRFSQAQRPGTSGSQNGDDTGTWPNNQFDTEMLQAMILASASEAADGSSTLGGGAGTMGLSARYGPQFTLQHVPDYRQNVYIPGSNATLTNAAGKRDGKAPAGGNGNKKKSGKKEKK

SEQ ID NO: 15273 - protein, 88 aa, Homo sapiens
MAASRLPPATLTLKQFVRRQQVLLLYRRILQTIRQVPNDSDRKYLKDWAREEFRRNKSATEEDTIRMMITQGNMQLKELEKTLALAKS

SEQ ID NO: 15274 - protein, 239 aa, Homo sapiens
MRLPGAMPALALKGELLLLSLLLLLEPQISQGLVVTPPGPELVLNVSSTFVLTCSGSAPVVWERMSQEPPQEMAKAQDGTFSSVLTLTNLTGLDTGEYFCTHNDSRGLETDERKRLYIFVPDPTVGFLPNDAEELFIFLTEITEITIPCRVTDPQLVVTLHEKKGDVALPVPYDHQRGFSGIFEDRSYICKTTIGDREVDSDAYYVYRLQGEPPFWPDAQQSVIHQRLCERSADCGPPG

SEQ ID NO: 15275 - protein, 97 aa, Homo sapiens
MSGAGRALAALLLAASVLSAALLAPGGSSGRDAQAAPPRDLDKKRHAELKMDQALLLIHNELLWTNLTVYWKSECCYHVGIQIWRIWKLFSLGKEHP

SEQ ID NO: 15276 - protein, 668 aa, Homo sapiens
MVAERTHKAAATGARGPGELGAPGTVALVAARAERGARLPSPGSCGLLTLALCSLALSLLAHFRTAELQARVLRLEAERGEQQMETAILGRVNQLLDEKWKLHSRRRREAPKTSPGCNCPPGPPGPTGRPGLPGDKGAIGMPGRVGSPGDAGLSIIGPRGPPGQPGTRGFPGFPGPIGLDGKPGHPGPKGDMGLTGPPGQPGPQGQKGEKGQCGEYPHRECLSSMPAALRSSQIIALKGEQSQASIQGPPGPPGPPGPSGPLGHPGLPGPMGPPGLPGPPGPKGDPGIQGYHGRKGERGMPGMPGKHGAKGAPGIAVAGMKGEPGIPGTKGEKGAEGSPGLPGLLGQKGEKGDAGNSIGGGRGEPGPPGLPGPPGPKGEAGVDGQVGPPGQPGDKGERGAAGEQGPDGPKGSKGEPGKGEMVDYNGNINEALQEIRTLALMGPPGLPGQIGPPGAPGIPGQKGEIGLPGPPGHDGEKGPRGKPGDMGPPGPQGPPGKDGPPGVKGENGHPGSPGEKGEKGETGQAGSPVPGLPGPEGPPGPPGLQGVPGPKGEAGLDGAKGEKGFQGEKGDRGPLGLPGTPGPIGVPGPAGPKGERGSKGDPGMTGPTGAAGLPGLHGPPGDKGNRGERGKKGSRGPKGDKGDQGAPGLDAPCPLGEDGLPVQGCWNK

SEQ ID NO: 15277 - protein, 440 aa, Homo sapiens
MAVREKVFDVIIRCFKRHGAEVIDTPVFELKETLMGKYGEDSKLIYDLKDQGGELLSLRYDLTVPFARYLAMNKLTNIKRYHIAKVYRRDNPAMTRGRYREFYQCDFDIAGNFDPMIPDAECLKIMCEILSSLQIGDFLVKVNDRRILDGMFAICGVSDSKFRTICSSVDKLDKVSWEEVKNEMVGEKGLAPEVADRIGDYVQQHGGVSLVEQLLQDPKLSQNKQALEGLGDLKLLFEYLTLFGIDDKISFDLSLARGLDYYTGVIYEAVLLQTPAQAGEEPLGVGSVAAGGRYDGLVGMFDPKGRKVPCVGLSIGVERIFSIVEQRLEALEEKIRTTETQVLVASAQKKLLEERLKLVSELWDAGIKAELLYKKNPKLLNQLQYCEEAGIPLVAIIGEQELKDGVIKLRSVTSREEVDVRREDLVEEIKRRTGQPLCIC

SEQ ID NO: 15278 - protein, 217 aa, Homo sapiens
MLQGLLPVSLLLSVAVSAIKELPGVKKYEVVYPIRLHPLHKREAKEPEQQEQFETELKYKMTINGKIAVLYLKKNKNLLAPGYTETYYNSTGKEITTSPQIMDDCYYQGHILNEKVSDASISTCRGLRGYFSQGDQRYFIEPLSPIHRDGQEHALFKYNPDEKNYDSTCGMDGVLWAHDLQQNIALPATKLVKLKDRKVQEHEKYIEYYLVLDNGEF

SEQ ID NO: 15279 - protein, 170 aa, Homo sapiens
MWGRLWPLLLSILTATAVPGPSLRRPSRELDATPRMTIPYEELSGTRHFKGQAQNYSTLLLEEASARLLVGARGALFSLSANDIGDGAHKEIHWEASPEMQSKCHQKGKNNQTECFNHVRFLQRLNSTHLYACGTHAFQPLCAAIDAEAFTLPTSFEEGKEKCPYDPARG

SEQ ID NO: 15280 - protein, 443 aa, Homo sapiens
MLSSFPVVLLETMSHYTDEPRFTIEQIDLLQRLRRTGMTKHEILHALETLDRLDQEHSDKFGRRSSYGGSSYGNSTNNVPASSSTATASTQTQHSGMSPSPSNSYDTSPQPCTTNQNGRENNERLSTSNGKMSPTRYHANSMGQRSYSFEASEEDLDVDDKVEELMRRDSSVIKEEIKAFLANRRISQAVVAQVTGISQSRISHWLLQQGSDLSEQKKRAFYRWYQLEKTNPGATLSMRPAPIPIEDPEWRQTPPPVSATSGTFRLRRGSRFTWRKECLAVMESYFNENQYPDEAKREEIANACNAVIQKPGKKLSDLERVTSLKVYNWFANRRKEIKRRANIAAILESHGIDVQSPGGHSNSDDVDGNDYSEQDTWQVRNGEEEEGRSSEGGREAEKDDSTSHSDHQDPISLAVEMAAVNHTILALARQGANEIKTEALDDD

SEQ ID NO: 15281 - protein, 38 aa, Homo sapiens
YSTPVFSQKMTVWILLLLSLYPGRKLSSYPHKLRFENE

SEQ ID NO: 15282 - protein, 35 aa, Homo sapiens
MAMTWIVFSLWPLTVFMGHIGGHSLFSCEPITLRM

SEQ ID NO: 15283 - protein, 73 aa, Homo sapiens
MKIFLPVLLAALLGVERASSLMCFSCLNQKSNLYCLKPTICSDQDNYCVTVSASAGIGECQASDRAFLPWPSP

SEQ ID NO: 15284 - protein, 293 aa, Homo sapiens
MPTSSSFKHRIKEQEDYIRDWTAHREEIARISQDLALIAREINDVAGEIDSVTSSGTAPSTTLVDRVFDESLNFRKIPPLVHSKTPEGNNGRSGDPRPQAAEPPDHLTITRRRTWSRDEVMGDNLLLSSVFQFSKKIRQSIDKTAGKIRILFKDKDRNWDDIESKLRAESEVPIVKTSSMEISSILQELKRVEKQLQAINAMIDPDGTLEALNNMGFPSAMLPSPPKQKSSPVNNHHSPGQTPTLGQPEARALHPAAVSAAAEFENAESEADFSIHFNRFNPDGEEEDVTVQE

SEQ ID NO: 15285 - protein, 702 aa, Homo sapiens
MWGRLWPLLLSILTATAVPGPSLRRPSRELDATPRMTIPYEELSGTRHFKGQAQNYSTLLLEEASARLLVGARGALFSLSANDIGDGAHKEIHWEASPEMQSKCHQKGKNNQTECFNHVRFLQRLNSTHLYACGTHAFQPLCAAIDAEAFTLPTSFEEGKEKCPYDPARGFTGLIIDGGLYTATRYEFRSIPDIRRSRHPHSLRTEETPMHWLNDAEFVFSVLVRESKASAVGDDDKVYYFFTERATEEGSGSFTQSRSSHRVARVARVCKGDLGGKKILQKKWTSFLKARLICHIPLYETLRGVCSLDAETSSRTHFYAAFTLSTQWKTLEASAICRYDLAEIQAVFAGPYMEYQDGSRRWGRYEGGVPEPRPGSCITDSLRSQGYNSSQDLPSLVLDFVKLHPLMARPVVPTRGRPLLLKRNIRYTHLTGTPVTTPAGPTYDLLFLGTADGWIHKAVVLGSGMHIIEETQVFRESQSVENLVISLLQHSLYVGAPSGVIQLPLSSCSRYRSCYDCILARDPYCGWDPGTHACAAATTIANRSQGSRTALIQDIERGNRGCESSRDTGRALQVHMGSMSPPSAWPCVLDGPETRQDLCQPPKPCVHSHAHMEECLSAGLQCPHPHLLLVHSCFIPASGLGVPSQLPHPIWSSSPAPCGDLFVKSLGTGQPGEVRLHHSPPLPSCVALVNQPPHSPWSFSRV

SEQ ID NO: 15286 - protein, 189 aa, Homo sapiens
MNYSLHLAFVCLSLFTERMCIQGSQFNVEVGRSDKLSLPGFENLTAGYNKFLRPNFGGEPVQIALTLDIASISSISESNMDYTATIYLRQRWMDQRLVFEGNKSFTLDARLVEFLWVPDTYIVESKKSFLHEVTVGNRLIRLFSNGTVLYALRITTTVACNMDLSKYPMDTQTCKLQLESWGYDGNDVE

SEQ ID NO: 15287 - protein, 915 aa, Homo sapiens
MEKMLAGCFLLILGQIVLLPAEARERSRGRSISRGRHARTHPQTALLESSCENKRADLVFIIDSSRSVNTHDYAKVKEFIVDILQFLDIGPDVTRVGLLQYGSTVKNEFSLKTFKRKSEVERAVKRMRHLSTGTMTGLAIQYALNIAFSEAEGARPLRENVPRVIMIVTDGRPQDSVAEVAAKARDTGILIFAIGVGQVDFNTLKSIGSEPHEDHVFLVANFSQIETLTSVFQKKLCTAHMCSTLEHNCAHFCINIPGSYVCRCKQGYILNSDQTTCRIQDLCAMEDHNCEQLCVNVPGSFVCQCYSGYALAEDGKRCVAVDYCASENHGCEHECVNADGSYLCQCHEGFALNPDKKTCTRINYCALNKPGCEHECVNMEESYYCRCHRGYTLDPNGKTCSRVDHCAQQDHGCEQLCLNTEDSFVCQCSEGFLINEDLKTCSRVDYCLLSDHGCEYSCVNMDRSFACQCPEGHVLRSDGKTCAKLDSCALGDHGCEHSCVSSEDSFVCQCFEGYILREDGKTCRRKDVCQAIDHGCEHICVNSDDSYTCECLEGFRLAEDGKRCRRKDVCKSTHHGCEHICVNNGNSYICKCSEGFVLAEDGRRCKKCTEGPIDLVFVIDGSKSLGEENFEVVKQFVTGIIDSLTISPKAARVGLLQYSTQVHTEFTLRNFNSAKDMKKAVAHMKYMGKGSMTGLALKHMFERSFTQGEGARPLSTRVPRAAIVFTDGRAQDDVSEWASKAKANGITMYAVGVGKAIEEELQEIASEPTNKHLFYAEDFSTMDEISEKLKKGICEALEDSDGRQDSPAGELPKTVQQPTESEPVTINIQDLLSCSNFAVQHRYLFEEDNLLRSTQKLSHSTKPSGSPLEEKHDQCKCENLIMFQNLANEEVRKLTQRLEEMTQRMEALENRLRYR

SEQ ID NO: 15288 - protein, 96 aa, Homo sapiens
MYVKLISSDGHEFIVKREHALTSGTIKAMLSGPGQFAENETNEVNFREIPSHVLSKVCMYFTYKVRYTNSSTEIPEFPIAPEIALELLMAANFLDC

SEQ ID NO: 15289 - protein, 492 aa, Homo sapiens
MAAGERSWCLCKLLRFFYSLFFPGLIVCGTLCVCLVIVLWGIRLLLQRKKKLVSTSKNGKNQMVIAFFHPYCNAGGGGERVLWCALRALQKKYPEAVYVVYTGDVNVNGQQILEGAFRRFNIRLIHPVQFVFLRKRYLVEDSLYPHFTLLGQSLGSIFLGWEALMQCVPDVYIDSMGYAFTLPLFKYIGGCQVGSYVHYPTISTDMLSVVKNQNIGFNNAAFITRNPFLSKVKLIYYYLFAFIYGLVGSCSDVVMVNSSWTLNHILSLWKVGNCTNIVYPPCDVQTFLDIPLHEKKMTPGHLLVSVGQFRPEKNHPLQIRAFAKLLNKKMVESPPSLKLVLIGGCRNKDDELRVNQLRRLSEDLGVQEYVEFKINIPFDELKNYLSEATIGLHTMWNEHFGIGVVECMAAGTIILAHNSGGPKLDIVVPHEGDITGFLAESEEDYAETIAHILSMSAEKRLQIRKSARASVSRFSDQEFEVTFLSSVEKLFK

SEQ ID NO: 15290 - protein, 419 aa, Homo sapiens
MSCAGRAGPARLAALALLTCSLWPARADNASQEYYTALINVTVQEPGRGAPLTFRIDRGRYGLDSPKAEVRGQVLAPLPLHGVADHLGCDPQTRFFVPPNIKQWIALLQRGNCTFKEKISRAAFHNAVAVVIYNNKSKEEPVTMTHPGTGDIIAVMITELRGKDILSYLEKNISVQMTIAVGTRMPPKNFSRGSLVFVSISFIVLMIISSAWLIFYFIQKIRYTNARDRNQRRLGDAAKKAISKLTTRTVKKGDKETDPDFDHCAVCIESYKQNDVVRILPCKHVFHKSCVDPWLSEHCTCPMCKLNILKALGIVPNLPCTDNVAFDMERLTRTQAVNRRSALGDLAGDNSLGLEPLRTSGISPLPQDGELTPRTGEINIAVTKEWFIIASFGLLSALTLCYMIIRATASLNANEVEWF

SEQ ID NO: 15291 - protein, 575 aa, Homo sapiens
MFGIQDTLGRGPTLKEKSLGAEMDSVRSWVRNVGVVDANVAAQSGVALSRAHFEKQPPSNLRKSNFFHFVLALYDRQGQPVEIERTAFVDFVENDKEQGNEKTNNGTHYKLQLLYSNGVRTEQDLYVRLIDSVTKQPIAYEGQNKNPEMCRVLLTHEVMCSRCCEKKSCGNRNETPSDPVIIDRFFLKFFLKCNQNCLKTAGNPRDMRRFQVVLSTTVNVDGHVLAVSDNMFVHNNSKHGRRARRLDPSEATPCIKAISPSEGWTTGGAMVIIIGDNFFDGLQVVFGTMLVWSELITPHAIRVQTPPRHIPGVVEVTLSYKSKQFCKGAPGRFIYTALNEPTIDYGFQRLQKVIPRHPGDPERLAKEMLLKRAADLVEALYGTPHNNQDIILKRAADIAEALYSVPRNPSQLPALSSSPAHSGMMGINSYGSQLGVSISESTQGNNQGYIRNTSSISPRGYSSSSTPQQSNYSTSSNSMNGYSNVPMANLGVPGSPGFLNGSPTGSPYGIMSSSPTVGSSSTSSILPFSSSVFPAVKQKSAFAPVIRPQGSPSPACSSGNGNGFRAMTGLVVPPM

SEQ ID NO: 15292 - protein, 590 aa, Homo sapiens
MHLARLVGSCSLLLLLGALSGWAASDDPIEKVIEGINRGLSNAEREVGKALDGINSGITHAGREVEKVFNGLSNMGSHTGKELDKGVQGLNHGMDKVAHEINHGIGQAGKEAEKLGHGVNNAAGQVGKEADKLIHHGVHHGANQAGSEAGKFGQGVDNAAGQAGNEAGRFGQGVHHAAGQAGNEAGRFGQGVHHAAGQAGNEAGRFGQGAHHGLSEGWKETEKFGQGIHHAAGQVGKEAEKFGQGAHHAAGQAGNEAGRFGQGVHHGLSEGWKETEKFGQGVHHTAGQVGKEAEKFGQGAHHAAGQAGNEAGRFGQGAHHAAGQAGNEAGRFGQGVHHGLSEGWKETEKFGQGVHHAASQFGKETEKLGHGVHHGVNEAWKEAEKFGQGVHHAASQVGKEEDRVVQGLHHGVSQAGREAGQFGHDIHHTAGQAGKEGDIAVHGVQPGVHEAGKEAGQFGQGVHHTLEQAGKEADKAVQGFHTGVHQAGKEAEKLGQGVNHAADQAGKEVEKLGQGAHHAAGQAGKELQNAHNGVNQASKEANQLLNGNHQSGSSSHQGGATTTPLASGASVNTPFINLPALWRSVANIMP

SEQ ID NO: 15293 - protein, 501 aa, Homo sapiens
MDTQAGSVDEENGRQLGEVELQCGICTKWFTADTFGIDTSSCLPFMTNYSFHCNVCHHSGNTYFLRKQANLKEMCLSALANLTWQSRTQDEHPKTMFSKDKDIIPFIDKYWECMTTRQRPGKMTWPNNIVKTMSKERDVFLVKEHPDPGSKDPEEDYPKFGLLDQDLSNIGPAYDNQKQSSAVSTSGNLNGGIAAGSSGKGRGAKRKQQDGGTTGTTKKARSDPLFSAQRLPPHGYPLEHPFNKDGYRYILAEPDPHAPDPEKLELDCWAGKPIPGDLYRACLYERVLLALHDRAPQLKISDDRLTVVGEKGYSMVRASHGVRKGAWYFEITVDEMPPDTAARLGWSQPLGNLQAPLGYDKFSYSWRSKKGTKFHQSIGKHYSSGYGQGDVLGFYINLPEDTETAKSLPDTYKDKALIKFKSYLYFEEKDFVDKAEKSLKQTPHSEVSINFGPCFKYPPKDLTYRPMSDMGWGAVVEHTLADVLYHVETEVDGRRSPPWEP

SEQ ID NO: 15294 - protein, 85 aa, Homo sapiens
MGITLIWCLALVLIKWITSKRRGAISYDSSDQTALYIRMLGDVRVRSRAGFESERRGSHPYIDFRIFHSQSEIEVSVSARNIRRL

SEQ ID NO: 15295 - protein, 68 aa, Homo sapiens
MKIATVSVLLPLALCLIQDAASKNEDQDKKFFQSLDGIMFINKCATCKMILEKEAKSQKRARHLARAP

SEQ ID NO: 15296 - protein, 88 aa, Homo sapiens
FLTLCTWLLLLGPGLLATVRAECSQDCATCSYRLVRPADINFLKHPRIDQFIHSTNEYLMEEAPDGGKSQCNASKWRHGVLMEKQQDL

SEQ ID NO: 15297 - protein, 71 aa, Homo sapiens
MFHVSFRYIFGLPPLILVLLPVASSDCDIEGKDGKQYESVLMVSIDQLLNQPYKKKEKRTERKQQSAMSNN

SEQ ID NO: 15298 - protein, 165 aa, Homo sapiens
MAALGDIQESPSVPSPVSLSSPGTPGTQHHEPQLHLHGHQHGSPGSSPKVLSQPSDLDLQDVEEVEIGRDTFWPVQLLMLPEAVTAAHSHLRQWPHVDSCRPQLDTVNQELLPPLHLPWAGASGSGHHCPPRSTSYPVSPPPPASPRWPPLSLVGAVSRSPAPPP

SEQ ID NO: 15299 - protein, 282 aa, Homo sapiens
MAGNFWQSSHYLQWILDKQDLLKERQKDLKFLSEEEYWKLQIFFTNVIQALGEHLKLRQQVIATATVYFKRFYARYSLKSIDPVLMAPTCVFLASKVEEFGVVSNTRLIAAATSVLKTRFSYAFPKEFPYRMNHILECEFYLLELMDCCLIVYHPYRPLLQYVQDMGQEDMLLPLAWRIVNDTYRTDLCLLYPPFMIALACLHVACVVQQKDARQWFAELSVDMEKILEIIRVILKLYEQWKNFDERKEMATILSKMPKPKPPPNRNSLSDSPLVAGPEAAR

SEQ ID NO: 15300 - protein, 229 aa, Homo sapiens
MASLQRSRVLRCCSCRLFQAHQVKKSVKWTCKACGEKQSFLQAYGEGSGADCRRHVQKLNLLQGQVSELPLRSLEETVSASEEENVGHQQAGNVKQQEKSQPSESRWLKYLEKDSQELELEGTGVCFSKQPSSKMEEPGPRFSQDLPRKRKWSRSTVQPPCSRGVQDSGGSEVAWGPQKGQAGLTWKVKQGSSPCLQENSADCSAGELRGPGKELWSPIQQDGYKEILF

SEQ ID NO: 15301 - protein, 89 aa, Homo sapiens
MKLLLLHPAFQSCLLLTLLGLWRTTPEAHASSLGAPAISAASFLQDLIHRYGEGDSLTLQQLKALLNHLDVGVGRGNVTQHVQGHRNLS

SEQ ID NO: 15302 - protein, 1523 aa, Homo sapiens
MAPGWAGVGAAVRARLALALALASVLSGPPAVACPTKCTCSAASVDCHGLGLRAVPRGIPRNAERLDLDRNNITRITKMDFAGLKNLRVLHLEDNQVSVIERGAFQDLKQLERLRLNKNKLQVLPELLFQSTPKLTRLDLSENQIQGIPRKAFRGITDVKNLQLDNNHISCIEDGAFRALRDLEILTLNNNNISRILVTSFNHMPKIRTLRLHSNHLYCDCHLAWLSDWLRQRRTVGQFTLCMAPVHLRGFNVADVQKKEYVCPAPHSEPPSCNANSISCPSPCTCSNNIVDCRGKGLMEIPANLPEGIVEIRLEQNSIKAIPAGAFTQYKKLKRIDISKNQISDIAPDAFQGLKSLTSLVLYGNKITEIVKGLFDGLVSLQLLLLNANKINCLRVNTFQDLQNLNLLSLYDNKLQTISKGLFAPLQSIQTLHLAQNPFVCDCHLKWLADYLQDNPIETSGARCSSPRRLANKRISQIKSKKFRCSGSEDYRSRFSSECFMDLVCPEKCRCEGTIVDCSNQKLVRIPSHLPEYVTDLRLNDNEVSVLEATGIFKKLPNLRKINLSNNKIKEVREGAFDGAASVQELMLTGNQLETVHGRVFRGLSGLKTLMLRSNLIGCVSNDTFAGLSSVRLLSLYDNRITTITPGAFTTLVSLSTINLLSNPFNCNCHLAWLGKWLRKRRIVSGNPRCQKPFFLKEIPIQDVAIQDFTCDGNEESSCQLSPRCPEQCTCMETVVRCSNKGLRALPRGMPKDVTELYLEGNHLTAVPRELSALRHLTLIDLSNNSISMLTNYTFSNMSHLSTLILSYNRLRCIPVHAFNGLRSLRVLTLHGNDISSVPEGSFNDLTSLSHLALGTNPLHCDCSLRWLSEWVKAGYKEPGIARCSSPEPMADRLLLTTPTHRFQCKGPVDINIVAKCNACLSSPCKNNGTCTQDPVELYRCACPYSYKGKDCTVPINTCIQNPCQHGGTCHLSDSHKDGFSCSCPLGFEGQRCEINPDDCEDNDCENNATCVDGINNYVCICPPNYTGELCDEVIDHCVPELNLCQHEAKCIPLDKGFSCECVPGYSGKLCETDNDDCVAHKCRHGAQCVDTINGYTCTCPQGFSGPFCEHPPPMVLLQTSPCDQYECQNGAQCIVVQQEPTCRCPPGFAGPRCEKLITVNFVGKDSYVELASAKVRPQANISLQVATDKDNGILLYKGDNDPLALELYQGHVRLVYDSLSSPPTTVYSVETVNDGQFHSVELVTLNQTLNLVVDKGTPKSLGKLQKQPAVGINSPLYLGGIPTSTGLSALRQGTDRPLGGFHGCIHEVRINNELQDFKALPPQSLGVSPGCKSCTVCKHGLCRSVEKDSVVCECRPGWTGPLCDQEARDPCLGHRCHHGKCVATGTSYMCKCAEGYGGDLCDNKNDSANACSAFKCHHGQCHISDQGEPYCLCQPGFSGEHCQQENPCLGQVVREVIRRQKGYASCATASKVPIMECRGGCGPQCCQPTRSKRRKYVFQCTDGSSFVEEVERHLECGCLACS

SEQ ID NO: 15303 - protein, 331 aa, Homo sapiens
MALSSAWRSVLPLWLLWSAACSRAASGDDNAFPFDIEGSSAVGRQDPPETSEPRVALGRLPPAAEKCNAGFFHTLSGECVPCDCNGNSNECLDGSGYCVHCQRNTTGEHCEKCLDGYIGDSIRGAPQFCQPCPCPLPHLANFAESCYRKNGAVRCICNENYAGPNCERCAPGYYGNPLLIGSTCKKCDCSGNSDPNLIFEDCDEVTGQCRNCLRNTTGFKCERCAPGYYGDARIAKNCAVCNCGGGPCDSVTGECLEEGFEPPTGMDCPTISCDKCVWDLTDDLRLAALSIEEGKSGVLSVSSGAAAHRHVNEINATIYLLKTKLSERENQ

SEQ ID NO: 15304 - protein, 995 aa, Homo sapiens
MSAEAADREAATSSRPCTPPQTCWFEFLLEESLLEKHLRKPCPDPAPVQLIVQFLEQASKPSVNEQNQVQPPPDNKRNRILKLLALKVAAHLKWDLDILEKSLSVPVLNMLLNELLCISKVPPGTKHVDMDLATLPPTTAMAVLLYNRWAIRTIVQSSFPVKQAKPGPPQLSVMNQMQQEKELTENILKVLKEQAADSILVLEAALKLNKDLYVHTMRTLDLLAMEPGMVNGETESSTAGLKVKTEEMQCQVCYDLGAAYFQQGSTNSAVYENAREKFFRTKELIAEIGSLSLHCTIDEKRLAGYCQACDVLVPSSDSTSQQLTPYSQVHICLRSGNYQEVIQIFIEDNLTLSLPVQFRQSVLRELFKKAQQGNEALDEICFKVCACNTVRDILEGRTISVQFNQLFLRPNKEKIDFLLEVCSRSVNLEKASESLKGNMAAFLKNVCLGLEDLQYVFMISSHELFITLLKDEERKLLVDQMRKRSPRVNLCIKPVTSFYDIPASASVNIGQLEHQLILSVDPWRIRQILIELHGMTSERQFWTVSNKWEVPSVYSGVILGIKDNLTRDLVYILMAKGLHCSTVKDFSHAKQLFAACLELVTEFSPKLRQVMLNEMLLLDIHTHEAGTGQAGERPPSDLISRVRGYLEMRLPDIPLRQVIAEECVAFMLNWRENEYLTLQVPAFLLQSNPYVKLGQLLAATCKELPGPKESRRTAKDLWEVVVQICSVSSQHKRGNDGRVSLIKQRESTLGIMYRSELLSFIKKLREPLVLTIILSLFVKLHNVREDIVNDITAEHISIWPSSIPNLQSVDFEAVAITVKELVRYTLSINPNNHSWLIIQADIYFATNQYSAALHYYLQAGAVCSDFFNKAVPPDVYTDQVIKRMIKCCSLLNCHTQVAILCQFLREIDYKTAFKSLQEQNSHDAMDSYYDYIWDVTILEYLTYLHHKRGETDKRQIAIKAIGQTELNASNPEEVLQLAAQRRKKKFLQAMAKLYF

SEQ ID NO: 15305 - protein, 777 aa, Homo sapiens
MQCLGIRSRSRSRELYLQERSLKVAALNGRRLGLQDDEDLQALLKGSQLLKVKSSSWRRERFYKLQEDCKTIWQESRKVMRTPESQLFSIEDIQEVRMGHRTEGLEKFARDVPEDRCFSIVFKDQRNTLDLIAPSPADAQHWVLGLHKIIHHSGSMDQRQKLQHWIHSCLRKADKNKDNKMSFKELQNFLKELNIQVDDSYARKIFRECDHSQTDSLEDEEIEAFYKMLTQRVEIDRTFAEAAGSGETLSVDQLVTFLQHQQREEAAGPALALSLIERYEPSETAKAQRQMTKDGFLMYLLSADGSAFSLAHRRVYQDMGQPLSHYLVSSSHNTYLLEDQLAGPSSTEAYIRALCKGCRCLELDCWDGPNQEPIIYHGYTFTSKILFCDVLRAIRDYAFKASPYPVILSLENHCTLEQQRVMARHLHAILGPMLLNRPLDGVTNSLPSPEQLKGKILLKGKKLGGLLPPGGEGGPEATVVSDEDEAAEMEDEAVRSRVQHKPKEDKLRLAQELSDMVIYCKSVHFGGFSSPGTPGQAFYEMASFSENRALRLLQESGNGFVRHNVGHLSRIYPAGWRTDSSNYSPVEMWNGGCQIVALNFQTPGPEMDVYQGRFQDNGACGYVLKPAFLRDPNGTFNPRALAQGPWWARKRLNIRVISGQQLPKVNKNKNSIVDPKVTVEIHGVSRDVASRQTAVITNNGFNPWWDTEFAFEVVVPDLALIRFLVEDYDASSKNDFIGQSTIPLNSLKQGYRHVHLMSKNGDQHPSATLFVKISLQD

SEQ ID NO: 15306 - protein, 339 aa, Homo sapiens
MHSLESSLIDIMRAENDTIKGRLNYSYPGSDSSLLINGQSSLFPMEDGFLDDGRGDQPLHSGLGSPHCFSHQNGERVERYSRKVFVGGLPPDIDEDEITASFRRFGPLIVDWPHKAESKSYFPPKGYAFLLFQDESSVQALIDACIEEDGKLYLCVSSPTIKDKPVQIRPWNLSDSDFVMDGSQPLDPRKTIFVGGVPRPLRAVELAMIMDRLYGGVCYAGIDTDPELKYPKGAGRVAFSNQQSYIAAISARFVQLQHGEIDKRVEVKPYVLDDQLCDECQGARCGGKFAPFFCANVTCLQYYCEYCWAAIHSRAGREFHKPLVKEGGDRPRHISFRWN

SEQ ID NO: 15307 - protein, 185 aa, Homo sapiens
WGGAVAAAGAARRVLLLLLLGVLSAGLRPGALATEHYSPLSLLKQELQHRQQQEAPAGGGGCSPQSGDWGDQYSAECGESSFLNFHDSDCEPKGSSPCDSLLSLNTEKILSQAKSIAEQKRFPFATDNDSTNEELAIAYVLIGSGLYDEAIRHFSTMLQEAIESFKEALKQKVDFIDAYKSLGQA

SEQ ID NO: 15308 - protein, 717 aa, Homo sapiens
MPGVARLPLLLGLLLLPRPGRPLDLADYTYDLAEEDDSEPLNYKDPCKAAAFLGDIALDEEDLRAFQVQQAVDLRRHTARKSSIKAAVPGNTSTPSCQSTNGQPQRGACGRWRGRSRSRRAATSRPERVWPDGVIPFVIGGNFTGSQRAVFRQAMRHWEKHTCVTFLERTDEDSYIVFTYRPCGCCSYVGRRGGGPQAISIGKNCDKFGIVVHELGHVVGFWHEHTRPDRDRHVSIVRENIQPGQEYNFLKMEPQEVESLGETYDFDSIMHYARNTFSRGIFLDTIVPKYEVNGVKPPIGQRTRLSKGDIAQARKLYKCPACGETLQDSTGNFSSPEYPNGYSAHMHCVWRISVTPGEKIILNFTSLDLYRSRLCWYDYVEVRDGFWRKAPLRGRFCGSKLPEPIVSTDSRLWVEFRSSSNWVGKGFFAVYEAICGGDVKKDYGHIQSPNYPDDYRPSKVCIWRIQVSEGFHVGLTFQSFEIERHDSCAYDYLEVRDGHSESSTLIGRYCGYEKPDDIKSTSSRLWLKFVSDGSINKAGFAVNFFKEVDECSRPNRGGCEQRCLNTLGSYKCSCDPGYELAPDKRRCEAACGGFLTKLNGSITSPGWPKEYPPNKNCIWQLVAPTQYRISLQFDFFETEGNDVCKYDFVEVRSGLTADSKLHGKFCGSEKPEVITSQYNNMRVEFKSDNTVSKKGFKAHFFSGGELFGLLGHPPRRP

SEQ ID NO: 15309 - protein, 81 aa, Homo sapiens
MALSSAWRSVLPLWLLWSAACSRAASGDDNAFPFDIEGSSAVGRQDPPETSEPRVALGRLPPAAEKCNAGFFHTLSGECVP

SEQ ID NO: 15310 - protein, 108 aa, Homo sapiens
MGPSCPVFLSFTKLSLWWLLLTPAGGEEAKRPPPRAPGDPLSSPSPTALPQGGSHTETEDRLFKHLFRGYNRWARPVPNTSDVVIVRFGLSIAQLIDVDEKNQMMTTN

SEQ ID NO: 15311 - protein, 199 aa, Homo sapiens
MSKSAVKISLDLLSNPLCEQDQDLLNMVTALDTAMKRMDAFNQEKVNQIQKTVIEPLKKFGSVFPSLNMAVKRREQALQDYRRLQAKVEKYEEKEKTGPVLAKLHQAREELRPVREDFEAKNRQLLEEMPRFYGSRLDYFQPSFESLIRAQVVYYSEMHKIFGDLSHQLDQPGHSDEQRERENEAKLSELRALSIVADD

SEQ ID NO: 15312 - protein, 38 aa, Homo sapiens
MYNTVWNMEDLDLEYAKTDINCGTDLMFYIEMDPPGKK

SEQ ID NO: 15313 - protein, 488 aa, Homo sapiens
MAYSQGGGKKKVCYYYDGDIGNYYYGQGHPMKPHRIRMTHNLLLNYGLYRKMEIYRPHKATAEEMTKYHSDEYIKFLRSIRPDNMSEYSKQMQRFNVGEDCPVFDGLFEFCQLSTGGSVAGAVKLNRQQTDMAVNWAGGLHHAKKSEASGFCYVNDIVLAILELLKYHQRVLYIDIDIHHGDGVEEAFYTTDRVMTVSFHKYGEYFPGTGDLRDIGAGKGKYYAVNFPMRDGIDDESYGQIFKPIISKVMEMYQPSAVVLQCGADSLSGDRLGCFNLTVKGHAKCVEVVKTFNLPLLMLGGGGYTIRNVARCWTYETAVALDCEIPNELPYNDYFEYFGPDFKLHISPSNMTNQNTPEYMEKIKQRLFENLRMLPHAPGVQMQAIPEDAVHEDSGDEDGEDPDKRISIRASDKRIACDEEFSDSEDEGEGGRRNVADHKKGAKKARIEEDKKETEDKKTDVKEEDKSKDNSGEKTDTKGTKSEQLSNP

SEQ ID NO: 15314 - protein, 168 aa, Homo sapiens
MRKSPGLSDCLWAWILLLSTLTGRSYGQPSLQDELKDNTTVFTRILDRLLDGYDNRLRPGLGERVTEVKTDIFVTSFGPVSDHDMEYTIDVFFRQSWKDERLKFKGPMTVLRLNNLMASKIWTPDTFFHNGKKSVAHNMTMPNKLLRITEDGTLLYTMRLTVRAECPM

SEQ ID NO: 15315 - protein, 308 aa, Homo sapiens
MEEGGSTGSAGSDSSTSGSGGAQQRELERMAEVLVTGEQLRLMSPENTLLQPREEEGVKYERTFMASEFLDWLVQEGEATTRKEAEQLCHRLMEHGIIQHVSNKHPFVDSNLLYQFRMNFRRRRRLMELLNEKSPSSQETHDSPFCLRKQSHDNRKSTSFMSVSPSKEIKIVSAVRRSSMSSCGSSGYFSSSPTLSSSPPVLCNPKSVLKRPVTSEELLTPGAPYARKTFTIVGDAVGWGFVVRGSKPCHIQAVDPSGPAAAAGMKVCQFVVSVNGLNVLHVDYRTVSNLILTGPRTIVMEVMEELEC

SEQ ID NO: 15316 - protein, 276 aa, Homo sapiens
MLLFSVLLLLSLVTGTQLGPRTPLPEAGVAILGRARGAHRPQPPHPPSPVSECGDRSIFEGRTRYSRITGGMEAEVGEFPWQVSIQARSEPFCGGSILNKWWILTAAHCLYSEELFPEELSVVLGTNDLTSPSMEIKEVASIILHKDFKRANMDNDIALLLLASPIKLDDLKVPICLPTQPGPATWRECWVAGWGQTNAADKNSVKTDLMKAPMVIMDWEECSKMFPKLTKNMLCAGYKNESYDACKQSYFPTLQRMNTGSSQTKPPGSHTFHLQN

SEQ ID NO: 15317 - protein, 82 aa, Homo sapiens
MAVVIRLLGLPFIAGPVDIRHFFTGLTIPDGGVHIIGGEIGEAFIIFATDEDARRAISRSGGFIKDSSVELFLSSKAEMQKT

SEQ ID NO: 15318 - protein, 149 aa, Homo sapiens
MAVVIRLLGLPFIAGPVDIRHFFTGLTIPDGGVHIIGGEIGEAFIIFATDEDARRAISRSGGFIKDSSVELFLSSKAEMQKTIEMKRTDRVGRGRPGSGTSGVDSLSNFIESVKEEASNSGYGSSINQDAGFHTNGTGHGNLRPRKTRP

SEQ ID NO: 15319 - protein, 232 aa, Homo sapiens
MNFLLSWVHWSLALLLYLHHAKWSQAAPMAEGGGQNHHEVVKFMDVYQRSYCHPIETLVDIFQEYPDEIEYIFKPSCVPLMRCGGCCNDEGLECVPTEESNITMQIMRIKPHQGQHIGEMSFLQHNKCECRPKKDRARQEKKSVRGKGKGQKRKRKKSRYKSWSVYVGARCCLMPWSLPGPHPCGPCSERRKHLFVQDPQTCKCSCKNTDSRCKARQLELNERTCRCDKPRR

SEQ ID NO: 15320 - protein, 126 aa, Homo sapiens
SSKKPAGLVLGLLLLKGLQEGRLSHVVLDQKGDQHRESPRGHWTLQALKNMGEILKAAGCDFTNVVKTTVLLADINDFNTVNEIYKQYFKSNFPARAAYQVAALPKGSRIEIEAVAIQGPLTTASL

SEQ ID NO: 15321 - protein, 361 aa, Homo sapiens
MRTTFVRSVTMDKWKDIELEKMKAGGNAKFREFLESQEDYDPCWSLQEKYNSRAAALFRDKVVALAEGREWSLESSPAQNWTPPQPRTLPSMVHRVSGQPQSVTASSDKAFEDWLNDDLGSYQGAQGNRYVGFGNTPPPQKKEDDFLNNAMSSLYSGWSSFTTGASRFASAAKEGATKFGSQASQKFWGHKQQPEPASELGHSLNENVLKPAQEKVKEGKIFDDVSSGVSQLASKGVGSKGWRDVTTFFSGKAEGPLDSPSEGHSYQNSGLDHFQNSNIDQSFWETFGSAEPTKTRKSPSSDSWTCADTSTERRSSDSWEVWGSASTNRNSNSDGGEGGEGTKKAVPPAVPTDDGWDNQNW

SEQ ID NO: 15322 - protein, 63 aa, Homo sapiens
MARLLQASCLLSLLLAGFVSQSRGQEKSKAPRQMGNPQVRETSUTPFAAPSAAGTPPPTVVVS

SEQ ID NO: 15323 - protein, 641 aa, Homo sapiens
MKGFGSDKEAILDIITSRSNRQRQEVCQSYKSLYGKDLIADLKYELTGKFERLIVGLMRPPAYCDAKEIKDAISGIGTDEKCLIEILASRTNEQMHQLVAAYKDAYERDLEADIIGDTSGHFQKMLVVLLQGTREEDDVVSEDLVQQDVQDLYEAGELKWGTDEAQFIYILGNRSKQHLRLVFDEYLKTTGKPIEASIRGELSGDFEKLMLAVVKCIRSTPEYFAERLFKAMKGLGTRDNTLIRIMVSRSELDMLDIREIFRTKYEKSLYSMIKNDTSGEYKKTLLKLSGGDDDAAGQFFPEAAQVAYQMWELSAVARVELKGTVRPANDFNPDADAKALRKAMKGLGTDEDTIIDIITHRSNVQRQQIRQTFKSHFGRDLMTDLKSEISGDLARLILGLMMPPAHYDAKQLKKAMEGAGTDEKALIEILATRTNAEIRAINEAYKEDYHKSLEDALSSDTSGHFRRILISLATGHREEGGENLDQAREDAQVAAEILEIADTPSGDKTSLETRFMTILCTRSYPHLRRVFQEFIKMTNYDVEHTIKKEMSGDVRDAFVAIVQSVKNKPLFFADKLYKSMKGAGTDEKTLTRIMVSRSEIDLLNIRREFIEKYDKSLHQAIEGDTSGDFLKALLALCGGED

SEQ ID NO: 15324 - protein, 151 aa, Homo sapiens
MERPLCSHLCSCLAMLALLSPLSLAQYDSWPHYPEYFQQPAPEYHQPQAPANVAKIQLRLAGQKRKHSEGRVEVYYDGQWGTVCDDDFSIHAAHVVCRELGYVEAKSWTASSSYGKGEGPIWLDNLHCTGNEATLAACTSNGWGVTDCKHT

SEQ ID NO: 15325 - protein, 443 aa, Homo sapiens
MASSLPWLCIILWLENALGKLEVEGNFYSENVSRILDNLLEGYDNRLRPGFGGAVTEVKTDIYVTSFGPVSDVEMTWTDERLKFGGPTEILSLNNLMVSKIWTPDTFFRNGKKSIAHNMTTPNKLFRIMQNGTILYTMRLTINADCPMRLVNFPMDGHACPLKFGSYAYPKSEIIYTWKKGPLYSVEVPEESSSLLQYDLIGQTVSSETIKSNTGEYVIMTVYFHLQRKMGYFMIQIYTPCIMTVILSQVSFWINKESVPARTVFGITTVLTMTTLSISARHSLPKVSYATAMDWFIAVCFAFVFSALIEFAAVNYFTNLQTQKAKRKAQFAAPPTVTISKATEPLEAEIVLHPDSKYHLKKRITSLSLPIVSSSEANKVLTRAPILQSTPVTPPPLSPAFGGTSKIDQYSRILFPVAFAGFNLVYWVVYLSKDTMEVSSSVE

SEQ ID NO: 15326 - protein, 130 aa, Homo sapiens
MLPFLFFSTLFSSIFTEAQKQYWVCNSSDASISYTYCGRDLKQLYFNLYITVNTMNLPKRKEVICRGSDDDYSFCRALKGETVNTTISFSFKGIKFSKGKYKCVVEAISGSPEEMLFCLEFVILHQPNSN

SEQ ID NO: 15327 - protein, 473 aa, Homo sapiens
MASCVGSRTLSKDDVNYKMHFRMINEQQVEDITIDFFYRPHTITLLSFTIVSLMYFAFTRDDSVPEDNIWRGILSVIFFFLIISVLAFPNGPFTRPHPALWRMVFGLSVLYFLFLVFLLFLNFEQVKSLMYWLDPNLRYATREADVMEYAVNCHVITWERIISHFDIFAFGHFWGWAMKALLIRSYGLCWTISITWELTELFFMHLLPNFAECWWDQVILDILLCNGGGIWLGMVVCRFLEMRTYHWASFKDIHTTTGKIKRAVLQFTPASWTYVRWFDPKSSFQRVAGVYLFMIIWQLTELNTFFLKHIFVFQASHPLSWGRILFIGGITAPTVRQYYAYLTDTQCKRVGTQCWVFGVIGFLEAIVCIKFGQDLFSKTQILYVVLWLLCVAFTTFLCLYGMIWYAEHYGHREKTYSECEDGTYSPEISWHHRKGTKGSEDSPPKHAGNNESHSSRRRNRHSKSKVTNGVGKK

SEQ ID NO: 15328 - protein, 229 aa, Homo sapiens
MWPPGRSITVKLREKTVSRKLEMNGPSAFQGLICGKYNGMCLQGPAGVPGRDGSPGANGIPGTPGIPGRDGFKGEKGECLRESFEESWTPNYKQCSWSSLNYGIDLGKIAECTFTKMRSNSALRVLFSGSLRLKCRNACCQRWYFTFNGAECSGPLPIEAIIYLDQGSPEMNSTINIHRTSSVEGLCEGIGAGLVDVAIWVGTCSDYPKGDASTGWNSVSRIIIEELPK

SEQ ID NO: 15329 - protein, 56 aa, Homo sapiens
MVAAKKTKKSLESINSRLQLVMKSGKYVLGYKQTLKMIRQGKAKLVILANNCPALR

SEQ ID NO: 15330 - protein, 127 aa, Homo sapiens
MKLLLLHPAFQSCLLLTLLGLWRTTPEAHASSLGAPAISAASFLQDLIHRYGEGDSLTLQQLKALLNHLDVGVGRGNVTQHVQGHRNLSTCFSSGDLFTAHNFSEQSRIGSSELQEFCPTILQQLDS

SEQ ID NO: 15331 - protein, 808 aa, Homo sapiens
MASSIRRGRGAWTRLLSLLLLAAWEVGSGQLRYSVPEEAKHGTFVGRIAQDLGLELEELVPRLFRVASKRHGDLLEVNLQNGILFVNSRIDREELCGRSAECSIHVEVIVDRPLQVFHVEVEVKDINDNPPIFPMTVKTIRFPESRLLDSRFPLEGASDADIGVNALLSYKLSSSEFFFLDIQANDELSESLSLVLGKSLDREETAEVNLLLVATDGGKPELTGTVQILIKVLDVNDNEPTFAQSVYKVKLLENTANGTLVVKLNASDADEGPNSEIVYSLGSDVSSTIQTKFTIDPISGEIRTKGKLDYEEAKSYEIQVTATDKGTPSMSGHCKISLKLVDINDNTPEVSITSLSLPISENASLGTVIALITVSDRDSGTNGHVTCSLTPHVPFKLVSTFKNYYSLVLDSALDRESVSAYELVVTARDGGSPSLWATTSVSIEVADVNDNAPAFAQPEYTVFVKENNPPGCHIFTVSAWDADAQENALVSYSLVERRVGERALSSYVSVHAESGKVYALQPLDHEEVELLQFQVSARDAGVPPLGSNVTLQVFVLDENDNAPALLAPRAGTAAGAVSELVPWSVGAGHVVAKVRAVDADSGYNAWLSYELQLGTGSARIPFRVGLYTGEISTTRALDEADSPRHRLLVLVKDHGEPALTATATVLVSLVESGQAPKASSRAWVGAAGSEATLVDVNVYLIIAICAVSSLLVLTVLLYTALRCSVPPTEGARAPGKPTLVCSSAVGSWSYSQQRRQRVCSGEDPPKTDLMAFSPSLSQGPDSAEEKQLSESEYVGKIWNFNLQIQLAS

SEQ ID NO: 15332 - protein, 92 aa, Homo sapiens
MARFLTLCTWLLLLGPGLLATVRAECSQDCATCSYRLVRPADINFLVSVARGECCAPCETEFPQQYADCLRPTARRVWRFAPGRSRSGASPW

SEQ ID NO: 15333 - protein, 109 aa, Homo sapiens
MKLHCCLFTLVASIIVPAAFVLEDVDFDQMVSLEANRSSYNASFPSSFELSASSHSDDDVIIAKEGTSVSIECLLTASHYEDVHWHNSKGQQLDGRSRGGKWLVSDNFL

SEQ ID NO: 15334 - protein, 154 aa, Homo sapiens
MGPSCPVFLSFTKLSLWWLLLTPAGGEEAKRPPPRAPGDPLSSPSPTALPQGGSHTETEDRLFKHLFRGYNRWARPVPNTSDVVIVRFGLSIAQLIDVDEKNQMMTTNVWLKQEWSDYKLRWNPTDFGNITSLRVPSEMIWIPDIVLYNNRTAR

SEQ ID NO: 15335 - protein, 122 aa, Homo sapiens
MKLLLLHPAFQSCLLLTLLGLWRTTPEAHASSLGAPAISAASFLQDLIHRYGEGDSLTLQQLKALLNHLDVGVGRGNVTQHVQGHRNLSTCFSSGDLFTAHNFSEQSRIGSSELQEFCPTIL

SEQ ID NO: 15336 - protein, 982 aa, Homo sapiens
MEEGGEGLRASLEFDGEALPCHPQEQQGVQPLTGCHSGLDSVTEGPKDVREAPSQSHLKEQSLQPIDSLISALKATEARIISGTLQATKVLDQDAVSSFSVQQVEKELDTASRKTQRVNKTLPAGQKNLPEIPLSAEVTTEESFYLSIQKDLTALLTGDTQAEISQIMNNGRKGAVCVQEPSCPLASLGSSAVTCHSAGSVGFLKEQRSALGREHPGGCDRSSSMGRPGRVKHVEFQGVEILWTGGDKRETQHPIDFETSLQRTASPDSKESSKVPRHLISSAGLCNSSSLTENVWDESWKAPSERPGTSSGTFSPVRLDESGEDEVFLQENKQHLEKTPKPERDRERISEQEEHVKGEDEDILGPGYTEDSTDVYSSQFETILDNTSLYYSAESLETLYSEPDSYFSFEMPLTPMIQQRIKEGGQFLERTSGGGHQDILSVSADGGIVMGYSSGVTNGLNDASDSIYTKGTPEIAFWGSNAGVKTTRLEAHSEMGSTEILEKETPENLSNGTSSNVEAAKRLAKRLYQLDRFKRSDVAKHLGKNNEFSKLVAEEYLKFFDFTGMTLDQSLRYFFKAFSLVGETQERERVLIHFSNRYFYCNPDTIASQDGVHCLTCAIMLLNTDLHGHNIGKKMTCQEFIANLQGVNEGVDFSKDLLKALYNSIKNEKLEWAVDDEEKKKSPSESTEEKANGTHPKTISRIGSTTNPFLDIPHDPNAAVYKSGFLARKIHADMDGKKTPRGKRGWKTFYAVLKGTVLYLQKDEYKPEKALSEEDLKNAVSVHHALASKATDYEKKPNVFKLKTADWRVLLFQTQSPEEMQGWINKINCVAAVFSAPPFPAAIGSQKKFSRPLLPATTTKLSQEEQLKSHESKLKQITTELAEHRSYPPDKKVKAKDVDEYKLKDHYLEFEKTRYEMYVSILKEGGKELLSNDESEAAGLKKSHSSPSLNPDTSPITAKVKRNVSERKDHRPETPSIKQKVT

SEQ ID NO: 15337 - protein, 134 aa, Homo sapiens
MAGLRARGGPGPGLLALSALGFCLMLQVSAKRPPKTPPCPPSCSCTRDTAFCVDSKAVPRNLPSEVISLTALADPTVLTRVSPQDPGECRLLRDPGWSVLPPPAAAVLVTQLQQVYTDWRQRLHRTVAPAVSLH

SEQ ID NO: 15338 - protein, 756 aa, Homo sapiens
MSWSPSLTTQTCGAWEMKERLGTGGFGNVIRWHNQETGEQIAIKQCRQELSPRNRERWCLEIQIMRRLTHPNVVAARDVPEGMQNLAPNDLPLLAMEYCQGGDLRKYLNQFENCCGLREGAILTLLSDIASALRYLHENRIIHRDLKPENIVLQQGEQRLIHKIIDLGYAKELDQGSLCTSFVGTLQYLAPELLEQQKYTVTVDYWSFGTLAFECITGFRPFLPNWQPVQWHSKVRQKSEVDIVVSEDLNGTVKFSSSLPYPNNLNSVLAERLEKWLQLMLMWHPRQRGTDPTYGPNGCFKALDDILNLKLVHILNMVTGTIHTYPVTEDESLQSLKARIQQDTGIPEEDQELLQEAGLALIPDKPATQCISDGKLNEGHTLDMDLVFLFDNSKITYETQISPRPQPESVSCILQEPKRNLAFFQLRKVWGQVWHSIQTLKEDCNRLQQGQRAAMMNLLRNNSCLSKMKNSMASMSQQLKAKLDFFKTSIQIDLEKYSEQTEFGITSDKLLLAWREMEQAVELCGRENEVKLLVERMMALQTDIVDLQRSPMGRKQGGTLDDLEEQARELYRRLREKPRDQRTEGDSQEMVRLLLQAIQSFEKKVRVIYTQLSKTVVCKQKALELLPKVEEVVSLMNEDEKTVVRLQEKRQKELWNLLKIACSKVRGPVSGSPDSMNASRLSQPGQLMSQPSTASNSLPEPAKKSEELVAEAHNLCTLLENAIQDTVREQDQSFTALDWSWLQTEEEEHSCLEQAS

SEQ ID NO: 15339 - protein, 62 aa, Homo sapiens
MKKCLLPVLITCMQTAICKDRMMMIMILLVNYRPDEFIECEDPVDHVGNATASQELGYGCLK

SEQ ID NO: 15340 - protein, 976 aa, Homo sapiens
MDSLASLVLCGVSLLLSASFLPATLTMTVDKGDNVNISFKKVLIKEEDAVIYKNGSFIHSVPRHEVPDILEVHLPHAQPQDAGVYSARYIGGNLFTSAFTRLIVRRCEAQKWGPECNHLCTACMNNGVCHEDTGECICPPGFMGRTCEKACELHTFGRTCKERCSGQEGCKSYVFCLPDPYGCSCATGWKGLQCNEGIQRMTPKIVDLPDHIEVNSGKFNPICKASGWPLPTNEEMTLVKPDGTVLHPKDFNHTDHFSVAIFTIHRILPPDSGVWVCSVNTVAGMVEKPFNISVKVLPKPLNAPNVIDTGHNFAVINISSEPYFGDGPIKSKKLLYKPVNHYEAWQHIQVTNEIVTLNYLEPRTEYELCVQLVRRGEGGEGHPGPVRRFTTASIGLPPPRGLNLLPKSQTTLNLTWQPIFPSSEDDFYVEVERRSVQKSDQQNIKVPGNLTSVLLNNLHPREQYVVRARVNTKAQGEWSEDLTAWTLSDILPPQPENIKISNITHSSAVISWTILDGYSISSITIRYKVQGKNEDQHVDVKIKNATITQYQLKGLEPETAYQVDIFAENNIGSSNPAFSHELVTLPESQAPADLGGGKMLLIAILGSAGMTCLTVLLAFLIILQLKRANVQRRMAQAFQNREEPAVQFNSGTLALNRKVKNNPDPTIYPVLDWNDIKFQDVIGEGNFGQVLKARIKKDGLRMDAAIKRMKEYASKDDHRDFAGELEVLCKLGHHPNIINLLGACEHRGYLYLAIEYAPHGNLLDFLRKSRVLETDPAFAIANSTASTLSSQQLLHFAADVARGMDYLSQKQFIHRDLAARNILVGENYVAKIADFGLSRGQEVYVKKTMGRLPVRWMAIESLNYSVYTTNSDVWSYGVLLWEIVSLGGTPYCGMTCAELYEKLPQGYRLEKPLNCDDEVYDLMRQCWREKPYERPSFAQILVSLNRMLEERKTYVNTTLYEKFTYAGIDCSAEEAA

SEQ ID NO: 15341 - protein, 94 aa, Homo sapiens
MKRVLSCVPEPTVVMAARALCMLGLVLALLSSSSAEEYVGLSANQCAVPAKDRVDCGYPHVTPKECNNRGCCFDSRIPGVPWCFKPLQEAECTF

SEQ ID NO: 15342 - protein, 66 aa, Homo sapiens
MKIFLPVLLAALLGVERASSLMCFSCLNQKSNLYCLKPTICSDQDNYCVTVSASAGIGGFAGGTDS

SEQ ID NO: 15343 - protein, 174 aa, Homo sapiens
MRLPGAMPALALKGELLLLSLLLLLEPQISQGLVVTPPGPELVLNVSSTFVLTCSGSAPVVWERMSQEPPQEMAKAQDGTFSSVLTLTNLTGLDTGEYFCTHNDSRGLETDERKRLYIFVPDPTVGFLPNDAEELFIFLTEITEITIPCRVTDPQLVVTLHEKKGDVALPVPYD

SEQ ID NO: 15344 - protein, 289 aa, Homo sapiens
MNYSLHLAFVCLSLFTERMCIQGSQFNVEVGRSDKLSLPGFENLTAGYNKFLRPNFGGEPVQIALTLDIASISSISESNMDYTATIYLRQRWMDQRLVFEGNKSFTLDARLVEFLWVPDTYIVESKKSFLHEVTVGNRLIRLFSNGTVLYALRITTTVACNMDLSKYPMDTQTCKLQLESWGYDGNDVEFTWLRGNDSVRGLEHLRLAQYTIERYFTLVTRSQQETGNYTRLVLQFELRRNVLYFILETYVPSTFLVVLSWVSFWISLDSVPARTCIGDNKGSRRSQYY

SEQ ID NO: 15345 - protein, 3565 aa, Homo sapiens
MTAWRRFQSLLLLLGLLVLCARLLTAAKGQNCGGLVQGPNGTIESPGFPHGYPNYANCTWIIITGERNRIQLSFHTFALEEDFDILSVYDGQPQQGNLKVRLSGFQLPSSIVSTGSILTLWFTTDFAVSAQGFKALYEVLPSHTCGNPGEILKGVLHGTRFNIGDKIRYSCLPGYILEGHAILTCIVSPGNGASWDFPAPFCRAEGACGGTLRGTSSSISSPHFPSEYENNADCTWTILAEPGDTIALVFTDFQLEEGYDFLEISGTEAPSIWLTGMNLPSPVISSKNWLRLHFTSDSNHRRKGFNAQFQVKKAIELKSRGVKMLPSKDGSHKNSVLSQGGVALVSDMCPDPGIPENGRRAGSDFSRVGANVQFSCEDNYVLQGSKSITCQRVTETLAAWSDHRPICRARTCGSNLRGPSGVITSPNYPVQYEDNAHCVWVITTTDPDKVIKLAFEEFELERGYDTLTVGDAGKVGDTRSVLYVLTGSSVPDLIVSMSNQMWLHLQSDDSIGSPGFKAVYQEIEKGGCGDPGIPAYGKRTGSSFLHGDTLTFECPAAFELVGERVITCQQNNQWSGNKPSCVFSCFFNFTASSGIILSPNYPEEYGNNMNCVWLIISEPGSRIHLIFNDFDVEPQFDFLAVKDDGISDITVLGTFSGNEVPSQLASSGHIVRLEFQSDHSTTGRGFNITYTTFGQNECHDPGIPINGRRFGDRFLLGSSVSFHCDDGFVKTQGSESITCILQDGNVVWSSTVPRCEAPCGGHLTASSGVILPPGWPGYYKDSLHCEWIIEAKPGHSIKITFDRFQTEVNYDTLEVRDGPASSSPLIGEYHGTQAPQFLISTGNFMYLLFTTDNSRSSIGFLIHYESVTLESDSCLDPGIPVNGHRHGGDFGIRSTVTFSCDPGYTLSDDEPLVCERNHQWNHALPSCDALCGGYIQGKSGTVLSPGFPDFYPNSLNCTWTIEVSHGKGVQMIFHTFHLESSHDYLLITEDGSFSEPVARLTGSVLPHTIKAGLFGNFTAQLRFISDFSISYEGFNITFSEYDLEPCDDPGVPAFSRRIGFHFGVGDSLTFSCFLGYRLEGATKLTCLGGGRRVWSAPLPRCVAECGASVKGNEGTLLSPNFPSNYDNNHECIYKIETEAGKGIHLRTRSFQLFEGDTLKVYDGKDSSSRPLGTFTKNELLGLILNSTSNHLWLEFNTNGSDTDQGFQLTYTSFDLVKCEDPGIPNYGYRIRDEGHFTDTVVLYSCNPGYAMHGSNTLTCLSGDRRVWDKPLPSCIAECGGQIHAATSGRILSPGYPAPYDNNLHCTWIIEADPGKTISLHFIVFDTEMAHDILKVWDGPVDSDILLKEWSGSALPEDIHSTFNSLTLQFDSDFFISKSGFSIQFSTSIAATCNDPGMPQNGTRYGDSREAGDTVTFQCDPGYQLQGQAKITCVQLNNRFFWQPDPPTCIAACGGNLTGPAGVILSPNYPQPYPPGKECDWRVKVNPDFVIALIFKSFNMEPSYDFLHIYEGEDSNSPLIGSYQGSQAPERIESSGNSLFLAFRSDASVGLSGFAIEFKEKPREACFDPGNIMNGTRVGTDFKLGSTITYQCDSGYKILDPSSITCVIGADGKPSWDQVLPSCNAPCGGQYTGSEGVVLSPNYPHNYTAGQICLYSITVPKEFVVFGQFAYFQTALNDLAELFDGTHAQARLLSSLSGSHSGETLPLATSNQILLRFSAKSGASARGFHFVYQAVPRTSDTQCSSVPEPRYGRRIGSEFSAGSIVRFECNPGYLLQGSTALHCQSVPNALAQWNDTIPSCVVPCSGNFTQRRGTILSPGYPEPYGNNLNCIWKIIVTEGSGIQIQVISFATEQNWDSLEIHDGGDVTAPRLGSFSGTTVPALLNSTSNQLYLHFQSDISVAAAGFHLEYKTVGLAACQEPALPSNSIKIGDRYMVNDVLSFQCEPGYTLQGRSHISCMPGTVRRWNYPSPLCIATCGGTLSTLGGVILSPGFPGSYPNNLDCTWRISLPIGYGAHIQFLNFSTEANHDFLEIQNGPYHTSPMIGQFSGTDLPAALLSTTHETLIHFYSDHSQNRQGFKLAYQAYELQNCPDPPPFQNGYMINSDYSVGQSVSFECYPGYILIGHPVLTCQHGINRNWNYPFPRCDAPCGYNVTSQNGTIYSPGFPDEYPILKDCIWLITVPPGHGVYINFTLLQTEAVNDYIAVWDGPDQNSPQLGVFSGNTALETAYSSTNQVLLKFHSDFSNGGFFVLNFHAFQLKKCQPPPAVPQAEMLTEDDDFEIGDFVKYQCHPGYTLVGTDILTCKLSSQLQFEGSLPTCEAQCPANEVRTGSSGVILSPGYPGNYFNSQTCSWSIKVEPNYNITIFVDTFQSEKQFDALEVFDGSSGQSPLLVVLSGNHTEQSNFTSRSNQLYLRWSTDHATSKKGFKIRYAAPYCSLTHPLKNGGILNRTAGAVGSKVHYFCKPGYRMVGHSNATCRRNPLGMYQWDSLTPLCQAVSCGIPESPGNGSFTGNEFTLDSKVVYECHEGFKLESSQQATAVCQEDGLWSNKGKPPTCKPVACPSIEAQLSEHVIWRLVSGSLNEYGAQVLLSCSPGYYLEGWRLLRCQANGTWNIGDERPSCRVISCGSLSFPPNGNKIGTLTVYGATAIFTCNTGYTLVGSHVRECLANGLWSGSETRCLAGHCGSPDPIVNGHISGDGFSYRDTVVYQCNPGFRLVGTSVRICLQDHKWSGQTPVCVPITCGHPGNPAHGFTNGSEFNLNDVVNFTCNTGYLLQGVSRAQCRSNGQWSSPLPTCRVVNCSDPGFVENAIRHGQQNFPESFEYGMSILYHCKKGFYLLGSSALTCMANGLWDRSLPKCLAISCGHPGVPANAVLTGELFTYGAVVHYSCRGSESLIGNDTRVCQEDSHWSGALPHCTGNNPGFCGDPGTPAHGSRLGDDFKTKSLLRFSCEMGHQLRGSPERTCLLNGSWSGLQPVCEAVSCGNPGTPTNGMIVSSDGILFSSSVIYACWEGYKTSGLMTRHCTANGTWTGTAPDCTIISCGDPGTLANGIQFGTDFTFNKTVSYQCNPGYVMEAVTSATIRCTKDGRWNPSKPVCKAVLCPQPPPVQNGTVEGSDFRWGSSISYSCMDGYQLSHSAILSCEGRGVWKGEIPQCLPVFCGDPGIPAEGRLSGKSFTYKSEVFFQCKSPFILVGSSRRVCQADGTWSGIQPTCIDPAHNTCPDPGTPHFGIQNSSRGYEVGSTVFFRCRKGYHIQGSTTRTCLANLTWSGIQTECIPHACRQPETPAHADVRAIDLPTFGYTLVYTCHPGFFLAGGSEHRTCKADMKWTGKSPVCKSKGVREVNETVTKTPVPSDVFFVNSLWKGYYEYLGKRQPATLTVDWFNATSSKVNATFSEASPVELKLTGIYKKEEAHLLLKAFQIKGQADIFVSKFENDNWGLDGYVSSGLERGGFTFQGDIHGKDFGKFKLERQDPLNPDQDSSSHYHGTSSGSVAAAILVPFFALILSGFAFYLYKHRTRPKVQYNGYAGHENSNGQASFENPMYDTNLKPTEAKAVRFDTTLNTVCTVV

SEQ ID NO: 15346 - protein, 404 aa, Homo sapiens
MPPFLITLFLFHSCCLRANGHLREGMTLLKTEFALHLYQSVAACRNETNFVISPAGVSLPLEILQFGAEGSTGQQLADALGYTVHDKRVKDFLHAVYATLPTSSQGTEMELACSLFVQVGTPLSPCFVEHVSWWANSSLEPADLSEPNSTAIQTSEGASRETAGGGPSEGPGGWPWEQVSAAFAQLVLVSTMSFQGTWRKRFSSTDTQILPFTCAYGLVLQVPMMHQTTEVNYGQFQDTAGHQVGVLELPYLGSAVSLFLVLPRDKDTPLSHIEPHLTASTIHLWTTSLRRARMDVFLPRFRIQNQFNLKSILNSWGVTDLFDPLKANLKGISGQDGFYVSEAIHKAKIEVLEEGTKASGATALLLLKRSRIPIFKADRPFIYFLREPNTGFVFSIGRVSNPLD

SEQ ID NO: 15347 - protein, 349 aa, Homo sapiens
MNYSLHLAFVCLSLFTERMCIQGSQFNVEVGRSDKLSLPGFENLTAGYNKFLRPNFGGEPVQIALTLDIASISSISESNMDYTATIYLRQRWMDQRLVFEGNKSFTLDARLVEFLWVPDTYIVESKKSFLHEVTVGNRLIRLFSNGTVLYALRITTTVACNMDLSKYPMDTQTCKLQLESWGYDGNDVEFTWLRGNDSVRGLEHLRLAQYTIERYFTLVTRSQQETGNYTRLVLQFELRRNVLYFILETYVPSTFLVVLSWVSFWISLDSVPARTCIGVTTVLSMTTLMIGSRTSLPNTNCFIKAIDVYLGICFSFVFGALLEYAVAHYSSLQQMAAKDRQKICYLYAA

SEQ ID NO: 15348 - protein, 118 aa, Homo sapiens
MLLFALLLAMELPLVAASATMRAQWTYSLRCHDCAVINDFNCPNIRVCPYHIRRCMTISIQLSSGDRAAVCPGPHPTFFQPGAWIPTQVTDSKHQPLPAHLTRRHPLHGPGNILPSAI

SEQ ID NO: 15349 - protein, 209 aa, Homo sapiens
MNFLLSWVHWSLALLLYLHHAKWSQAAPMAEGGGQNHHEVVKFMDVYQRSYCHPIETLVDIFQEYPDEIEYIFKPSCVPLMRCGGCCNDEGLECVPTEESNITMQIMRIKPHQGQHIGEMSFLQHNKCECRPKKDRARQEKKSVRGKGKGQKRKRKKSRPCGPCSERRKHLFVQDPQTCKCSCKNTDSRCKARQLELNERTCRCDKPRR

SEQ ID NO: 15350 - protein, 238 aa, Homo sapiens
MPAALVENSQVICEVWASNLEEEMRKIREIVLSYSYIAMDTEFPGVVVRPIGEFRSSIDYQYQLLRCNVDLLKIIQLGLTFTNEKGEYPSGINTWQFNFKFNLTGYDFGYMVKLLTDSRLPEEEHEFFHILNLFFPSIYDVKYLMKSCKNLKGGLQEVADQLDLQRIGRQHQAGSDSLLTGMAFFRMKELFFEDSIDDAKYCGRLYGLGTGVAQKQNEDVDSAQEKMSILAIINNMQQ

SEQ ID NO: 15351 - protein, 123 aa, Homo sapiens
MKLHCCLFTLVASIIVPAAFVLEDVDFDQMVSLEANRSSYNASFPSSFELSASSHSDDDVIIAKEGTSVSIECLLTASHYEDVHWHNSKGQQLDGRSRGGKWLVSDNFLNITNVAFDDRGLYT

SEQ ID NO: 15352 - protein, 81 aa, Homo sapiens
MGPSCPVFLSFTKLSLWWLLLTPAGGEEAKRPPPRAPGDPLSSPSPTALPQGGSHTETEDRLFKHLFRGYNRWARPVPNTS

SEQ ID NO: 15353 - protein, 147 aa, Homo sapiens
GLGLGLWLGAGLSAARRLEQVPSLLGRRRKLHLPDPDLASWGPGRSGSGGGRWDCMCECLLRTDPVPEEGEDVAATISATETLSEEEQEELRRELAKVEEEIQTLSQVLAAKEKHLAEIKRKLGINSLQELKQNIAKGWQDVTATSA

SEQ ID NO: 15354 - protein, 273 aa, Homo sapiens
MFSHLPFDCVLLLLLLLLTRSSEVEYRAEVGQNAYLPCFYTPAAPGNLVPVCWGKGACPVFECGNVVLRTDERDVNYWTSRYWLNGDFRKGDVSLTIENVTLADSGIYCCRIQIPGIMNDEKFNLKLVIKPAETQTLGSLPDINLTQISTLANELRDSRLANDLRDSGATIRIGIYIGAGICAGLALALIFGALIFKWYSHSKEKIQNLSLISLANLPPSGLANAVAEGIRSEENIYTIEENVYEVEEPNEYYCYVSSRQQPSQPLGCRFAMP

SEQ ID NO: 15355 - protein, 81 aa, Homo sapiens
MERASCLLLLLLPLVHVSATTPEPCELDDEDFRCVCNFSEPQPDWSEAFQCVSAVEVEIHAGGLNLEPFLKRVDADADPRQ

SEQ ID NO: 15356 - protein, 85 aa, Homo sapiens
MRKSPGLSDCLWAWILLLSTLTGRSYGQPSLQDELKDNTTVFTRILDRLLDGYDNRLRPGLGERVTEVKTDIFVTSFGPVSDHDM

SEQ ID NO: 15357 - protein, 58 aa, Homo sapiens
MAYHGLTVPLIVMSVFWGFVGFLVPWFIPKGPNRGVIITMLVTCSVCCYLLSREENAF

SEQ ID NO: 15358 - protein, 235 aa, Homo sapiens
MRRSMKRRRRRRPVAPATAARGGDFRAEDGAGLEAREEKVVYSRSQLSLADSTKALGDAFKLFMPRSTEFMSSDAELWSFLCSLKHQFSPHILRSKDVYGYSSCRALVPDPPGPPTARGQARRPVPRAAARRRRRGARAAAARRRKPRPPPPPPPPPEESCPAKPVAPGPCFGGRTLEEIWRAATPTLTTFPTIRVGSDVWGERSLAAARRRARQVLRVNLEPMVRLRRFPVPRA

SEQ ID NO: 15359 - protein, 1227 aa, Homo sapiens
MTTHVTLEDALSNVDLLEELPLPDQQPCIEPPPSSIMYQANFDTNFEDRNAFVTGIARYIEQATVHSSMVKCNEQPNRVEIYEKTVEVLEPEVTKLMKFMYFQRKAIERFCSEVKRLCHAERRKDFVSEAYLLTLGKFINMFAVLDELKNMKCSVKNDHSAYKRAAQFLRKMADPQSIQESQNLSMFLANHNRITQCLHQQLEVIPGYEELLADIVNICVDYYENKMYLTPSEKHMLLKVMGFGLYLMDGNVSNIYKLDAKKRINLSKIDKFFKQLQVVPLFGDMQIELARYIKTSAHYEENKSKWTCTQSSISPQYNICEQMVQIRDDHIRFISELARYSNSEVVTGSGLDSQKSDEEYRELFDLALRGLQLLSKWSAHVMEVYSWKLVHPTDKFCNKDCPGTAEEYERATRYNYTSEEKFAFVEVIAMIKGLQVLMGRMESVFNQAIRNTIYAALQDFAQVTLREPLRQAVRKKKNVLISVLQAIRKTICDWEGGREPPNDPCLRGEKDPKGGFDIKVPRRAVGPSSTQLYMVRTMLESLIADKSGSKKTLRSSLDGPIVLAIEDFHKQSFFFTHLLNISEALQQCCDLSQLWFREFFLELTMGRRIQFPIEMSMPWILTDHILETKEPSMMEYVLYPLDLYNDSAYYALTKFKKQFLYDEIEAEVNLCFDQFVYKLADQIFAYYKAMAGSVLLDKRFRAECKNYGVIIPYPPSNRYETLLKQRHVQLLGRSIDLNRLITQRISAAMYKSLDQAISRFESEDLTSIVELEWLLEINRLTHRLLCKHMTLDSFDAMFREANHNVSAPYGRITLHVFWELNFDFLPNYCYNGSTNRFVRTAIPFTQEPQRDKPANVQPYYLYGSKPLNIAYSHIYSSYRNFVGPPHFKTICRLLGYQGIAVVMEELLKIVKSLLQGTILQYVKTLIEVMPKICRLPRHEYGSPGILEFFHHQLKDIIEYAELKTDVFQSLREVGNAILFCLLIEQALSQEEVCDLLHAAPFQNILPRVYIKEGERLEVRMKRLEAKYAPLHLVPLIERLGTPQQIAIAREGDLLTKERLCCGLSMFEVILTRIRSYLQDPIWRGPPPTNGVMHVDECVEFHRLWSAMQFVYCIPVGTNEFTAEQCFGDGLNWAGCSIIVLLGQQRRFDLFDFCYHLLKVQRQDGKDEIIKNVPLKKMADRIRKYQILNNEVFAILNKYMKSVETDSSTVEHVRCFQPPIHQSLATTC

SEQ ID NO: 15360 - protein, 634 aa, Homo sapiens
MLDCGLDMTSTLNFLPLPLVQSPRLSNLPGWSLKDGNAFLDKELKECSGHVFVDSVPEFCLPETELIDLSTVDVILISNYHCMMALPYITEHTGFTGTVYATEPTVQIGRLLMEELVNFIERVPKAQSASLWKNKDIQRLLPSPLKDAVEVSTWRRCYTMQEVNSALSKIQLVGYSQKIELFGAVQVTPLSSGYALGSSNWIIQSHYEKVSYVSGSSLLTTHPQPMDQASLKNSDVLVLTGLTQIPTANPDGMVGEFCSNLALTVRNGGNVLVPCYPSGVIYDLLECLYQYIDSAGLSSVPLYFISPVANSSLEFSQIFAEWLCHNKQSKVYLPEPPFPHAELIQTNKLKHYPSIHGDFSNDFRQPCVVFTGHPSLRFGDVVHFMELWGKSSLNTVIFTEPDFSYLEALAPYQPLAMKCIYCPIDTRLNFIQVSKLLKEVQPLHVVCPEQYTQPPPAQSHRMDLMIDCQPPAMSYRRAEVLALPFKRRYEKIEIMPELADSLVPMEIKPGISLATVSAVLHTKDNKHLLQPPPRPAQPTSGKKRKRVSDDVPDCKVLKPLLSGSIPVEQFVQTLEKHGFSDIKVEDTAKGHIVLLQEAETLIQIEEDSTHIICDNDEMLRVRLRDLVLKFLQKF

SEQ ID NO: 15361 - protein, 111 aa, Homo sapiens
MRPLKPGAPLPALFLLALALSPHGAHGRPRGRRGARVTDKEPKPLLFLPAAGAGRTPSGSRSAEIFPRDSNLKDKFIKHFTGPVTFSPECSKHFHRLYYNTRECSTPAYIS

SEQ ID NO: 15362 - protein, 610 aa, Homo sapiens
MAAPILKDVVAYVEVWSSNGTENYSKTFTTQLVDMGAKVSKTFNKQVTHVIFKDGYQSTWDKAQKRGVKLVSVLWVEKCRTAGAHIDESLFPAANMNEHLSSLIKKKRKCMQPKDFNFKTPENDKRFQKKFEKMAKELQRQKTNLDDDVPILLFESNGSLIYTPTIEINSRHHSAMEKRLQEMKEKRENLSPTSSQMIQQSHDNPSNSLCEAPLNISRDTLCSDEYFAGGLHSSFDDLCGNSGCGNQERKLEGSINDIKSDVCISSLVLKANNIHSSPSFTHLDKSSPQKFLSNLSKEEINLQRNIAGKVVTPDQKQAAGMSQETFEEKYRLSPTLSSTKGHLLIHSRPRSSSVKRKRVSHGSHSPPKEKCKRKRSTRRSIMPRLQLCRSEDRLQHVAGPALEALSCGESSYDDYFSPDNLKERYSENLPPESQLPSSPAQLSCRSLSKKERTSIFEMSDFSCVGKKTRTVDITNFTAKTISSPRKTGNGEGRATSSCVTSAPEEALRCCRQAGKEDACPEGNGFSYTIEDPALPKGHDDDLTPLEGSLEEMKEAVGLKSTQNKGTTSKISNSSEGEAQSEHEPCFIVDCNMETSTEEKENLPGGYSGSM

SEQ ID NO: 15363 - protein, 149 aa, Homo sapiens
LLLFCLCAFLSLSWYAALSGQKGDVVDVYQREFLALRDRLHAAEQESLKRSKELNLVLDEIKRAVSERQALRDGDGNRTWGRLTGPPIEAVERLTPARAAPAHRLPSPATPAGQGEQSAARGARGPGPHRSVGGDGHPERAARGALVPD

SEQ ID NO: 15364 - protein, 76 aa, Homo sapiens
MQFRLFSFALIILNCMDYSHCQGNRWRRSKRASYVSNPICKGCLSCSKDNGCSRCQQKLFFFLRREGMRQYGECLH

SEQ ID NO: 15365 - protein, 141 aa, Homo sapiens
MSCAGRAGPARLAALALLTCSLWPARADNASQEYYTALINVTVQEPGRGAPLTFRIDRGRYGLDSPKAEVRGQVLAPLPLHGVADHLGCDPQTRFFVPPNIKQWIALLQRGNCTFKEKISRAAFHNAVAVVIYNNKSKEEN

SEQ ID NO: 15366 - protein, 40 aa, Homo sapiens
MAAACGPGAAGYCLLLGLHLFLLTAGPALGWNDPECCCGM

SEQ ID NO: 15367 - protein, 41 aa, Homo sapiens
MLRGISQLPAVATMSWVLLPVLWLIVQTQASNCAWPKVSIQ

SEQ ID NO: 15368 - protein, 135 aa, Homo sapiens
MMEDDGQPRTLYVGNLSRDVTEVLILQLFSQIGPCKSCKMITEHTSNDPYCFVEFYEHRDAAAALAAMNGRKILGKEVKVNWATTPSSQKKDTSNHFHVFVGDLSPEITTEDIKSAFAPFGKISIAHKNGQDLEG

SEQ ID NO: 15369 - protein, 1368 aa, Homo sapiens
MRPPGFLSRAPSLNRAERGIWSCSMDQREPLPPAPAENEMKYDTNNNEEEEGEQFDFDSGDEIPEADRQAPSAPETGGAGASEAPAPTGGEDGAGAETTPVAEPTKLVLPMKVNPYSVIDITPFQEDQPPTPVPSAEEENVGLHVPCGYLVPVPCGYAVPSNLPLLLPAYSSPVIICATSLDEEAETPEVTEDRQPNSLSSEEPPTSEDQVGREDSALARWAADPANTAWMENPEEAIYDDVPRENSDSEPDEMIYDDVENGDEGGNSSLEYGWSSSEFESYEEQSDSECKNGIPRSFLRSNHKKQLSHDLTRLKEHYEKKMRDLMASTVGVVEIQQLRQKHELKMQKLVKAAKDGTKDGLERTRAAVKRGRSFIRTKSLIAQDHRSSLEEEQNLFIDVDCKHPEAILTPMPEGLSQQQVVRRYILGSVVDSEKNYVDALKRILEQYEKPLSEMEPKVLSERKLKTVFYRVKEILQCHSLFQIALASRVSEWDSVEMIGDVFVASFSKSMVLDAYSEYVNNFSTAVAVLKKTCATKPAFLEFLKEQEASPDRTTLYSLMMKPIQRFPQFILLLQDMLKNTSKGHPDRLPLQMALTELETLAEKLNERKRDADQRCEVKQIAKAINERYLNKLLSSGSRYLIRSDDMIETVYNDRGEIVKTKERRVFMLNDVLMCATVSSRPSHDSRVMSSQRYLLKWSVPLGHVDAIEYGSSAGTGEHSRHLAVHPPESLAVVANAKPNKVYMGPGQLYQDLQNLLHDLNVIGQITQLIGNLKGNYQNLNQSVAHDWTSGLQRLILKKEDEIRAADCCRIQLQLPGKQDKSGRPTFFTAVFNTFTPAIKESWVNSLQMAKLALEEENHMGWFCVEDDGNHIKKEKHPLLVGHMPVMVAKQQEFKIECAAYNPEPYLNNESQPDSFSTAHGFLWIGSCTHQMGQIAIVSFQNSTPKVIECFNVESRILCMLYVPVEEKRREPGAPPDPETPAVRASDVPTICVGTEEGSISIYKSSQGSKKVRLQHFFTPEKSTVMSLACTSQSLYAGLVNGAVASYARAPDGSWDSEPQKVIKLGVLPVRSLLMMEDTLWAASGGQVFIISVETHAVEGQLEAHQEEGMVISHMAVSGVGIWIAFTSGSTLRLFHTETLKHLQDINIATPVHNMLPGHQRLSVTSLLVCHGLLMVGTSLGVLVALPVPRLQGIPKVTGRGMVSYHAHNSPVKFIVLATALHEKDKDKSRDSLAPGPEPQDEDQKDALPSGGAGSSLSQGDPDAAIWLGDSLGSMTQKSDLSSSSGSLSLSHGSSSLEHRSEDSTIYDLLKDPVSLRSKARRAKKAKASSALVVCGGQGHRRVHRKARQPHQEELAPTVMVWQIPLLNI

SEQ ID NO: 15370 - protein, 131 aa, Homo sapiens
MKFLIFAFFGGVHLLSLCSGKAICKNGISKRTFEEIKEEIASCGDVAKAIINLAVYGKAQNRSYERLALLVDTVGPRLSGSKNLEKAIQIMYQNLQQDGLEKVHLEPVRIPHWERGEESAVMLEPRIHKIA

SEQ ID NO: 15371 - protein, 139 aa, Homo sapiens
MMKTLLLFVGLLLTWESGQVLGDQTVSDNELQEMSNQGSKYVNKEIQNAVNGVKQIKTLIEKTNEERKTLLSNLEEAKKKKEDALNETRESETKLKELPGVCNETMMALWEECKPCLKQTCMKFYARVCRSGSGLVGRQ

SEQ ID NO: 15372 - protein, 39 aa, Homo sapiens
MESKALLVLTLAVWLQSLTASRGGVAAADLILKLQIFKF

SEQ ID NO: 15373 - protein, 206 aa, Homo sapiens
MAAAVLGQLGALWIHNLRSRGKLALGVLPQSYIHTSASLDISRKWEKKNKIVYPPQLPGEPRRPAEIYHCRRQIKYSKDKMWYLAKLIRGMSIDQALAQLEFNDKKGAKIIKEVLLEAQDMAVRDHNVEFRSNLYIAESTSGRGQCLKRIRYHGRGRFGIMEKVYCHYFVKLVEGPPPPPEPPKTAVAHAKEYIQQLRSRTIVHTL

SEQ ID NO: 15374 - protein, 205 aa, Homo sapiens
MGAARLLPNLTLCLQLLILCCQTQYVRDQGAMTDQLSRRQIREYQLYSRTSGKHVQVTGRRISATAEDGNKFAKLIVETDTFGSRVRIKGAESEKYICMNKRGKLIGKPSGKSKDCVFTEIVLENNYTAFQNARHEGWFMAFTRQGRPRQASRSRQNQREAHFIKRLYQGQLPFPNHAEKQKQFEFVGSAPTRRTKRTRRPQPLT

SEQ ID NO: 15375 - protein, 282 aa, Homo sapiens
MGPLPRTVELFYDVLSPYSWLGFEILCRYQNIWNINLQLRPSLITGIMKDSGNKPPGLLPRKGLYMANDLKLLRHHLQIPIHFPKDFLSVMLEKGSLSAMRFLTAVNLEHPEMLEKASRELWMRVWSRVSVGLWESSGRTLDDFLTFPRHVFRVMILPPPGGSTVLPVTPLSPHRLPAVFSSSQNEDITEPQSILAAAEKAGMSAEQAQGLLEKIATPKVKNQLKETTEAACRYGAFGLPITVAHVDGQTHMLFGSDRMELLAHLLGEKWMGPIPPAVNARL

SEQ ID NO: 15376 - protein, 271 aa, Homo sapiens
MMKTLLLFVGLLLTWESGQVLGDQTVSDNELQEMSNQGSKYVNKEIQNAVNGVKQIKTLIEKTNEERKTLLSNLEEAKKKKEDALNETRESETKLKELPGVCNETMMALWEECKPCLKQTCMKFYARVCRSGSGLVGRQLEEFLNQSSPFYFWMNGDRIDSLLENDRQQTHMLDVMQDHFSRASSIIDELFQDSLMPFSPYEPLNFHAMFQPFLEMIHEAQQAMDIHFHSPAFQHPPTEFIREGDDDRTVCREIRHNSTGCLRMKDQCDKC

SEQ ID NO: 15377 - protein, 931 aa, Homo sapiens
MKIQKKLTGCSRLMLLCLSLELLLEAGAGNIHYSVPEETDKGSFVGNIAKDLGLQPQELADGGVRIVSRGRMPLFALNPRSGSLITARRIDREELCAQSMPCLVSFNILVEDKMKLFPVEVEIIDINDNTPQFQLEELEFKMNEITTPGTRVSLPFGQDLDVGMNSLQSYQLSSNPHFSLDVQQGADGPQHPEMVLQSPLDREEEAVHHLILTASDGGEPVRSGTLRIYIQVVDANDNPPAFTQAQYHINVPENVPLGTQLLMVNATDPDEGANGEVTYSFHNVDHRVAQIFRLDSYTGEISNKEPLDFEEYKMYSMEVQAQDGAGLMAKVKVLIKVLDVNDNAPEVTITSVTTAVPENFPPGTIIALISVHDQDSGDNGYTTCFIPGNLPFKLEKLVDNYYRLVTERTLDRELISGYNITITAIDQGTPALSTETHISLLVTDINDNSPVFHQDSYSAYIPENNPRGASIFSVRAHDLDSNENAQITYSLIEDTIQGAPLSAYLSINSDTGVLYALRSFDYEQFRDMQLKVMARDSGDPPLSSNVSLSLFLLDQNDNAPEILYPALPTDGSTGVELAPLSAEPGYLVTKVVAVDRDSGQNAWLSYRLLKASEPGLFSVGLHTGEVRTARALLDRDALKQSLVVAVQDHGQPPLSATVTLTVAVADRISDILADLGSLEPSAKPNDSDLTLYLVVAAAAVSCVFLAFVIVLLAHRLRRWHKSRLLQASGGGLASMPGSHFVGVDGVRAFLQTYSHEVSLTADSRKSHLIFPQPNYADTLISQESCEKKGFLSAPQSLLEDKKEPFSQQAPPNTDWRFSQAQRPGTSGSQNGDDTGTWPNNQFDTEMLQAMILASASEAADGSSTLGGGAGTMGLSARYGPQFTLQHVPDYRQNVYIPGSNATLTNAAGKRDGKAPAGGNGNKKKSGKKEKK

SEQ ID NO: 15378 - protein, 2016 aa, Homo sapiens
MATGGGPFEDGMNDQDLPNWSNENVDDRLNNMDWGAQQKKANRSSEKNKKKFGVESDKRVTNDISPESSPGVGRRRTKTPHTFPHSRYMSQMSVPEQAELEKLKQRINFSDLDQRSIGSDSQGRATAANNKRQLSENRKPFNFLPMQINTNKSKDASTNPPNRETIGSAQCKELFASALSNDLLQNCQVSEEDGRGEPAMESSQIVSRLVQIRDYITKASSMREDLVEKNERSANVERLTHLIDHLKEQEKSYMKFLKKILARDPQQEPMEEIENLKKQHDLLKRMLQQQEQLRALQGRQAALLALQHKAEQAIAVMDDSVVAETAGSLSGVSITSELNEELNDLIQRFHNQLRDSQPPAVPDNRRQAESLSLTREVSQSRKPSASERLPDEKVELFSKMRVLQEKKQKMDKLLGELHTLRDQHLNNSSSSPQRSVDQRSTSAPSASVGLAPVVNGESNSLTSSVPYPTASLVSQNESENEGHLNPSEKLQKLNEVRKRLNELRELVHYYEQTSDMMTDAVNENRKDEETEESEYDSEHENSEPVTNIRNPQVASTWNEVNSHSNAQCVSNNRDGRTVNSNCEINNRSAANIRALNMPPSLDCRYNREGEQEIHVAQGEDDEEEEEEAEEEGVSGASLSSHRSSLVDEHPEDAEFEQKINRLMAAKQKLRQLQDLVAMVQDDDAAQGVISASASNLDDFYPAEEDTKQNSNNTRGNANKTQKDTGVNEKAREKFYEAKLQQQQRELKQLQEERKKLIDIQEKIQALQTACPDLQLSAASVGNCPTKKYMPAVTSTPTVNQHETSTSKSVFEPEDSSIVDNELWSEMRRHEMLREELRQRRKQLEALMAEHQRRQGLAETASPVAVSLRSDGSENLCTPQQSRTEKTMATWGGSTQCALDEEGDEDGYLSEGIVRTDEEEEEEQDASSNDNFSVCPSNSVNHNSYNGKETKNRWKNNCPFSADENYRPLAKTRQQNISMQRQENLRWVSELSYVEEKEQWQEQINQLKKQLDFSVSICQTLMQDQQTLSCLLQTLLTGPYSVMPSNVASPQVHFIMHQLNQCYTQLTWQQNNVQRLKQMLNELMRQQNQHPEKPGGKERGSSASHPPSPSLFCPFSFPTQPVNLFNIPGFTNFSSFAPGMNFSPLFPSNFGDFSQNISTPSEQQQPLAQNSSGKTEYMAFPKPFESSSSIGAEKPRNKKLPEEEVESSRTPWLYEQEGEVEKPFIKTGFSVSVEKSTSSNRKNQLDTNGRRRQFDEESLESFSSMPDPVDPTTVTKTFKTRKASAQASLASKDKTPKSKSKKRNSTQLKSRVKNIRYESASMSSTCEPCKSRNRHSAQTEEPVQAKVFSRKNHEQLEKIIKCNRSTEISSETGSDFSMFEALRDTIYSEVATLISQNESRPHFLIELFHELQLLNTDYLRQRALYALQDIVSRHISESHEKGENVKSVNSGTWIASNSELTPSESLATTDDETFEKNFERETHKISEQNDADNASVLSVSSNFEPFATDDLGNTVIHLDQALARMREYERMKTEAESNSNMRCTCRIIEDGDGAGAETPVIENRSSQQPVSEVSTIPCPRIDTQQLDRQIKAIMKEVIPFLKEHMDEVCSSQLLTSVRRMVLTLTQQNDESKEFVKFFHKQLGSILQDSLAKFAGRKLKDCGEDLLVEISEVLFNELAFFKLMQDLDNNSITVKQRCKRKIEATGVIQSCAKEAKRILEDHGSPAGEIDDEDKDKDETETVKQTQTSEVYDGPKNVRSDISDQEEDEESEGCPVSINLSKAETQALTNYGSGEDENEDEEMEEFEEGPVDVQTSLQANTEATEENEHDEQVLQRDFKKTAESKNVPLEREATSKNDQNNCPVKPCYLNILEDEQPLNSAAHKESPPTVDSTQQPNPLPLRLPEMEPLVPRVKEVKSAQETPESSLAGSPDTESPVLVNDYEAESGNISQKSDEEDFVKVEDLPLKLTIYSEADLRKKMVEEEQKNHLSGEICEMQTEELAGNSETLKEPETVGAQSI

SEQ ID NO: 15379 - protein, 58 aa, Homo sapiens
MLQGLLPVSLLLSVAVSAIKELPGVKKYEVVYPIRLHPLHKREAKEPEQQFLSSMKIS

SEQ ID NO: 15380 - protein, 137 aa, Homo sapiens
MKFLIFAFFGGVHLLSLCSGKAICKNGISKRTFEEIKEEIASCGDVAKAIINLAVYGKAQNRSYERLALLVDTVGPRLSGSKNLEKAIQIMYQNLQQDGLEKVHLEPVRIPHWERGEESAVMLEPRIHKIAILGLGS

SEQ ID NO: 15381 - protein, 216 aa, Homo sapiens
MNLLLNSISLLTFLSEFVVIHNGIITNYKDLRKFLESKGYEFESETDTETIAKLIKYVFDNRETEDITFSTLVERVIQQLEGAFALVFKSVHYPGEAVATRRGSPLLIGVRSKYKLSTEQIPILYRTCTLENVKNICKTRMKRLDSSACLHAVGDKAVEFFFASDASAIIEHTNRVIFLEDDDIAAVADGKLSIHRVKRSASDDPSRAIQTLQMEL

SEQ ID NO: 15382 - protein, 1275 aa, Homo sapiens
MLWRTERLYKPYVFFFKYTYAWVLLLPLLLTDNINVFLKACEQIGLKEAQLFHPGDLQDLSNRVTVKQEETDRRVKNVLITLYWLGRKAQSNPYYNGPHLNLKAFENLLGQALTKALEDSSFLKRSGRDSGYGDIWCPERGEFLAPPRHHKREDSFESLDSLGSRSLTSCSSDITLRGGREGFESDTDSEFTFKMQDYNKDDMSYRRISAVEPKTALPFNRFLPNKSRQPSYVPAPLRKKKPDKHEDNRRSWASPVYTEADGTFSRSKSMSDVSAEDVQNLRQLRYEEMQKIKSQLKEQDQKWQDDLAKWKDRRKSYTSDLQKKKEEREEIEKQALEKSKRSSKTFKEMLQDRESQNQKSTVPSRRRMYSFDDVLEEGKRPPTMTVSEASYQSERVEEKGATYPSEIPKEDSTTFAKREDRVTTEIQLPSQSPVEEQSPASLSSLRSRSTQMESTRVSASLPRSYRKTDTVRLTSVVTPRPFGSQTRGISSLPRSYTMDDAWKYNGDVEDIKRTPNNVVSTPAPSPDASQLASSLSSQKEVAATEEDVTRLPSPTSPFSSLSQDQAATSKATLSSTSGLDLMSESGEGEISPQREVSRSQDQFSDMRISINQTPGKSLDFGFTIKWDIPGIFVASVEAGSPAEFSQLQVDDEIIAINNTKFSYNDSKEWEEAMAKAQETGHLVMDVRRYGKADWGKDQPSLPFIRHKTLNLTSMATKIIGSPETKWIDATSGIYNSEKSSNLSVTTDFSESLQSSNIESKEINGIHDESNAFESKASESISLKNLKRRSQFFEQGSSDSVVPDLPVPTISAPSRWVWDQEEERKRQERWQKEQDRLLQEKYQREQEKLREEWQRAKQEAERENSKYLDEELMVLSSNSMSLTTREPSLATWEATWSEGSKSSDREGTRAGEEERRQPQEEVVHEDQGKKPQDQLVIERERKWEQQLQEEQEQKRLQAEAEEQKRPAEEQKRQAEIERETSVRIYQYRRPVDSYDIPKTEEASSGFLPGDRNKSRSTTELDDYSTNKNGNNKYLDQIGNMTSSQRRSKKEQVPSGAELERQQILQEMRKRTPLHNDNSWIRQRSASVNKEPVSLPGIMRRGESLDNLDSPRSNSWRQPPWLNQPTGFYASSSVQDFSRPPPQLVSTSNRAYMRNPSSSVPPPSAGSVKTSTTGVATTQSPTPRSHSPSASQSGSQLRNRSVSGKRICSYCNNILGKGAAMIIESLGLCYHLHCFKCVACECDLGGSSSGAEVRIRNHQLYCNDCYLRFKSGRPTAM

SEQ ID NO: 15383 - protein, 33 aa, Homo sapiens
MRWRTILLQYCFLLITCLLTALEAVPIDIDKTK

SEQ ID NO: 15384 - protein, 243 aa, Homo sapiens
MRPLLVLLLLGLAAGSPPLDDNKIPSLCPGHPGLPGTPGHHGSQGLPGRDGRDGRDGAPGAPGEKGEGGRPGLPGPRGDPGPRGEAGPAGPTGPAGECSVPPRSAFSAKRSESRVPPPSDAPLPFDRVLVNEQGHYDAVTGKFTCQVPGVYYFAVHATVYRASLQFDLVKNGESIASFFQFFGGWPKPASLSGGAMVRLEPEDQVWVQVGVGDYIGIYASIKTDSTFSGFLVYSDWHSSPVFA

SEQ ID NO: 15385 - protein, 70 aa, Homo sapiens
MWQLWASLCCLLVLANARSRPSFHPLSDELVNYVNKRNTTWQAGHNFYNVDMSYLKRLCGTFLGGPKPPQ

SEQ ID NO: 15386 - protein, 187 aa, Homo sapiens
MSEMAELSELYEESSDLQMDVMPGEGDLPQMEVGSGSRELSLRPSRSGAQQLEEEGPMEEEEAQPMAAPEGKRSLANGPNAGEQPGQVAGADFESEDEGEEFDDWEDDYDYPEEEQLSGAGYRVSAALEEADKMFLRTREPALDGGFQMHYEKTPFDQLAFIEELFSLMVVNRLTEELGCDEIIDRE

SEQ ID NO: 15387 - protein, 110 aa, Homo sapiens
MFALGLPFLVLLVASVESHLGVLGPKNVSQKDAEFERTYVDEVNSELVNIYTFNHTVTRNRTEGVRVSVNVLNKQKGAPLLFVVRQKEAVVSFQVPLILRGMFQRKYLYQ

SEQ ID NO: 15388 - protein, 190 aa, Homo sapiens
MVIWVILSLLGELGKPGLLTSLKNMEQPSKDFCDSHKKSSKSSTYSASSYSSSGKRQNLACFLTNPHCGSLVNADGHGEVWTDWNNMSKFFQYGWRCTTNENTYSNRTLMGNWNQERYDLRNIVQPKPLPSQFGHYFETTYDTSYNNKMPLSTHRFKREPHWFPGHQPELDPPRYKCTEKSTYMNSYSKP

SEQ ID NO: 15389 - protein, 184 aa, Homo sapiens
MPGLLNWITGAALPLTASDVTSCVSGYALGLTASLTYGNLEAQPFQGLFVYPLDECTTVIGFEAVIADRVVTVQIKDKAKLESGHFDASHVRSPTVTGDLGRGFGADPVRGQPGDHCPHGECHHLHQHLLGAPNAAQRGCEGPSACCLCPNRAPVLHQEHWHLQPTGPGQRQALLRCLGPGLLE

SEQ ID NO: 15390 - protein, 488 aa, Homo sapiens
MENLTKHSIECSSFRGDWECKNQFERKQGSQEGHFSEMIFTPEDMPTFSIQHQRIHTDEKLLECKECGKDFSFVSVLVRHQRIHTGEKPYECKECGKAFGSGANLAYHQRIHTGEKPFECKECGKAFGSGSNLTHHQRIHTGEKPYECKECGKAFSFGSGLIRHQIIHSGEKPYECKECGKSFSFESALIRHHRIHTGEKPYECIDCGKAFGSGSNLTQHRRIHTGEKPYECKACGMAFSSGSALTRHQRIHTGEKPYICNECGKAFSFGSALTRHQRIHTGEKPYVCKECGKAFNSGSDLTQHQRIHTGEKPYECKECEKAFRSGSKLIQHQRMHTGEKPYECKECGKTFSSGSDLTQHHRIHTGEKPYECKECGKAFGSGSKLIQHQLIHTGERPYECKECGKSFSSGSALNRHQRIHTGEKPYECKECGKAFYSGSSLTQHQRIHTGEKLYECKNCGKAYGRDSEFQQHKKSHNGKKLCELETIN

SEQ ID NO: 15391 - protein, 131 aa, Homo sapiens
MLIFWTITLFLLGAAKGKEVCYEDLGCFSDTEPWGGTAIRPLKILPWSPEKIGTRFLLYTNENPNNFQILLLSDPSTIEASNFQMDRKTRFIIHGFIDKGDESWVTDMCKKLFEVEEVNCICVDWKKGSQA

SEQ ID NO: 15392 - protein, 60 aa, Homo sapiens
MAAFMLGSLLRTFKQVRPLLLSTPLPLTAESHNPRVPHGSATCSARWFLHQLQAKFEVTM

SEQ ID NO: 15393 - protein, 104 aa, Homo sapiens
MGPGARLAALLAVLALGTGDPERAAARGDTFSALTSVARALAPERRLLGLLRRYLRGEEARLRDLTRFYDKVLSLHEDSTTPVANPLLAFTLIKRLQSDWRNVL

SEQ ID NO: 15394 - protein, 50 aa, Homo sapiens
MKVFFLFAVLFCLVQTNSVHISHREARGPSFRICVDFLGPRWARGCSTGN

SEQ ID NO: 15395 - protein, 1117 aa, Homo sapiens
MDSKDESSHVWPTSAEHEQNAAQVHFVPDTGTVAQIVYTDDQVRPPQQVVYTADGASYTSVDGPEHTLVYIHPVEAAQTLFTDPGQVAYVQQDATAQQTPLGRLEAKEEEDEDEDEDTEEDEEEDGEDTDLDDWEPDPPRPFDPHDLWCEECNNAHASVCPKHGPLHPIPNRPVLTRARASLPLVLYIDRFLGGVFSKRRIPKRTQFGPVEGPLVRGSELKDCYIHLKVSLDKGDRKERDLHEDLWFELSDETLCNWMMFVRPAQNHLEQNLVAYQYGHHVYYTTIKNVEPKQELKVWYAASYAEFVNQKIHDISEEERKVLREQEKNWPCYECNRRFISSEQLQQHLNSHDEKLDVFSRTRGRGRGRGKRRFGPGRRPGRPPKFIRLEITSENGEKSDDGTQDLLHFPTKEQFDEAEPATLNGLDQPEQTTIPIPQLPQETQSSLEHEPETHTLHLQPQHEESVVPTQSTLTADDMRRAKRIRNAALQHLFIRKSFRPFKCLQCGKAFREKDKLDQHLRFHGREGNCPLTCDLCNKGFISSTSLESHMKLHSDQKTYSCIFCPESFDRLDLLKDHVAIHINDGYFTCPTCKKRFPDFIQVKKHVRSFHSEKIYQCTECDKAFCRPDKLRLHMLRHSDRKDFLCSTCGKQFKRKDKLREHMQRMHNPEREAKKADRISRSKTFKPRITSTDYDSFTFKCRLCMMGFRRRGMLVNHLSKRHPDMKIEEVPELTLPIIKPNRDYFCQYCDKVYKSASKRKAHILKNHPGAELPPSIRKLRPAGPGEPDPMLSTHTQLTGTIATPPVCCPHCSKQYSSKTKMVQHIRKKHPEFAQLSNTIHTPLTTAVISATPAVLTTDSATGETVVTTDLLTQAMTELSQTLTTDYRTPQGDYQRIQYIPVSQSASGLQQPQHIQLQVVQVASATSPHQSQQSTVDVGQLHDPQPYPQHAIQVQHIQVSGQPLSPSAQQAQQGLSPSHIQGSSSTQGQALQQQQQQQQNSSVQHTYLPSAWNSFRGYSSEIQMMTLPPGQFVITDSGVATPVTTGQVKAVTSGHYVLSESQSELEEKQTSALSGGVQVEPPAHSDSLDPQTNSQQQTTQYIITTTTNGNGSSEVHITKP

SEQ ID NO: 15396 - protein, 532 aa, Homo sapiens
MALRSVMFSDVSIDFSPEEWEYLDLEQKDLYRDVMLENYSNLVSLGCFISKPDVISSLEQGKEPWKVVRKGRRQYPDLETKYETKKLSLENDIYEINLSQWKIMERIENHGLKGLILKNDWESTGKIEGQERPQEGYFSSVKMPSEKVSSYQKRTSVTPHQRLHFVDKPYECKECGKAFRVRQQLTFHHRIHTGEKPYECKECGMAFRQTAHLTRHQRLHSGEKLYECKECGEAFICGADLRVHQKMHIGEKPYECKECGKAFRVRGQLTLHQRIHTGEKPYVCKECGKAFRQYAHLTRHQKLNSADRLYECKECGKAFLCGSGLRVHHKLHTGEKPYECKECGKAFRVRQQLTLHQRIHTGEKPYECKECGKTFSRGYHLILHHRIHTGEKPYECKECWKAFSRYSQLISHQSIHIGVKPYDCKECGKAFRLLSQLTQHQSIHIGEKPYKCKECGKAFRLRQKLTLHQSIHTGEKPFECKECRKAFRLNSSLIQHLRIHSGEKPYECKECKKAFRQHSHLTHHLKIHNVKI

SEQ ID NO: 15397 - protein, 668 aa, Homo sapiens
MNGQEVFYLTYTPEDVEGNVQLETGDKINFVIDNNKHTGAVSARNIMLLKKKQARCQGVVCAMKEAFGFIERGDVVKEIFFHYSEFKGDLETLQPGDDVEFTIKDRNGKEVATDVRLLPQGTVIFEDISIEHFEGTVTKVIPKVPSKNQNDPLPGRIKVDFVIPKELPFGDKDTKSKVTLLEGDHVRFNISTDRRDKLERATNIEVLSNTFQFTNEAREMGVIAAMRDGFGFIKCVDRDVRMFFHFSEILDGNQLHIADEVEFTVVPDMLSAQRNHAIRIKKLPKGTVSFHSHSDHRFLGTVEKEATFSNPKTTSPNKGKEKEAEDGIIAYDDCGVKLTIAFQAKDVEGSTSPQIGDKVEFSISDKQRPGQQVATCVRLLGRNSNSKRLLGYVATLKDNFGFIETANHDKEIFFHYSEFSGDVDSLELGDMVEYSLSKGKGNKVSAEKVNKTHSVNGITEEADPTIYSGKVIRPLRSVDPTQTEYQGMIEIVEEGDMKGEVYPFGIVGMANKGDCLQKGESVKFQLCVLGQNAQTMAYNITPLRRATVECVKDQFGFINYEVGDSKKLFFHVKEVQDGIELQAGDEVEFSVILNQRTGKCSACNVWRVCEGPKAVAAPRPDRLVNRLKNITLDDASAPRLMVLRQPRGPDNSMGFGAERKIRQAGVID

SEQ ID NO: 15398 - protein, 56 aa, Homo sapiens
MKYSCCALVLAVLGTELLGSLCSTVRSPRFRGRIQQERKNIRPNIILVLTDDQDVE

SEQ ID NO: 15399 - protein, 71 aa, Homo sapiens
MPVKKKRKSPGVAAAVAEDGGLKKCKISRYHLPPPFKLPSSLLCWTTGGKGVGPGLPGWGWRQLLQIPTPC

SEQ ID NO: 15400 - protein, 167 aa, Homo sapiens
MDRVLLRWISLFWLTAMVEGLQVTVPDKKKVAMLFQPTVLRCHFSTSSHQPAVVQWKFKSYCQDRMGESLGMSSTRAQSLSKRNLEWDPYLDCLDSRRTVRVVASKQGSTVTLGDFYRGREITIVHDADLQIGKLMWGDSGLYYCIITTPDDLEGKNEDSVELLVLE

SEQ ID NO: 15401 - protein, 261 aa, Homo sapiens
MGQPWAAGSTDGAPAQLPLVLTALWAAAVGLELAYVLVLGPGPPPLGPLARALQLALAAFQLLNLLGNVGLFLRSDPSIRGVMLAGRGLGQGWAYCYQCQSQVPPRSGHCSACRVCILRRDHHCRLLGRCVGFGNYRPFLCLLLHAAGVLLHVSVLLGPALSALLRAHTPLHMAALLLLPWLMLLTDNPCPATALTTTKRSPWCPRSILCMCLQQLSEHPRLPPAHLHREVPSTPQAQCCGNQPHAPSSLRNSDLQATCTS

SEQ ID NO: 15402 - protein, 143 aa, Homo sapiens
MNLQPIFWIGLISSVCCVFAQTDENRCLKANAKSCGECIQAGPNCGWCTNSTFLQEGMPTSARCDDLEALKKKGCPPDDIENPRGSKDIKKNKNVTNRSKGTAEKLKPEDITQIQPQQLVLRLRSGEPQTFTLKFKRAEDYPI

SEQ ID NO: 15403 - protein, 34 aa, Homo sapiens
MRWRTILLQYCFLLITCLLTALEAVPIDIDKTKV

SEQ ID NO: 15404 - protein, 162 aa, Homo sapiens
MAWKTLPIYLLLLLSVFVIQQVSSQELSCKGRCFESFERGRECDCDAQCKKYDKCCPDYESFCAEEHSVSENQESSSSSSSSSSSSTIRKIKSSKNSAANRELQKKLKVKDNKKNRTKKKPTPKPPVVDEAGSGLDNGDFKVTTPDTSTTQHNKVSTSPKIT

SEQ ID NO: 15405 - protein, 195 aa, Homo sapiens
MRWRTILLQYCFLLITCLLTALEAVPIDIDKTKVQNIHPVESAKIEPPDTGLYYDEYLKQVIDVLETDKHFREKLQKADIEEIKSGRLSKELDLVSHHVRTKLDELKRQEVGRLRMLIKAKLDSLQDIGMDHQALLKQFDHLNHLNPDKFESTDLDMLIKAATSDLEHYDKTRHEEFKKYEMMKEHERREYLKTL

SEQ ID NO: 15406 - protein, 153 aa, Homo sapiens
MVTQAQQEITVQQLMAHLDAIRKDMVILEKSEFANLRAENEKMKIELDQVKQQLMHETSRIRADNKLDINLERSRVTDMFTDQEKQLMETTTEFTKKDTQTKSIISETSNKIDAEIASLKTLMESNKLETIRYLAASVFTCLAIALGFYRFWK

SEQ ID NO: 15407 - protein, 118 aa, Homo sapiens
MPMASPQTLVLYLLVLAVTEAWGQEAVIPGCHLHPFNVTVRSDRQGTCQGSHVAQACVGHCESSAFPSRYSVLVASGYRHNITSVSQCCTISGLKKVRRARARWMDAGVAGRPERWRS

SEQ ID NO: 15408 - protein, 90 aa, Homo sapiens
MRLLSFVVLALFAVTQAEEGARLLASKSLLNRYAVEGRDLTLQYNIYNVGSSAALDVELSDDSFPPEDFGIVSGMLNVKWDRIAPYPLGT

SEQ ID NO: 15409 - protein, 128 aa, Homo sapiens
MADSSGQQAPDYRSILSISDEAARAQALNEHLSTRSYVQGYSLSQADVDAFRQLSAPPADPQLFHVARWFRHIEALLGSPCGKGQPCRLQASKGRRVQPQWSPPAGTQPCRLHLYNSLTRNKCFLHFL

SEQ ID NO: 15410 - protein, 308 aa, Homo sapiens
MVPEVRVLSSLLGLALLWFPLDSHARARPDMFCLFHGKRYSPGESWHPYLEPQGLMYCLRCTCSEGAHVSCYRLHCPPVHCPQPVTEPQQCCPKCVEPHTPSGLRAPPKSCQHNGTMYQHGEIFSAHELFPSRLPNQCVLCSCTEGQIYCGLTTCPEPGCPAPLPLPDSCCQACKDEASEQSDEEDSVQSLHGVRHPQDPCSSDAGRKRGPGTPAPTGLSAPLSFIPRHFRPKGAGSTTVKIVLKEKHKKEDKADPGHSEISSTRCPKAPGRVLVHTSVSPSPDNLRRFALEHEASDLVEIYLWKLVK

SEQ ID NO: 15411 - protein, 85 aa, Homo sapiens
MRSLLLLSAFCLLEAATLAERSAGLAFSLYQAMAKDQAVENILVSPVVVASSLGLVSLGGKATTASQAKAVLSAEQLRDEEVHAG

SEQ ID NO: 15412 - protein, 524 aa, Homo sapiens
MPTVEELYRNYGILADATEQVGQHKDAYQVILDGVKGGTKEKRLAAQFIPKFFKHFPELADSAINAQLDLCEDEDVSIRRQAIKELPQFATGENLPRVADILTQLLQTDDSAEFNLVNNALLSIFKMDAKGTLGGLFSQILQGEDIVRERAIKFLSTKLKTLPDEVLTKEVEELILTESKKVLEDVTGEEFVLFMKILSGLKSLQTVSGRQQLVELVAEQADLEQTFNPSDPDCVDRLLQCTRQAVPLFSKNVHSTRFVTYFCEQVLPNLGTLTTPVEGLDIQLEVLKLLAEMSSFCGDMEKLETNLRKLFDKLLEYMPLPPEEAENGENAGNEEPKLQFSYVECLLYSFHQLGRKLPDFLTAKLNAEKLKDFKIRLQYFARGLQVYIRQLRLALQGKTGEALKTEENKIKVVALKITNNINVLIKDLFHIPPSYKSTVTLSWKPVQKVEIGQKRASEDTTSGSPPKKSSAGPKRDARQIYNPPSGKYSSNLGNFNYEQRGAFRGSRGGRGWGTRGNRSRGRLY

SEQ ID NO: 15413 - protein, 1155 aa, Homo sapiens
MKTLAERRRSAPSLILDKALQKRPTTRDSPSASVDTCTFLSSLVCSNRTLLIDGRAELKRGLQRQERHLFLFNDLFVVAKIKYNNNFKIKNKIKLTDMWTASCVDEVGEGNTNAMKSFVLGWPTVNFVATFSSPEQKDKWLSLLQRYINLEKEKDYPKSIPLKIFAKDIGNCAYSKTITVMNSDTANEVINMSLPMLGITGSERDYQLWVNSGKEEAPYPLIGHEYPYGIKMSHLRDSALLTPGSKDSTTPFNLQEPFLMEQLPREMQCQFILKPSRLAAAQQLSDSGHKTFKRRRSIINWAFWRGSSTHLDNLPSSPTSPMPGQLFGISLPNICENDNLPKPVLDMLFFLNQKGPLTKGIFRQSANVKSCRELKEKLNSGVEVHLDCESIFVIASVLKDFLRNIPGSIFSSDLYDHWVSVMDQGNDEEKINTVQRLLDQLPRANVVLLRYLFGVLHNIEQHSSSNQMTAFNLAVCVAPSILWPPASSSPELENEFTKKVSLLIQFLIENCLRIFGEEITSLFREVSVRCDTRENASDISCFQLNDSSYDSLENELNEDVDAPCSDLVKKLGQGSRSMDSVLTLSDYDLDQPEVEGLLTLSDFDLAHSKDEDVQMKRPLESKPVNILVYTKIPLRDHARAPSAMCTPSYLSTAAANAAKSLRRHRRCSEPSIDYLDSKLSYLREFYQKKLRKSSCDAILSQKDEDYLKQNQPLQEEGKTCFKQSLVTGTDVSKKNATTQNTKKKSLSGSEGNHVKLFPKSKPVAISVASYSPMSSQDHSKNQPFDVNTSGYSPPHTADALKGPRTHRRCSEPNIEDQNRKLTYLRGIYSKKQHKTSCEAGLLHGEEDYLKRHKSLQMEGQKLINQSLVMGIEVGKSSATNQNTEKVLPPRLNLCPRTSYSSLSSPGTSPSGSSVSSQDSAFSQISEHSVFTPTETSSPIDCTFQAQRKREDLSPDFSNASHVSGMPGPSSGQACSRPAYTKKDTMEWHSQMHSVTLHPSTWLRNGVASLKNWSLKKKAKAARPEEEKIASPKGPLEPPPHASGVPEANSLQEEQKDLPLRAAEGLSPVQSAQRCSSSPFQDSERHCSSPFSLVESRLKLCMKSHEEIEPGSQSSSGSLPWERASASSWTLEDATSPDSGPTVVCDIEDRYLTKDI

SEQ ID NO: 15414 - protein, 118 aa, Homo sapiens
MLIFWTITLFLLGAAKGKEVCYEDLGCFSDTEPWGGTAIRPLKILPWSPEKIGTRFLLYTNENPNNFQILLLSDPSTIEASNFQMDRKTRFIIHGFIDKGDESWVTDMCKQPGASPRA

SEQ ID NO: 15415 - protein, 844 aa, Homo sapiens
MFWKFDLHSSSHIDTLLEREDVTLKELMDEEDVLQECKAQNRKLIEFLLKAECLEDLVSFIIEEPPQDMDEKIRYKYPNISCELLTSDVSQMNDRLGEDESLLMKLYSFLLNDSPLNPLLASFFSKVLSILISRKPEQIVDFLKKKHDFVDLIIKHIGTSAIMDLLLRLLTCIEPPQPRQDVLNWLNEEKIIQRLVEIVHPSQEEDRHSNASQSLCEIVRLSRDQMLQIQNSTEPDPLLATLEKQEIIEQLLSNIFHKEKNESAIVSAIQILLTLLETRRPTFEGHIEICPPGMSHSACSVNKSVLEAIRGRLGSFHELLLEPPKKSVMKTTWGVLDPPVGNTRLNVIRLISSLLQTNTSSINGDLMELNSIGVILNMFFKYTWNNFLHTQVEICIALILASPFENTENATITDQDSTGDNLLLKHLFQKCQLIERILEAWEMNEKKQAEGGRRHGYMGHLTRIANCIVHSTDKGPNSALVQQLIKDLPDEVRERWETFCTSSLGETNKRNTVDLAFSDYQMQQMTSNFIDQFGFNDEKFADQDDIGNVSFDRVSDINFTLNTNESGNIALFEACCKERIQQFDDGGSDEEDIWEEKHIAFTPESQRRSSSGSTDSEESTDSEEEDGAKQDLFEPSSANTEDKMEVDLSEPPNWSANFDVPMETTHGAPLDSVGSDVWSTEEPMPTKETGWASFSEFTSSLSTKDSLRSNSPVEMETSTEPMDPLTPSAAALAVQPEAAGSVAMEASSDGEEDAESTDKVTETVMNGGMKETLSLTVDAKTETAVFKSEEGKLSTSQDAACKDAEECPETAEAKCAAPRPPSSSPEQRTGQPSAPGDTSVNGPV

SEQ ID NO: 15416 - protein, 35 aa, Homo sapiens
MDQALSLWFLLGWIGGDSCNLIGSFLADQLPLQTW

SEQ ID NO: 15417 - protein, 796 aa, Homo sapiens
MLRGGRRGQLGWHSWAAGPGSLLAWLILASAGAAPCPDACCPHGSSGLRCTRDGALDSLHHLPGAENLTELYIENQQHLQHLELRDLRGLGELRNLTIVKSGLRFVAPDAFHFTPRLSRLNLSFNALESLSWKTVQGLSLQELVLSGNPLHCSCALRWLQRWEEEGLGGVPEQKLQCHGQGPLAHMPNASCGVPTLKVQVPNASVDVGDDVLLRCQVEGRGLEQAGWILTELEQSATVMKSGGLPSLGLTLANVTSDLNRKNVTCWAENDVGRAEVSVQVNVSFPASVQLHTAVEMHHWCIPFSVDGQPAPSLRWLFNGSVLNETSFIFTEFLEPAANETVRHGCLRLNQPTHVNNGNYTLLAANPFGQASASIMAAFMDNPFEFNPEDPIPVSFSPVDTNSTSGDPVEKKDETPFGVSVAVGLAVFACLFLSTLLLVLNKCGRRNKFGINRPAVLAPEDGLAMSLHFMTLGGSSLSPTEGKGSGLQGHIIENPQYFSDACVHHIKRRDIVLKWELGEGAFGKVFLAECHNLLPEQDKMLVAVKALKEASESARQDFQREAELLTMLQHQHIVRFFGVCTEGRPLLMVFEYMRHGDLNRFLRSHGPDAKLLAGGEDVAPGPLGLGQLLAVASQVAAGMVYLAGLHFVHRDLATRNCLVGQGLVVKIGDFGMSRDIYSTDYYRVGGRTMLPIRWMPPESILYRKFTTESDVWSFGVVLWEIFTYGKQPWYQLSNTEAIDCITQGRELERPRACPPEVYAIMRGCWQREPQQRHSIKDVHARLQALAQAPPVYLDVLG

SEQ ID NO: 15418 - protein, 36 aa, Homo sapiens
MFSLKTLPFLLLLHVQISKAFPVSSKEKNTKTVQNK

SEQ ID NO: 15419 - protein, 512 aa, Homo sapiens
MLLPLLLSSLLGGSQAMDGRFWIRVQESVMVPEGLCISVPCSFSYPRQDWTGSTPAYGYWFKAVTETTKGAPVATNHQSREVEMSTRGRFQLTGDPAKGNCSLVIRDAQMQDESQYFFRVERGSYVRYNFMNDGFFLKVTALTQKPDVYIPETLEPGQPVTVICVFNWAFEECPPPSFSWTGAALSSQGTKPTTSHFSVLSFTPRPQDHNTDLTCHVDFSRKGVSAQRTVRLRVAYAPRDLVISISRDNTPDPPENLRVMVSQANRTVLENLGNGTSLPVLEGQSLCLVCVTHSSPPARLSWTQRGQVLSPSQPSDPGVLELPRVQVEHEGEFTCHARHPLGSQHVSLSLSVHYKKGLISTAFSNGAFLGIGITALLFLCLALIIMKILPKRRTQTETPRPRFSRHSTILDYINVVPTAGPLAQKRNQKATPNSPRTPLPPGAPSPESKKNQKKQYQLPSFPEPKSSTQAPESQESQEELHYATLNFPGVRPRPEARMPKGTQADYAEVKFQ

SEQ ID NO: 15420 - protein, 182 aa, Homo sapiens
MEQGKGLAVLILAIILLQGTLAQSIKGNHLVKVYDYQEDGSVLLTCDAEAKNITWFKDGKMIGFLTEDKKKWNLGSNAKDPRGMYQCKGSQNKSKPLQVYYRMCQNCIELNAATISGFLFAEIVSIFVLAVGVYFIAGQDGVRQSRASDKQTLLPNDQLYQPLKDREDDQYSHLQGNQLRRN

SEQ ID NO: 15421 - protein, 300 aa, Homo sapiens
MTVVGNPRSWSCQWLPILILLLGTGHGPGVEGVTHYKAGDPVILYVNKVGPYHNPQETYHYYQLPVCCPEKIRHKSLSLGEVLDGDRMAESLYEIRFRENVEKRILCHMQLSSAQVEQLRQAIEELYYFEFVVDDLPIRGFVGYMEESGFLPHSHKIGLWTHLDFHLEFHGDRIIFANVSVRDVKPHSLDGLRPDEFLGLTHTYSVRWSETSVERRSDRRRGDDGGFFPRTLEIHWLSIINSMVLVFLLVGFVAVILMRVLRNDLARYNLDEETTSAGSGDDFDQGDNGWKIIHTDVFRF

SEQ ID NO: 15422 - protein, 166 aa, Homo sapiens
MVTSSFPISVAVFALITLQVGTQDSFIAAVYEHAVILPNKTETPVSQEDALNLMNENIDILETAIKQAAEQGARIIVTPEDALYGWKFTRETVFPYLEDIPDPQVNWIPCQDPHRFGHTPVQARLSCLAKDNSIYVLANLGDKKPCNSRDSTCPPNGYFQYNTNVV

SEQ ID NO: 15423 - protein, 189 aa, Homo sapiens
MNGLPSAEAPGGAGCALAGLPPLPRGLSGLLNASGGSWRELERVYSQRSRIHDELSRAARAPDGPRHAAGAANAGPAAGPRRPVNLDSALAALRKEMVGLRQLDMSLLCQLWGLYESIQDYKHLCQDLSFCQDLSSSLHSDSSYPPDAGLSDDEEPPDASLPPDPPPLTVPQTHNARDQWLQDAFHISL

SEQ ID NO: 15424 - protein, 704 aa, Homo sapiens
MTAGSSYPLFLAAYACTGCLAERLGWFIKSSNEATNITPKHNMKAFLDELKAENIKKFLYNFTQIPHLAGTEQNFQLAKQIQSQWKEFGLDSVELAHYDVLLSYPNKTHPNYISIINEDGNEIFNTSLFEPPPPGYENVSDIVPPFSAFSPQGMPEGDLVYVNYARTEDFFKLERDMKINCSGKIVIARYGKVFRGNKVKNAQLAGAKGVILYSDPADYFAPGVKSYPDGWNLPGGGVQRGNILNLNGAGDPLTPGYPANEYAYRRGIAEAVGLPSIPVHPIGYYDAQKLLEKMGGSAPPDSSWRGSLKVPYNVGPGFTGNFSTQKVKMHIHSTNEVTRIYNVIGTLRGAVEPDRYVILGGHRDSWVFGGIDPQSGAAVVHEIVRSFGTLKKEGWRPRRTILFASWDAEEFGLLGSTEWAEENSRLLQERGVAYINADSSIEGNYTLRVDCTPLMYSLVHNLTKELKSPDEGFEGKSLYESWTKKSPSPEFSGMPRISKLGSGNDFEVFFQRLGIASGRARYTKNWETNKFSGYPLYHSVYETYELVEKFYDPMFKYHLTVAQVRGGMVFELANSIVLPFDCRDYAVVLRKYADKIYSISMKHPQEMKTYSVSFDSLFSAVKNFTEIASKFSERLQDFDKSKHVIYAPSSHNKYAGESFPGIYDALFDIESKVDPSKAWGEVKRQIYVAAFTVQAAAETLSEVA

SEQ ID NO: 15425 - protein, 339 aa, Homo sapiens
MNHSERFVFIAEWYDPNASLLRRYELLFYPGDGSVEMHDVKNHRTFLKRTKYDNLHLEDLFIGNKVNVFSRQLVLIDYGDQYTARQLGSRKEKTLALIKPDAISKAGEIIEIINKAGFTITKLKMMMLSRKEALDFHVDHQSRPFFNELIQFITTGPIIAMEILRDDAICEWKRLLGPANSGVARTDASESIRALFGTDGIRNAAHGPDSFASAAREMELFFPSSGGCGPANTAKFTNCTCCIVKPHAVSEGLLGKILMAIRDAGFEISAMQMFNMDRVNVEEFYEVYKGVVTEYHDMVTEMYSGPCVAMEIQQNNATKTFREFCGPADPTPKSPISHK

SEQ ID NO: 15426 - protein, 28 aa, Homo sapiens
LAILLTFFHPFLVYRECRTWKESPSAIA

SEQ ID NO: 15427 - protein, 995 aa, Homo sapiens
MDALNRNQIGPGCQTQTMVQKGPLDLIETGKGLKVQTDKPHLVSLGSGRLSTAITLLPLEEGRTVIGSAARDISLQGPGLAPEHCYIENLRGTLTLYPCGNACTIDGLPVRQPTRLTQGCMLCLGQSTFLRFNHPAEAKWMKSMIPAGGRAPGPPYSPVPAESESLVNGNHTPQTATRGPSACASHSSLVSSIEKDLQEIMDSLVLEEPGAAGKKPAATSPLSPMANGGRYLLSPPTSPGAMSVGSSYENTSPAFSPLSSPASSGSCASHSPSGQEPGPSVPPLVPARSSSYHLALQPPQSRPSGARSESPRLSRKGGHERPPSPGLRGLLTDSPAATVLAEARRATESPRLGGQLPVVAISLSEYPASGALSQPTSIPGSPKFQPPVPAPRNKIGTLQDRPPSPFREPPGSERVLTTSPSRQLVGRTFSDGLATRTLQPPESPRLGRRGLDSMRELPPLSPSLSRRALSPLPTRTTPDPKLNREVAESPRPRRWAAHGASPEDFSLTLGARGRRTRSPSPTLGESLAPHKGSFSGRLSPAYSLGSLTGASPCQSPCVQRKLSSGDLRVPVTRERKNSITEISDNEDDLLEYHRRQRQERLREQEMERLERQRLETILNLCAEYSRADGGPEAGELPSIGEATAALALAGRRPSRGLAGASGRSSEEPGVATQRLWESMERSDEENLKEECSSTESTQQEHEDAPSTKLQGEVLALEEERAQVLGHVEQLKVRVKELEQQLQESAREAEMERALLQGEREAERALLQKEQKAVDQLQEKLVALETGIQKERDKEAEALETETKLFEDLEFQQLERESRVEEERELAGQGLLRSKAELLRSIAKRKERLAILDSQAGQIRAQAVQESERLARDKNASLQLLQKEKEKLTVLERRYHSLTGGRPFPKTTSTLKEVYRSKMDGEATSPLPRTRSGPLPSSSGSSSSSSQLSVATLGRSPSPKSALLTQNGTGSLPRNLAATLQDIETKRQLALQQKGE

SEQ ID NO: 15428 - protein, 529 aa, Homo sapiens
MDLPVGPGAAGPSNVPAFLTKLWTLVSDPDTDALICWSPSGNSFHVFDQGQFAKEVLPKYFKHNNMASFVRQLNMYGFRKVVHIEQGGLVKPERDDTEFQHPCFLRGQEQLLENIKRKVTSVSTLKSEDIKIRQDSVTKLLTDVQLMKGKQECMDSKLLAMKHENEALWREVASLRQKHAQQQKVVNKLIQFLISLVQSNRILGVKRKIPLMLNDSGSAHSMPKYSRQFSLEHVHGSGPYSAPSPAYSSSSLYAPDAVASSGPIISDITELAPASPMASPGGSIDERPLSSSPLVRVKEEPPSPPQSPRVEEASPGRPSSVDTLLSPTALIDSILRESEPAPASVTALTDARGHTDTEGRPPSPPPTSTPEKCLSVACLDKNELSDHLDAMDSNLDNLQTMLSSHGFSVDTSALLDLFSPSVTVPDMSLPDLDSSLASIQELLSPQEPPRPPEAENSSPDSGKQLVHYTAQPLFLLDPGSVDTGSNDLPVLFELGEGSYFSEGDGFAEDPTISLLTGSEPPKAKDPTVS

SEQ ID NO: 15429 - protein, 136 aa, Homo sapiens
MWQLWASLCCLLVLANARSRPSFHPLSDELVNYVNKRNTTWQAGHNFYNVDMSYLKRLCGTFLGGPKPPQRVMFTEDLKLPASFDAREQWPQCPTIKEIRDQGSCGSCWAFGAVEAISDRICIHTNAHVSVEVSAE

SEQ ID NO: 15430 - protein, 248 aa, Homo sapiens
MAPGAPSSSPSPILAVLLFSSLVLSPAQAIVVYTDREVHGAVGSRVTLHCSFWSSEWVSDDISFTWRYQPEGGRDAISIFHYAKGQPYIDEVGTFKERIQWVGDPRWKDGSIVIHNLDYSDNGTFTCDVKNPPDIVGKTSQVTLYVFEKVPTRYGVVLGAVIGGVLGVVLLLLLLFYVVRYCWLRRQAALQRRLSAMEKGKLHKPGKDASKRGRQTPVLYAMLDHSRSTKAVSEKKAKGLGESRKDKK

SEQ ID NO: 15431 - protein, 381 aa, Homo sapiens
MALPPGPAALRHTLLLLPALLSSGWGELEPQIDGQTWAERALRENERHAFTCRVAGGPGTPRLAWYLDGQLQEASTSRLLSVGGEAFSGGTSTFTVTAHRAQHELNCSLQDPRSGRSANASVILNVQFKPEIAQVGAKYQEAQGPGLLVVLFALVRANPPANVTWIDQDGPVTVNTSDFLVLDAQNYPWLTNHTVQLQLRSLAHNLSVVATNDVGVTSASLPAPGLLATRVEVPLLGIVVAAGLALGTLVGFSTLVACLVCRKEKKTKGPSRHPSLISSDSNNLKLNNVRLPRENMSLPSNLQLNDLTPDSRVKPADRQMAQNNSRPELLDPEPGGLLTSQACLLHHGTPALTNPWLPHQQEGALPGGWSPQAHNSTVWKL

SEQ ID NO: 15432 - protein, 277 aa, Homo sapiens
MEQRPRGCAAVAAALLLVLLGARAQGGTRSPRCDCAGDFHKKIGLFCCRGCPAGHYLKAPCTEPCGNSTCLVCPQDTFLAWENHHNSECARCQACDEQASQVALENCSAVADTRCGCKPGWFVECQVSQCVSSSPFYCQPCLDCGALHRHTRLLCSRRDTDCGTCLPGFYEHGDGCVSCPTPPPSLAGAPWGAVQSAVPLSVAGGRVGGVLGMRVGELGWTEGRRVRRGATTQHPPAAFSVLGPGAPGWPCGPPPAWGHPDLHIPPLLASQAPGYCR

SEQ ID NO: 15433 - protein, 68 aa, Homo sapiens
MMVALRGASALLVLFLAAFLPPPQCTQDPAMVHYIYQRFRVLEGWKNVPKQRGHTFKNSKSSQKIYLS

SEQ ID NO: 15434 - protein, 91 aa, Homo sapiens
MKHYHLKRNQSFCPTVNLDKLWTLVSEQTRVNAAKNKTGAAPIIDVVRSGYYKVLGKGKLPKQPVIVKAKFFSRRAEEKIKSVGGACVLVA

SEQ ID NO: 15435 - protein, 488 aa, Homo sapiens
MDPGQQPPPQPAPQGQGQPPSQPPQGQGPPSGPGQPAPAATQAAPQAPPAGHQIVHVRGDSETDLEALFNAVMNPKTANVPQTVPMRLRKLPDSFFKPPEPKSHSRQASTDAGTAGALTPQHVRAHSSPASLQLGAVSPGTLTPTGVVSGPAATPTAQHLRQSSFEIPDDVPLPAGWEMAKTSSGQRYFLNHIDQTTTWQDPRKAMLSQMNVTAPTSPPVQQNMMNSASGPLPDGWEQAMTQDGEIYYINHKNKTTSWLDPRLDPRFAMNQRISQSAPVKQPPPLAPQSPQGGVMGGSNSNQQQQMRLQQLQMEKERLRLKQQELLRQELALRSQLPTLEQDGGTQNPVSSPGMSQELRTMTTNSSDPFLNSGTYHSRDESTDSGLSMSSYSVPRTPDDFLNSVDEMDTGDTINQSTLPSQQNRFPDYLEAIPGTNVDLGTLEGDGMNIEGEELMPSLQEALSSDILNDMESVLAATKLDKESFLTWL

SEQ ID NO: 15436 - protein, 77 aa, Homo sapiens
MAAAAVARLWWRGILGASALTRATVRPRNDVAHKQLSAFGEYVAEILPKYVQQVQVSCFNELEVCIHPDGVIPVLTF

SEQ ID NO: 15437 - protein, 132 aa, Homo sapiens
MQRLGATLLCLLLAAAVPTAPAPAPTATSAPVKPGPALSYPQEEATLNEMFREVEELMEDTQHKLRSAVEEMEAEEAAAKASSEVNLANLPPSYHNETNTDTKVGNNTIHVHREIHKECIIDEDCGPSMYCQ

SEQ ID NO: 15438 - protein, 205 aa, Homo sapiens
MTGLALLYSGVFVAFWACALAVGVCYTIFDLGFRFDVAWFLTETSPFMWSNLGIGLAISLSVVGAAWGIYITGSSIIGGGVKAPRIKTKNLVSIIFCEAVAIYGIIMAIVISNMAEPFSATDPKAIGHRNYHAGYSMFGAGLTVGLSNLFCGVCVGIVGSGAALADAQNPSLFVKILIVEIFGSAIGLFGVIVAILQTSRVKMGD

SEQ ID NO: 15439 - protein, 158 aa, Homo sapiens
MPGPLGLLCFLALGLLGSAGPSGAAPPLCAAPCSCDGDRRVDCSGKGLTAVPEGLSAFTQALDISMNNITQLPEDAFKNFPFLEELRLDANHITSVPEDSFEGLVQLRHLWLDDNSLTEVPVHPLSNLPTLQALTLALNKISSIPDFAFTNLSSLVVL

SEQ ID NO: 15440 - protein, 148 aa, Homo sapiens
MASPGCLWLLAVALLPWTCASRALQHLDPPAPLPLVIWHGMGDSCCNPLSMGAIKKMVEKKIPGIYVLSLEIGKTLMEDVENSFFLNVNSQVTTVCQALAKDPKLQQGYNAMGFSQGGQFLRAVAQRCPSPPMINLISVGGQHQVPCA

SEQ ID NO: 15441 - protein, 328 aa, Homo sapiens
MAYSTVQRVALASGLVLALSLLLPKAFLSRGKRQEPPPTPEGKLGRFPPMMHHHQAPSDGQTPGARFQRSHLAEAFAKAKGSGGGAGGGGSGRGLMGQIIPIYGFGIFLYILYILFKLSKGKTTAEDGKCYTAMPGNTHRKITSFELAQLQEKLKETEAAMEKLINRVGPNGESTQTDHSDVYVHCLGVFTTKWLDCLIFLSRAQTVTSDQEKRLLHQLREITRVMKEGKFIDRFSPEKEAEEAPYMEDWEGYPEETYPIYDLSDCIKRRQETILVDYPDPKELSAEEIAERMGMIEEEESDHLGWESLPTDPRAQEDNSVTSCDPKP

SEQ ID NO: 15442 - protein, 49 aa, Homo sapiens
MALPPGPAALRHTLLLLPALLSSAQYQPCLSPSQRPPAVFQVGGSWSHK

SEQ ID NO: 15443 - protein, 471 aa, Homo sapiens
MTVGTVKIVIRGDRNTGKTALWHRLQGRPFVEEYIPTQEIQVTSIHWSYKTTDDIVKVEVWDVVDKGKCKKRGDGLKMENDPQEAESEMALDAEFLDVYKNCNGVVMMFDITKQWTFNYILRELPKVPTHVPVCVLGNYRDMGEHRVILPDDVRDFIDNLDRPPGSSYFRYAESSMKNSFGLKYLHKFFNIPFLQLQRETLLRQLETNQLDMDATLEELSVQQETEDQNYGIFLEMMEARSRGHASPLAANGQSPSPGSQSPVVPAGAVSTGSSSPGTPQPAPQLPLNAAPPSSVPPVPPSEALPPPACPSAPAPRRSIISRLFGTSPATEAAPPPPEPVPAAEGPATVQSVEDFVPDDRLDRSFLEDTTPARDEKKVGAKAAQQDSDSDGEALGGNPMVAGFQDDVDLEDQPRGSPPLPAGPVPSQDITLSSEEEAEVAAPTKGPAPAPQQCSEPETKWSGEAQQHQAPC

SEQ ID NO: 15444 - protein, 101 aa, Homo sapiens
MVTSSFPISVAVFALITLQVGTQDSFIAAVYEHAVILPNKTETPVSQEDALNLMNENIDILETAIKQAAEQGARIIVTPEDALYGWKFTRETVFPYLEDIP

SEQ ID NO: 15445 - protein, 169 aa, Homo sapiens
MLCLLLTLGVALVCGVPAMDIPQTKQDLELPKLAGTWHSMAMATNNISLMATLKAPLRVHITSLLPTPEDNLEIVLHRWENNSCVEKKVLGEKTENPKKFKINYTVANEATLLDTDYDNFLFLCLQDTTTPIQSMMCQYLESWWRTMRSCRDSSGLSGPCPGTYGTCWT

SEQ ID NO: 15446 - protein, 430 aa, Homo sapiens
MAAMETETAPLTLESLPTDPLLLILSFLDYRDLINCCYVSRRLSQLSSHDPLWRRHCKKYWLISEEEKTQKNQCWKSLFIDTYSDVGRYIDHYAAIKKAWDDLKKYLEPRCPRMVLSLKEGAREEDLDAVEAQIGCKLPDDYRCSYRIHNGQKLVVPGLLGSMALSNHYRSEDLLDVDTAAGGFQQRQGLKYCLPLTFCIHTGLSQYIAVEAAEGRNKNEVFYQCPDQMARNPAAIDMFIIGATFTDWFTSYVKNVVSGGFPIIRDQIFRYVHDPECVATTGDITVSVSTSFLPELSSVHPPHYFFTYRIRIEMSKDALPEKACQLDSRYWRITNAKGDVEEVQGPGVVGEFPIISPGRVYEYTSCTTFSTTSGYMEGYYTFHFLYFKDKIFNVAIPRFHMACPTFRVSIARLGYLMTSVTVTPTLETIT

SEQ ID NO: 15447 - protein, 420 aa, Homo sapiens
MTVVGNPRSWSCQWLPILILLLGTGHGPGVEGVTHYKAGDPVILYVNKVGPYHNPQETYHYYQLPVCCPEKIRHKSLSLGEVLDGDRMAESLYEIRFRENVEKRILCHMQLSSAQVEQLRQAIEELYYFEFVVDDLPIRGFVGYMEESGFLPHSHKIGLWTHLDFHLEFHGDRIIFANVSVRDVKPHSLDGLRPDEFLGLTHTYSVRWSETSVERRSDRRRGDDGGFFPRTLEIHWLSIINSMVLVFLLVGFVAVILMRVLRNDLARYNLDEETTSAGSGDDFDQGDNGWKIIHTDVFRFPPYRGLLCAVLGVGAQFLALGTGIIVMALLGMFNVHRHGAINSAAILLYALTCCISGYVSSHFYRQIGGERWVWNIILTTSLFSGSASHNHPAASDGLAAGGLSPHCHWRHLWEEQRQPL

SEQ ID NO: 15448 - protein, 948 aa, Homo sapiens
MASSIRRGRGAWTRLLSLLLLAAWEVGSGQLRYSVPEEAKHGTFVGRIAQDLGLELEELVPRLFRVASKRHGDLLEVNLQNGILFVNSRIDREELCGRSAECSIHVEVIVDRPLQVFHVEVEVKDINDNPPIFPMTVKTIRFPESRLLDSRFPLEGASDADIGVNALLSYKLSSSEFFFLDIQANDELSESLSLVLGKSLDREETAEVNLLLVATDGGKPELTGTVQILIKVLDVNDNEPTFAQSVYKVKLLENTANGTLVVKLNASDADEGPNSEIVYSLGSDVSSTIQTKFTIDPISGEIRTKGKLDYEEAKSYEIQVTATDKGTPSMSGHCKISLKLVDINDNTPEVSITSLSLPISENASLGTVIALITVSDRDSGTNGHVTCSLTPHVPFKLVSTFKNYYSLVLDSALDRESVSAYELVVTARDGGSPSLWATTSVSIEVADVNDNAPAFAQPEYTVFVKENNPPGCHIFTVSAWDADAQENALVSYSLVERRVGERALSSYVSVHAESGKVYALQPLDHEEVELLQFQVSARDAGVPPLGSNVTLQVFVLDENDNAPALLAPRAGTAAGAVSELVPWSVGAGHVVAKVRAVDADSGYNAWLSYELQLGTGSARIPFRVGLYTGEISTTRALDEADSPRHRLLVLVKDHGEPALTATATVLVSLVESGQAPKASSRAWVGAAGSEATLVDVNVYLIIAICAVSSLLVLTVLLYTALRCSVPPTEGARAPGKPTLVCSSAVGSWSYSQQRRQRVCSGEDPPKTDLMAFSPSLSQGPDSAEEKQLSESEYVGKPRQPNPDWRYSASLRAGMHSSVHLEEAGILRAGPGGPDQQWPTVSSATPEPEAGEVSPPVGAGVNSNSWTFKYGPGNPKQSGPGELPDKFIIPGSPAIISIRQEPTNSQIDKSDFITFGKKEETKKKKKKKKGNKTQEKKEKGNSTTDNSDQ

SEQ ID NO: 15449 - protein, 353 aa, Homo sapiens
MRNAVCIFYLVLRALDTLEDDMTISVEKKVPLLHNFHSFLYQPDWRFMESKEKDRQVLEDFPTISLEFRNLAEKYQTVIADICRRMGIGMAEFLDKHVTSEQEWDKYCHYVAGLVGIGLSRLFSASEFEDPLVGEDTERANSMGLFLQKTNIIRDYLEDQQGGREFWPQEVWSRYVKKLGDFAKPENIDLAVQCLNELITNALHHIPDVITYLSRLRNQSVFNFCAIPQVMAIATLAACYNNQQVFKGAVKIRKGQAVTLMMDATNMPAVKAIIYQYMEEIYHRIPDSDPSSSKTRQIISTIRTQNLPNCQLISRSHYSPIYLSFVMLLAALSWQYLTTLSQVTEDYVQTGEH

SEQ ID NO: 15450 - protein, 61 aa, Homo sapiens
MSTEGGGRRCQAQVSRRISFSASHRLYSKFLSDEENLKLFGKCNNPNGHGHNYKGGDYAAP

SEQ ID NO: 15451 - protein, 172 aa, Homo sapiens
MKYSCCALVLAVLGTELLGSLCSTVRSPRFRGRIQQERKNIRPNIILVLTDDQDVELGSLQVMNKTRKIMEHGGATFINAFVTTPMCCPSRSSMLTGKYVHNHNVYTNNENCSSPSWQAMHEPRTFAVYLNNTGYRTAFFGKYLNEYNGSYIPPGWREWLGLIKNSRFYNYT

SEQ ID NO: 15452 - protein, 230 aa, Homo sapiens
MHDKGITTAAVCVYPARVCDAVKALKAAGCNIPVASVAAGFPAGQTHLKTRLEEIRLAVEDGATEIDVVINRSLVLTGQWEALYDEIRQFRKACGEAHLKTILATGELGTLTNVYKASMIAMMAGSDFIKTSTGKETVNATFPVAIVMLRAIRDFFWKTGNKIGFKPAGGIRSAKDSLAWLSLVKEELGDEWLKPELFRIGASTLLSDIERQIYHHVTGRYAAYHDLPMS

SEQ ID NO: 15453 - protein, 257 aa, Homo sapiens
MATNFLAHEKIWFDKFKYDDAERRFYEQMNGPVAGASRQSSGPGASSGTSGDHGELVVRIASLEVENQSLRGVVQELQQAISKLEARLNVLEKSSPGHRATAPQTQHVSPMRQVEPPAKKPATPAEDDEDDDIDLFGSDNEEEDKEAAQLREERLRQYAEKKAKKPALVAKSSILLDVKPWDDETDMAQLEACVRSIQLDGLVWGASKLVPVGYGIRKLQIQCVVEDDKVGTDLLEEEITKFEEHVQSVDIAAFNKI

SEQ ID NO: 15454 - protein, 26 aa, Homo sapiens
MRTLFNLLWLALACSPVHTTLSKSDA

SEQ ID NO: 15455 - protein, 264 aa, Homo sapiens
MPVEEFVAGWISGALGLVLGHPFDTVKLLGFFKGMSFPIASIAVVNSVLFGVYSNTLLVLTATSHQERRAQPPSYMHIFLAGCTGGFLQAYCLAPFDLIKVRLQNQTEPRAQPGSPPPRYQGPVHCAASIFREEGPRGLFRGAWALTLRDTPTVGIYFITYEGLCRQYTPEGQNPSSATVLVAGGFAGIASWVAATPLDMIKSRMQMDGLRRRVYQGMLDCMVSSIRQEGLGVFFRGVTINSARAFPVNAVTFLSYEYLLRWWG

SEQ ID NO: 15456 - protein, 155 aa, Homo sapiens
MFCPLKLILLPVLLDYSLGLNDLNVSPPELTVHVGDSALMGCVFQSTEDKCIFKIDWTLSPGEHAKDEYVLYYYSNLSVPIGRFQNRVHLMGDILCNDGSLLLQDVQEADQGTYICEIRLKGESQVFKKAVVLHVLPEEPKELMVHVGGLIQMGC

SEQ ID NO: 15457 - protein, 409 aa, Homo sapiens
MVELFIFLFLLGETPFKVVVKSLSPKELVRIHVPKPLDRNDGTFLMRYRMYETVDEGLKIEVLYGDEHVAQSPYILKGPVYHEYCECPEDPQAWQKTLSCPTKEPQIAKDFASFPSINLQQMLKEVPKRFGDERGAIVHYTILNNHVYRRSLGKYTDFKMFSDEILLSLTRKVLLPDLEFYVNLGDWPLEHRKVNGTPSPIPIISWCGSLDSRDVVLPTYDITHSMLEAMRGVTNDLLSIQGNTGPSWINKTERAFFRGRDSREERLQLVQLSKENPQLLDAGITGYFFFQEKEKELGKAKLMGFFDFFKYKYQVNVDGTVAAYRYPYLMLGDSLVLKQDSPYYEHFYMALEPWKHYVPIKRNLSDLLEKVKWAKSFTLSPRLECSGTISTHCNLCLPGSRNFVPQPPE

SEQ ID NO: 15458 - protein, 133 aa, Homo sapiens
MQLFVRAQELHTFEVTGQETVAQIKAHVASLEGIAPEDQVVLLAGAPLEDEATLGQCGVEALTTLEVAGRMLGGKVHGSLARAGKVRGQTPKVAKQEKKKKKTGRAKRRMQYNRRFVNVVPTFGKKKGPNANS

SEQ ID NO: 15459 - protein, 150 aa, Homo sapiens
MRSLLLLSAFCLLEAALAAEVKKPAAAAAPGTAEKLSPKAATLAERSAGLAFSLYQAMAKDQAVENILVSPVVVASSLGLVSLGGKATTASQAKAVLSAEQLRDEEVHAGLGELLRSLSNSTARNVTWKLGSRLYGPSSVSFADDFVRSS

SEQ ID NO: 15460 - protein, 188 aa, Homo sapiens
MAYAYLFKYIIIGDTGVEFGARMITIDGKQIKLQIWDTAGQESFRSITRSYYRGAAGALLVYDITRRDTFNHLTTWLEDARQHSNSNMVIMLIGNKSDLESRREVKKEEGEAFAREHGLIFMETSAKTASNVEEAFINTAKEIYEKIQEGVFDINNEANGIKIGPQHAATNATHAGNQGGQQAGGGCC

SEQ ID NO: 15461 - protein, 467 aa, Homo sapiens
MAQALPWLLLWMGAGVLPAHGTQHGIRLPLRSGLGGAPLGLRLPRETDEEPEEPGRRGSFVEMVDNLRGKSGQGYYVEMTVGSPPQTLNILVDTGSSNFAVGAAPHPFLHRYYQRQLSSTYRDLRKGVYVPYTQGKWEGELGTDLVSIPHGPNVTVRANIAAITESDKFFINGSNWEGILGLAYAEIARPDDSLEPFFDSLVKQTHVPNLFSLQLCGAGFPLNQSEVLASVGGSMIIGGIDHSLYTGSLWYTPIRREWYYEVIIVRVEINGQDLKMDCKETEKFPDGFWLGEQLVCWQAGTTPWNIFPVISLYLMGEVTNQSFRITILPQQYLRPVEDVATSQDDCYKFAISQSSTGTVMGAVIMEGFYVVFDRARKRIGFAVSACHVHDEFRTAAVEGPFVTLDMEDCGYNIPQTDESTLMTIAYVMAAICALFMLPLCLMVCQWRCLRCLRQQHDDFADDISLLK

SEQ ID NO: 15462 - protein, 1645 aa, Homo sapiens
MDDDSLDELVARSPGPDGHPQVGPADPAESSVGSSGDSGDDSDSEHGDGTDGEDEGASEEEDLEDRSGSEDSEDDGETLLEVAGTQGKLEAAGSFNSDDDAESCPICLNAFRDQAVGTPENCAHYFCLDCIVEWSKNANSCPVDRTLFKCICIRAQFGGKILRKIPVENTKASEEEEDPTFCEVCGRSDREDRLLLCDGCDAGYHMECLDPPLQEVPVDEWFCPECAAPGVVLAADAGPVSEEEVSLLLADVVPTTSRLRPRAGRTRAIARTRQSERVRATVNRNRISTARRVQHTPGRLGSSLLDEAIEAVATGLSTAVYQRPLTPRTPARRKRKTRRRKKVPGRKKTPSGPSAKSKSSATRSKKRQHRVKKRRGKKVKSEATTRSRIARTLGLRRPVHSSCIPSVLKPVEPSLGLLRADIGAASLSLFGDPYELDPFDSSEELSANPLSPLSAKRRALSRSALQSHQPVARPVSVGLSRRRLPAAVPEPDLEEEPVPDLLGSILSGQSLLMLGSSDVIIHRDGSLSAKRAAPVSFQRNSGSLSRGEEGFKGCLQPRALPSGSPAQGPSGNRPQSTGLSCQGRSRTPARTAGAPVRLDLPAAPGAVQARNLSNGSVPGFRQSHSPWFNGTNKHTLPLASAASKISSRDSKPPCRSVVPGPPLKPAPRRTDISELPRIPKIRRDDGGGRRDAAPAHGQSIEIPSACISRLTGREGTGQPGRGTRAESEASSRVPREPGVHTGSSRPPAPSSHGSLAPLGPSRGKGVGSTFESFRINIPGNMAHSSQLSSPGFCNTFRPVDDKEQRKENPSPLFSIKKTKQLRSEVYDPSDPTGSDSSAPGSSPERSGPGLLPSEITRTISINSPKAQTVQAVRCVTSYTVESIFGTEPEPPLGPSSAMSKLRGAVAAEGASDTEREEPTESQGLAARLRRPSPPEPWDEEDGASCSTFFGSEERTVTCVTVVEPEAPPSPDVLQAATHRVVELRPPSRSRSTSSSRSRKKAKRKRVSREHGRTRSGTRSESRDRSSRSASPSVGEERPRRQRSKAKSRRSSSDRSSSRERAKRKKAKDKSREHRRGPWGHSRRTSRSRSGSPGSSSYEHYESRKKKKRRSASRPRGRECSPTSSLERLCRHKHQRERSHERPDRKESVAWPRDRRKRRSRSPSSEHRAREHRRPRSREKWPQTRSHSPERKGAVREASPAPLAQGEPGREDLPTRLPALGEAHVSPEVATADKAPLQAPPVLEVAAECEPDDLDLDYGDSVEAGHVFDDFSSDAVFIQLDDMSSPPSPESTDSSPERDFPLKPALPPASLAVAAIQREVSLMHDEDPSQPPPLPEGTQEPHLLRPDAAEKAEAPSSPDVAPAGKEDSPSASGRVQEAARPEEVVSQTPLLRSRALVKRVTWNLQESESSAPAEDRAPRAPLHRPQKPREGAWDMEDVAPTGVRQVFSELPFPSHVLPEPGFPDTDPSQVYSPGLPPAPAQPSSIPPCALVSQPTVQFILQGSLPLVGCGAAQTLAPVPAALTPASEPASQATAASNSEEKTPAPRLAAEKTKKEEYMKKLHMQERAVEEVKLAIKPFYQKREVTKEEYKDILRKAVQKICHSKSGEINPVKVANLVKAYVDKYRHMRRHKKPEAGEEPPTQGAEG

SEQ ID NO: 15463 - protein, 172 aa, Homo sapiens
MIIYRDLISHDEMFSDIYKIREIADGLCLEVEGKMVSRTEGNIDDSLIGGNASAEGPEGEGTESTVITGVDIVMNHHLQETSFTKEAYKKYIKDYMKSIKGKLEEQRPERVKPFMTGAAEQIKHILANFKNYQFFIGENMNPDGMVALLDYREDGVTPYMIFFKDGLEMEKC

SEQ ID NO: 15464 - protein, 656 aa, Homo sapiens
MADKVRRQRPRRRVCWALVAVLLADLLALSDTLAVMSVDLGSESMKVAIVKPGVPMEIVLNKESRRKTPVIVTLKENERFFGDSAASMAIKNPKATLRYFQHLLGKQADNPHVALYQARFPEHELTFDPQRQTVHFQISSQLQFSPEEVLGMVLNYSRSLAEDFAEQPIKDAVITVPVFFNQAERRAVLQAARMAGLKVLQLINDNTATALSYGVFRRKDINTTAQNIMFYDMGSGSTVCTIVTYQMVKTKEAGMQPQLQIRGVGFDRTLGGLEMELRLRERLAGLFNEQRKGQRAKDVRENPRAMAKLLREANRLKTVLSANADHMAQIEGLMDDVDFKAKVTRVEFEELCADLFERVPGPVQQALQSAEMSLDEIEQVILVGGATRVPRVQEVLLKAVGKEELGKNINADEAAAMGAVYQAAALSKAFKVKPFVVRDAVVYPILVEFTREVEEEPGIHSLKHNKRVLFSRMGPYPQRKVITFNRYSHDFNFHINYGDLGFLGPEDLRVFGSQNLTTVKLKGVGDSFKKYPDYESKGIKAHFNLDESGVLSLDRVESVFETLVEDSAEEESTLTKLGNTISSLFGGGTTPDAKENGTDTVQEEEESPAEGSKDEPGEQVELKEEAEAPVEDGSQPPPPEPKGDATPEGEKATEKE

SEQ ID NO: 15465 - protein, 1018 aa, Homo sapiens
MDKILEAVVTSSYPVSVKQGLVRRVLEAARQPLEREQCLALLALGARLYVGGAEELPRRVGCQLLHVAGRHHPDVFAEFFSARRVLRLLQGGAGPPGPRALACVQLGLQLLPEGPAADEVFALLRREVLRTVCERPGPAACAQVARLLARHPRCVPDGPHRLLFCQQLVRCLGRFRCPAEGEEGAVEFLEQAQQVSGLLAQLWRAQPAAILPCLKELFAVISCAEEEPPSSALASVVQHLPLELMDGVVRNLSNDDSVTDSQMLTAISRMIDWVSWPLGKNIDKWIIALLKGLAAVKKFSILIEVSLTKIEKVFSKLLYPIVRGAALSVLKYMLLTFQHSHEAFHLLLPHIPPMVASLVKEDSNSGTSCLEQLAELVHCMVFRFPGFPDLYEPVMEAIKDLHVPNEDRIKQLLGQDAWTSQKSELAGFYPRLMAKSDTGKIGLINLGNTCYVNSILQALFMASDFRHCVLRLTENNSQPLMTKLQWLFGFLEHSQRPAISPENFLSASWTPWFSPGTQQDCSEYLKYLLDRLHEEEKTGTRICQKLKQSSSPSPPEEPPAPSSTSVEKMFGGKIVTRICCLCCLNVSSREEAFTDLSLAFPPPERCRRRRLGSVMRPTEDITARELPPPTSAQGPGRVGPRRQRKHCITEDTPPTSLYIEGLDSKEAGGQSSQEERIEREEEGKEERTEKEEVGEEEESTRGEGEREKEEEVEEEEEKVEKETEKEAEQEKEEDSLGAGTHPDAAIPSGERTCGSEGSRSVLDLVNYFLSPEKLTAENRYYCESCASLQDAEKVVELSQGPCYLILTLLRFSFDLRTMRRRKILDDVSIPLLLRLPLAGGRGQAYDLCSVVVHSGVSSESGHYYCYAREGAARPAASLGTADRPEPENQWYLFNDTRVSFSSFESVSNVTSFFPKDTAYVLFYRQRPREGPEAELGSSRVRTEPTLHKDLMEAISKDNILYLQEQEKEARSRAAYISALPTSPHWGRGFDEDKDEDEGSPGGCNPAGGNGGDFHRLVF

SEQ ID NO: 15466 - protein, 62 aa, Homo sapiens
MWATLPLLCAGAWLLGVPVCGAAELCVNSLEKFHFKSWMSKKTKAHCVLVAESVGEHQCMCF

SEQ ID NO: 15467 - protein, 343 aa, Homo sapiens
MGDAKEAGAEGPPAGAAARGGLSLLSQGESEESSAQGSALFLGGNEVKSRAVVKYSSAPPRTAFARLEEKTDLKLPPANWLRESAKLGPAGTTILGNSKKSKPFSSFGMAYDFIDSVGNDVDVVSDSENIKKLLKIPYSKSHVSMAVHRIGRTLLLDELDIQELFMRSSQTGDWTWLKEFYQRLIDQKWQRKKKSKEHWYQKAILSKFLYYSINGDGAAQPVSSTAEQQESSSSDQTNDSEGASWPAPFEMPSSVSEDPSASSQGSEPLEPSYIVGHVASAPKEQNLITLFNDGEHSQGLKNDFVRNILWTFEDIHMLVGSNMPIFGGGRYPAVSLRLRNVYF

SEQ ID NO: 15468 - protein, 70 aa, Homo sapiens
MAEVKSMFREVLPKQGPLFVEDIMTMVLCKPKLLPLKSLTLEKLEKMHQAAQNTIRQQEMAEKDQRQITH

SEQ ID NO: 15469 - protein, 43 aa, Homo sapiens
MFSLKTLPFLLLLHVQISKAFPVSSKEKNTKTVQRQKYLKSDK

SEQ ID NO: 15470 - protein, 320 aa, Homo sapiens
MAPEEDAGGEALGGSFWEAGNYRRTVQRVEDGHRLCGDLVSCFQERARIEKAYAQQLADWARKWRGTVEKGPQYGTLEKAWHAFFTAAERLSALHLEVREKLQGQDSERVRAWQRGAFHRPVLGGFRESRAAEDGFRKAQKPWLKRLKEVEASKKSYHAARKDEKTAQTRESHAKADSAVSQEQLRKLQERVERCAKEAEKTKAQYEQTLAELHRYTPRYMEDMEQAFETCQAAERQRLLFFKDMLLTLHQHLDLSSSEKFHELHRDLHQGIEAASDEEDLRWWRSTHGPGMAMNWPQFEALVLGHTEDNQPEREGWPEP

SEQ ID NO: 15471 - protein, 1047 aa, Homo sapiens
MAPRLQLEKAAWRWAETVRPEEVSQEHIETAYRIWLEPCIRGVCRRNCKGNPNCLVGIGEHIWLGEIDENSFHNIDDPNCERRKKNSFVGLTNLGATCYVNTFLQVWFLNLELRQALYLCPSTCSDYMLGDGIQEEKDYEPQTICEHLQYLFALLQNSNRRYIDPSGFVKALGLDTGQQQDAQEFSKLFMSLLEDTLSKQKNPDVRNIVQQQFCGEYAYVTVCNQCGRESKLLSKFYELELNIQGHKQLTDCISEFLKEEKLEGDNRYFCENCQSKQNATRKIRLLSLPCTLNLQLMRFVFDRQTGHKKKLNTYIGFSEILDMEPYVEHKGGSYVYELSAVLIHRGVSAYSGHYIAHVKDPQSGEWYKFNDEDIEKMEGKKLQLGIEEDLEPSKSQTRKPKCGKGTHCSRNAYMLVYRLQTQEKPNTTVQVPAFLQELVDRDNSKFEEWCIEMAEMRKQSVDKGKAKHEEVKELYQRLPAGAEPYEFVSLEWLQKWLDESTPTKPIDNHACLCSHDKLHPDKISIMKRISEYAADIFYSRYGGGPRLTVKALCKECVVERCRILRLKNQLNEDYKTVNNLLKAAVKGSDGFWVGKSSLRSWRQLALEQLDEQDGDAEQSNGKMNGSTLNKDESKEERKEEEELNFNEDILCPHAVFFFSKYIFLNSGELCISENERRLVSKEAWSKLQQYFPKAPEFPSYKECCSQCKILEREGEENEALHKMIANEQKTSLPNLFQDKNRPCLSNWPEDTDVLYIVSQFFVEEWRKFVRKPTRCSPVSSVGNSALLCPHGGLMFTFASMTKEDSKLIALIWPSEWQMIQKLFVVDHVIKITRIEVGDVNPSETQYISEPKLCPECREGLLCQQQRDLREYTQATIYVHKVVDNKKVMKDSAPELNVSSSETEEDKEEAKPDGEKDPDFNQSNGGTKRQKISHQNYIAYQKQVIRRSMRHRKVRGEKALLVSANQTLKELKIQIMHAFSVAPFDQNLSIDGKILSDDCATLGTLGVIPESVILLKADEPIADYAAMDDVMQVCMPEEGFKGTGLLGH

SEQ ID NO: 15472 - protein, 71 aa, Homo sapiens
HLGQLALLGLLAMLLAVETFSELPQVRAMGKFFRPSGPVTAEDQGGILGQDELALSTLPPAAPASGQAPAC

SEQ ID NO: 15473 - protein, 513 aa, Homo sapiens
MATATIALGTDSIKMENGQSTAAKLGLPPLTPEQQEALQKAKKYAMEQSIKSVLVKQTIAHQQQQLTNLQMAAQRQRALAIMCRVYVGSIYYELGEDTIRQAFAPFGPIKSIDMSWDSVTMKHKGFAFVEYEVPEAAQLALEQMNSVMLGGRNIKVGRPSNIGQAQPIIDQLAEEARAFNRIYVASVHQDLSDDDIKSVFEAFGKIKSCTLARDPTTGKHKGYGFIEYEKAQSSQDAVSSMNLFDLGGQYLRVGKAVTPPMPLLTPATPGGLPPAAAVAAAAATAKITAQEAVAGAAVLGTLGTPGLVSPALTLAQPLGTLPQAVMAAQAPGVITGVTPARPPIPVTIPSVGVVNPILASPPTLGLLEPKKEKEEEELFPESERPEMLSEQEHMSISGSSARHMVMQKLLRKQESTVMVLRNMVDPKDIDDDLEGEVTEECGKFGAVNRVIIYQEKQGEEEDAEIIVKIFVEFSIASETHKAIQALNGRWFAGRKVVAEVYDQERFDNSDLSA

SEQ ID NO: 15474 - protein, 432 aa, Homo sapiens
MAGPPALPPPETAAAATTAAAASSSAASPHYQEWILDTIDSLRSRKARPDLERICRMVRRRHGPEPERTRAELEKLIQQRAVLRVSYKGSISYRNAARVQPPRRGATPPAPPAPPQQQQPPPPQPQPPPEGGAVRAGGAARPVSLREVVRYLGGSGGAGGRLTRGRVQGLLEEEAAARGRLERTRLGALALPRGDRPGRAPPAASARPSRSKRGGEERVLEKEEEEDDDEDEDEEDDVSEGSEVPESDRPAGAQHHQLNGERGPQSAKERVKEWTPCGPHQGQDEGRGPAPGSGTRQVFSMAAMNKEGGTASVATGPDSPSPVPLPPGKPALPGADGTPFGCPPGRKEKPSDPVEWTVMDVVEYFTEAGFPEQATAFQEQEIDGKSLLLMQRTDVLTGLSIRLGPALKIYEHHIKVLQQGHFEDDDPDGFLG

SEQ ID NO: 15475 - protein, 120 aa, Homo sapiens
MKLLMVLMLAALSQHCYAGSGCPLLENVISKTINPQVSKTEYKELLQEFIDDNATTNAIDELKECFLNQTDETLSNVEVFMVISFSSYKLFKSPDQGQVGSSFLTDNAKATSEQAFSYIG

SEQ ID NO: 15476 - protein, 165 aa, Homo sapiens
MRSLLLLSAFCLLEAALAAEVKKPAAAAAPGTAEKLSPKAATLAERSAGLAFSLYQAMAKDQAVENILVSPVVVASSLGLVSLGGKATTASQAKAVLSAEQLRDEEVHAGLGELLRSLSNSTARNVTWKLGSRLYGPSSVSFADDFVRSSKQHYNCEHSKINFRD

SEQ ID NO: 15477 - protein, 531 aa, Homo sapiens
MEPRAVAEAVETGEEDVIMEALRSYNQEHSQSFTFDDAQQEDRKRLAELLVSVLEQGLPPSHRVIWLQSVRILSRDRNCLDPFTSRQSLQALACYADISVSEGSVPESADMDVVLESLKCLCNLVLSSPVAQMLAAEARLVVKLTERVGLYRERSFPHDVQFFDLRLLFLLTALRTDVRQQLFQELKGVRLLTDTLELTLGVTPEGNPPPTLLPSQETERAMEILKVLFNITLDSIKGEVDEEDAALYRHLGTLLRHCVMIATAGDRTEEFHGHAVNLLGNLPLKCLDVLLTLEPHGDSTEFMGVNMDVIRALLIFLEKRLHKTHRLKESVAPVLSVLTECARMHRPARKFLKAQVLPPLRDVRTRPEVGEMLRNKLVRLMTHLDTDVKRVAAEFLFVLCSESVPRFIKYTGYGNAAGLLAARGLMAGGRPEGQYSEDEDTDTDEYKEAKASINPVTGRVEEKPPNPMEGMTEEQKEHEAMKLVTMFDKLSRNRVIQPMGMSPRGHLTSLQDAMCETMEQQLSSDPDSDPD

SEQ ID NO: 15478 - protein, 363 aa, Homo sapiens
MNKPSDGRPKYLVVNADEGEPGTCKDREILRHDPHKLLEGCLVGGRAMGARAAYIYIRGEFYNEASNLQVAIREAYEAGLIGKNACGSGYDFDVFVVRGAGAYICGEETALIESIEGKQGKPRLKPPFPADVGVFGCPTTVANVETVAVSPTICRRGGTWFAGFGRERNSGTKLFNISGHVNHPCTVEEEMSVPLKELIEKHAGGVTGGWDNLLAVIPGGSSTPLIPKSVCETVLMDFDALVQAQTGLGTAAVIVMDRSTDIVKAIARLIEFYKHESCGQCTPCREGVDWMNKVMARFVRGDARPAEIDSLWEISKQIEGHTICALGDGAAWPVQGLIRHFRPELEERMQRFAQQHQARQAAS

SEQ ID NO: 15479 - protein, 2617 aa, Homo sapiens
MLTDSGGGGTSFEEDLDSVAPRSAPAGASEPPPPGGVGLGIRTVRLFGEAGPASGVGSSGGGGSGSGTGGGDAALDFKLAAAVLRTGGGGGASGSDEDEVSEVESFILDQEDLDNPVLKTTSEIFLSSTAEGADLRTVDPETQARLEALLEAAGIGKLSTADGKAFADPEVLRRLTSSVSCALDEAAAALTRMKAENSHNAGQVDTRSLAEACSDGDVNAVRKLLDEGRSVNEHTEEGESLLCLACSAGYYELAQVLLAMHANVEDRGNKGDITPLMAASSGGYLDIVKLLLLHDADVNSQSATGNTALTYACAGGFVDIVKVLLNEGANIEDHNENGHTPLMEAASAGHVEVARVLLDHGAGINTHSNEFKESALTLACYKGHLDMVRFLLEAGADQEHKTDEMHTALMEACMDGHVEVARLLLDSGAQVNMPADSFESPLTLAACGGHVELAALLIERGANLEEVNDEGYTPLMEAAREGHEEMVALLLAQGANINAQTEETQETALTLACCGGFSEVADFLIKAGADIELGCSTPLMEASQEGHLELVKYLLASGANVHATTATGDTALTYACENGHTDVADVLLQAGADLEHESEGGRTPLMKAARAGHLCTVQFLISKGANVNRATANNDHTVVSLACAGGHLAVVELLLAHGADPTHRLKDGSTMLIEAAKGGHTNVVSYLLDYPNNVLSVPTTDVSQLPPPSQDQSQVPRVPTHTLAMVVPPQEPDRTSQENSPALLGVQKGTSKQKSSSLQVADQDLLPSFHPYQPLECIVEETEGKLNELGQRISAIEKAQLKSLELIQGEPLNKDKIEELKKNREEQVQKKKKILKELQKVERQLQMKTQQQFTKEYLETKGQKDTVSLHQQCSHRGVFPEGEGDGSLPEDHFSELPQVDTILFKDNDVDDEQQSPPSAEQIDFVPVQPLSSPQCNFSSDLGSNGTNSLELQKVSGNQQIVGQPQIAITGHDQGLLVQEPDGLMVATPAQTLTDTLDDLIAAVSTRVPTGSNSSSQTTECLTPESCSQTTSNVASQSMPPVYPSVDIDAHTESNHDTALTLACAGGHEELVSVLIARDAKIEHRDKKGFTPLILAATAGHVGVVEILLDKGGDIEAQSERTKDTPLSLACSGGRQEVVDLLLARGANKEHRNVSDYTPLSLAASGGYVNIIKILLNAGAEINSRTGSKLGISPLMLAAMNGHVPAVKLLLDMGSDINAQIETNRNTALTLACFQGRAEVVSLLLDRKANVEHRAKTGLTPLMEAASGGYAEVGRVLLDKGADVNAPPVPSSRDTALTIAADKGHYKFCELLIHRGAHIDVRNKKGNTPLWLASNGGHFDVVQLLVQAGADVDAADNRKITPLMSAFRKGHVKVVQYLVKEVNQFPSDIECMRYIATITDKELLKKCHQCVETIVKAKDQQAAEANKNASILLKELDLEKSREESRKQALAAKREKRKEKRKKKKEEQKRKQEEDEENKPKENSELPEDEDEEENDEDVEQEVPIEPPSATTTTTIGISATSATFTNVFGKKRANVVTTPSTNRKNKKNKTKETPPTAHLILPEQHMSLAQQKADKNKINGEPRGGGAGGNSDSDNLDSTDCNSESSSGGKSQELNFVMDVNSSKYPSLLLHSQEEKTSTATSKTQTRLEGEVTPNSLSTSYKTVSLPLSSPNIKLNLTSPKRGQKREEGWKEVVRRSKKLSVPASVVSRIMGRGGCNITAIQDVTGAHIDVDKQKDKNGERMITIRGGTESTRYAVQLINALIQDPAKELEDLIPKNHIRTPASTKSIHANFSSGVGTTAASSKNAFPLGAPTLVTSQATTLSTFQPANKLNKNVPTNVRSSFPVSLPLAYPHPHFALLAAQTMQQIRHPRLPMAQFGGTFSPSPNTWGPFPVRPVNPGNTNSSPKHNNTSRLPNQNGTVLPSESAGLATASCPITVSSVVAASQQLCVTNTRTPSSVRKQLFACVPKTSPPATVISSVTSTCSSLPSVSSAPITSGQAPTTFLPASTSQAQLSSQKMESFSAVPPTKEKVSTQDQPMANLCTPSSTANSCSSSASNTPGAPETHPSSSPTPTSSNTQEEAQPSSVSDLSPMSMPFASNSEPAPLTLTSPRMVAADNQDTSNLPQLAVPAPRVSHRMQPRGSFYSMVPNATIHQDPQSIFVTNPVTLTPPQGPPAAVQLSSAVNIMNGSQMHINPANKSLPPTFGPATLFNHFSSLFDSSQVPANQGWGDGPLSSRVATDASFTVQSAFLGNSVLGHLENMHPDNSKAPGFRPPSQRVSTSPVGLPSIDPSGSSPSSSSAPLASFSGIPGTRVFLQGPAPVGTPSFNRQHFSPHPWTSASNSSTSAPPTLGQPKGVSASQDRKIPPPIGTERLARIRQGGSVAQAPAGTSFVAPVGHSGIWSFGVNAVSEGLSGWSQSVMGNHPMHQQLSDPSTFSQHQPMERDDSGMVAPSNIFHQPMASGFVDFSKGLPISMYGGTIIPSHPQLADVPGGPLFNGLHNPDPAWNPMIKVIQNSTECTDAQQASLLPSVPALKGEIPSPQLTRPKKRIGRPMVASPNQRHQDHLRPKVPAGVQELTHCPDTPLLPPSDSRGHNSSNSPSLQAGGAEGAGDRGRDTR

SEQ ID NO: 15480 - protein, 177 aa, Homo sapiens
MVKLFIGNLPREATEQEIRSLFEQYGKVLECDIIKNYGFVHIEDKTAAEDAIRNLHHYKLHGVNINVEASKNKSKTSTKLHVGNISPTCTNKELRAKFEEYGPVIECDIVKDYAFVHMERAEDAVEAIRGLDNTEFQGEPPSLGRGLNTRLCAENGWISKRRGLVKITAVGWLVMKK

SEQ ID NO: 15481 - protein, 157 aa, Homo sapiens
MTSGSVFFYILIFGKYFSHGGGQDVKCSLGYFPCGNITKCLPQLLHCNGVDDCGNQADEDNCGDNNGWSLQFDKYFASYYKMTSQYPFEAETPECLVGSVPVQCLCQGLELDCDETNLRAVPSVSSNVTAMSLQWNLIRKLPPDCFKNYHDLQKLTL

SEQ ID NO: 15482 - protein, 167 aa, Homo sapiens
MALPPGPAALRHTLLLLPALLSSGWGELEPQIDGQTWAERALRENERHAFTCRVAGGPGTPRLAWYLDGQLQEASTSRLLSVGGEAFSGGTSTFTVTAHRAQHELNCSLQDPRSGRSANASVILNVQWLLATRVEVPLLGIVVAAGLALGTLVGFSTLVACLVCRKE

SEQ ID NO: 15483 - protein, 293 aa, Homo sapiens
MRESALERGPVPEAPAGGPVHAVTVVTLLEKLASMLETLRERQGGLARRQGGLAGSVRRIQSGLGALSRSHDTTSNTLAQLLAKAERVSSHANAAQERAVRRAAQVQRLEANHGLLVARGKLHVLLFKASPTLQRFAVRTQLSLPLPSHACLSPQTLAAEEEGEVPASAFQKAPEPLGPADQSELGPEQLEAEVGESSDEEPVESRAQRLRRTGLQKVQSLRRALSGRKGPAAPPPTPVKPPRLGPGRSAEAQPEAQPALEPTLEPEPPQDTEEDPGRPGAAEEALLQMESVA

SEQ ID NO: 15484 - protein, 311 aa, Homo sapiens
MLYQTINSLKTKNPKLKILLSIGGYLFGSKGFHPMVDSSTSRLEFINSIILFLRNHNFDGLDVSWIYPDQKENTHFTVLIHELAEAFQKDFTKSTKERLLLTAGVSAGRQMIDNSYQVEKLAKDLDFINLLSFDFHGSWEKPLITGHNSPLSKGWQDRGPSSYYNVEYAVGYWIHKGMPSEKVVMGIPTYGHSFTLASAETTVGAPASGPGAAGPITESSGFLAYYEICQFLKGAKITRLQDQQVPYAVKGNQWVGYDDVKSMETKVQFLKNLNLGGAMIWSIDMDDFTGKSCNQGPYPLVQAVKRSLGSL

SEQ ID NO: 15485 - protein, 37 aa, Homo sapiens
MNLAISIALLLTGLPRAEGDQPNGLPSGPEPSSGLPP

SEQ ID NO: 15486 - protein, 306 aa, Homo sapiens
MASPGCLWLLAVALLPWTCASRALQHLDPPAPLPLVIWHGMGDSCCNPLSMGAIKKMVEKKIPGIYVLSLEIGKTLMEDVENSFFLNVNSQVTTVCQALAKDPKLQQGYNAMGFSQGGQFLRAVAQRCPSPPMINLISVGGQHQGVFGLPRCPGESSHICDFIRKTLNAGAYSKVVQERLVQAEYWHDPIKEDVYRNHSIFLADINQERGINESYKKNLMALKKFVMVKFLNDSIVDPVDSEWFGFYRSGQAKETIPLQETSLYTQDRLGLKEMDNAGQLVFLATEGDHLQLSEEWFYAHIIPFLG

SEQ ID NO: 15487 - protein, 1111 aa, Homo sapiens
MPALWLGCCLCFSLLLPAARATSRREVCDCNGKSRQCIFDRELHRQTGNGFRCLNCNDNTDGIHCEKCKNGFYRHRERDRCLPCNCNSKGSLSARCDNSGRCSCKPGVTGARCDRCLPGFHMLTDAGCTQDQRLLDSKCDCDPAGIAGPCDAGRCVCKPAVTGERCDRCRSGYYNLDGGNPEGCTQCFCYGHSASCRSSAEYSVHKITSTFHQDVDGWKAVQRNGSPAKLQWSQRHQDVFSSAQRLDPVYFVAPAKFLGNQQVSYGQSLSFDYRVDRGGRHPSAHDVILEGAGLRITAPLMPLGKTLPCGLTKTYTFRLNEHPSNNWSPQLSYFEYRRLLRNLTALRIRATYGEYSTGYIDNVTLISARPVSGAPAPWVEQCICPVGYKGQFCQDCASGYKRDSARLGPFGTCIPCNCQGGGACDPDTGDCYSGDENPDIECADCPIGFYNDPHDPRSCKPCPCHNGFSCSVMPETEEVVCNNCPPGVTGARCELCADGYFGDPFGEHGPVRPCQPCQCNNNVDPSASGNCDRLTGRCLKCIHNTAGIYCDQCKAGYFGDPLAPNPADKCRACNCNPMGSEPVGCRSDGTCVCKPGFGGPNCEHGAFSCPACYNQVKIQMDQFMQQLQRMEALISKAQGGDGVVPDTELEGRMQQAEQALQDILRDAQISEGASRSLGLQLAKVRSQENSYQSRLDDLKMTVERVRALGSQYQNRVRDTHRLITQMQLSLAESEASLGNTNIPASDHYVGPNGFKSLAQEATRLAESHVESASNMEQLTRETEDYSKQALSLVRKALHEGVGSGSGSPDGAVVQGLVEKLEKTKSLAQQLTREATQAEIEADRSYQHSLRLLDSVSRLQGVSDQSFQVEEAKRIKQKADSLSSLVTRHMDEFKRTQKNLGNWKEEAQQLLQNGKSGREKSDQLLSRANLAKSRAQEALSMGNATFYEVESILKNLREFDLQVDNRKAEAEEAMKRLSYISQKVSDASDKTQQAERALGSAAADAQRAKNGAGEALEISSEIEQEIGSLNLEANVTADGALAMEKGLASLKSEMREVEGELERKELEFDTNMDAVQMVITEAQKVDTRAKNAGVTIQDTLNTLDGLLHLMGM

SEQ ID NO: 15488 - protein, 35 aa, Homo sapiens
MQPILLLLAFLLLPRADAAGEKGQADQSCAAPQAT

SEQ ID NO: 15489 - protein, 32 aa, Homo sapiens
MWQLWASLCCLLVLANARSRPSFHPLSDELVN

SEQ ID NO: 15490 - protein, 223 aa, Homo sapiens
MQQRGAAGSRGCALFPLLGVLFFQDAHVRGYVGEKIKLKCTFKSTSDVTDKLTIDWTYRPPSSSHTVSIFHYQSFQYPTTAGTFRDRISWVGNVYKGDASISISNPTIKDNGTFSCAVKNPPDVHHNIPMTELTVTERGFGTMLSSVALLSILVFVPSAVVVALLLVRMGRKAAGLKKRSRSGYKKSSIEVSDDTDQEEEEACMARLCVRCAECLDSDYEETY

SEQ ID NO: 15491 - protein, 328 aa, Homo sapiens
MLVGCADRTVKHFSTEDGIFQGQRHCPGGEGMFRGLAQADGTLITCVDSGILRVWHDKDKDTSSDPLLELRVGPGVCRMRQDPAHPHVVATGGKENALKIWDLQGSEEPVFRAKNVRNDWLDLRVPIWDQDIQFLPGSQKLVTCTGYHQVRVYDPASPQRRPVLETTYGEYPLTAMTLTPGGNSVIVGNTHGQLAEIDLRQGRLLGCLKGLAGSVRGLQCHPSKPLLASCGLDRVLRIHRIQNPRGLEHKVYLKSQLNCLLLSGRDNWEDEPQEPQEPNKVPLEDTETDELWASLEAAAKRKLSGLEQPQGALQTRRRKKKRPGSTSP

SEQ ID NO: 15492 - protein, 67 aa, Homo sapiens
MLIKVKTLTGKEIEIDIEPTDKVERIKERVEEKEGIPPQQQRLIYSGKQILHSLAFLGRHARRPSVP

SEQ ID NO: 15493 - protein, 298 aa, Homo sapiens
MSEYIRVTEDENDEPIEIPSEDDGTVLLSTVTAQFPGACGLRYRNPVSQCMRGVRLVEGILHAPDAGWGNLVYVVNYPKDNKRKMDETDASSAVKVKRAVQKTSDLIVLGLPWKTTEQDLKEYFSTFGEVLMVQVKKDLKTGHSKGFGFVRFTEYETQVKVMSQRHMIDGRWCDCKLPNSKQSQDEPLRSRKVFVGRCTEDMTEDELREFFSQYGDVMDVFIPKPFRAFAFVTFADDQIAQSLCGEDLIIKGISVHISNAEPKHNSNRQLERSGRFGGNPVHLISNVYGRSTSLKVVL

SEQ ID NO: 15494 - protein, 149 aa, Homo sapiens
MKVRKSSTPEEVKKRKKAVLFCLSEDKKNIILEEGKEILVGDVGQTVDDPYATFVKMLPDKDCRYALYDATYETKESKKEDLVFIFWAPESAPLKSKMIYASSKDAIKKKLTGIKHELQANCYEEVKDRCTLAEKLGGSAVISLEGKPL

SEQ ID NO: 15495 - protein, 84 aa, Homo sapiens
MKYSCCALVLAVLGTELLGSLCSTVRSPRFRGRIQQERKNIRPNIILVLTDDQDVELGSLQVMNKTRKIMEHGGATFINAFVTT

SEQ ID NO: 15496 - protein, 264 aa, Homo sapiens
MWKIRELEKQMEDAYRGTKRKMLPSSSSRMRSDGFDEESQRYYWRPKNEISGTLEDDFLKAKSWNKKFYDYEANMPDRWGHSGYKELYPEEFETDSSDQQDITNGKKTSPQVKSSTHESRKHKKSKKSHKKKQKKRSHKKQKKSKKEATDITADSSSEFSEETGASGTRKGKQPHKRKKKSRKKSLKKPALFLEAESNTSHSDDSASSSSEESEERDTKKTKRKKREKKAHTSVANNEIQERTNKRTNWKVATDERSAESSEDD

SEQ ID NO: 15497 - protein, 662 aa, Homo sapiens
MFLFVLANFSMATFMDPGIFPRAEEDEDKEDDFRAPLYKTVEIKGIQVRMKWCATCRFYRPPRCSHCSVCDNCVEEFDHHCPWVNNCIGRRNYRYFFLFLLSLTAHIMGVFGFGLLYVLYHIEELSGVRTAVTMAVMCVAGLFFIPVAGLTGFHVVLVARGRTTNEQVTGKFRGGVNPFTNGCCNNVSRVLCSSPAPRYLGRPKKEKTIVIRPPFLRPEVSDGQITVKIMDNGIQGELRRTKSKGSLEITESQSADAEPPPPPKPDLSRYTGLRTHLGLATNEDSSLLAKDSPPTPTMYKYRPGYSSSSTSAAMPHSSSAKLSRGDSLKEPTSIAESSRHPSYRSEPSLEPESFRSPTFGKSFHFDPLSSGSRSSSLKSAQGTGFELGQLQSIRSEGTTSTSYKSLANQTRNGSLSYDSLLTPSDSPDFESVQAGPEPDPPLGYTSPFLSARLAQQREAERHPRLVPTGPTHREPSPVRYDNLSRHIVASLQEREKLLRQSPPLPGREEEPGLGDSGIQSTPGSGHAPRTSSSSDDSKRSPLGKTPLGRPAVPRFGKPDGLRGRGVGSPEPGPTAPYLGRSMSYSSQKAQPGVSETEEVALQPLLTPKDEVQLKTTYSKSNGQPKSLGSASPGPGQPPLSSPTRGGVKKVSGVGGTTYEISV

SEQ ID NO: 15498 - protein, 391 aa, Homo sapiens
MAGKRSGWSRAALLQLLLGVNLVVMPPTRARSLRFVTLEGMLQHWELGQALRQRYHGFLNTSYHRQEVYVRSTDFDRTLMSAEANLAGLFPPNGMQRFNPNISWQPIPVHTVPITEDRLLKFPLGPCPRYEQLQNETRQTPEYQNESSRNAQFLDMVANETGLTDLTLETVWNVYDTLFCEQTHGLRLPPWASPQTMQRLSRLKDFSFRFLFGIYQQAEKARLQGGVLLAQIRKNLTLMATTSQLPKLLVYSAHDTTLVALQMALDVYNGEQAPYASCHIFELYQEDSGNFSVEMYFRNESDKAPWPLSLPGCPHRCPLQDFLRLTEPVVPKDWQQECQLASGPADTEVIVALAVCGSILFLLIVLLLTVLFRMQAQPPGYRHVADGEDHA

SEQ ID NO: 15499 - protein, 99 aa, Homo sapiens
TPEVKKQRGKILLGLSRLPLISVALVQGWALGGGAEFTTACDFRLMTPESKIRFVHKEMGIIPSWGGTTRLVEIIGSRQALKVLSGALKLDSKNALNIG

SEQ ID NO: 15500 - protein, 199 aa, Homo sapiens
MSNMEKHLFNLKFAAKELSRSAKKCDKEEKAEKAKIKKAIQKGNMEVARIHAENAIRQKNQAVNFLRMSARVDAVAARVQTAVTMGKVTKSMAGVVKSMDATLKTMNLEKISALMDKFEHQFETLDVQTQQMEDTMSSTTTLTTPQNQVDMLLQEMADEAGLDLNMELPQGQTGSVGTSVASAEQDELSQRLARLRDQV

SEQ ID NO: 15501 - protein, 476 aa, Homo sapiens
MLDERLQRHRTSGGDHAPDSPSGENSPAPQGRLAEVQDSSMPVPAQPKAGGSGSYWPARHSGARVILLVLYREHLNPNGHHFLTKEELLQRCAQKSPRVAPGSARPWPALRSLLHRNLVLRTHQPARYSLTPEGLELAQKLAESEGLSLLNVGIGPKEPPGEETAVPGAASAELASEAGVQQQPLELRPGEYRVLLCVDIGETRGGGHRPELLRELQRLHVTHTVRKLHVGDFVWVAQETNPRDPANPGELVLDHIVERKRLDDLCSSIIDGRFREQKFRLKRCGLERRVYLVEEHGSVHNLSLPESTLLQAVTNTQVIDGFFVKRTADIKESAAYLALLTRGLQRLYQGHTLRSRPWGTPGNPESGAMTSPNPLCSLLTFSDFNAGAIKNKAQSVREVFARQLMQVRGVSGEKAAALVDRYSTPASLLAAYDACATPKEQETLLSTIKCGRLQRNLGPALSRTLSQLYCSYGPLT

SEQ ID NO: 15502 - protein, 640 aa, Homo sapiens
MFSCVKPYEDQNYSALRRDCRRRKVLFEDPLFPATDDSLYYKGTPGPAVRWKRPKGICEDPRLFVDGISSHDLHQGQVGNCWFVAACSSLASRESLWQKVIPDWKEQEWDPEKPNAYAGIFHFHFWRFGEWVDVVIDDRLPTVNNQLIYCHSNSRNEFWCALVEKAYAKLAGCYQALDGGNTADALVDFTGGVSEPIDLTEGDFANDETKRNQLFERMLKVHSRGGLISASIKAVTAADMEARLACGLVKGHAYAVTDVRKVRLGHGLLAFFKSEKLDMIRLRNPWGEREWNGPWSDTSEEWQKVSKSEREKMGVTVQDDGEFWMTFEDVCRYFTDIIKCRVINTSHLSIHKTWEEARLHGAWTLHEDPRQNRGGGCINHKDTFFQNPQYIFEVKKPEDEVLICIQQRPKRSTRREGKGENLAIGFDIYKVEENRQYRMHSLQHKAASSIYINSRSVFLRTDQPEGRYVIIPTTFEPGHTGEFLLRVFTDVPSNCRELRLDEPPHTCWSSLCGYPQLVTQVHVLGAAGLKDSPTGANSYVIIKCEGDKVRSAVQKGTSTPEYNVKGIFYRKKLSQPITVQVWNHRVLKDEFLGQVHLKADPDNLQALHTLHLRDRNSRQPSNLPGTVAVHILSSTSLMAV

SEQ ID NO: 15503 - protein, 822 aa, Homo sapiens
MRLALLWALGLLGAGSPLPSWPLPNIGGTEEQQAESEKAPREPLEPQVLQDDLPISLKKVLQTSLPEPLRIKLELDGDSHILELLQNRELVPGRPTLVWYQPDGTRVVSEGHTLENCCYQGRVRGYAGSWVSICTCSGLRGLVVLTPERSYTLEQGPGDLQGPPIISRIQDLHLPGHTCALSWRESVHTQKPPEHPLGQRHIRRRRDVVTETKTVELVIVADHSEAQKYRDFQHLLNRTLEVALLLDTFFRPLNVRVALVGLEAWTQRDLVEISPNPAVTLENFLHWRRAHLLPRLPHDSAQLVTGTSFSGPTVGMAIQNSICSPDFSGGVNMDHSTSILGVASSIAHELGHSLGLDHDLPGNSCPCPGPAPAKTCIMEASTDFLPGLNFSNCSRRALEKALLDGMGSCLFERLPSLPPMAAFCGNMFVEPGEQCDCGFLDDCVDPCCDSLTCQLRPGAQCASDGPCCQNCQLRPSGWQCRPTRGDCDLPEFCPGDSSQCPPDVSLGDGEPCAGGQAVCMHGRCASYAQQCQSLWGPGAQPAAPLCLQTANTRGNAFGSCGRNPSGSYVSCTPRDAICGQLQCQTGRTQPLLGSIRDLLWETIDVNGTELNCSWVHLDLGSDVAQPLLTLPGTACGPGLVCIDHRCQRVDLLGAQECRSKCHGHGVCDSNRHCYCEEGWAPPDCTTQLKATSSLTTGLLLSLLVLLVLVMLGASYWYRARLHQRLCQLKGPTCQYRAAQSGPSERPGPPQRALLARGTKQASALSFPAPPSRPLPPDPVSKRLQAELADRPNPPTRPLPADPVVRSPKVTVGGEKGTASPPT

SEQ ID NO: 15504 - protein, 130 aa, Homo sapiens
MGIQGGSVLFGLLLVLAVFCHSGHSLQCYNCPNPTADCKTAVNCSSDFDACLITKAGLQVYNKCWKFEHCNFNDVTTRLRENELTYYCCKKDLCNFNEQLENDTFLKALKDEKLQGLKTKQPGKKSASLS

SEQ ID NO: 15505 - protein, 80 aa, Homo sapiens
MKLLTGLVFCSLVLSVSSRSFFSFLGEAFDGARDMWRAYSDMREANYIGSDKYFHARGNYDAAKRGPGGAWAAEVIREDD

SEQ ID NO: 15506 - protein, 84 aa, Homo sapiens
MRIISRQIVLLFSGFWGLAMGAFPSSVQIGGLFIRNTDQEYTAFRLAIFLHNTSPNASEAPFNLVPHVDNIETANSFAVTNACK

SEQ ID NO: 15507 - protein, 277 aa, Homo sapiens
MDKFWWHAAWGLCLVPLSLAQIDLNITCRFAGVFHVEKNGRYSISRTEAADLCKAFNSTLPTMAQMEKALSIGFETCRYGFIEGHVVIPRIHPNSICAANNTGVYILTSNTSQYDTYCFNASAPPEEDCTSVTDLPNAFDGPITITIVNRDGTRYVQKGEYRTNPEDIYPSNPTDDDVSSGSSSERSSTSGGYIFYTFSTVHPIPDEDSPWITDSTDRIPATTASAHTSHPMQGRTTPSPEDSSWTDFFNPISHPMGRGHQAGRRMDMDSSHSITLQ

SEQ ID NO: 15508 - protein, 20 aa, Homo sapiens
MWQLWASLCCLLVLANARSR

SEQ ID NO: 15509 - protein, 255 aa, Homo sapiens
MALNVAPVRDTKWLTLEVCRQFQRGTCSRSDEECKFAHPPKSCQVENGRVIACFDSLKGRCSRENCKYLHPPTHLKTQLEINGRNNLIQQKTAAAMLAQQMQFMFPGTPLHPVPTFPVGPAIGTNTAISFAPYLAPVTPGVGLVPTEILPTTPVIVPGSPPVTVPGSTATQKLLRTDKLEVCREFQRGNCARGETDCRFAHPADSTMIDTSDNTVTVCMDYIKGRCMREKCKYFHPPAHLQAKIKAAQPRPRPQS

SEQ ID NO: 15510 - protein, 84 aa, Homo sapiens
MRTLFNLLWLALACSPVHTTLSKSDAKKAASKTLLEKAGAQWRDLGSPQPLPPRFKRFSCFSLPSSWDYRVSFQISRCKTGVWW

SEQ ID NO: 15511 - protein, 242 aa, Homo sapiens
MTVVGNPRSWSCQWLPILILLLGTGHGPGVEGVTHYKAGDPVILYVNKVGPYHNPQETYHYYQLPVCCPEKIRHKSLSLGEVLDGDRMAESLYEIRFRENVEKRILCHMQLSSAQVEQLRQAIEELYYFEFVVDDLPIRGFVGYMEESGFLPHSHKIGLWTHLDFHLEFHGDRIIFANVSVRDVKPHSLDGLRPDEFLGLTHTYSVRWSETSVERRSDRRRGDDGGFFPRTLEIHWLSIINS

SEQ ID NO: 15512 - protein, 136 aa, Homo sapiens
MAATMKKAAAEDVNVTFEDQQKINKFARNTSRITELKEEIEVKKKQLQNLEDACDDIMLADDDCLMIPYQIGDVFISHSQEETQEMLEEAKKNLQEEIDALESRVESIQRVLADLKVQLYAKFGSNINLEADERNT

SEQ ID NO: 15513 - protein, 206 aa, Homo sapiens
TVFLFGLLSFSRSVALFRGYHGPLDLYPEFYRIATDPTIHTVPEGRPVNVCVGKEWYRFPSSFLLPDNWQLQFIPSEFRGQLPKPFAEGPLATRIVPTDMNDQNLEEPSRYIDISKCHYLVDLDTMRETPREPKYSSNKEEWISLAYRPFLDASRSSKLLRAFYVPFLSDQYTVYVNYTILKPRKAKQIRKKSGDRRRAEPTYRKN

SEQ ID NO: 15514 - protein, 225 aa, Homo sapiens
MRIISRQIVLLFSGFWGLAMGAFPSSVQIGGLFIRNTDQEYTAFRLAIFLHNTSPNASEAPFNLVPHVDNIETANSFAVTNAFCSQYSRGVFAIFGLYDKRSVHTLTSFCSALHISLITPSFPTEGESQFVLQLRPSLRGALLSLLDHYEWNCFVFLYDTDRGLVISTTPLASNCMPSSVVHSWLYVLYNKSINSITACLLGPSTELNVFNYLIADSNLNNGNYI

SEQ ID NO: 15515 - protein, 185 aa, Homo sapiens
MQTDEEIGKVAAAVPVIISRALELFLESLLKKACQVTQSRNAKTMTTSHLKQCIELEQQFDFLKDLVASVPDMQGDGEDNHMDGDKGARRGRKPGSGGRKNGGMGTKSKDKKLSGTDSEQEDESEDTDTDGEEETSQPPPQASHPSAHFQSPPTPFLPFASTLPLPPAPPGPSAPDEEDEEDYDS

SEQ ID NO: 15516 - protein, 75 aa, Homo sapiens
MAGQEDPVQREIHQDWANREYIEIITSSIKKIADFLNSFDMSCRSRLATLNEKLTALERRIEYIEARVTKGETLT

SEQ ID NO: 15517 - protein, 474 aa, Homo sapiens
MDRNPSPPPPGRDKEEEEEVAGGDCIGSTVYSKHWLFGVLSGLIQIVSPENTKSSSDDEEQLTELDEEMENEICRVWDMSMDEDVALFLQEFNAPDIFMGVLAKSKCPRLREICVGILGNMACFQEICVSISSDKNLGQVLLHCLYDSDPPTLLETSRLLLTCLSQAEVASVWVERIQEHPAIYDSICFIMSSSTNVDLLVKVGEVVDKLFDLDEKLMLEWVRNGAAQPLDQPQEESEEQPVFRLVPCILEAAKQVRSENPEWLDVYMHILQLLTTVDDGIQAIVHCPDTGKDIWNLLFDLVCHEFCQSDDPPIILQEQKTVLASVFSVLSAIYASQTEQEYLKIEKVDLPLIDSLIRVLQNMEQCQKKPENSAESNTEETKRTDLTQDDFHLKILKDILCEFLSNIFQALTKETVAQGVKEGQLSKQKCSSAFQNLLPFYSPVVEDFIKILREVDKALADDLEKNFPSLKVQT

SEQ ID NO: 15518 - protein, 124 aa, Homo sapiens
MATPAVPVSAPPATPTPVPAAAPASVPAPTPAPAAAPVPAAAPASSSDPAAAAAATAAPGQTPASAQAPAQTPAPALPGPALPGPFPGGRVVRLHPVILASIVDSYERRNEGAARVIGTLLGGC

SEQ ID NO: 15519 - protein, 87 aa, Homo sapiens
MSGGRRKEEPPQPQLANGALKVSVWSKVLRSDAAWEDKDEFLDVIYWFRQIIAVVLGVIWGVLPLRGFLGIAGKGHCCSGAVCVCDD

SEQ ID NO: 15520 - protein, 184 aa, Homo sapiens
MVTSSFPISVAVFALITLQVGTQDSFIAAVYEHAVILPNKTETPVSQEDALNLMNENIDILETAIKQAAEQGARIIVTPEDALYGWKFTRETVFPYLEDIPDPQVNWIPCQDPHRFGHTPVQARLSCLAKDNSIYVLANLGDKKPCNSRDSTCPPNGYFQYNTNVVYNTEGKLVARYHKVGKSH

SEQ ID NO: 15521 - protein, 123 aa, Homo sapiens
MGAPGGKINRPRTELKKKLFKRRRVLNRERRLRHRVVGAVIDQGLITRHHLKKRASSARANITLSGKKRRKLLQQIRLAQKEKTAMEVEAPSKPARTSEPQLKRQKKTKAPQDVEMKDLEDES

SEQ ID NO: 15522 - protein, 137 aa, Homo sapiens
MGAGPSLLLAALLLLLSGDGAVRCDTPANCTYLDLLGTWVFQVGSSGSQRDVNCSVMGPQEKKVVVYLQKLDTAYDDLGNSGHFTIIYNQGFEIVLNDYKWFAFFKDVTDFISHLFMQLGTVGIYDLPHLRNKLVIK

SEQ ID NO: 15523 - protein, 43 aa, Homo sapiens
MASRLTLLTLLLLLLAGGLGRTPKQTWRASSLTPRTSPVSTRP

SEQ ID NO: 15524 - protein, 51 aa, Homo sapiens
MKFFVFALILALMLSMTGADSHAKRHHGYKRKFHEKHHSHRGYRSNYLYDN

SEQ ID NO: 15525 - protein, 44 aa, Homo sapiens
MPVPWFLLSLALGRSPVVLSLERLVGPQDATHCSPNCPVWSVWC

SEQ ID NO: 15526 - protein, 127 aa, Homo sapiens
MPGLLNWITGAALPLTASDVTSCVSGYALGLTASLTYGNLEAQPFQGLFVYPLDECTTVIGFEAVIADRVVTVQIKDKAKLESGHFDASHVRSPTVTGNILQDGVSIAPHSCTPGKVTLDEDLERIL

SEQ ID NO: 15527 - protein, 126 aa, Homo sapiens
MAAPVGPVKFWRPGTEGPGVSISEERQSLAENSGTTVVYNPYAALSIEQQRQKLPVFKLRNHILYLIENYQTVVIVGETGCGKSTQIPQYLAEAGWTAEGRVVGVTQPRRVAAVTHDLSSQRLQGE

SEQ ID NO: 15528 - protein, 67 aa, Homo sapiens
MRTQVYEGLCKNYFSLAVLQRDRIKLLFFDILVFLSVFLLFLLFLVDIMANNTTSLGSPWPENFWGS

SEQ ID NO: 15529 - protein, 60 aa, Homo sapiens
MEKAVNDGSHSEELFCHLKTISEKEDLPRCTSESHLSWYSHQYQGKSKFPILGFPVLSII

SEQ ID NO: 15530 - protein, 329 aa, Homo sapiens
MLGQVVTLILLLLLKVYQGKGCQGSADHVVSISGVPLQLQPNSIQTKVDSIAWKKLLPSQNGFHHILKWENGSLPSNTSNDRFSFIVKNLSLLIKAAQQQDSGLYCLEVTSISGKVQTATFQVFVFDKVEKPRLQGQGKILDRGRCQVALSCLVSRDGNVSYAWYRGSKLIQTAGNLTYLDEEVDINGTHTYTCNVSNPVSWESHTLNLTQDCQNAHQEFRFWPFLVIIVILSALFLGTLACFCVWRRKRKEKQSETSPKEFLTIYEDVKDLKTRRNHEQEQTFPGGGSTIYSMIQSQSSAPTSQEPAYTLYSLIQPSRKGDRFYSFSG

SEQ ID NO: 15531 - protein, 131 aa, Homo sapiens
MQHRGFLLLTLLALLALTSAVAKKKDKVKKGGPGSECAEWAWGPCTPSSKDCGVGFREGTCGAQTQRIRCRVPCNWKKEFGADCKYKFENWGACDGGTGTKVRQGTLKKARYNAQCQETIRVTKPCTPKTK

SEQ ID NO: 15532 - protein, 289 aa, Homo sapiens
MCSTMSAPTCLAHLPPCFLLLALVLVPSDASGQSSRNDWQVLQPEGPMLVAEGETLLLRCMVVGSCTDGMIKWVKVSTQDQQEIYNFKRGSFPGVMPMIQRTSEPLNCDYSIYIHNVTREHTGTYHCVRFDGLSEHSEMKSDEGTSVLVKGAGDPEPDLWIIQPQELVLGTTGDTVFLNCTVLGDGPPGPIRWFQGAGLSREAIYNFGGISHPKETAVQASNNDFSILLQNVSSEDAGTYYCVKFQRKPNRQYLSGQGTSLKVKAKSTSSKEAEFTSEPATEMSPTGLQ

SEQ ID NO: 15533 - protein, 132 aa, Homo sapiens
MVRRFLVTLRIRRACGPPRVRVFVVHIPRLTGEWAAPGAPAAVALVLMLLRSQRLGQQPLPRRPGHDDGQRPSGGAAAAPRRGAQLRRPRHSHPTRARRCPGGLPGHAGGAAPGRGAAGRARCLGPSARGPG

SEQ ID NO: 15534 - protein, 120 aa, Homo sapiens
MKPAAREARLPPRSPGLRWALPLLLLLLRLGQILCAGGRPSPVFDIKAVSISPTNVILTWKSNDTAASEYKYVVKHKMENEKTITVVHQPWCNITGLRPATSYVFSITPGIGNETWGDPR

SEQ ID NO: 15535 - protein, 71 aa, Homo sapiens
MFLSLPTLTVLIPLVSLAGLFYSASVEENFPQGCTSTASLCFYSLLLPITIPVYVFFHLWTWMGIKLFRHN

SEQ ID NO: 15536 - protein, 162 aa, Homo sapiens
MRTLFNLLWLALACSPVHTTLSKSDAKKAASKTLLEKSQFSDKPVQDRGLVVTDLKAESVVLEHRSYCSAKARDRHFAGDVLGYVTPWNSHGYDVTKVFGSKFTQISPVWLQLKRRGREMFEVTGLHDVDQGSHPSCLTVLAPQAEKSGGCELSGSMPRACT

SEQ ID NO: 15537 - protein, 219 aa, Homo sapiens
MWSGLLPPGLNESDAESNSEDEATLENSGLNLQEDKEDESIRKTEIIDFSTDEPKTETESNVNAYEECPSGIPIDMWNKFQELHKKHSEQKSTTSRFRGKRRKRSRKDKLKNEKELHSEPSSNETQWKELTQYFGVNDRFDPPVKRKKVEKSGLEKRIDQAVEEWNIEKAEELSNQLATREENHGSNVVCFSVSAIQRLVLSLCPFPDGVTSINYFSLV

SEQ ID NO: 15538 - protein, 206 aa, Homo sapiens
MDKFWWHAAWGLCLVPLSLAQIDLNITCRFAGVFHVEKNGRYSISRTEAADLCKAFNSTLPTMAQMEKALSIGFETCRYGFIEGHVVIPRIHPNSICGANTTSGPIRTPQIPEWLIILASLLALALILAVCIAVNSRRRCGQKKKLVINSGNGAVEDRKPSGLNGEASKSQEMVHLVNKESSETPDQFMTADETRNLQNVDMKIGV

SEQ ID NO: 15539 - protein, 61 aa, Homo sapiens
MIGIFHIFMWYFLLVLYMGQIKGAFGTYEPVTYKTGCTLWGIFFRRQNDLTSVTEEAESTP

SEQ ID NO: 15540 - protein, 686 aa, Homo sapiens
MEVVTFGDVAVHFSREEWQCLDPGQRALYREVMLENHSSVAGLAGFLVFKPELISRLEQGEEPWVLDLQGAEGTEAPRTSKTDSTIRTENEQACEDMDILKSESYGTVVRISPQDFPQNPGFGDVSDSEVWLDSHLGSPGLKVTGFTFQNNCLNEETVVPKTFTKDAPQGCKELGSSGLDCQPLESQGESAEGMSQRCEECGKGIRATSDIALHWEINTQKISRCQECQKKLSDCLQGKHTNNCHGEKPYECAECGKVFRLCSQLNQHQRIHTGEKPFKCTECGKAFRLSSKLIQHQRIHTGEKPYRCEECGKAFGQSSSLIHHQRIHTGERPYGCRECGKAFSQQSQLVRHQRTHTGERPYPCKECGKAFSQSSTLAQHQRMHTGEKAQILKASDSPSLVAHQRIHAVEKPFKCDECGKAFRWISRLSQHQLIHTGEKPYKCNKCTKAFGCSSRLIRHQRTHTGEKPFKCDECGKGFVQGSHLIQHQRIHTGEKPYVCNDCGKAFSQSSSLIYHQRIHKGEKPYECLQCGKAFSMSTQLTIHQRVHTGERPYKCNECGKAFSQNSTLFQHQIIHAGVKPYECSECGKAFSRSSYLIEHQRIHTRAQWFYEYGNALEGSTFVSRKKVNTIKKLHQCEDCEKIFRWRSHLIIHQRIHTGEKPYKCNDCGKAFNRSSRLTQHQKIHMG

SEQ ID NO: 15541 - protein, 580 aa, Homo sapiens
MDRVLLRWISLFWLTAMVEGLQVTVPDKKKVAMLFQPTVLRCHFSTSSHQPAVVQWKFKSYCQDRMGESLGMSSTRAQSLSKRNLEWDPYLDCLDSRRTVRVVASKQGSTVTLGDFYRGREITIVHDADLQIGKLMWGDSGLYYCIITTPDDLEGKNEDSVELLVLGRTGLLADLLPSFAVEIMPEWVFVGLVLLGVFLFFVLVGICWCQCCPHSCCCYVRCPCCPDSCCCPQAFRKGYRIQADKERDSMKVLYYVEKELAQFDPARRMRGRYNNTISELSSLHEEDSNFRQSFHQMRSKQFPVSGDLESNPDYWSGVMGGSSGASRGPSAMEYNKEDRESFRHSQPRSKSEMLSRKNFATGVPAVSMDELAAFADSYGQRPRRADGNSHEARGGSRFERSESRAHSGFYQDDSLEEYYGQRSRSREPLTDADRGWAFSPARRRPAEDAHLPRLVSRTPGTAPKYDHSYLGSARERQARPEGASRGGSLETPSKRSAQLGPRSASYYAWSPPGTYKAGSSQDDQEDASDDALPPYSELELTRGPSYRGRDLPYHSNSEKKRKKEPAKKTNDFPTRMSLVV

SEQ ID NO: 15542 - protein, 252 aa, Homo sapiens
MTGLALLYSGVFVAFWACALAVGEAGSWRAGAASRPSWPGRNSAGKWPAGNTGPPRALHPRLWGLAPARASDSDKGDPDFQLLEEGFLTETSPFMWSNLGIGLAISLSVVGAAWGIYITGSSIIGGGVKAPRIKTKNLVSIIFCEAVAIYGIIMAIVISNMAEPFSATDPKAIGHRNYHAGYSMFGAGLTVGLSNLFCGVCVGIVGSGAALADAQNPSLFVKILIVEIFGSAIGLFGVIVAILQTSRVKMGD

SEQ ID NO: 15543 - protein, 96 aa, Homo sapiens
MGLRSHHLSLGLLLLFLLPAECLGAEGRLALKLFRDLFANYTSALRPVADTDQTLNVTLEVTLSQIIDMVRCGGGTAVESYLSQCQEMKGMNGTRC

SEQ ID NO: 15544 - protein, 2032 aa, Homo sapiens
MGDDSEWLKLPVDQKCEHKLWKARLSGYEEALKIFQKIKDEKSPEWSKFLGLIKKFVTDSNAVVQLKGLEAALVYVENAHVAGKTTGEVVSGVVSKVFNQPKAKAKELGIEICLMYIEIEKGEAVQEELLKGLDNKNPKIIVACIETLRKALSEFGSKIILLKPIIKVLPKLFESREKAVRDEAKLIAVEIYRWIRDALRPPLQNINSVQLKELEEEWVKLPTSAPRPTRFLRSQQELEAKLEQQQSAGGDAEGGGDDGDEVPQIDAYELLEAVEILSKLPKDFYDKIEAKKWQERKEALESVEVLIKNPKLEAGDYADLVKALKKVVGKDTNVMLVALAAKCLTGLAVGLRKKFGQYAGHVVPTILEKFKEKKPQVVQALQEAIDAIFLTTTLQNISEDVLAVMDNKNPTIKQQTSLFIARSFRHCTASTLPKSLLKPFCAALLKHINDSAPEVRDAAFEALGTALKVVGEKAVNPFLADVDKLKLDKIKECSEKVELIHGKKAGLAADKKEFKPLPGRTAASGAAGDKDTKDISAPKPGPLKKAPAAKAGGPPKKGKPAAPGGAGNTGTKNKKGLETKEIVEPELSIEVCEEKASAVLPPTCIQLLDSSNWKERLACMEEFQKAVELMDRTEMPCQALVRMLAKKPGWKETNFQVMQMKLHIVALIAQKGNFSKTSAQVVLDGLVDKIGDVKCGNNAKEAMTAIAEACMLPWTAEQVVSMAFSQKNPKNQSETLNWLSNAIKEFGFSGLNVKAFISNVKTALAATNPAVRTAAITLLGVMYLYVGPSLRMFFEDEKPALLSQIDAEFEKMQGQSPPAPTRGISKHSTSGTDEGEDGDEPDDGSNDVVDLLPRTEISDKITSELVSKIGDKNWKIRKEGLDEVAGIINDAKFIQPNIGELPTALKGRLNDSNKILVQQTLNILQQLAVAMGPNIKQHVKNLGIPIITVLGDSKNNVRAAALATVNAWAEQTGMKEWLEGEDLSEELKKENPFLRQELLGWLAEKLPTLRSTPTDLILCVPHLYSCLEDRNGDVRKKAQDALPFFMMHLGYEKMAKATGKLKPTSKDQVLAMLEKAKVNMPAKPAPPTKATSKPMGGSAPAKFQPASAPAEDCISSSTEPKPDPKKAKAPGLSSKAKSAQGKKMPSKTSLKEDEDKSGPIFIVVPNGKEQRMKDEKGLKVLKWNFTTPRDEYIEQLKTQMSSCVAKWLQDEMFHSDFQHHNKALAVMVDHLESEKEGVIGCLDLILKWLTLRFFDTNTSVLMKALEYLKLLFTLLSEEEYHLTENEASSFIPYLVVKVGEPKDVIRKDVRAILNRMCLVYPASKMFPFIMEGTKSKNSKQRAECLEELGCLVESYGMNVCQPTPGKALKEIAVHIGDRDNAVRNAALNTIVTVYNVHGDQVFKLIGNLSEKDMSMLEERIKRSAKRPSAAPIKQVEEKPQRAQNISSNANMLRKGPAEDMSSKLNQARSMSGHPEAAQMVRREFQLDLDEIENDNGTVRCEMPELVQHKLDDIFEPVLIPEPKIRAVSPHFDDMHSNTASTINFIISQVASGDINTSIQALTQIDEVLRQEDKAEAMSGHIDQFLIATFMQLRLIYNTHMADEKLEKDEIIKLYSCIIGNMISLFQIESLAREASTGVLKDLMHGLITLMLDSRIEDLEEGQQVIRSVNLLVVKVLEKSDQTNILSALLVLLQDSLLATASSPKFSELVMKCLWRMVRLLPDTINSINLDRILLDIHIFMKVFPKEKLKQCKSEFPIRTLKTLLHTLCKLKGPKILDHLTMIDNKNESELEAHLCRMMKHSMDQTGSKSDKETEKGASRIDEKSSKAKVNDFLAEIFKKIGSKENTKEGLAELYEYKKKYSDADIEPFLKNSSQFFQSYVERGLRVIEMEREGKGRISTSTGISPQMEVTCVPTPTSTVSSIGNTNGEEVGPSVYLERLKILRQRCGLDNTKQDDRPPLTSLLSKPAVPTVASSTDMLHSKLSQLRESREQHQHSDLDSNQTHSSGTVTSSSSTANIDDLKKRLERIKSSRK

SEQ ID NO: 15545 - protein, 237 aa, Homo sapiens
MVAGSDAGRALGVLSVVCLLHCFGFISCFSQQIYGVVYGNVTFHVPSNVPLKEVLWKKQKDKVAELENSEFRAFSSFKNRVYLDTVSGSLTIYNLTSSDEDEYEMESPNITDTMKFFLYVLESLPSPTLTCALTNGSIEVQCMIPEHYNSHRGLIMYSWDCPMEQCKRNSTSIYFKMENDLPQKIQCTLSNPLFNTTSSIILTTCIPSSGHSRHRYALIPIPLAVITTCIVLYMNVL

SEQ ID NO: 15546 - protein, 96 aa, Homo sapiens
MAAHLKKRVYEEFTKVVQPQEEIATKKLRLTKPSKSAALHIDLCKATSPADALQYLLQFARKPVEAESVEGVVRILLEHYYKRWSLSVLPRLVANS

SEQ ID NO: 15547 - protein, 182 aa, Homo sapiens
MRRMWATQGLAVALALSVLPGSRALRPGDCEVCISYLGRFYQDLKDRDVTFSPATIENELIKFCREARGKENRLCYYIGATDDAATKIINEVSKPLAHHIPVEKICEKLKKKDSQICELKYDKQIDLSTVDLKKLRVKELKKILDDWGETCKGCAEKSDYIRKINELMPKYAPKAASARTDL

SEQ ID NO: 15548 - protein, 165 aa, Homo sapiens
MNLAISIALLLTVLQVSRGQKVTSLTACLVDQSLRLDCRHENTSSSPIQYEFSLTRETKKHVLFGTVGVPEHTYRSRTNFTSKYNMKVLYLSAFTSKDEGTYTCALHHSGHSPPISSQNVTVLRGHGFHVPVTGGAHGGDRKPQVPVQRSYFSESADPLPPIPQT

SEQ ID NO: 15549 - protein, 265 aa, Homo sapiens
MNRFLLLMSLYLLGSARGTSSQPNELSGSIDHQTSVQQLPGEFFSLENPSDAEALYETSSGLNTLSEHGSSEHGSSKHTVAEHTSGEHAESEHASGEPAATEHAEGEHTVGEQPSGEQPSGEHLSGEQPLSELESGEQPSDEQPSGEHGSGEQPSGEQASGEQPSGEHASGEQASGAPISSTSTGTILNCYTCAYMNDQGKCLRGEGTCITQNSQQCMLKKIFEGGKLQFMVQGCENMCPSMNLFSHGTRMQIICCRNQSFCNKI

SEQ ID NO: 15550 - protein, 141 aa, Homo sapiens
MRVEPSWPNQLLKTSVKFLMTSPEIASLSWGQMKVKGSNTTYKDCKVWPGGSRTWDWRETGTEHSPGVQPADVKEVVEKGVQTLVIGRGMSEALKVPSSTVEYLKKHGIDVRVLQTEQAVKEYNALVAQGVRVGGVFHSTC

SEQ ID NO: 15551 - protein, 62 aa, Homo sapiens
MRLLSFVVLALFAVTQAEEGARLLASKSLLNRYAVEGRDLTLQYNIYNVGSRHVHEEKLRQG

SEQ ID NO: 15552 - protein, 49 aa, Homo sapiens
MIGDILLFGTLLMNAGAVLNFKLKKKDTQGFGEESREPSTGCSALESQR

SEQ ID NO: 15553 - protein, 604 aa, Homo sapiens
MASVAWAVLKVLLLLPTQTWSPVGAGNPPDCDAPLASALPRSSFSSSSELSSSHGPGFSRLNRRDGAGGWTPLVSNKYQWLQIDLGERMEVTAVATQGGYGSSDWVTSYLLMFSDGGRNWKQYRREESIWGFPGNTNADSVVHYRLQPPFEARFLRFLPLAWNPRGRIGMRIEVYGCAYKSEVVYFDGQSALLYRLDKKPLKPIRDVISLKFKAMQSNGILLHREGQHGNHITLELIKGKLVFFLNSGNAKLPSTIAPVTLTLGSLLDDQHWHSVLIELLDTQVNFTVDKHTHHFQAKGDSSYLDLNFEISFGGIPTPGRSRAFRRKSFHGCLENLYYNGVDVTELAKKHKPQILMMGNVSFSCPQPQTVPVTFLSSRSYLALPGNSGEDKVSVTFQFRTWNRAGHLLFGELRRGSGSFVLFLKDGKLKLSLFQPGQSPRNVTAGAGLNDGQWHSVSFSAKWSHMNVVVDDDTAVQPLVAVLIDSGDTYYFGALYEQSCEAHKHRGNPSGLYYIDADGSGPLGPFLVYCNMTDAAWTVVQHGGPDAVTLRGAPSGHPRSAVSFAYAAGAGQLRSAVNLAERCEQRLALRCGTARRPDSRGLVTQ

SEQ ID NO: 15554 - protein, 605 aa, Homo sapiens
MASVAWAVLKVLLLLPTQTWSPVGAGNPPDCDSPLASALPRSSFSSSSELSSSHGPGFSRLNRRDGAGGWTPLVSNKYQWLQIDLGERMEVTAVATQGGYGSSDWVTSYLLMFSDGGRNWKQYRREESIWGFPGNTNADSVVHYRLQPPFEARFLRFLPLAWNPRGRIGMRIEVYGCAYKSEVVYFDGQSALLYTLDKKPLKPIRDVISLKFKAMQSNGILLHREGQHGNHITLELIKGKLVFFLNSGNAKLPSTIAPVTLTLGSLLDDQHWHSVLIELLDTQVNFTVDKHTHHFQAKGDSSNLDLNFEISFGGILSPGRSRAFTRKSFHGCLENLYYNGVDVTELAKKHKPQILMMGNVSFSCPQPQTVPVTFLSSRSYLALPGNSGEDKVSVTFQFRTWNRAGHLLFGELQRGSGSFVLFLKDGKLKLSLFQAGQSPRNVTAGAGLNDGQWHSVSFSAKWSHMNVVVDDDTAVQPLVAVLIDSGDTYYFGALYEQSCEAHKHRGNPSGLYYIDADGSGPLGPFLVYCNMTADSAWTVVRHGGPDAVTLRGAPSGHPLSAVSFAYAAGAGQLRAAVNLAERCEQRLALRCGTARRPDSRGLVTQ

SEQ ID NO: 15555 - protein, 41 aa, Homo sapiens
MWATLPLLCAGAWLLGVPVCGAAELCVNSLGTQRARRPRGC

SEQ ID NO: 15556 - protein, 889 aa, Homo sapiens
MYLSICCCFLLWAPALTLKNLNYSVPEEQGAGTVIGNIGRDARLQPGLPPAERGGGGRSKSGSYRVLENSAPHLLDVDADSGLLYTKQRIDRESLCRHNAKCQLSLEVFANDKEICMIKVEIQDINDNAPSFSSDQIEMDISENAAPGTRFPLTSAHDPDAGENGLRTYLLTRDDHGLFGLDVKSRGDGTKFPELVIQKALDREQQNHHTLVLTALDGGEPPRSATVQINVKVIDSNDNSPVFEAPSYLVELPENAPLGTVVIDLNATDADEGPNGEVLYSFSSYVPDRVRELFSIDPKTGLIRVKGNLDYEENGMLEIDVQARDLGPNPIPAHCKVTVKLIDRNDNAPSIGFVSVRQGALSEAAPPGTVIALVRVTDRDSGKNGQLQCRVLGGGGTGGGGGLGGPGGSVPFKLEENYDNFYTVVTDRPLDRETQDEYNVTIVARDGGSPPLNSTKSFAIKILDENDNPPRFTKGLYVLQVHENNIPGEYLGSVLAQDPDLGQNGTVSYSILPSHIGDVSIYTYVSVNPTNGAIYALRSFNFEQTKAFEFKVLAKDSGAPAHLESNATVRVTVLDVNDNAPVIVLPTLQNDTAELQVPRNAGLGYLVSTVRALDSDFGESGRLTYEIVDGNDDHLFEIDPSSGEIRTLHPFWEDVTPVVELVVKVTDHGKPTLSAVAKLIIRSVSGSLPEGVPRVNGEQHHWDMSLPLIVTLSTISIILLAAMITIAVKCKRENKEIRTYNCRIAEYSHPQLGGGKGKKKKINKNDIMLVQSEVEERNAMNVMNVVSSPSLATSPMYFDYQTRLPLSSPRSEVMYLKPASNNLTVPQGHAGCHTSFTGQGTNASETPATRMSIIQTDNFPAEPNYMGSRQQFVQSISVAPRLRTQKEPA

SEQ ID NO: 15557 - protein, 170 aa, Homo sapiens
MPVKRSLKLDGLLEENSFDPSKITRKKSVITYSPTTGTCQMSLFASPTSSEEQKHRNGLSNEKRKKLNHPSLTESKESTTKDNDEFMMLLSKVEKLSEEIMEIMQNLSSIQALEGSRELENLIGISCASHFLKREMQKTKELMTKVNKQKLFEKSTGLPHKGQPQMSQPL

SEQ ID NO: 15558 - protein, 1440 aa, Homo sapiens
MARAQALVLALTFQLCAPETETPAAGCTFEEASDPAVPCEYSQAQYDDFQWEQVRIHPGTRAPADLPHGSYLMVNTSQHAPGQRAHVIFQSLSENDTHCVQFSYFLYSRDGHSPGTLGVYVRVNGGPLGSAVWNMTGSHGRQWHQAELAVSTFWPNEYQVLFEALISPDRRGYMGLDDILLLSYPCAKAPHFSRLGDVEVNAGQNASFQCMAAGRAAEAERFLLQRQSGALVPAAGVRHISHRRFLATFPLAAVSRAEQDLYRCVSQAPRGAGVSNFAELIVKEPPTPIAPPQLLRAGPTYLIIQLNTNSIIGDGPIVRKEIEYRMARGPWAEVHAVSLQTYKLWHLDPDTEYEISVLLTRPGDGGTGRPGPPLISRTKCAEPMRAPKGLAFAEIQARQLTLQWEPLGYNVTRCHTYTVSLCYHYTLGSSHNQTIRECVKTEQGVSRYTIKNLLPYRNVHVRLVLTNPEGRKEGKEVTFQTDEDVPSGIAAESLTFTPLEDMIFLKWEEPQEPNGLITQYEISYQSIESSDPAVNVPGPRRTISKLRNETYHVFSNLHPGTTYLFSVRARTGKGFGQAALTEITTNISAPSFDYADMPSPLGESENTITVLLRPAQGRGAPISVYQVIVEEERARRLRREPGGQDCFPVPLTFEAALARGLVHYFGAELAASSLPEAMPFTVGDNQTYRGFWNPPLEPRKAYLIYFQAASHLKGETRLNCIRIARKAACKESKRPLEVSQRSEEMGLILGICAGGLAVLILLLGAIIVIIRKGKPVNMTKATVNYRQEKTHMMSAVDRSFTDQSTLQEDERLGLSFMDTHGYSTRGDQRSGGVTEASSLLGGSPRRPCGRKGSPYHTGQLHPAVRVADLLQHINQMKTAEGYGFKQEYESFFEGWDATKKKDKVKGSRQEPMPAYDRHRVKLHPMLGDPNADYINANYIDIRINREGYHRSNHFIATQGPKPEMVYDFWRMVWQEHCSSIVMITKLVEVGRVKCSRYWPEDSDTYGDIKIMLVKTETLAEYVVRTFALERRGYSARHEVRQFHFTAWPEHGVPYHATGLLAFIRRVKASTPPDAGPIVIHCSAGTGRTGCYIVLDVMLDMAECEGVVDIYNCVKTLCSRRVNMIQTEEQYIFIHDAILEACLCGETTIPVSEFKATYKEMIRIDPQSNSSQLREEFQTLNSVTPPLDVEECSIALLPRNRDKNRSMDVLPPDRCLPFLISTDGDSNNYINAALTDSYTRSAAFIVTLHPLQSTTPDFWRLVYDYGCTSIVMLNQLNQSNSAWPCLQYWPEPGRQQYGLMEVEFMSGTADEDLVARVFRVQNISREGHLLVRHFQFLRWSAYRDTPDSKKAFLHLLAEVDKWQAESGDGRTIVHCLNGGGRSGTFCACATVLEMIRCHNLVDVFFAAKTLRNYKPNMVETMDQYHFCYDVALEYLEGLESR

SEQ ID NO: 15559 - protein, 824 aa, Homo sapiens
MRLALLWALGLLGAGSPLPSWPLPNIVLSWGVLGPAGGTEEQQAESEKAPREPLEPQVLQDDLPISLKKVLQTSLPEPLRIKLELDGDSHILELLQNRELVPGRPTLVWYQPDGTRVVSEGHTLENCCYQGRVRGYAGSWVSICTCSGLRGLVVLTPERSYTLEQGPGDLQGPPIISRIQDLHLPGHTCALSWRESVHTQKPPEHPLGQRHIRRRRDVVTETKTVELVIVADHSEAQKYRDFQHLLNRTLEVALLLDTFFRPLNVRVALVGLEAWTQRDLVEISPNPAVTLENFLHWRRAHLLPRLPHDSAQLVTGTSFSGPTVGMAIQNSICSPDFSGGVNMDHSTSILGVASSIAHELGHSLGLDHDLPGNSCPCPGPAPAKTCIMEASTDFLPGLNFSNCSRRALEKALLDGMGSCLFERLPSLPPMAAFCGNMFVEPGEQCDCGFLDDCVDPCCDSLTCQLRPGAQCASDGPCCQNCQLRPSGWQCRPTRGDCDLPEFCPGDSSQCPPDVSLGDGEPCAGGQAVCMHGRCASYAQQCQSLWGPGAQPAAPLCLQTANTRGNAFGSCGRNPSGSYVSCTPRDAICGQLQCQTGRTQPLLGSIRDLLWETIDVNGTELNCSWVHLDLGSDVAQPLLTLPGTACGPGLVCIDHRCQRVDLLGAQECRSKCHGHGVCDSNRHCYCEEGWAPPDCTTQLKATSSLTTGLLLSLLVLLVLVMLGASYWYRARLHQRLCQLKGPTCQYRAAQSGPSERPGPPQRALLARGTKSQGPAKPPPPRKPLPADPQGRCPSGDLPGPGAGIPPLVVPSRPAPPPPTVSSLYL

SEQ ID NO: 15560 - protein, 118 aa, Homo sapiens
MWATLPLLCAGAWLLGVPVCGAAELCVNSLVAGLSPPLGPWSLRSPSQPERCCPWRNSSWWTAPRTSIITAAKGVSPARLSSISCTTRGSWVKTPTPTRARMVIASSNLERPSALSRM

SEQ ID NO: 15561 - protein, 151 aa, Homo sapiens
MDFWLWPLYFLPVSGALRILPEVKVEGELGGSVTIKCPLPEMHVRIYLCREMAGSGTCGTVVSTTNFIKAEYKGRVTLKQYPRKNLFLVEVTQLTESDSGVYACGAGMNTDRGKTQKVTLNVHSEYEPSWEEQPMPETPKWFHLPYLFQMP

SEQ ID NO: 15562 - protein, 419 aa, Homo sapiens
MTASGSPDYGQPHKINPLPPQQEWINQPVRVNVKREYDHMNGSRESPVDCSVSKCSKLVGGGESNPMNYNSYMDEKNGPPPPNMTTNERRVIVPADPTLWTQEHVRQWLEWAIKEYSLMEIDTSFFQNMDGKELCKMNKEDFLRATTLYNTEVLLSHLSYLRESSLLAYNTTSHTDQSSRLSVKEDPSYDSVRRGAWGNNMNSGLNKSPPLGGAQTISKNTEQRPQPDPYQILGPTSSRLANPGSGQIQLWQFLLELLSDSANASCITWEGTNGEFKMTDPDEVARRWGERKSKPNMNYDKLSRALRYYYDKNIMTKVHGKRYAYKFDFHGIAQALQPHPTESSMYKYPSDISYMPSYHAHQQKVNFVPPHPSSMPVTSSSFFGAASQYWTSPTGGIYPNPNVPRHPNTHVPSHLGSYY

SEQ ID NO: 15563 - protein, 820 aa, Homo sapiens
MWSWKCLLFWAVLVTATLCTARPSPTLPEQAQPWGAPVEVESFLVHPGDLLQLRCRLRDDVQSINWLRDGVQLAESNRTRITGEEVEVQDSVPADSGLYACVTSSPSGSDTTYFSVNVSDALPSSEDDDDDDDSSSEEKETDNTKPNRMPVAPYWTSPEKMEKKLHAVPAAKTVKFKCPSSGTPNPTLRWLKNGKEFKPDHRIGGYKVRYATWSIIMDSVVPSDKGNYTCIVENEYGSINHTYQLDVVERSPHRPILQAGLPANKTVALGSNVEFMCKVYSDPQPHIQWLKHIEVNGSKIGPDNLPYVQILKTAGVNTTDKEMEVLHLRNVSFEDAGEYTCLAGNSIGLSHHSAWLTVLEALEERPAVMTSPLYLEIIIYCTGAFLISCMVGSVIVYKMKSGTKKSDFHSQMAVHKLAKSIPLRRQVSADSSASMNSGVLLVRPSRLSSSGTPMLAGVSEYELPEDPRWELPRDRLVLGKPLGEGCFGQVVLAEAIGLDKDKPNRVTKVAVKMLKSDATEKDLSDLISEMEMMKMIGKHKNIINLLGACTQDGPLYVIVEYASKGNLREYLQARRPPGLEYCYNPSHNPEEQLSSKDLVSCAYQVARGMEYLASKKCIHRDLAARNVLVTEDNVMKIADFGLARDIHHIDYYKKTTNGRLPVKWMAPEALFDRIYTHQSDVWSFGVLLWEIFTLGGSPYPGVPVEELFKLLKEGHRMDKPSNCTNELYMMMRDCWHAVPSQRPTFKQLVEDLDRIVALTSNQEYLDLSMPLDQYSPSFPDTRSSTCSSGEDSVFSHEPLPEEPCLPRHPAQLANGGLKRR

SEQ ID NO: 15564 - protein, 1462 aa, Homo sapiens
MDTTAAAALPAFVALLLLSPWPLLGSAQGQFSAGGCTFDDGPGACDYHQDLYDDFEWVHVSAQEPHYLPPEMPQGSYMIVDSSDHDPGEKARLQLPTMKENDTHCIDFSYLLYSQKGLNPGTLNILVRVNKGPLANPIWNVTGFTGRDWLRAELAVSTFWPNEYQVIFEAEVSGGRSGYIAIDDIQVLSYPCDKSPHFLRLGDVEVNAGQNATFQCIATGRDAVHNKLWLQRRNGEDIPVAQTKNINHRRFAASFRLQEVTKTDQDLYRCVTQSERGSGVSNFAQLIVREPPRPIAPPQLLGVGPTYLLIQLNANSIIGDGPIILKEVEYRMTSGSWTETHAVNAPTYKLWHLDPDTEYEIRVLLTRPGEGGTGLPGPPLITRTKCAEPMRTPKTLKIAEIQARRIAVDWESLGYNITRCHTFNVTICYHYFRGHNESKADCLDMDPKAPQHVVNHLPPYTNVSLKMILTNPEGRKESEETIIQTDEDVPGPVPVKSLQGTSFENKIFLNWKEPLDPNGIITQYEISYSSIRSFDPAVPVAGPPQTVSNLWNSTHHVFMHLHPGTTYQFFIRASTVKGFGPATAINVTTNISAPTLPDYEGVDASLNETATTITVLLRPAQAKGAPISAYQIVVEELHPHRTKREAGAMECYQVPVTYQNAMSGGAPYYFAAELPPGNLPEPAPFTVGDNRTYQGFWNPPLAPRKGYNIYFQAMSSVEKETKTQCVRIATKAAATEEPEVIPDPAKQTDRVVKIAGISAGILVFILLLLVVILIVKKSKLAKKRKDAMGNTRQEMTHMVNAMDRSYADQSTLHAEDPLSITFMDQHNFSPRLPNDPLVPTAVLVPITDENHSATAESSRLLDVPRYLCEGTESPYQTGQLHPAIRVADLLQHINLMKTSDSYGFKEEYESFFEGQSASWDVAKKDQNRAKNRYGNIIAYDHSRVILQPVEDDPSSDYINANYIDIWLYRDGYQRPSHYIATQGPVHETVYDFWRMIWQEQSACIVMVTNLVEVGRVKCYKYWPDDTEVYGDFKVTCVEMEPLAEYVVRTFTLERRGYNEIREVKQFHFTGWPDHGVPYHATGLLSFIRRVKLSNPPSAGPIVVHCSAGAGRTGCYIVIDIMLDMAEREGVVDIYNCVKALRSRRINMVQTEEQYIFIHDAILEACLCGETAIPVCEFKAAYFDMIRIDSQTNSSHLKDEFQTLNSVTPRLQAEDCSIACLPRNHDKNRFMDMLPPDRCLPFLITIDGESSNYINAALMDSYRQPAAFIVTQYPLPNTVKDFWRLVYDYGCTSIVMLNEVDLSQGCPQYWPEEGMLRYGPIQVECMSCSMDCDVINRIFRICNLTRPQEGYLMVQQFQYLGWASHREVPGSKRSFLKLILQVEKWQEECEEGEGRTIIHCLNGGGRSGMFCAIGIVVEMVKRQNVVDVFHAVKTLRNSKPNMVEAPEQYRFCYDVALEYLESS

SEQ ID NO: 15565 - protein, 217 aa, Homo sapiens
MAEFDTISELEEEEEEEAATSSSSPSSSSSVSGPDDDEEDEEEEEEEEEEEEEEEEEEEEEAPPPPRVVSEEHLRRYAPDPVLVRGAGHITVFGLSNKFDTEFPSVLTGKVAPEEFKTSIGRVNACLKKALPVNVKWLLCGCLCCCCTLGCSLWPVICLNKRTRRSIQKLIEWENNRLYHKLALHWKLTKRKCETSNMMEYVILIEFLPKYPIFRPD

SEQ ID NO: 15566 - protein, 351 aa, Homo sapiens
MLEVLRVLSTSSEALHHAVIFLFNGAEENVLQASHGFITQHPWASLIRAFINLEAAGVGGKELVFQTGPENPWLVQAYVSAAKHPFASVVAQEVFQSGIIPSDTDFRIYRDFGNIPGIDLAFIENGYIYHTKYDTADRILTDSIQRAGDNILAVLKHLATSDMLAAASKYRHGNMVFFDVLGLFVIAYPSRIGSIINYMVVMGVVLYLGKKFLQPKHKTGNYKKDFLCGLGITLISWFTSLVTVLIIAVFISLIGQSLSWYNHFYVSVCLYGTATVAKIILIHTLAKRFYYMNASAQYLGEVFFDISLFVHCCFLVTLTYQGLCSAFISAVWVAFPLLTKLCVHKDFKQHD

SEQ ID NO: 15567 - protein, 251 aa, Homo sapiens
MGEFNEKKTTCGTVCLKYLLFTYNCCFWLAGLAVMAVGIWTLALKSDYISLLASGTYLATAYILVVAGTVVMVTGVLGCCATFKERRNLLRLYFILLLIIFLLEIIAGILAYAYYQQLNTELKENLKDTMTKRYHQPGHEAVTSAVDQLQQEFHCCGSNNSQDWRDSEWIRSQEAGGRVVPDSCCKTVVALCGQRDHASNIYKGGCITKLETFIQEHLRVIGAVGIGIACVQVFGMIFTCCLYRSLKLEHY

SEQ ID NO: 15568 - protein, 589 aa, Homo sapiens
MTVVGNPRSWSCQWLPILILLLGTGHGPGVEGVTHYKAGDPVILYVNKVGPYHNPQETYHYYQLPVCCPEKIRHKSLSLGEVLDGDRMAESLYEIRFRENVEKRILCHMQLSSAQVEQLRQAIEELYYFEFVVDDLPIRGFVGYMEESGFLPHSHKIGLWTHLDFHLEFHGDRIIFANVSVRDVKPHSLDGLRPDEFLGLTHTYSVRWSETSVERRSDRRRGDDGGFFPRTLEIHWLSIINSMVLVFLLVGFVAVILMRVLRNDLARYNLDEETTSAGSGDDFDQGDNGWKIIHTDVFRFPPYRGLLCAVLGVGAQFLALGTGIIVMALLGMFNVHRHGAINSAAILLYALTCCISGYVSSHFYRQIGGERWVWNIILTTSLFSVPFFLTWSVVNSVHWANGSTQALPATTILLLLTVWLLVGFPLTVIGGIFGKNNASPFDAPCRTKNIAREIPPQPCAISVELYYIFATVWGREQYTLYGILFFVFAILLSVGACISIALTYFQLSGEDYRWWWRSVLSVGSTGLFIFLYSVFYYARRSNMSGAVQTVEFFGYSLLTGYVFFLMLGTISFFSSLKFIRYIYVNLKMD

SEQ ID NO: 15569 - protein, 82 aa, Homo sapiens
MSRRRHSDENDGGQPHKRRKTSDANETEDHLESLICKVGEKSACSLESNLEGLAGVLEADLPNYKSKILRLLCTVSVFYLIL

SEQ ID NO: 15570 - protein, 33 aa, Homo sapiens
FMRLPLISVALVQGWALGGGAEFTTACDFSFRH

SEQ ID NO: 15571 - protein, 177 aa, Homo sapiens
MELGCWTQLGLTFLQLLLISSLPREYTVINEACPGAEWNIMCRECCEYDQIECVCPGKREVVGYTIPCCRNEENECDSCLIHPGCTIFENCKSCRNGSWGGTLDDFYVKGFYCAECRAGWYGGDCMPCSSSPCFHDGTCVLDKAGSYKCACLAGYTGQRCENLLEERNCSDPGGPVN

SEQ ID NO: 15572 - protein, 167 aa, Homo sapiens
MERPAPWTLWVTTSWWYIWALRSSVTFLPDFEDDDLYGQSVEDDYCISPSTAAQFIYSRRDKPSVEPVEEYDYEDLKESSNSVSNHQLSGFDQARLYSCLDHMREVLGDAVPDEILIEAVLKNKFDVQKALSGVLEQDRVQSLKDKNEATVSTGKIAKGKPVDSQTS

SEQ ID NO: 15573 - protein, 144 aa, Homo sapiens
MALSWLQRVELALFAAAFLCGAVAAAAMTRTQGSFSGRCPLYGVATLNGSSLALSRPSAPSLCYFVAGASGLLALYCLLLLLFWIYSSCIEDSHRGAIGLRIALAISAIAVFLVLVSACILRFGTRSLCNSIISLNTTIRPLLG

SEQ ID NO: 15574 - protein, 83 aa, Homo sapiens
MKLVSVALMYLGSLAFLGADTARLDVASEFRKKWNKWALSRGKRELRMSSSYPTGLADVKAGPAQTLIRPQDMKGASRSPEDR

SEQ ID NO: 15575 - protein, 755 aa, Homo sapiens
MEALTLWLLPWICQCVSVRADSIIHIGAIFEENAAKDDRVFQLAVSDLSLNDDILQSEKITYSIKVIEANNPFQAVQEACDLMTQGILALVTSTGCASANALQSLTDAMHIPHLFVQRNPGGSPRTACHLNPSPDGEAYTLASRPPVRLNDVMLRLVTELRWQKFVMFYDSEYDIRGLQSFLDQASRLGLDVSLQKVDKNISHVFTSLFTTMKTEELNRYRDTLRRAILLLSPQGAHSFINEAVETNLASKDSHWVFVNEEISDPEILDLVHSALGRMTVVRQIFPSAKDNQKCTRNNHRISSLLCDPQEGYLQMLQISNLYLYDSVLMLANAFHRKLEDRKWHSMASLNCIRKSTKPWNGGRSMLDTIKKGHITGLTGVMEFREDSSNPYVQFEILGTTYSETFGKDMRKLATWDSEKGLNGSLQERPMGSRLQGLTLKVVTVLEEPFVMVAENILGQPKRYKGFSIDVLDALAKALGFKYEIYQAPDGRYGHQLHNTSWNGMIGELISKRADLAISAITITPERESVVDFSKRYMDYSVGILIKKPEEKISIFSLFAPFDFAVWACIAAAIPVVGVLIFVLNRIQAVRAQSAAQPRPSASATLHSAIWIVYGAFVQQGGESSVNSMAMRIVMGSWWLFTLIVCSSYTANLAAFLTVSRMDNPIRTFQDLSKQVEMSYGTVRDSAVYEYFRAKGTNPLEQDSTFAELWRTISKNGGADNCVSSPSEGIRKDPGAAGHRGPGCAEAEVVAAHGPL

SEQ ID NO: 15576 - protein, 241 aa, Homo sapiens
MATGELGDLGGYYFRFLPQKTFQSLSSKEITSRLRQWSMLGRIKAQAFGFDQTFQSYRKDDFVMAFFKDPNVIPNLKLLSDSSGQWIILGTEVKKIEAINVPCTQLSMSFFHRLYDEDIVRDSGHIVKCLDSFCDPFLISDELRRVLLVEDSEKYEIFSQPDREEFLFCLFKHLCLGGALCQYEDVISPYLETTKLIYKDLVSVRKNPQTKKIQITSSVFKVSAYVSVRELLQPKNLITFY

SEQ ID NO: 15577 - protein, 142 aa, Homo sapiens
MAPVKISHVVSFSSQDPKYPVENLLNPDSPRRPWLGCPQDKSGQLKVELQLERAVPTGYIDVGNCGCAFLQIDVGHSSWPLDRPFITLLPATTLMSLTDSKQGKNRSGVRMFKDGKEGKSRKDGGGLYEKQRCSTKEDCECY

SEQ ID NO: 15578 - protein, 364 aa, Homo sapiens
MQRLGATLLCLLLAAAVPTAPAPAPTATSAPVKPGPALSYPQEEATLNEMFREVEELMEDTQHKLRSAVEEMEAEEAAAKASSEVNLANLPPSYHNETNTDTKVGNNTIHVHREIHKITNNQTGQMVFSETVITSVGDEEGRRSHECIIDEDCGPSMYCQFASFQYTCQPCRGQRMLCTRDSECCGDQLCVWGHCTKMATRGSNGTICDNQRDCQPGLCCAFQRGLLFPVCTPLPVEGELCHDPASRLLDLITWELEPDGALDRCPCASGLLCQPHRLPRLEPGFVPSLPSHSLVYVCKPTFVGSRDQDGEILLPREVPDEYEVGSFMEEVRQELEDLERSLTEEMALREPAAAAAALLGGEEI

SEQ ID NO: 15579 - protein, 1355 aa, Homo sapiens
MVPGEENQLVPKEIENAAEEPRVLCIIQDTTNSKTVNERITLNLPASTPVRKLFEDVANKVGYINGTFDLVWGNGINTADMAPLDHTSDKSLLDANFEPGKKNFLHLTDKDGEQPQILLEDSSAGEDSVHDRFIGPLPREGSGGSTSDYVSQSYSYSSILNKSETGYVGLVNQAMTCYLNSLLQTLFMTPEFRNALYKWEFEESEEDPVTSIPYQLQRLFVLLQTSKKRAIETTDVTRSFGWDSSEAWQQHDVQELCRVMFDALEQKWKQTEQADLINELYQGKLKDYVRCLECGYEGWRIDTYLDIPLVIRPYGSSQAFASVEEALHAFIQPEILDGPNQYFCERCKKKCDARKGLRFLHFPYLLTLQLKRFDFDYTTMHRIKLNDRMTFPEELDMSTFIDVEDEKSPQTESCTDSGAENEGSCHSDQMSNDFSNDDGVDEGICLETNSGTEKISKSGLEKNSLIYELFSVMVHSGSAAGGHYYACIKSFSDEQWYSFNDQHVSRITQEDIKKTHGGSSGSRGYYSSAFASSTNAYMLIYRLKDPARNAKFLEVDEYPEHIKNLVQKERELEEQEKRQREIERNTCKIKLFCLHPTKQVMMENKLEVHKDKTLKEAVEMAYKMMDLEEVIPLDCCRLVKYDEFHDYLERSYEGEEDTPMGLLLGGVKSTYMFDLLLETRKPDQVFQSYKPGEVMVKVHVVDLKAESVAAPITVRAYLNQTVTEFKQLISKAIHLPAETMRIVLERCYNDLRLLSVSSKTLKAEGFFRSNKVFVESSETLDYQMAFADSHLWKLLDRHANTIRLFVLLPEQSPVSYSKRTAYQKAGGDSGNVDDDCERVKGPVGSLKSVEAILEESTEKLKSLSLQQQQDGDNGDSSKSTETSDFENIESPLNERDSSASVDNRELEQHIQTSDPENFQSEERSDSDVNNDRSTSSVDSDILSSSHSSDTLCNADNAQIPLANGLDSHSITSSRRTKANEGKKETWDTAEEDSGTDSEYDESGKSRGEMQYMYFKAEPYAADEGSGEGHKWLMVHVDKRITLAAFKQHLEPFVGVLSSHFKVFRVYASNQEFESVRLNETLSSFSDDNKITIRLGRALKKGEYRVKVYQLLVNEQEPCKFLLDAVFAKGMTVRQSKEELIPQLREQCGLELSIDRFRLRKKTWKNPGTVFLDYHIYEEDINISSNWEVFLEVLDGVEKMKSMSQLAVLSRRWKPSEMKLDPFQEVVLESSSVDELREKLSEISGIPLDDIEFAKGRGTFPCDISVLDIHQDLDWNPKVSTLNVWPLYICDDGAVIFYRDKTEELMELTDEQRNELMKKESSRLQKTGHRVTYSPRKEKALKIYLDGAPNKDLTQD

SEQ ID NO: 15580 - protein, 150 aa, Homo sapiens
MWSWKCLLFWAVLVTATLCTARPSPTLPEQAQPWGAPVEVESFLVHPGDLLQLRCRLRDDVQSINWLRDGVQLAESNRTRITGEEVEVQDSVPADSGLYACVTSSPSGSDTTYFSVNVSACPDLQEAKWCSASFHSITPLPFGLGTRLSD

SEQ ID NO: 15581 - protein, 393 aa, Homo sapiens
MEPFVVLVLCLSFMLLFSLWRQSCRRRKLPPGPTPLPIIGNMLQIDVKDICKSFTNFSKVYGPVFTVYFGMNPIVVFHGYEAVKEALIDNGEEFSGRGNSPISQRITKGLGIISSNGKRWKEIRRFSLTTLRNFGMGKRSIEDRVQEEAHCLVEELRKTKASPCDPTFILGCAPCNVICSVVFQKRFDYKDQNFLTLMKRFNENFRILNSPWIQVCNNFPLLIDCFPGTHNKVLKNVALTRSYIREKVKEHQASLDVNNPRDFIDCFLIKMEQEKDNQKSEFNIENLVGTVADLFVAGTETTSTTLRYGLLLLLKHPEVTAKVQEEIDHVIGRHRSPCMQDRSHMPYTDAVVHEIQRYSDLVPTGVPHAVTTDTKFRNYLIPKSFDNKIMLAA

SEQ ID NO: 15582 - protein, 90 aa, Homo sapiens
MRWRTILLQYCFLLITCLLTALEAVPIDIDKTKVQNIHPVESAKIEPPDTGLYYDEYLKQVIDVLETDKHFREKLQKADIEEIKSGRLSK

SEQ ID NO: 15583 - protein, 48 aa, Homo sapiens
MAWFALYLLSLLWATAGTSTQTQSSCCEYDVFPRRSGKQLPWGRGCDL

SEQ ID NO: 15584 - protein, 54 aa, Homo sapiens
GSKAASLHWTSERVVSVLLLGLLPAAYLNPCSAMDYSLAAALTLHGHWKIKNNE

SEQ ID NO: 15585 - protein, 1002 aa, Homo sapiens
MAFLHLCHLALRHGIPLEEVAKKTSFKDCIPRSFRRHIRQHSALTRLRLRNVFRRFLRDFQPGRLSQQMVMVKYLATLERLAPRFGTERVPVCHLRLLAQAEGEPCYIRDSGVAPTDPGPESAAGPPTHEVLVTGTGGIQWWPVEEEVNKEEGSSGSSGRNPQASLFGKKAKAHKAVGQPADRPREPLWAYFCDFRDITHVVLKEHCVSIHRQDNKCLELSLPSRAAALSFVSLVDGYFRLTADSSHYLCHEVAPPRLVMSIRDGIHGPLLEPFVQAKLRPEDGLYLIHWSTSHPYRLILTVAQRSQAPDGMQSLRLRKFPIEQQDGAFVLEGWGRSFPSVRELGAALQGCLLRAGDDCFSLRRCCLPQPGETSNLIIMRGARASPRTLNLSQLSFHRVDQKEITQLSHLGQGTRTNVYEGRLRVEGSGDPEEGKMDDEDPLVPGRDRGQELRVVLKVLDPSHHDIALAFYETASLMSQVSHTHLAFVHGVCVRGPENIMVTEYVEHGPLDVWLRRERGHVPMAWKMVVAQQLASALSYLENKNLVHGNVCGRNILLARLGLAEGTSPFIKLSDPGVGLGALSREERVERIPWLAPECLPGGANSLSTAMDKWGFGATLLEICFDGEAPLQSRSPSEKEHFYQRQHRLPEPSCPQLATLTSQCLTYEPTQRPSFRTILRDLTRLQPHNLADVLTVNPDSPASDPTVFHKRYLKKIRDLGEGHFGKVSLYCYDPTNDGTGEMVAVKALKADCGPQHRSGWKQEIDILRTLYHEHIIKYKGCCEDQGEKSLQLVMEYVPLGSLRDYLPRHSIGLAQLLLFAQQICEGMAYLHAQHYIHRDLAARNVLLDNDRLVKIGDFGLAKAVPEGHEYYRVREDGDSPVFWYAPECLKEYKFYYASDVWSFGVTLYELLTHCDSSQSPPTKFLELIGIAQGQMTVLRLTELLERGERLPRPDKCPCEVYHLMKNCWETEASFRPTFENLIPILKTVHEKYQGQAPSVFSVC

SEQ ID NO: 15586 - protein, 211 aa, Homo sapiens
MKLPLLLALLFGAVSALHLRSETSTFETPLGAKTLPEDEETPEQEMEETPCRELEEEEEWGSGSEDASKKDGAVESISVPDMVDKNLTCPEEEDTVKVVGIPGCQTCRYLLFTCRRCYRGNLVSIHNFNINYRIQCSVSALNQGQVWIGGRITGSGRCRRFQWVDGSRWNFAYWAAHQPWSRGGHCVALCTRGGHWRRAHCLRRLPFICSY

SEQ ID NO: 15587 - protein, 328 aa, Homo sapiens
MLIQVCLYFYCKFLWRCLKFVMRKLTGRCELQRICYNTKPGASRTMKIETSLRDSKSKLLQTSVSVHPDAIEKTIEDIMELKKINPDVNPQLGISLQACLLQIVGYRNLIADVEKLRREAYDSDNPQHEEMLLKLWKFLKPNTPLESRISKQWCEIGFQGDDPKTDFRGMGLLGLYNLQYFAERDATAAQQVLSDSLHPKCRDITKEEISKFSKAEWEKKRMDKAIGYSFAIVGINITDLAYNLLVSGALKTHFYNIAPEAPTLSHFQQTFCYLMHEFHKFWIEEDPMDIMEFNRVREKFRKRIIKQLQNPDMALCPHFAASEGLINM

SEQ ID NO: 15588 - protein, 156 aa, Homo sapiens
MQHRGFLLLTLLALLALTSAVAKKKDKVKKGGPGSECAEWAWGPCTPSSKDCGVGFREGTCGAQTQRIRCRVPCNWKKEFGADCKYKFENWGACDGGTGTKVRQGTLKKARYNAQCQETIRVTKPCTPKTKAKAKGQRKEKGVGLSRGAAPPPPRL

SEQ ID NO: 15589 - protein, 311 aa, Homo sapiens
MKRVNSCVKSDEHVLEELETEGERQLKSLLQHQLDTSVSIEECMSKKESFAPGTMYKPFGKEAAGTMTLSQFQTLHEKDQETASLRELGLNETEILIWKSHVSGEKKTKLRATPEAIQNRLQDIEERISERQRILCLPQRFAKSKQLTRREMEIEKSLFQGADRHSFLKALYYQAYHKKTSADKYMTSMKRKIKLGTKDEPQKKNKGDPMNNLESFYQEMIMKKRLEEFQLMRGLTSFPREDFQNLSYEGTTSVLGAKWQKRTGRTSTFSILLVSLLSETVFTSSAMYGIPHLLTMSLKFSTRIGKLSFTP

SEQ ID NO: 15590 - protein, 108 aa, Homo sapiens
MPSRLRKTRKLRGHVSHGHGRIGKHRKHPGGRGNAGGLHHHRINFDKYHPGYFGKVGMKHYHLKRNQSFCPTVNLDKLWTLVSEQTRVNAAKNKTGAAPIIDVVRSVS

SEQ ID NO: 15591 - protein, 119 aa, Homo sapiens
MVTSSFPISVAVFALITLQVGTQDSFIAAVYEHAVILPNKTETPVSQEDALNLMNENIDILETAIKQAAEQGARIIVTPEDALYGWKFTRETVFPYLEDIPDPQVNWIPCQDPHRSAHC

SEQ ID NO: 15592 - protein, 83 aa, Homo sapiens
MEPFVVLVLCLSFMLLFSLWRQSCRRRKLPPGPTPLPIIGNMLQIDVKDICKSFTNVSLPYVPPANCKGSQKSMVLCSPCILA

SEQ ID NO: 15593 - protein, 351 aa, Homo sapiens
MASTGSQASDIDEIFGFFNDGEPPTKKPRKLLPSLKTKKPRELVLVIGTGISAAVAPQVPALKSWKGLIQALLDAAIDFDLLEDEESKKFQKCLHEDKNLVHVAHDLIQKLSPRTSNVRSTFFKDCLYEVFDDLESKMEDSGKQLLQSVLHLMENGALVLTTNFDNLLELYAADQGKQLESLDLTDEKKVLEWAQEKRKLSVLHIHGVYTNPSGIVLHPAGYQNVLRNTEVMREIQKLYENKSFLFLGCGWTVDDTTFQALFLEAVKHKSDLEHFMLVRRGDVDEFKKLRENMLDKGIKVISYGDDYADLPEYFKRLTCEISTRGTSAGMVREGQLNGSSAAHSEIRGCST

SEQ ID NO: 15594 - protein, 370 aa, Homo sapiens
MKFFLLLFTIGFCWAQYSPNTQQGRTSIVHLFEWRWVDIALECERYLAPKGFGGVQVSPPNENVAIHNPFRPWWERYQPVSYKLCTRSGNEDEFRNMVTRCNNVGVRIYVDAVINHMSGNAVSAGTSSTCGSYFNPGSRDFPAVPYSGWDFNDGKCKTGSGDIENYNDATQVRDCRLVGLLDLALEKDYVRSKIAEYMNHLIDIGVAGFRLDASKHMWPGDIKAILDKLHNLNSNWFPAGSKPFIYQEVIDLGGEPIKSSDYFGNGRVTEFKYGAKLGTVIRKWNGEKMSYLKNWGEGWGFMPSDRALVFVDNHDNQRGHGAGGASILTFWDARLYKMAVGFMLAHPYGFTRVMSSYRWPRQFQNGNEHG

SEQ ID NO: 15595 - protein, 198 aa, Homo sapiens
MATLWGGLLRLGSLLSLSCLALSVLLLAQLSDAAKNFEDVRCKCICPPYKENSGHIYNKNISQKDCDCLHVVEPMPVRGPDVEAYCLRCECKYEERSSVTIKVTIIIYLSILGLLLLYMVYLTLVEPILKRRLFGHAQLIQSDDDIGDHQPFANAHDVLARSRSRANVLNKVEYAQQRWKLQVQEQRKSVFDRHVVLS

SEQ ID NO: 15596 - protein, 1179 aa, Homo sapiens
MKVVPEKNAVRILWGRERGARAMGAQRLLQELVEDKTRWMKWEGKRVELPDSPRSTFLLAFSPDRTLLASTHVNHNIYITEVKTGKCVHSLIGHRRTPWCVTFHPTISGLIASGCLDGEVRIWDLHGGSESWFTDSNNAIASLAFHPTAQLLLIATANEIHFWDWSRREPFAVVKTASEMERVRLVRFDPLGHYLLTAIVNPSNQQGDDEPEIPIDGTELSHYRQRALLQSQPVRRTPLLHNFLHMLSSRSSGIQTEPFHPPEQASSTQQDQGLLNRPSAFSTVQSSTAGNTLRNLSLGPTRRSLGGPLSSHPSRYHREIAPGLTGSEWTRTVLSLNSRSEAESMPPPRTSASSVSLLSVLRQQEGGSQASVYTSATEGRGFPASGLATESDGGNGSSQNNSGSIRHELQCDLRRFFLEYDRLQELDQSLSGEAPQTQQAQEMLNNNIESERPGPSHQPTPHSSENNSNLSRGHLNRCRACHNLLTFNNDTLRWERTTPNYSSGEASSSWQVPSSFESVPSSGSQLPPLERTEGQTPSSSRLELSSSASPQEERTVGVAFNQETGHWERIYTQSSRSGTVSQEALHQDMPEESSEEDSLRRLSPAAYYAQRMIQYLSRRDSIRQRSMRYQQNRLRSSTSSSSSDNQGPSVEGTDLEFEDFEDNGDRSRHRAPRNARMSAPSLGRFVPRRFLLPEYLPYAGIFHERGQPGLATHSSVNRVLAGAVIGDGQSAVASNIANTTYRLQWWDFTKFDLPEISNASVNVLVQNCKIYNDASCDISADGQLLAAFIPSSQRGFPDEGILAVYSLAPHNLGEMLYTKRFGPNAISVSLSPMGRYVMVGLASRRILLHPSTEHMVAQVFRLQQAHGGETSMRRVFNVLYPMPADQRRHVSINSARWLPEPGLGLAYGTNKGDLVICRPEALNSGVEYYWDQLNETVFTVHSNSRSSERPGTSRATWRTDRDMGLMNAIGLQPRNPATSVTSQGTQTLALQLQNAETQTEREVPEPGTAASGPGEGEGSEYGASGEDALSRIQRLMAEGGMTAVVQREQSTTMASMGGFGNNIIVSHRIHRSSQTGTEPGAAHTSSPQPSTSRGLLPEAGQLAERGLSPRTASWDQPGTPGREPTQPTLPSSSPVPIPVSLPSAEGPTLHCELTNNNHLLDGGSSRGDAAGPRGEPRNR

SEQ ID NO: 15597 - protein, 950 aa, Homo sapiens
MVFTPEDRLGKQCLLLPLLLLAAWKVGSGQLHYSVPEEAKHGTFVGRIAQDLGLELAELVPRLFRMASKDREDLLEVNLQNGILFVNSRIDREELCGRSAECSIHLEVIVDRPLQVFHVDVEVRDINDNPPLFPVEEQRVLIYESRLPDSVFPLEGASDADVGSNSILTYKLSSSEYFGLDVKINSDDNKQIGLLLKKSLDREEAPAHNLFLTATDGGKPELTGTVQLLVTVLDVNDNAPTFEQSEYEVRIFENADNGTTVIRLNASDRDEGANGAISYSFNSLVAAMVIDHFSIDRNTGEIVIRGNLDFEQENLYKILIDATDKGHPPMAGHCTVLVRILDKNDNVPEIALTSLSLPVREDAQFGTVIALISVNDLDSGANGQVNCSLTPHVPFKLVSTFKNYYSLVLDSALDRESVSAYELVVTARDGGSPSLWATASLSVEVADMNDNAPAFAQPEYTVFVKENNPPGCHIFTVSARDADAQENALVSYSLVERRVGERALSSYISVHAESGKVYALQPLDHEELELLQFQVSARDAGVPPLGSNVTLQVFVLDENDNAPALLAPRVGGTGGAVSELVPRSLGAGQVVAKVRAVDADSGYNAWLSYELQPPASSARFPFRVGLYTGEISTTRVLDEADSPRHRLLVLVKDHGEPALTATATVLVSLVESGQAPKASSRASVGAAGPEAALVDVNVYLIIAICAVSSLLVLTLLLYTALRCSAPPTEGACTADKPTLVCSSAVGSWSYSQQRRQRVCSGEGPPKMDLMAFSPSLSPCPIMMGKAENQDLNEDHDAKPRQPNPDWRYSASLRAGMHSSVHLEEAGILRAGPGGPDQQWPTVSSATPEPEAGEVSPPVGAGVNSNSWTFKYGPGNPKQSGPGELPDKFIIPGSPAIISIRQEPTNSQIDKSDFITFGKKEETKKKKKKKKGNKTQEKKEKGNSTTDNSDQ

SEQ ID NO: 15598 - protein, 68 aa, Homo sapiens
MWQLWASLCCLLVLANARSRPSFHPLSDELVNYVNKRNTTWQAGHNFYNVDMSYLKRLCGTFLGGPKP

SEQ ID NO: 15599 - protein, 1116 aa, Homo sapiens
MKEICRICARELCGNQRRWIFHTASKLNLQVLLSHVLGKDVPRDGKAEFACSKCAFMLDRIYRFDTVIARIEALSIERLQKLLLEKDRLKFCIASMYRKNNDDSGAEIKAGNGTVDMSVLPDARYSALLQEDFAYSGFECWVENEDQIQEPHSCHGSEGPGNRPRRCRGCAALRVADSDYEAICKVPRKVARSISCGPSSRWSTSICTEEPALSEVGPPDLASTKVPPDGESMEEETPGSSVESLDASVQASPPQQKDEETERSAKELGKCDCCSDDQAPQHGCNHKLELALSMIKGLDYKPIQSPRGSRLPIPVKSSLPGAKPGPSMTDGVSSGFLNRSLKPLYKTPVSYPLELSDLQELWDDLCEDYLPLRVQPMTEELLKQQKLNSHETTITQQSVSDSHLAELQEKIQQTEATNKILQEKLNEMSYELKCAQESSQKQDGTIQNLKETLKSRERETEELYQVIEGQNDTMAKLREMLHQSQLGQLHSSEGTSPAQQQVALLDLQSALFCSQLEIQKLQRVVRQKERQLADAKQCVQFVEAAAHESEQQKEASWKHNQELRKALQQLQEELQNKSQQLRAWEAEKYNEIRTQEQNIQHLNHSLSHKEQLLQEFRELLQYRDNSDKTLEANEMLLEKLRQRIHDKAVALERAIDEKFSALEEKEKELRQLRLAVRERDHDLERLRDVLSSNEATMQSMESLLRAKGLEVEQLSTTCQNLQWLKEEMETKFSRWQKEQESIIQQLQTSLHDRNKEVEDLSATLLCKLGPGQSEIAEELCQRLQRKERMLQDLLSDRNKQVLEHEMEIQGLLQSVSTREQESQAAAEKLVQALMERNSELQALRQYLGGRDSLMSQAPISNQQAEVTPTGRLGKQTDQGSMQIPSRDDSTSLTAKEDVSIPRSTLGDLDTVAGLEKELSNAKEELELMAKKERESQMELSALQSMMAVQEEELQVQAADMESLTRNIQIKEDLIKDLQMQLVDPEDIPAMERLTQEVLLLREKVASVESQGQEISGNRRQQLLLMLEGLVDERSRLNEALQAERQLYSSLVKFHAHPESSERDRTLQVELEGAQVLRSRLEEVLGRSLERLNRLETLAAIGGGELESVRIHHKHAY

SEQ ID NO: 15600 - protein, 22 aa, Homo sapiens
MAGQGLPLHVATLLTGLLECLG

SEQ ID NO: 15601 - protein, 890 aa, Homo sapiens
MVYSRRGSLGSRLLLLWLLLAYWKAGSGQLHYSIPEEAKHGTFVGRIAQDLGLELAELVPRLFRVASKGRGDLLEVNLQNGILFVNSRIDREELCRRRAECSIHLEVIVDRPLQVFHVEVAVKDINDNPPRFSRQEQRLFILESRMPDSRFPLEGASDLDIGANAQLRYRLNPNEYFDLDVKTNEEETNFLELVLRKSLDREETQEHRLLVIATDGGKPELTGTVQLLINVLDANDNAPEFDKSIYNVRLLENAPSGTLVIKLNASDADEGINKEIVYFFSNLVLDDVKSKFIINSNTGEIKVNGELDYEDYNSYEINIDAMDKSTFPLSGHCKVVVKLLDVNDNTPEMAITTLFLPVKEDAPLSTVIALISVSDRDSGANGQVTCSLMPHVPFKLVSTFKNYYSLVLDSALDRESVSVYELVVTARDGGSPSLWATASVSVEVADVNDNAPAFAQPQYTVFVKENNPPGCHIFTVSARDADAQENALVSYSLVERRVGERPLSSYVSVHAESGKVYALQPLDHEEVELLQFQVSARDAGVPPLGSNVTLQVFVLDENDNAPALLVPRVGGTGGAVSELVPRSVGAGHVVAKVRAVDPDSGYNAWLSYELQPAPGSARIPFRVGLYTGEISTTRSLDETEAPRHRLLVLVKDHGEPPLTATATVLVSLVESGQAPKASSRASAGAVGPEAALVDVNVYLIIAICAVSSLLVLTLLLYTALRCSAQPTEAVCTRGKPTLLCSSAVGSWSYSQQRRQRVCSGEAPPKTDLMAFSPSLPQGPTSTDNPRQPNPDWRYSASLRAGMHSSVHLEEAGILRAGPGGPDQQWPTVSSATPEPEAGEVSPPVGAGVNSNSWTFKYGPGNPKQSGPEPKKQTQVSFLLRRKGEASQPRQ

SEQ ID NO: 15602 - protein, 639 aa, Homo sapiens
MLLWLLLLILTPGREQSGVAPKAVLLLNPPWSTAFKGEKVALICSSISHSLAQGDTYWYHDEKLLKIKHDKIQITEPGNYQCKTRGSSLSDAVHVEFSPDWLILQALHPVFEGDNVILRCQGKDNKNTHQKVYYKDGKQLPNSYNLEKITVNSVSRDNSKYHCTAYRKFYILDIEVTSKPLNIQVQGVPVSNVNLEIRPTGGQLIEGENMVLICSVAQGSGTVTFSWHKEGRVRSLGRKTQRSLLAELHVLTVKESDAGRYYCAADNVHSPILSTWIRVTVRIPVSHPVLTFRAPRAHTVVGDLLELHCESLRGSPPILYRFYHEDVTLGNSSAPSGGGASFNLSLTAEHSGNYSCDADNGLGAQHSHGVSLRVTVPVSRPVLTLRAPGAQAVVGDLLELHCESLRGSFPILYWFYHEDDTLGNISAHSGGGASFNLSLTTEHSGNYSCEADNGLGAQHSKVVTLNVTGTSRNRTGLTAAGITGLVLSILVLAAAAALLHYARARRKPGGLSATGTSSHSPSECQEPSSSRPSRIDPQEPTHSKPLAPMELEPMYSNVNPGDSNPIYSQIWSIQHTKENSANCPMMHQEHEELTVLYSELKKTHPDDSAGEASSRGRAHEEDDEENYENVPRVLLASDH

SEQ ID NO: 15603 - protein, 354 aa, Homo sapiens
MRHSLTKLLAASGSNSPTRSESPEPAATCSLPSDLTRAAAGEEETAAAGSPGRKQQFGDEGELEAGRGSRGGVAVRAPSPEEMEEEAIASLPGEETEDMDFLSGLELADLLDPRQPDWHLDPGLSSPGPLSSSGGGSDSGGLWRGDDDDEAAAAEMQRFSDLLQRLLNGIGGCSSSSDSGSAEKRRRKSPGGGGGGGSGNDNNQAATKSPRKAAAAAARLNRLKKKEYVMGLESRVRGLAAENQELRAENRELGKRVQALQEESRYLRAVLANETGLARLLSRLSGVGLRLTTSLFRDSPAGDHDYALPVGKQKQDLLEEDDSAGGVCLHVDKDKVSVEFCSACARKASSSLKM

SEQ ID NO: 15604 - protein, 751 aa, Homo sapiens
MAFLIILITCFVIILATSQPCQTPDDFVAATSPGHIIIGGLFAIHEKMLSSEDSPRRPQIQECVGFEISVFLQTLAMIHSIEMINNSTLLPGVKLGYEIYDTCTEVTVAMAATLRFLSKFNCSRETVEFKCDYSSYMPRVKAVIGSGYSEITMAVSRMLNLQLMPQVGYESTAEILSDKIRFPSFLRTVPSDFHQIKAMAHLIQKSGWNWIGIITTDDDYGRLALNTFIIQAEANNVCIAFKEVLPAFLSDNTIEVRINRTLKKIILEAQLLGVLKNVTFTDGWNSFHFDAHGDLNTGYDVVLWKEINGHMTVTKMAEYDLQNDVFIIPDQETKNEFRNLKQIQSKCSKECSPGQMKKTTRSQHICCYECQNCPENHYTNQTDMPHCLLCNNKTHWAPVRSTMCFEKEVEYLNWNDSLAILLLILSLLGIIFVLVVGIIFTRNLNTPVVKSSGGLRVCYVILLCHFLNFASTSFFIGEPQDFTCKTRQTMFGVSFTLCISCILTKSLKILLAFSFDPKLQKFLKCLYRPILIIFTCTGIQVVICTLWLIFAAPTVEVNVSLPRVIILECEEGSILAFGTMLGYIAILAFICFIFAFKGKYENYNEAKFITFGMLIYFIAWITFIPIYATTFGKYVPAVEIIVILISNYGILYCTFIPKCYVIICKQEINTKSAFLKMIYSYSSHSVSSIALSPASLDSMSGNVTMTNPSSSGKSATWQKSKDLQAQAFAHICRENATSVSKTLPRKRMSSI

SEQ ID NO: 15605 - protein, 55 aa, Homo sapiens
MSTEGGGRRCQAQVSRRISFSASHRLYSKFLSDEENLKLFGKCNNPNGHGHNYKD

SEQ ID NO: 15606 - protein, 89 aa, Homo sapiens
MTSHYVIAIFALMSSCLATAGPEPGALCELSPVSASHPVQALMESFTVLSGCASRGTTGLPQEVHVLNLRTAGQGPGQLQREACSMNHY

SEQ ID NO: 15607 - protein, 66 aa, Homo sapiens
MDGTEGSAGQPGPAERSHRSSVSSVGARGGSHPHLLFHTLLGPQPWRSSSGLSSFSLKIIYVSTKK

SEQ ID NO: 15608 - protein, 452 aa, Homo sapiens
MDGTIKEALSVVSDDQSLFDSAYGAAAHLPKADMTASGSPDYGQPHKINPLPPQQEWINQPVRVNVKREYDHMNGSRESPVDCSVSKCSKLVGGGESNPMNYNSYMDEKNGPPPPNMTTNERRVIVPADPTLWTQEHVRQWLEWAIKEYSLMEIDTSFFQNMDGKELCKMNKEDFLRATTLYNTEVLLSHLSYLRESSLLAYNTTSHTDQSSRLSVKEDPSYDSVRRGAWGNNMNSGLNKSPPLGGAQTISKNTEQRPQPDPYQILGPTSSRLANPGSGQIQLWQFLLELLSDSANASCITWEGTNGEFKMTDPDEVARRWGERKSKPNMNYDKLSRALRYYYDKNIMTKVHGKRYAYKFDFHGIAQALQPHPTESSMYKYPSDISYMPSYHAHQQKVNFVPPHPSSMPVTSSSFFGAASQYWTSPTGGIYPNPNVPRHPNTHVPSHLGSYY

SEQ ID NO: 15609 - protein, 600 aa, Homo sapiens
MTMYLWLKLLAFGFAFLDTEVFVTGQSPTPSPTGVSSVQTPHLPTHADSQTPSAGTDTQTFSGSAANAKLNPTPGSNAISDAYLNASETTTLSPSGSAVISTTTIATTPSKPTCDEKYANITVDYLYNKETKLFTAKLNVNENVECGNNTCTNNEVHNLTECKNASVSISHNSCTAPDKTLILDVPPGVEKFQLHDCTQVEKADTTICLKWKNIETFTCDTQNITYRFQCGNMIFDNKEIKLENLEPEHEYKCDSEILYNNHKFTNASKIIKTDFGSPGEPQIIFCRSEAAHQGVITWNPPQRSFHNFTLCYIKETEKDCLNLDKNLIKYDLQNLKPYTKYVLSLHAYIIAKVQRNGSAAMCHFTTKSAPPSQVWNMTVSMTSDNSMHVKCRPPRDRNGPHERYHLEVEAGNTLVRNESHKNCDFRVKDLQYSTDYTFKAYFHNGDYPGEPFILHHSTSYNSKALIAFLAFLIIVTSIALLVVLYKIYDLHKKRSCNLDEQQELVERDDEKQLMNVEPIHADILLETYKRKIADEGRLFLAEFQSIPRVFSKFPIKEARKPFNQNKNRYVDILPYDYNRVELSEINGDAGSNYINASYID

SEQ ID NO: 15610 - protein, 141 aa, Homo sapiens
MGAGPSLLLAALLLLLSGDGAVRCDTPANCTYLDLLGTWVFQVGSSGSQRDVNCSVMGPQEKKVVVYLQKLDTAYDDLGNSGHFTIIYNQGFEIVLNDYKWFAFFKDVTDFISHLFMQLGTVGIYDLPHLRNKLAMNRRWG

SEQ ID NO: 15611 - protein, 338 aa, Homo sapiens
MRWRTILLQYCFLLITCLLTALEAVPIDIDKTKVQNIHPVESAKIEPPDTGLYYDEYLKQVIDVLETDKHFREKLQKADIEEIKSGRLSKELDLVSHHVRTKLDELKRQEVGRLRMLIKAKLDSLQDIGMDHQALLKQFDHLNHLNPDKFESTDLDMLIKAATSDLEHYDKTRHEEFKKYEMMKEHERREYLKTLNEEKRKEEESKFEEMKKKHENHPKVNHPGSKDQLKEVWEETDGLDPNDFDPKTFFKLHDVNSDGFLDEQELEALFTKELEKVYDPKNEEDDMVEMEEERLRMREHVMNEVDTNKDRLVTLEEFLKATEKKEFLEPDSWESPSI

SEQ ID NO: 15612 - protein, 480 aa, Homo sapiens
METDLNSQDRKDLDKFIKFFALKTVQVIVQARLGEKICTRSSSSPTGSDWFNLAIKDIPEVTHEAKKALAGQLPAVGRSMCVEISLKTSEGDSMELEIWCLEMNEKCDKEIKVSYTVYNRLSLLLKSLLAITRVTPAYRLSRKQGHEYVILYRIYFGEVQLSGLGEGFQTVRVGTVGTPVGTITLSCAYRINLAFMSTRQFERTPPIMGIIIDHFVDRPYPSSSPMHPCNYRTAGEDTGVIYPSVEDSQEVCTTSFSTSPPSQLMVPGKEGGVPLAPNQPVHGTQADQERLATCTPSDRTHCAATPSSSEDTETVSNSSEGRASPHDVLETIFVRKVGAFVNKPINQVTLTSLDIPFAMFAPKNLELEDTDPMVNPPDSPETESPLQGSLHSDGSSGGSSGNTHDDFVMIDFKPAFSKDDILPMDLGTFYREFQNPPQLSSLSIDIGAQSMAEDLDSLPEKLAVHEKNVREFDAFVETLQ

SEQ ID NO: 15613 - protein, 135 aa, Homo sapiens
MPRVYIGRLSYNVREKDIQRFFSGYGRLLEVDLKNGYGFVEFEDSRDADDAVYELNGKELCGERVIVEHARGPRRDRDGYSYGSRMTNGAEAVSTEAKMTAFPDWPWLFHTLCDPCPMTLWLTLPEAMTTAAFCH

SEQ ID NO: 15614 - protein, 192 aa, Homo sapiens
MMSPSQASLLFLNVCIFICGEAVQGNCVHHSTDSSVVNIVEDGSNAKDESKSNDTVCKEDCEESCDVKTKITREEKHFMCRNLQNSIVSYTRSTKKLLRNMMDEQQASLDYLSNQVMCDMDYRGGGRTVIQKRIDGIIDFQRLWCDYLDGFGDLLGEFWLGLKKIFYIVNQKNTSFMLYVALESEDDTLAYA

SEQ ID NO: 15615 - protein, 145 aa, Homo sapiens
MWSWKCLLFWAVLVTATLCTARPSPTLPEQDALPSSEDDDDDDDSSSEEKETDNTKPNPVAPYWTSPEKMEKKLHAVPAAKTVKFKCPSSGTPNPTLRWLKNGKEFKPDHRIGGYKVRYATWSIIMDSVVPSDKGNYTCIVENEY

SEQ ID NO: 15616 - protein, 84 aa, Homo sapiens
MRTLFNLLWLALACSPVHTTLSKSDAKKAASKTLLEKSQFSDKPVQDRGLVVTDLKAESVVLEHRSYCSAKARDRHFAGDVLGY

SEQ ID NO: 15617 - protein, 911 aa, Homo sapiens
MASSWKLMLFLSVTMCLSEYSKSLPGLSTSYAALLRIKKSSSSSLFGSKTRPRYSSPSLGTLSASSPSWLGAAQNYYSPINLYHSSDAFKQDESVDYGPVFVQEPDDIIFPTDSDEKKVALNCEVRGNPVPSYRWLRNGTEIDLESDYRYSLIDGTFIISNPSEAKDSGHYQCLATNTVGSILSREATLQFAYLGNFSGRTRSAVSVREGQGVVLMCSPPPHSPEIIYSWVFNEFPSFVAEDSRRFISQETGNLYISKVQTSDVGSYICLVKNTVTNARVLSPPTPLTLRNDGVMGEYEPKIEVHFPFTVTAAKGTTVKMECFALGNPVPTITWMKVNGYIPSKARLRKSQAVLEIPNVQLDDAGIYECRAENSRGKNSFRGQLQVYTYPHWVEKLNDTQLDSGSPLRWECKATGKPRPTYRWLKNGVPLSPQSRVEMVNGVLMIHNVNQSDAGMYQCLAENKYGAIYASAELKILASAPTFALNQLKKTIIVTKDQEVVIECKPQGSPKPTISWKKGDRAVRENKRIAILPDGSLRILNASKSDEGKYVCRGENVFGSAEIIASLSVKEPTRIELTPKRTELTVGESIVLNCKAIHDASLDVTFYWTLKGQPIDFEEEGGHFESIRAQASSADLMIRNILLMHAGRYGCRVQTTADSVSDEAELLVRGPPGPPGIVIVEEITESTATLSWSPAADNHSPISSYNLQARSPFSLGWQTVKTVPEIITGDMESAMAVDLNPWVEYEFRVVATNPIGTGDPSTPSRMIRTNEAVPKTAPTNVSGRSGRRHELVIAWEPVSEEFQNGEGFGYIVAFRPNGTRGWKEKMVTSSEASKFIYRDESVPPLTPFEVKVGVYNNKGDGPFSQIVVICSAEGEPSAAPTDVKATSVSVSEILVAWKHIKESLGRPQGFEV

SEQ ID NO: 15618 - protein, 100 aa, Homo sapiens
MVWKKLGSRNFSSCPSGSIQWIWDVLGECAQDGWDEASVGLGLISILCFAASTFPQFIKAYKTGNMDQALSLWFLLGWIGGDSCNLIGSFLADQLPLQTW

SEQ ID NO: 15619 - protein, 82 aa, Homo sapiens
MRIISRQIVLLFSGFWGLAMGAFPSSVQIGGLFIRNTDQEYTAFRLAIFLHNTSPNASEAPFNLVPHVDNIETANSFAVTNA

SEQ ID NO: 15620 - protein, 342 aa, Homo sapiens
MGAALGTGTRLAPWPGRACGALPRWTPTAPAQGCHSKPGPARPVPLKKRGYDVTRNPHLNKGMAFTLEERLQLGIHGLIPPCFLSQDVQLLRIMRYYERQQSDLDKYIILMTLQDRNEKLFYRVLTSDVEKFMPIVYTPTVGLACQHYGLTFRRPRGLFITIHDKGHLATMLNSWPEDNIKAVVVTDGERILGLGDLGCYGMGIPVGKLALYTACGGVNPQQCLPVLLDVGTNNEELLRDPLYIGLKHQRVHGKAYDDLLDEFMQAVTDKFGINCLIQFEDFANANAFRLLNKYRNKYCMFNDDIQGTTCHTFSCPWHLWAQVMFQHIPGPMGFSEWLPRNS

SEQ ID NO: 15621 - protein, 878 aa, Homo sapiens
MNFKRVKPNIFLLNQSRLIISICEIMSTDQGSSTCPKIALVPPCSTSSTTTLVGENVSEEEAQGINGNRPAKHSAASPKPQVPPKPLHLQNSPSSNIHQTPRHKALPSAKPRMEEIKPASASCVSKEKPSKVSDLISRFEGGSSLSNYSDLKKESAVNLNAPRTPGRHGLTTTPQQKLLSQHLPQRQGNDTDKTQGAQTCVANGVMAAQNQMECEEEKAATLSSDTSIQASEPLLDTHIVNGERDETATAPASPTTDSCDGNASDSSYRTPGIGPVLPLEERGAETETKVQERENGESPLELEQLDQHHEMKETNEQKLHKIANELLLTERAYVNRLDLLDQVFYCKLLEEANRGSFPAEMVNKIFSNISSINAFHSKFLLPELEKRMQEWETTPRIGDILQKLAPFLKMYGEYVKGFDNAMELVKNMTERIPQFKSVVEEIQKQKICGSLTLQHHMLEPVQRIPRYEMLLKDYLRKLPPDSLDWNDAKKSLEIISTAASHSNSAIRKMENLKKLLEIYEMLGEEEDIVNPSNELIKEGQILKLAARNTSAQERYLFLFNNMLLYCVPKFSLVGSKFTVRTRVGIDGMKIVETQNEEYPHTFQVSGKERTLELQASSAQDKEEWIKALQETIDAFHQRHETFRNAIAKDNDIHSEVSTAELGKRAPRWIRDNEVTMCMKCKEPFNALTRRRHHCRACGYVVCWKCSDYKAQLEYDGGKLSKVCKDCYQIISGFTDSEEKKRKGILEIESAEVSGNSVVCSFLQYMEKSKPWQKAWCVIPKQDPLVLYMYGAPQDVRAQATIPLLGYVVDEMPRSADLPHSFKLTQSKSVHSFAADSEELKQKWLKVILLAVTGETPGGPNEHPATLDDHPEPKKKSEC

SEQ ID NO: 15622 - protein, 1498 aa, Homo sapiens
MVALRGLGSGLQPWCPLDLRLEWVDTVWELDFTETEPLDPSIEAEIIETGLAAFTKLYESLLPFATGEHGSMESIWTFFIENNVSHSTLVALFYHFVQIVHKKNVSVQYREYGLHAAGLYFLLLEVPGSVANQVFHPVMFDKCIQTLKKSWPQESNLNRKRKKEQPKSSQANPGRHRKRGKPPRREDIEMDEIIEEQEDENICFSARDLSQIRNAIFHLLKNFLRLLPKFSLKEKPQCVQNCIEVFVSLTNFEPVLHECHVTQARALNQAKYIPELAYYGLYLLCSPIHGEGDKVISCVFHQMLSVILMLEVGEGSHRAPLAVTSQVINCRNQAVQFISALVDELKESIFPVVRILLQHICAKVVDKSEYRTFAAQSLVQLLSKLPCGEYAMFIAWLYKYSRSSKIPHRVFTLDVVLALLELPEREVDNTLSLEHQKFLKHKFLVQEIMFDRCLDKAPTVRSKALSSFAHCLELTVTSASESILELLINSPTFSVIESHPGTLLRNSSAFSYQRQTSNRSEPSGEINIDSSGETVGSGERCVMAMLRRRIRDEKTNVRKSALQVLVSILKHCDVSGMKEDLWILQDQCRDPAVSVRKQALQSLTELLMAQPRCVQIQKAWLRGVVPVVMDCESTVQEKALEFLDQLLLQNIRHHSHFHSGDDSQVLAWALLTLLTTESQELSRYLNKAFHIWSKKEKFSPTFINNVISHTGTEHSAPAWMLLSKIAGSSPRLDYSRIIQSWEKISSQQNPNSNTLGHILCVIGHIAKHLPKSTRDKVTDAVKCKLNGFQWSLEVISSAVDALQRLCRASAETPAEEQELLTQVCGDVLSTCEHRLSNIVLKENGTGNMDEDLLVKYIFTLGDIAQLCPARVEKRIFLLIQSVLASSADADHSPSSQGSSEAPASQPPPQVRGSVMPSVIRAHAIITLGKLCLQHEDLAKKSIPALVRELEVCEDVAVRNNVIIVMCDLCIRYTIMVDKYIPNISMCLKDSDPFIRKQTLILLTNLLQEEFVKWKGSLFFRFVSTLIDSHPDIASFGEFCLAHLLLKRNPVMFFQHFIECIFHFNNYEKHEKYNKFPQSEREKRLFSLKGKSNKERRMKIYKFLLEHFTDEQRFNITSKICLSILACFADGILPLDLDASELLSDTFEVLSSKEIKLLAMRSKPDKDLLMEEDDMALANVVMQEAQKKLISQVQKRNFIENIIPIIISLKTVLEKNKIPALRELMHYLREVMQDYRDELKDFFAVDKQLASELEYDMKKYQEQLVQEQELAKHADVAGTAGGAEVAPVAQVALCLETVPVPAGQENPAMSPAVSQPCTPRASAGHVAVSSPTPETGPLQRLLPKARPMSLSTIAILNSVKKAVESKSRHRSRSLGVLPFTLNSGSPEKTCSQVSSYSLEQESNGEIEHVTKRAISTPEKSISDVTFGAGVSYIGTPRTPSSAKEKIEGRSQGNDILCLSLPDKPPPQPQQWNVRSPARNKDTPACSRRSLRKTPLKTAN

SEQ ID NO: 15623 - protein, 483 aa, Homo sapiens
MSTARTENPVIMGLSSQNGQLRGPVKPTGGPGGGGTQTQQQMNQLKNTNTINNGTQQQAQSMTTTIKPGDDWKKTLKLPPKDLRIKTSDVTSTKGNEFEDYCLKRELLMGIFEMGWEKPSPIQEESIPIALSGRDILARAKNGTGKSGAYLIPLLERLDLKKDNIQAMVIVPTRELALQVSQICIQVSKHMGGAKVMATTGGTNLRDDIMRLDDTVHVVIATPGRILDLIKKGVAKVDHVQMIVLDEADKLLSQDFVQIMEDIILTLPKNRQILLYSATFPLSVQKFMNSHLQKPYEINLMEELTLKGVTQYYAYVTERQKVHCLNTLFSRLQINQSIIFCNSSQRVELLAKKISQLGYSCFYIHAKMRQEHRNRVFHDFRNGLCRNLVCTDLFTRGIDIQAVNVVINFDFPKLAETYLHRIGRSGRFGHLGLAINLITYDDRFNLKSIEEQLGTEIKPIPSNIDKSLYVAEYHSEPVEDEKP

SEQ ID NO: 15624 - protein, 151 aa, Homo sapiens
MNWAPATCWALLLAAAFLCDSGAAKGGRGGARGSARGGVRGGARGASRVRVRPAQRYGAPGSSLRVAAAGAAAGAAAGAAAGLAAGSGWRRAAGPGERGLEDEEDGVPGGNGTGPGIYSYRAWTSGAGPTRGPRLCLVLGGALGALGLLRP

SEQ ID NO: 15625 - protein, 210 aa, Homo sapiens
MNRFLLLMSLYLLGSARGTSSQPNELSGSIDHQTSVQQLPGEPAATEHAEGEHTVGEQPSGEQPSGEHLSGEQPLSELESGEQPSDEQPSGEHGSGEQPSGEQASGEQPSGEHASGEQASGAPISSTSTGTILNCYTCAYMNDQGKCLRGEGTCITQNSQQCMLKKIFEGGKLQFMVQGCENMCPSMNLFSHGTRMQIICCRNQSFCNKI

SEQ ID NO: 15626 - protein, 194 aa, Homo sapiens
MWVKLLSIVAEFCFSPFLVTDEETASDALERNSLSSQDPQQPTSTVSVTEDSSTSEIDKEEKEQTTQDPDLTTEANPQYLGLARKKSGILLLTLVSFLIFILFIIVQLFIMKLRKAHVIWKKENEVSEHTLESYRSRSNNEETSSEEKNGQSSHPMRCMNYITKLYSEAKTKRKENVQHSKLEEKHIQVPESIV

SEQ ID NO: 15627 - protein, 179 aa, Homo sapiens
MSFLKSFPPPGPAEGLLRQQPDTEAVLNGKGLGTGTLYIAESRLSWLDGSGLGFSLEYPTISLHALSRDRSDCLGEHLYVMVNAKFEEESKEPVADEEEEDSDDDVEPITEFRFVPSDKSALEAMFTAMCECQALHPDPEDEDSDDYDGEEYDVEAHDGMEVDTTPTVAGQFEDADVDH

SEQ ID NO: 15628 - protein, 159 aa, Homo sapiens
MKMASSLAFLLLNFHVSLLLVQLLTPCSAQFSVLGPSGPILAMVGEDADLPCHLFPTMSAETMELKWVSSSLRQVVNVYADGKEVEDRQSAPYRGRTSILRDGITAGKAALRIHNVTASDSGKYLCYFQDGDFYEKALVELKVADPFFRSAQPWIAALA

SEQ ID NO: 15629 - protein, 705 aa, Homo sapiens
MDADKEKDLQKFLKNVDEISNLIQEMNSDDPVVQQKAVLETEKRLLLMEEDQEEDECRTTLNKTMISPPQTAMKSAEEINSEAFLASVEKDAKERAKRRRENKVLADALKEKGNEAFAEGNYETAILRYSEGLEKLKDMKVLYTNRAQAYMKLEDYEKALVDCEWALKCDEKCTKAYFHMGKANLALKNYSVSRECYKKILEINPKLQTQVKGYLNQVDLQEKADLQEKEAHELLDSGKNTAVTTKNLLETLSKPDQIPLFYAGGIEILTEMINECTEQTLFRMHNGFSIISDNEVIRRCFSTAGNDAVEEMVCVSVLKLWQAVCSRNEENQRVLVIHHDRARLLAALLSSKVLAIRQQSFALLLHLAQTESGRSLIINHLDLTRLLEALVSFLDFSDKEANTAMGLFTDLALEERFQVWFQANLPGVLPALTGVLKTDPKVSSSSALCQCIAIMGNLSAEPTTRRHMAACEEFGDGCLSLLARCEEDVDLFREVIYTLLGLMMNLCLQAPFVSEVWAVEVSRRCLSLLNSQDGGILTRAAGVLSRTLSSSLKIVEEALRAGVVKKMMKFLKTGGETASRYAIKILAICTNSYHEAREEVIRLDKKLSVMMKLLSSEDEVLVGNAALCLGNCMEVPNVASSLLKTDLLQVLLKLAGSDTQKTAVQVNAGIALGKLCTAEPRFAAQLRKLHGLEILNSTMKYISDS

SEQ ID NO: 15630 - protein, 168 aa, Homo sapiens
MYHDASRWGLTLQTYVQLTMLDRHTRPQVSSVRLMERSIHSARYIFVENLYRSGKMPEVDYVVLSEWFDWILRNMDVSVDLIVYLRTNPETCYQRLKKRCREEEKVIPLEYLEAIHHLHEEWLIKGSLFPMAAPVLVIEADHHMERMLELFEQNRDRILTPENRKHCP

SEQ ID NO: 15631 - protein, 58 aa, Homo sapiens
MLSRCRSGLLHVLGLSFLLQTRRPILLCSPRLMKPLVVFVLGGPGAGKGTQCARIVEG

SEQ ID NO: 15632 - protein, 163 aa, Homo sapiens
MLIFWTITLFLLGAAKGKEVCYEDLGCFSDTEPWGGTAIRPLKILPWSPEKIGTRFLLYTNENPNNFQILLLSDPSTIEASNFQMDRKTRFIIHGFIDKGDESWVTDMCKTPGLSRITGLDPVEASFESTPEEVRLDPSDADFVDVIHTDAAPLIPFLGFGTN

SEQ ID NO: 15633 - protein, 210 aa, Homo sapiens
MTVVGNPRSWSCQWLPILILLLGTGHGPGVEGVTHYKAGDPVILYVNKVGPYHNPQETYHYYQLPVCCPEKIRHKSLSLGEVLDGDRMAESLYEIRFRENVEKRILCHMQLSSAQVEQLRQAIEELYYFEFVVDDLPIRGFVGYMEESGFLPHSHKIGLWTHLDFHLEFHGDRIIFANVSVRDVKPHSLDGLRPDEFLGLTHTYSVRWSE

SEQ ID NO: 15634 - protein, 56 aa, Homo sapiens
MFSLKTLPFLLLLHVQISKAFPVSSKEKNTKTVQHKAISEANQMQPPDLGLPSLQN

SEQ ID NO: 15635 - protein, 243 aa, Homo sapiens
MAVQISKKRKFVADGIFKAELNEFLTRELAEDGYSGVEVRVTPTRTEIIILATRTQNVLGEKGRRIRELTAVVQKRFGFPEGSVELYAEKVATRGLCAIAQAESLRYKLLGGLAVRRACYGVLRFIMESGAKGCEVVVSGKLRGQRAKSMKFVDGLMIHSGDPVNYYVDTAVRHVLLRQGVLGIKVKIMLPWDPTGKIGPKKPLPDHVSIVEPKDEILPTTPISEQKGGKPEPPAMPQPVPTA

SEQ ID NO: 15636 - protein, 816 aa, Homo sapiens
MELRCGGLLFSSRFDSGNLAHVEKVESLSSDGEGVGGGASALTSGIASSPDYEFNVWTRPDCAETEFENGNRSWFYFSVRGGMPGKLIKINIMNMNKQSKLYSQGMAPFVRTLPTRPRWERIRDRPTFEMTETQFVLSFVHRFVEGRGATTFFAFCYPFSYSDCQELLNQLDQRFPENHPTHSSPLDTIYYHRELLCYSLDGLRVDLLTITSCHGLREDREPRLEQLFPDTSTPRPFRFAGKRIFFLSSRVHPGETPSSFVFNGFLDFILRPDDPRAQTLRRLFVFKLIPMLNPDGVVRGHYRTDSRGVNLNRQYLKPDAVLHPAIYGAKAVLLYHHVHSRLNSQSSSEHQPSSCLPPDAPVSDLEKANNLQNEAQCGHSADRHNAEAWKQTEPAEQKLNSVWIMPQQSAGLEESAPDTIPPKESGVAYYVDLHGHASKRGCFMYGNSFSDESTQVENMLYPKLISLNSAHFDFQGCNFSEKNMYARDRRDGQSKEGSGRVAIYKASGIIHSYTLECNYNTGRSVNSIPAACHDNGRASPPPPPAFPSRYTVELFEQVGRAMAIAALDMAECNPWPRIVLSEHSSLTNLRAWMLKHVRNSRGLSSTLNVGVNKKRGLRTPPKSHNGLPVSCSENTLSRARSFSTGTSAGGSSSSQQNSPQMKNSPSFPFHGSRPAGLPGLGSSTQKVTHRVLGPVREPRSQDRRRQQQPLNHRPAGSLAPSPAPTSSGPASSHKLGSCLLPDSFNIPGSSCSLLSSGDKPEAVMVIGKGLLGTGARMPCIKTRLQTCPRRVSARRGPGFPRLGPGWAGAHRRLAEG

SEQ ID NO: 15637 - protein, 99 aa, Homo sapiens
MEPFVVLVLCLSFMLLFSLWRQSCRRRKLPPGPTPLPIIGNMLQIDVKDICKSFTNVSLPYVPPANCKGNHFQQWKEMEGDPAFLPHNLAEFWDGEEEH

SEQ ID NO: 15638 - protein, 257 aa, Homo sapiens
MGPGARLAALLAVLALGTGDPERAAARGDTFSALTSVARALAPERRLLGLLRRYLRGEEARLRDLTRFYDKVLSLHEDSTTPVANPLLAFTLIKRLQSDWRNVVHSLEASENIRALKDGYEKVEQDLPAFEDLEGAARALMRLQDVYMLNVKGLARGVFQRVTGSAITDLYSPKRLFSLTGDDCFQVGKVAYDMGDYYHAIPWLEEAVSLFRGSYGEWKTEDEASLEDALDHLAFAYFRAGNVSCALSLSREFLLYR

SEQ ID NO: 15639 - protein, 479 aa, Homo sapiens
MLTSKGQGFLHGGLCLWLCVFTPFFKGCVGCATEERLFHKLFSHYNQFIRPVENVSDPVTVHFEVAITQLANVIWNDYKLRWDPMEYDGIETLRVPADKIWKPDIVLYNNAVGDFQVEGKTKALLKYNGMITWTPPAIFKSSCPMDITFFPFDHQNCSLKFGSWTYDKAEIDLLIIGSKVDMNDFWENSEWEIIDASGYKHDIKYNCCEEIYTDITYSFYIRRLPMFYTINLIIPCLFISFLTVLVFYLPSDCGEKVTLCISVLLSLTVFLLVITETIPSTSLVVPLVGEYLLFTMIFVTLSIVVTVFVLNIHYRTPTTHTMPRWVKTVFLKLLPQVLLMRWPLDKTRGTGSDAVPRGLARRPAKGKLASHGEPRHLKECFHCHKSNELATSKRRLSHQPLQWVVENSEHSPEVEDVINSVQFIAENMKSHNETKEVEDDWKYVAMVVDRVFLWVFIIVCVFGTAGLFLQPLLGNTGKS

SEQ ID NO: 15640 - protein, 83 aa, Homo sapiens
MAKSLLKTASLSGRTKLLHQTGLSLYSTSHGFYEEEVKKTLQQFPGGSIDLQKEDNGIGILTLNNPSRMNAFSEFREISLYQC

SEQ ID NO: 15641 - protein, 79 aa, Homo sapiens
MAGGRCGPQLTALLAAWIAAVAATAGPEEAALPPEQSRVQPMTASNWTLVMEGEWMLKLYRYVLEEKGHSVTSTCSMNT

SEQ ID NO: 15642 - protein, 43 aa, Homo sapiens
MKMASSLAFLLLNFHVSLLLVQLLTPCSGLCSPLGSLYLAFPV

SEQ ID NO: 15643 - protein, 194 aa, Homo sapiens
MKRQGASSERKRARIPSGKAGAANGFLMEVCVDSVESAVNAERGGADRIELCSGLSEGGTTPSMGVLQVVKQSVQIPVFVMIRPRGGDFLYSDREIEVMKADIRLAKLYGADGLVFGALTEDGHIDKELCMSLMAICRPLPVTFHRAFDMVHDPMAALETLLTLGFERVLTSGCDSSALEGLPLIKRLIEQEVV

SEQ ID NO: 15644 - protein, 168 aa, Homo sapiens
MALPPGPAALRHTLLLLPALLSSGWGELEPQIDGQTWAERALRENERHAFTCRVAGGPGTPRLAWYLDGQLQEASTSRLLSVGGEAFSGGTSTFTVTAHRAQHELNCSLQDPRSGRSANASVILNVQCPSRHPSLISSDSNNLKLNNVRLPRENMSLPSNLQLNDLTP

SEQ ID NO: 15645 - protein, 583 aa, Homo sapiens
MAHVRGLQLPGCLALAALCSLVHSQHVFLAPQQARSLLQRVRRANTFLEEVRKGNLERECVEETCSYEEAFEALESSTATDVFWAKYTACETARTPRDKLAACLEGNCAEGLGTNYRGHVNITRSGIECQLWRSRYPHKPEINSTTHPGADLQENFCRNPDSSTTGPWCYTTDPTVRRQECSIPVCGQDQVTVAMTPRSEGSSVNLSPPLEQCVPDRGQQYQGRLAVTTHGLPCLAWASAQAKALSKHQDFNSAVQLVENFCRNPDGDEEGVWCYVAGKPGDFGYCDLNYCEEAVEEETGDGLDEDSDRAIEGRTATSEYQTFFNPRTFGSGEADCGLRPLFEKKSLEDKTERELLESYIDGRIVEGSDAEIGMSPWQVMLFRKSPQELLCGASLISDRWVLTAAHCLLYPPWDKNFTENDLLVRIGKHSRTRYERNIEKISMLEKIYIHPSLLQAGYKGRVTGWGNLKETWTANVGKGQPSVLQVVNLPIVERPVCKDSTRIRITDNMFCAGYKPDEGKRGDACEGDSGGPFVMKSPFNNRWYQMGIVSWGEGCDRDGKYGFYTHVFRLKKWIQKVIDQFGE

SEQ ID NO: 15646 - protein, 237 aa, Homo sapiens
MSFLKSFPPPGPAEGLLRQQPDTEAVLNGKGLGTGTLYIAESRLSWLDGSGLGFSLEYPTISLHALSRDRSDCLGEHLYVMVNAKFEEESKEPVADEEEEDSDDDVEPITEFRFVPSDKSALEAMFTAMCECQALHPDPEDEDSDDYDGEEYDVEAHEQGQGDIPTFYTYEEGLSHLTAEGQATLERLEGMLSQSVSSQYNMAGVRTEDSIRDYEDGMEVDTTPTVAGQFEDADVDH

SEQ ID NO: 15647 - protein, 55 aa, Homo sapiens
MWQLWASLCCLLVLANARSRPSFHPLSDELVNYVNKRNTTWQAGHNFYNVDMSYL

SEQ ID NO: 15648 - protein, 1376 aa, Homo sapiens
MALKNINYLLIFYLSFSLLIYIKNSFCNKNNTRCLSNSCQNNSTCKDFSKDNDCSCSDTANNLDKDCDNMKDPCFSNPCQGSATCVNTPGERSFLCKCPPGYSGTICETTIGSCGKNSCQHGGICHQDPIYPVCICPAGYAGRFCEIDHDECASSPCQNGAVCQDGIDGYSCFCVPGYQGRHCDLEVDECASDPCKNEATCLNEIGRYTCICPHNYSGVNCELEIDECWSQPCLNGATCQDALGAYFCDCAPGFLGDHCELNTDECASQPCLHGGLCVDGENRYSCNCTGSGFTGTHCETLMPLCWSKPCHNNATCEDSVDNYTCHCWPGYTGAQCEIDLNECNSNPCQSNGECVELSSEKQYGRITGLPSSFSYHEASGYVCICQPGFTGIHCEEDVNECSSNPCQNGGTCENLPGNYTCHCPFDNLSRTFYGGRDCSDILLGCTHQQCLNNGTCIPHFQDGQHGFSCLCPSGYTGSLCEIATTLSFEGDGFLWVKSGSVTTKGSVCNIALRFQTVQPMALLLFRSNRDVFVKLELLSGYIHLSIQVNNQSKVLLFISHNTSDGEWHFVEVIFAEAVTLTLIDDSCKEKCIAKAPTPLESDQSICAFQNSFLGGLPVGMTSNGVALLNFYNMPSTPSFVGCLQDIKIDWNHITLENISSGSSLNVKAGCVRKDWCESQPCQSRGRCINLWLSYQCDCHRPYEGPNCLREYVAGRFGQDDSTGYVIFTLDESYGDTISLSMFVRTLQPSGLLLALENSTYQYIRVWLERGRLAMLTPNSPKLVVKFVLNDGNVHLISLKIKPYKIELYQSSQNLGFISASTWKIEKGDVIYIGGLPDKQETELNGGFFKGCIQDVRLNNQNLEFFPNPTNNASLNPVLVNVTQGCAGDNSCKSNPCHNGGVCHSRWDDFSCSCPALTSGKACEEVQWCGFSPCPHGAQCQPVLQGFECIANAVFNGQSGQILFRSNGNITRELTNITFGFRTRDANVIILHAEKEPEFLNISIQDSRLFFQLQSGNSFYMLSLTSLQSVNDGTWHEVTLSMTDPLSQTSRWQMEVDNETPFVTSTIATGSLNFLKDNTDIYVGDRAIDNIKGLQGCLSTIEIGGIYLSYFENVHGFINKPQEEQFLKISTNSVVTGCLQLNVCNSNPCLHGGNCEDIYSSYHCSCPLGWSGKHCELNIDECFSNPCIHGNCSDRVAAYHCTCEPGYTGVNCEVDIDNCQSHQCANGATCISHTNGYSCLCFGNFTGKFCRQSRLPSTVCGNEKTNLTCYNGGNCTEFQTELKCMCRPGFTGEWCEKDIDECASDPCVNGGLCQDLLNKFQCLCDVAFAGERCEVDVSSLSFYVSLLFWQNLFQLLSYLILRMNDEPVVEWGEQEDY

SEQ ID NO: 15649 - protein, 1269 aa, Homo sapiens
MKVVPEKNAVRILWGRERGARAMGAQRLLQELVEDKTRWMKWEGKRVELPDSPRSTFLLAFSPDRTLLASTHVNHNIYITEVKTGKCVHSLIGHRRTPWCVTFHPTISGLIASGCLDGEVRIWDLHGGSESWFTDSNNAIASLAFHPTAQLLLIATANEIHFWDWSRREPFAVVKTASEMERVRLVRFDPLGHYLLTAIVNPSNQQGDDEPEIPIDGTELSHYRQRALLQSQPVRRTPLLHNFLHMLSSRSSGIQVGEQSTVQDSATPSPPPPPPQPSTERPRTSAYIRLRQRVSYPTAECCQHLGILCLCSRCSGTRVPSLLPHQDSVPPASARATTPSFSFVQTEPFHPPEQASSTQQDQGLLNRPSAFSTVQSSTAGNTLRNLSLGPTRRSLGGPLSSHPSRYHREIAPGLTGSEWTRTVLSLNSRSEAESMPPPRTSASSVSLLSVLRQQEGGSQASVYTSATEGRGFPASGLATESDGGNGSSQNNSGSIRHELQCDLRRFFLEYDRLQELDQSLSGEAPQTQQAQEMLNNNIESERPGPSHQPTPHSSENNSNLSRGHLNRCRACHNLLTFNNDTLRWERTTPNYSSGEASSSWQVPSSFESVPSSGSQLPPLERTEGQTPSSSRLELSSSASPQEERTVGVAFNQETGHWERIYTQSSRSGTVSQEALHQDMPEESSEEDSLRRLSPAAYYAQRMIQYLSRRDSIRQRSMRYQQNRLRSSTSSSSSDNQGPSVEGTDLEFEDFEDNGDRSRHRAPRNARMSAPSLGRFVPRRFLLPEYLPYAGIFHERGQPGLATHSSVNRVLAGAVIGDGQSAVASNIANTTYRLQWWDFTKFDLPEISNASVNVLVQNCKIYNDASCDISADGQLLAAFIPSSQRGFPDEGILAVYSLAPHNLGEMLYTKRFGPNAISVSLSPMGRYVMVGLASRRILLHPSTEHMVAQVFRLQQAHGGETSMRRVFNVLYPMPADQRRHVSINSARWLPEPGLGLAYGTNKGDLVICRPEALNSGVEYYWDQLNETVFTVHSNSRSSERPGTSRATWRTDRDMGLMNAIGLQPRNPATSVTSQGTQTLALQLQNAETQTEREVPEPGTAASGPGEGEGSEYGASGEDALSRIQRLMAEGGMTAVVQREQSTTMASMGGFGNNIIVSHRIHRSSQTGTEPGAAHTSSPQPSTSRGLLPEAGQLAERGLSPRTASWDQPGTPGREPTQPTLPSSSPVPIPVSLPSAEGPTLHCELTNNNHLLDGGSSRGDAAGPRGEPRNR

SEQ ID NO: 15650 - protein, 296 aa, Homo sapiens
MWLLGPLCLLLSSAAAKAKSKCGPTFFPCASGIHCIIGRFRCNGFEDCPDGSDEENCTANPLLCSTARYHCKNGLCIDKSFICDGQNNCQDNSDEESCESSQEPGSGQVFVTSENQLVYYPSITYAIIGSSVIFVLVVALLALVLHHQRKRNNLMTLPVHRLQHPVLLSRLVVLDHPHHCNVTYNVNNGIQYVASQAEQNASEVGSPPSYSEALLDQRPAWYDLPPPPYSSDTESLNQADLPPYRSRSGSANSASSQAASSLLSVEDTSHSPGQPGPQEGTAEPRDSEPSQGTEEV

SEQ ID NO: 15651 - protein, 815 aa, Homo sapiens
MSGLGRLFGKGKKEKGPTPEEAIQKLKETEKILIKKQEFLEQKIQQELQTAKKYGTKNKRAALQALRRKKRFEQQLAQTDGTLSTLEFQREAIENATTNAEVLRTMELAAQSMKKAYQDMDIDKVDELMTDITEQQEVAQQISDAISRPMGFGDDVDEDELLEELEELEQEELAQELLNVGDKEEEPSVKLPSVPSTHLPAGPGSTALRMTVVGNPRSWSCQWLPILILLLGTGHGPGVEGVTHYKAGDPVILYVNKVGPYHNPQETYHYYQLPVCCPEKIRHKSLSLGEVLDGDRMAESLYEIRFRENVEKRILCHMQLSSAQVEQLRQAIEELYYFEFVVDDLPIRGFVGYMEESGFLPHSHKIGLWTHLDFHLEFHGDRIIFANVSVRDVKPHSLDGLRPDEFLGLTHTYSVRWSETSVERRSDRRRGDDGGFFPRTLEIHWLSIINSMVLVFLLVGFVAVILMRVLRNDLARYNLDEETTSAGSGDDFDQGDNGWKIIHTDVFRFPPYRGLLCAVLGVGAQFLALGTGIIVMALLGMFNVHRHGAINSAAILLYALTCCISGYVSSHFYRQIGGERWVWNIILTTSLFSVPFFLTWSVVNSVHWANGSTQALPATTILLLLTVWLLVGFPLTVIGGIFGKNNASPFDAPCRTKNIAREIPPQPWYKSTVIHMTVGGFLPFSAISVELYYIFATVWGREQYTLYGILFFVFAILLSVGACISIALTYFQLSGEDYRWWWRSVLSVGSTGLFIFLYSVFYYARRSNMSGAVQTVEFFGYSLLTGYVFFLMLGTISFFSSLKFIRYIYVNLKMD

SEQ ID NO: 15652 - protein, 201 aa, Homo sapiens
MQSGTHWRVLGLCLLSVGVWGQDGNEEMAYKVSISGTTVILTCPQYPGSEILWQHNDKNIGGDEDDKNIGSDEDHLSLKEFSELEQSGYYVCYPRGSKPEDANFYLYLRARVCENCMEMDVMSVATIVIVDICITGGLLLLVYYWSKNRKAKAKPVTRGAGAGGRQRGQNKERPPPVPNPDYEPIRKGQRDLYSGLNQRRI

SEQ ID NO: 15653 - protein, 286 aa, Homo sapiens
MKLLENSSFEAINSQLTVETGDAHIIGRIESYSCKMAGDDKHMFKQFCQEGQPHVLEALSPPQTSGLSPSRLSKSQGGEEEGPLSDKCSRKTLFYLIATLNESFRPDYDFSTARSHEFSREPSLSWVVNAVNCSLFSAVREDFKDLKPQLWNAVDEEICLAECDIYRWAGIPADGLQASRFVGHLAPHTTCHPILPSYNPDLDSDPFGEDGSLWSFNYFFYNKRLKRIVFFSCRSISGSTYTPSEAGNELDMELGEEEVEEESRSGGSGAEETSTMEEDRVPVICI

SEQ ID NO: 15654 - protein, 1005 aa, Homo sapiens
MRGGKCNMLSSLGCLLLCGSITLALGNAQKLPKGKRPNLKVHINTTSDSILLKFLRPSPNVKLEGLLLGYGSNVSPNQYFPLPAEGKFTEAIVDAEPKYLIVVRPAPPPSQKKSCSGKTRSRKPLQLVVGTLTPSSVFLSWGFLINPHHDWTLPSHCPNDRFYTIRYREKDKEKKWIFQICPATETIVENLKPNTVYEFGVKDNVEGGIWSKIFNHKTVVGSKKVNGKIQSTYDQDHTVPAYVPRKLIPITIIKQVIQNVTHKDSAKSPEKAPLGGVILVHLIIPGLNETTVKLPASLMFEISDALKTQLAKNETLALPAESKTPEVEKISARPTTVTPETVPRSTKPTTSSALDVSETTLVLSKRTPETLQTILIPQFELPLSTLAPKSLPEFPEAKTPFPFEKPRGTLASSEKPWIVPTAKISEDSKVLQPQTATYDVFSSPTTSDEPEISDSYTATSDRILDSIPPKTSRTLEQPRATLAPSETPFVPQKLEIFTSPEMQPTTPAPQQTTSIPSTPKRRPRPKPPRTKPERTTSAGTITPKISKSPEPTWTTPAPGKTQFISLKPKIPLSPEVTHTKPAPEPQTLLPSQSTIGPETPGTKPSTTLAPRKTKRPGRRPRPRPRPKTTPSPEVPKSKPALEPATIQPEPLVPTTASKPSERPKTTHRPDAPQIQPGSKPPKQLLPKPQTTAEPDMPPTKSVSEPVPFETEAPSMTIVPTTDIEPVTVRTEATVTTLAPKTSQRTRTRRPRPKHKTTPRPETLQTKLDFGPITPGTSSAPTTTTKRTRRPHPKPKTTPHPEVPQTKLATKTSKRTRPPRPRPKTTPSPQAPETKPVPATVLEPVTLRPEASTTLASKTSQRTRRPRLRTKTTPRPEAPESKPVPTAELKPVTLRTETWVTTQAPKTSQRTRRPRPKTKTTPSPEVPQTKLVPSTDLEPGTLRTEAPKTMVVTTVLEPDTFRTKFPETTLAPKTQRTRRPRPRPKTTSSPEVPQNKSGKCMNPWLK

SEQ ID NO: 15655 - protein, 170 aa, Homo sapiens
MWQLWASLCCLLVLANARSRPSFHPLSDELVNYVNKRNTTWQAGHNFYNVDMSYLKRLCGTFLGGPKPPQRVMFTEDLKLPASFDAREQWPQCPTIKEIRDQGSCGSCWAFGAVEAISDRICIHTNAHVSVEVSAEDLLTCCGSMCGDGCNGGYPAEAWNFWTRKGLVSG

SEQ ID NO: 15656 - protein, 1495 aa, Homo sapiens
MGTALLQRGGCFLLCLSLLLLGCWAELGSGLEFPGAEGQWTRFPKWNACCESEMSFQLKTRSARGLVLYFDDEGFCDFLELILTRGGRLQLSFSIFCAEPATLLADTPVNDGAWHSVRIRRQFRNTTLFIDQVEAKWVEVKSKRRDMTVFSGLFVGGLPPELRAAALKLTLASVREREPFKGWIRDVRVNSSQVLPVDSGEVKLDDEPPNSGGGSPCEAGEEGEGGVCLNGGVCSVVDDQAVCDCSRTGFRGKDCSQEDNNVEGLAHLMMGDQGKEEYIATFKGSEYFCYDLSQNPIQSSSDEITLSFKTLQRNGLMLHTGKSADYVNLALKNGAVSLVINLGSGAFEALVEPVNGKFNDNAWHDVKVTRNLRQVTISVDGILTTTGYTQEDYTMLGSDDFFYVGGSPSTADLPGSPVSNNFMGCLKEVVYKNNDVRLELSRLAKQGDPKMKIHGVVAFKCENVATLDPITFETPESFISLPKWNAKKTGSISFDFRTTEPNGLILFSHGKPRHQKDAKHPQMIKVDFFAIEMLDGHLYLLLDMGSGTIKIKALLKKVNDGEWYHVDFQRDGRSGTISVNTLRTPYTAPGESEILDLDDELYLGGLPENKAGLVFPTEVWTALLNYGYVGCIRDLFIDGQSKDIRQMAEVQSTAGVKPSCSKETAKPCLSNPCKNNGMCRDGWNRYVCDCSGTGYLGRSCEREATVLSYDGSMFMKIQLPVVMHTEAEDVSLRFRSQRAYGILMATTSRDSADTLRLELDAGRVKLTVNLDCIRINCNSSKGPETLFAGYNLNDNEWHTVRVVRRGKSLKLTVDDQQAMTGQMAGDHTRLEFHNIETGIITERRYLSSVPSNFIGHLQSLTFNGMAYIDLCKNGDIDYCELNARFGFRNIIADPVTFKTKSSYVALATLQAYTSMHLFFQFKTTSLDGLILYNSGDGNDFIVVELVKGYLHYVFDLGNGANLIKGSSNKPLNDNQWHNVMISRDTSNLHTVKIDTKITTQITAGARNLDLKSDLYIGGVAKETYKSLPKLVHAKEGFQGCLASVDLNGRLPDLISDALFCNGQIERGCEGPSTTCQEDSCSNQGVCLQQWDGFSCDCSMTSFSGPLCNDPGTTYIFSKGGGQITYKWPPNDRPSTRADRLAIGFSTVQKEAVLVRVDSSSGLGDYLELHIHQGKIGVKFNVGTDDIAIEESNAIINDGKYHVVRFTRSGGNATLQVDSWPVIERYPAGNNDNERLAIARQRIPYRLGRVVDEWLLDKGRQLTIFNSQATIIIGGKEQGQPFQGQLSGLYYNGLKVLNMAAENDANIAIVGNVRLVGEVPSSMTTESTATAMQSEMSTSIMETTTTLATSTARRGKPPTKEPISQTTDDILVASAECPSDDEDIDPCEPSSGGLANPTRAGGREPYPGSAEVIRESSSTTGMVVGIVAAAALCILILLYAMYKYRNRDEGSYHVDESRNYISNSAQSNGAVVKEKQPSSAKSSNKNKKNKDKEYYV

SEQ ID NO: 15657 - protein, 537 aa, Homo sapiens
MAWRGAGPSVPGAPGGVGLSLGLLLQLLLLLGPARGFGDEEERRCDPIRISMCQNLGYNVTKMPNLVGHELQTDAELQLTTFTPLIQYGCSSQLQFFLCSVYVPMCTEKINIPIGPCGGMCLSVKRRCEPVLKEFGFAWPESLNCSKFPPQNDHNHMCMEGPGDEEVPLPHKTPIQPGEECHSVGTNSDQYIWVKRSLNCVLKCGYDAGLYSRSAKEFTDIWMAVWASLCFISTAFTVLTFLIDSSRFSYPERPIIFLSMCYNIYSIAYIVRLTVGRERISCDFEEAAEPVLIQEGLKNTGCAIIFLLMYFFGMASSIWWVILTLTWFLAAGLKWGHEAIEMHSSYFHIAAWAIPAVKTIVILIMRLVDADELTGLCYVGNQNLDALTGFVVAPLFTYLVIGTLFIAAGLVALFKIRSNLQKDGTKTDKLERLMVKIGVFSVLYTVPATCVIACYFYEISNWALFRYSADDSNMAVEMLKIFMSLLVGITSGMWIWSAKTLHTWQKCSNRLVNSGKVKREKRGNGWVKPGKGSETVV

SEQ ID NO: 15658 - protein, 205 aa, Homo sapiens
MTRMDPYCRLRLGYAVYETPTAHNGAKNPRWNKVIHCTVPPGVDSFYLEIFDERAFSMDDRIAWTHITIPESLRQGKVEDKWYSLSGRQGDDKEGMINLVMSYALLPAAMVMPPQPVVLMPTVYQQGVGYVPITGMPAVCSPGMVPVALPPAAVNAQPRCSEEDLKAIQDMFPNMDQEVIRSVLEAQRGNKDAAINSLLQMGEEP

SEQ ID NO: 15659 - protein, 111 aa, Homo sapiens
MGLSIFLLLCVLGLSQAATPKIFNGTECGRNSQPWQVGLFEGTSLRCGGVLIDHRWVLTAAHCSGRPIPGSAPVPQPLHRLPCHLPWCVSRENHEQHGVCRRRPGAGCLPG

SEQ ID NO: 15660 - protein, 467 aa, Homo sapiens
MSAVAQLWEDEWEVLLISLQGTAPFLHVGAVAAVTMLSWIVAGQFARAERTSSQVTILCTFFTVVFALYLAPLTISSPCIMEKKDLGPKPALIGHRGAPMLAPEHTLMSFRKALEQKLYGLQADITISLDGVPFLMHDTTLRRTTNVEEEFPELARRPASMLNWTTLQRLNAGQWFLKTDPFWTASSLSPSDHREAQNQSICSLAELLELAKGNATLLLNLRDPPREHPYRSSFINVTLEAVLHSGFPQHQVMWLPSRQRPLVRKVAPGFQQTSGSKEAVASLRRGHIQRLNLRYTQVSRQELRDYASWNLSVNLYTVNAPWLFSLLWCAGVPSVTSDNSHALSQVPSPLWIMPPDEYCLMWVTADLVSFTLIVGIFVLQKWRLGGIRSYNPEQIMLSAAVRRTSRDVSIMKEKLIFSEISDGVEVSDVLSVCSDNSYDTYANSTATPVGPRGGGSHTKTLIERSGR

SEQ ID NO: 15661 - protein, 192 aa, Homo sapiens
MVTSSFPISVAVFALITLQVGTQDSFIAAVYEHAVILPNKTETPVSQEDALNLMNENIDILETAIKQAAEQGARIIVTPEDALYGWKFTRETVFPYLEDIPDPQVNWIPCQDPHRFGHTPVQARLSCLAKDNSIYVLANLGDKKPCNSRDSTCPPNGYFQYNTNVVYNTEGKLVARYHKETLQSVKRSFAVI

SEQ ID NO: 15662 - protein, 766 aa, Homo sapiens
MKPFQLDLLFVCFFLFSQELGLQKRGCCLVLGYMAKDKFRRMNEGQVYSFSQQPQDQVVVSGQPVTLLCAIPEYDGFVLWIKDGLALGVGRDLSSYPQYLVVGNHLSGEHHLKILRAELQDDAVYECQAIQAAIRSRPARLTVLVPPDDPVILGGPVISLRAGDPLNLTCHADNAKPAASIIWLRKGEVINGATYSKTLLRDGKRESIVSTLFISPGDVENGQSIVCRATNKAIPGGKETSVTIDIQHPPLVNLSVEPQPVLEDNVVTFHCSAKANPAVTQYRWAKRGQIIKEASGEVYRTTVDYTYFSEPVSCEVTNALGSTNLSRTVDVYFGPRMTTEPQSLLVDLGSDAIFSCAWTGNPSLTIVWMKRGSGVVLSNEKTLTLKSVRQEDAGKYVCRAVVPRVGAGEREVTLTVNGPPIISSTQTQHALHGEKGQIKCFIRSTPPPDRIAWSWKENVLESGTSGRYTVETISTEEGVISTLTISNIVRADFQTIYNCTAWNSFGSDTEIIRLKEQESVPMAVIIGVAVGAGVAFLVLMATIVAFCCARSQRNLKGVVSAKNDIRVEIVHKEPASGREGEEHSTIKQLMMDRGEFQQDSVLKQLEVLKEEEKEFQNLKDPTNGYYSVNTFKEHHSTPTISLSSCQPDLRPAGKQRVPTGMSFTNIYSTLSGQGRLYDYGQRFVLGMGSSSIELCEREFQRGSLSDSSSFLDTQCDSSVSSSGKQDGYVQFDKASKASASSSHHSQSSSQNSDPSRPLQRRMQTHV

SEQ ID NO: 15663 - protein, 824 aa, Homo sapiens
MLFSWREDPGAQCLLLSLLLLAASEVGSGQLHYSVSEEAKHGTFVGRIAQDLGLELAELVPRLFRVASKRHGDLLEVNLQNGILFVNSRIDREELCGRSAECSIHLEVIVDRPLQVFHVEVEVKDINDNAPVFPMAVKNLFISESRQPGSRFSLEGASDADIGTNSLLTYSLDSTEYFTLDVKRNDEEIKSLGLVLKKNLNREDTPKHYLLITAIDGGKPELTGTTQLKITVLDVNDNAPAFERTIYKVRLLENAPNGTLVVTVNATDLDEGVNKDIAYSFNTDMSADILSKFHLDPVNGQISVKGNIDFEESKSYEIQVEATDKGNPPMSDHCTVLLEIVDINDNVPELVIQSLSLPVLEDSPLSTVIALISVSDRDSGVNGQVTCSLTPHVPFKLVSTFKNYYSLVLDSPLDRESVSAYELVVTARDGGSPSLWATASVSVEVADVNDNAPAFSQSEYTVFVKENNPPGCHIFTVSARDADAQENALVSYSLVERRVGERALSSYVSVHAESGKVYALQPLDHEELELLQFQVSARDAGVPPLGSNVTLQVFVLDENDNAPALLMPRVGGIGGAVSELVPRSVGAGHVVAKVRAVDADSGYNAWLSYELQPGTGGARIPFRVGLYTGEISTTRALDEVDAPRHRLLVLVKDHGEPSLTATATVLVSLVESGQAPKASSQASAGATGPEAALVDVNVYLIVAICAVSSLLVLTLLLYTALRCSAPPTEGDCGPGKPTLVCSSAVGSWSYSQQRQQRVCSGEGLPKTDLMAFSPSLPPCPISRDREEKQDVDVDLSAKVSNFYLFFPKCLCFSFLNVSTPLEIH

SEQ ID NO: 15664 - protein, 138 aa, Homo sapiens
MRGRELPLVLLALVLCLAPRGRAVPLPAGGGTVLTKMYPRGNHWAVGHLMGKKSTGESSSVSERGSLKQQLREYIRWEEAARNLLGLIEAKENRNHQPPQPKALGNQQPSWDSEDSSNFKDLVDSLLQVLNVKEGTPS

SEQ ID NO: 15665 - protein, 686 aa, Homo sapiens
MVFTPEDRLGKQCLLLPLLLLAAWKVGSGQLHYSVPEEAKHGTFVGRIAQDLGLELAELVPRLFRMASKDREDLLEVNLQNGILFVNSRIDREELCGRSAECSIHLEVIVDRPLQVFHVDVEVRDINDNPPLFPVEEQRVLIYESRLPDSVFPLEGASDADVGSNSILTYKLSSSEYFGLDVKINSDDNKQIGLLLKKSLDREEAPAHNLFLTATDGGKPELTGTVQLLVTVLDVNDNAPTFEQSEYEVRIFENADNGTTVIRLNASDRDEGANGAISYSFNSLVAAMVIDHFSIDRNTGEIVIRGNLDFEQENLYKILIDATDKGHPPMAGHCTVLVRILDKNDNVPEIALTSLSLPVREDAQFGTVIALISVNDLDSGANGQVNCSLTPHVPFKLVSTFKNYYSLVLDSALDRESVSAYELVVTARDGGSPSLWATASLSVEVADMNDNAPAFAQPEYTVFVKENNPPGCHIFTVSARDADAQENALVSYSLVERRVGERALSSYISVHAESGKVYALQPLDHEELELLQFQPRQPNPDWRYSASLRAGMHSSVHLEEAGILRAGPGGPDQQWPTVSSATPEPEAGEVSPPVGAGVNSNSWTFKYGPGNPKQSGPGELPDKFIIPGSPAIISIRQEPTNSQIDKSDFITFGKKEETKKKKKKKKGNKTQEKKEKGNSTTDNSDQ

SEQ ID NO: 15666 - protein, 248 aa, Homo sapiens
MDTTAAAALPAFVALLLLSPWPLLGSAQGQFSAGGCTFDDGPGACDYHQDLYDDFEWVHVSAQEPHYLPPEMPQGSYMIVDSSDHDPGEKARLQLPTMKENDTHCIDFSYLLYSQKGLNPGTLNILVRVNKGPLANPIWNVTGFTGRDWLRAELAVSTFWPNEYQVIICTFLVYVLMSSVLTICVIHRCKYASHGNERLPSCLPHPHYWGSVIHRYTYASHGNERLPLFLPHPVDEEVFGDIGTKPSN

SEQ ID NO: 15667 - protein, 215 aa, Homo sapiens
MLACLCTVLWHLPAVPALNRTGDPGPGPSIQKTYDLTRYLEHQLRSLAGTYLNYLGPPFNEPDFNPPRLGAETLPRATVDLEVWRSLNDKLRLTQNYEAYSHLLCYLRGLNRQAATAELRRSLAHFCTSLQGLLGSIAGVMAALGYPLPQPLPGTEPTWTPGPAHSDFLQKMDDFWLLKELQTWLWRSAKDFNRLKKKMQPPAAAVTLHLGAHGF

SEQ ID NO: 15668 - protein, 253 aa, Homo sapiens
MEQRPRGCAAVAAALLLVLLGARAQGGTRSPRCDCAGDFHKKIGLFCCRGCPAGHYLKAPCTEPCGNSTCLVCPQDTFLAWENHHNSECARCQACDEQASQVALENCSAVADTRCGCKPGWFVECQVSQCVSSSPFYCQPCLDCGALHRHTRLLCSRRDTDCGTCLPGFYEHGDGCVSCPTSTLGSCPERCAAVCGWRQSRWCAGNASGRTGMDRGEAGEEGGNHPTPTSCFQCSGSRCSWLALWSPSCLGPP

SEQ ID NO: 15669 - protein, 450 aa, Homo sapiens
MDPGQQPPPQPAPQGQGQPPSQPPQGQGPPSGPGQPAPAATQAAPQAPPAGHQIVHVRGDSETDLEALFNAVMNPKTANVPQTVPMRLRKLPDSFFKPPEPKSHSRQASTDAGTAGALTPQHVRAHSSPASLQLGAVSPGTLTPTGVVSGPAATPTAQHLRQSSFEIPDDVPLPAGWEMAKTSSGQRYFLNHIDQTTTWQDPRKAMLSQMNVTAPTSPPVQQNMMNSASAMNQRISQSAPVKQPPPLAPQSPQGGVMGGSNSNQQQQMRLQQLQMEKERLRLKQQELLRQELALRSQLPTLEQDGGTQNPVSSPGMSQELRTMTTNSSDPFLNSGTYHSRDESTDSGLSMSSYSVPRTPDDFLNSVDEMDTGDTINQSTLPSQQNRFPDYLEAIPGTNVDLGTLEGDGMNIEGEELMPSLQEALSSDILNDMESVLAATKLDKESFLTWL

SEQ ID NO: 15670 - protein, 204 aa, Homo sapiens
MEAQAQGLLETEPLQGTDEDAVASADFSSMLSEEEKEELKAELVQLEDEITTLRQVLSAKERHLVEIKQKLGMNLMNELKQNFSKSWHDMQTTTAYKKTHETLSHAGQKATAAFSNVGTAISKKFGDMSYSIRHSISMPAMRNSPTFKSFEERVETTVTSLKTKVGGTNPNGGSFEEVLSSTAHASAQSLAGGSRRTKEEELQC

SEQ ID NO: 15671 - protein, 114 aa, Homo sapiens
MWTALVLIWIFSLSLSESHAASNDPRNFVPNKMWKGLVKRNASVETVDNKTSEDVTMAAASPVTLTKGTSAAHLNSMEVTTEDTSRTDAYESYKKKDYTQVDYLINGMYADSEM

SEQ ID NO: 15672 - protein, 436 aa, Homo sapiens
MLPCASCLPGSLLLWALLLLLLGSASPQDSEEPDSYTECTDGYEWDPDSQHCRDVNECLTIPEACKGEMKCINHYGGYLCLPRSAAVINDLHGEGPPPPVPPAQHPNPCPPGYEPDDQDSCVDVDECAQALHDCRPSQDCHNLPGSYQCTCPDGYRKIGPECVDIDECRYRYCQHRCVNLPGSFRCQCEPGFQLGPNNRSCVDVNECDMGAPCEQRCFNSYGTFLCRCHQGYELHRDGFSCSDIDECSYSSYLCQYRCINEPGRFSCHCPQGYQLLATRLCQDIDECESGAHQCSEAQTCVNFHGGYRCVDTNRCVEPYIQVSENRCLCPASNPLCREQPSSIVHRYMTITSERSVPADVFQIQATSVYPGAYNAFQIRAGNSQGDFYIRAQGPPLTGAGSSAPRASVTPRGEEVTRRADSRPRPRDLDLAGLQGS

SEQ ID NO: 15673 - protein, 467 aa, Homo sapiens
MLIFWTITLFLLGAAKGKEVCYEDLGCFSDTEPWGGTAIRPLKILPWSPEKIGTRFLLYTNENPNNFQILLLSDPSTIEASNFQMDRKTRFIIHGFIDKGDESWVTDMCKKLFEVEEVNCICVDWKKGSQATYTQAANNVRVVGAQVAQMLDILLVKYSYPPSKVHLIGHSLGAHVAGEAGSKTPGLSRITGLDPVEASFESTPEEVRLDPSDADFVDVIHTDAAPLIPFLGFGTNQQMGHLDFFPNGGESMPGCKKNALSQIVDLDGIWAGTRDFVACNHLRSYKYYLESILNPDGFAAYPCTSYKSFESDKCFPCPDQGCPQMGHYADKFAGRTSEEQQKFFLNTGEASNFARWRYGVSITLSGRTATGQIKVALFGNKGNTHQYSIFRGILKPGSTHSYEFDAKLDVGTIEKVKFLWNNNVINPTLPKVGATKITVQKGEEKTVYNFCSEDTVREDTLLTLTPC

SEQ ID NO: 15674 - protein, 1084 aa, Homo sapiens
MVALRGLGSGLQPWCPLDLRLEWVDTVWELDFTETEPLDPSIEAEIIETGLAAFTKLYESLLPFATGEHGSMESIWTFFIENNVSHSTLVALFYHFVQIVHKKNVSVQYREYGLHAAGLYFLLLEVPGSVANQVFHPVMFDKCIQTLKKSWPQESNLNRKRKKEQPKSSQANPGRHRKRGKPPRREDIEMDEIIEEQEDENICFSARDLSQIRNAIFHLLKNFLRLLPKFSLKEKPQCVQNCIEVFVSLTNFEPVLHECHVTQARALNQAKYIPELAYYGLYLLCSPIHGEGDKVISCVFHQMLSVILMLEVGEGSHRAPLAVTSQVINCRNQAVQFISALVDELKESIFPVVRILLQHICAKVVDKSEYRTFAAQSLVQLLSKLPCGEYAMFIAWLYKYSRSSKIPHRVFTLDVVLALLELPEREVDNTLSLEHQKFLKHKFLVQEIMFDRCLDKAPTVRSKALSSFAHCLELTVTSASESILELLINSPTFSVIESHPGTLLRNSSAFSYQRQTSNRSEPSGEINIDSSGETVGSGERCVMAMLRRRIRDEKTNVRKSALQVLVSILKHCDVSGMKEDLWILQDQCRDPAVSVRKQALQSLTELLMAQPRCVQIQKAWLRGVVPVVMDCESTVQEKALEFLDQLLLQNIRHHSHFHSGDDSQVLAWALLTLLTTESQELSRYLNKAFHIWSKKEKFSPTFINNVISHTGTEHSAPAWMLLSKIAGSSPRLDYSRIIQSWEKISSQQNPNSNTLGHILCVIGHIAKHLPKSTRDKVTDAVKCKLNGFQWSLEVISSAVDALQRLCRASAETPAEEQELLTQVCGDVLSTCEHRLSNIVLKENGTGNMDEDLLVKYIFTLGDIAQLCPARVEKRIFLLIQSVLASSADADHSPSSQGSSEAPASQPPPQVRGSVMPSVIRAHAIITLGKLCLQHEDLAKKSIPALVRELEVCEDVAVRNNVIIVMCDLCIRYTIMVDKYIPNISMCLKDSDPFIRKQTLILLTNLLQEEFVKWKGSLFFRFVSTLIDSHPDIASFGEFCLAHLLLKRNPVMFFQHFIECIFHFNNYEKHEKYNKFPQSERALHR

SEQ ID NO: 15675 - protein, 288 aa, Homo sapiens
MEREPSASEAAPAAAALFAWGANSYGQLGLGHKEDVLLPQQLNDFCKPRSVRRITGGGGHSAVVTDGGDLFVCGLNKDGQLGLGHTEDIPYFTPCKSLFGCPIQQVACGWDFTIMLTENGQVLSCGSNSFGQLGVPHGPRRCVVPQAIELHKEKVVCIAAGLRHAVAATASGIVFQWGTGLASCGRRLCPGQTLPLFFTAKEPSRVTGLENSKAMCVLAGSDHSASLTDAGEVYVWGSNKHGQLANEAAFLPVPQKIEAHCFQNEKVTAIWSGWTHLVAQTGLLWLRA

SEQ ID NO: 15676 - protein, 165 aa, Homo sapiens
MHPDLGPLCTLLYVTLTILCSSVSSDLAPYFTSEPLSAVQKLGGPVVLHCSAQPVTTRISWLHNGKTLDGNLEHVKIHQGTLTILSLNSSLLGYYQCLANNSIGAIVSGPATVSVAVLGDFGSSTKHVITAEEKSAGFIGCRVPESNPKAEVRYKIRGKWLEHST

SEQ ID NO: 15677 - protein, 90 aa, Homo sapiens
MQPILLLLAFLLLPRADAGEIIGGHEAKPHSRPYMAYLMIWDQKSLKRCGGFLIRDDFVLTAAHCWGSWRERPSGPELCSPSGYLATRPR

SEQ ID NO: 15678 - protein, 797 aa, Homo sapiens
MRLALLWALGLLGAGSPLPSWPLPNIGGTEEQQAESEKAPREPLEPQVLQDDLPISLKKVLQTSLPEPLRIKLELDGDSHILELLQNRELVPGRPTLVWYQPDGTRVVSEGHTLENCCYQGRVRGYAGSWVSICTCSGLRGLVVLTPERSYTLEQGPGDLQGPPIISRIQDLHLPGHTCALSWRESVHTQKPPEHPLGQRHIRRRRDVVTETKTVELVIVADHSEAQKYRDFQHLLNRTLEVALLLDTFFRPLNVRVALVGLEAWTQRDLVEISPNPAVTLENFLHWRRAHLLPRLPHDSAQLVTGTSFSGPTVGMAIQNSICSPDFSGGVNMDHSTSILGVASSIAHELGHSLGLDHDLPGNSCPCPGPAPAKTCIMEASTDFLPGLNFSNCSRRALEKALLDGMGSCLFERLPSLPPMAAFCGNMFVEPGEQCDCGFLDDCVDPCCDSLTCQLRPGAQCASDGPCCQNCQLRPSGWQCRPTRGDCDLPEFCPGDSSQCPPDVSLGDGEPCAGGQAVCMHGRCASYAQQCQSLWGPGAQPAAPLCLQTANTRGNAFGSCGRNPSGSYVSCTPRDAICGQLQCQTGRTQPLLGSIRDLLWETIDVNGTELNCSWVHLDLGSDVAQPLLTLPGTACGPGLVCIDHRCQRVDLLGAQECRSKCHGHGVCDSNRHCYCEEGWAPPDCTTQLKATSSLTTGLLLSLLVLLVLVMLGASYWYRARLHQRLCQLKGPTCQYRAAQSGPSERPGPPQRALLARGTKAELADRPNPPTRPLPADPVVRSPKVTVGGEKGTASPPT

SEQ ID NO: 15679 - protein, 60 aa, Homo sapiens
MRGGKCNMLSSLGCLLLCGSITLALGNAQKLPKANKRTELVIQHGWMSLIKMMLNERSQV

SEQ ID NO: 15680 - protein, 96 aa, Homo sapiens
MIARRNPEPLRFLPDEARSLPPPKLTDPRLLYIGFLGYCSGLIDNLIRRRPIATADYLYAVRDREMFGYMKLHPEDFPEEDKKTYGEIFEKFHPIR

SEQ ID NO: 15681 - protein, 211 aa, Homo sapiens
ALTAHPSCLLALLVAGLAQGIRGPLRAQDLGPQPLELKEAFKLFQIQFNRSYLSPEEHAHRLDIFAHNLAQAQRLQEEDLGTAEFGVTPFSDLTEEEFGQLYGYRRAAGGVPSMGREIRSEEPEESVPFSCDWRKVASAISPIKDQKNCNCCWAMAAAGNIETLWRISFWDFVDVSVQGGLASEKDYPFQGKVRAHRCHPKKYQKVAWIQD

SEQ ID NO: 15682 - protein, 531 aa, Homo sapiens
MDRVLLRWISLFWLTAMVEGLQVTVPDKKKVAMLFQPTVLRCHFSTSSHQPAVVQWKFKSYCQDRMGESLGMSSTRAQSLSKRNLEWDPYLDCLDSRRTVRVVASKQGSTVTLGDFYRGREITIVHDADLQIGKLMWGDSGLYYCIITTPDDLEGKNEDSVELLVLGRTGLLADLLPSFAVEIMPVRKGYRIQADKERDSMKVLYYVEKELAQFDPARRMRGRYNNTISELSSLHEEDSNFRQSFHQMRSKQFPVSGDLESNPDYWSGVMGGSSGASRGPSAMEYNKEDRESFRHSQPRSKSEMLSRKNFATGVPAVSMDELAAFADSYGQRPRRADGNSHEARGGSRFERSESRAHSGFYQDDSLEEYYGQRSRSREPLTDADRGWAFSPARRRPAEDAHLPRLVSRTPGTAPKYDHSYLGSARERQARPEGASRGGSLETPSKRSAQLGPRSASYYAWSPPGTYKAGSSQDDQEDASDDALPPYSELELTRGPSYRGRDLPYHSNSEKKRKKEPAKKTNDFPTRMSLVV

SEQ ID NO: 15683 - protein, 134 aa, Homo sapiens
MRPGTALQAVLLAVLLVGLRAATGRLLSGQPVCRGGTQRPCYKVIYFHDTSRRLNFEEAKEACRRDGGQLVSIESEDEQKLIEKFIENLLPSDGDFWIGLRRREEKQSNSTACQDLYAWTDGSISQFRETSSSF

SEQ ID NO: 15684 - protein, 335 aa, Homo sapiens
MWLLGPLCLLLSSAAAKAKSKCGPTFFPCASGIHCIIGRFRCNGFEDCPDGSDEENCTANPLLCSTARYHCKNGLCIDKSFICDGQNNCQDNSDEESCESSQVSLLLPRLECSGTISAHCKLRLPGSRHSPASASRVAGTTEPGSGQVFVTSENQLVYYPSITYAIIGSSVIFVLVVALLALVLHHQRKRNNLMTLPVHRLQHPVLLSRLVVLDHPHHCNVTYNVNNGIQYVASQAEQNASEVGSPPSYSEALLDQRPAWYDLPPPPYSSDTESLNQADLPPYRSRSGSANSASSQAASSLLSVEDTSHSPGQPGPQEGTAEPRDSEPSQGTEEV

SEQ ID NO: 15685 - protein, 270 aa, Homo sapiens
MRPGTALQAVLLAVLLVGLRAATGRLLSASDLDLRGGQPVCRGGTQRPCYKVIYFHDTSRRLNFEEAKEACRRDGGQLVSIESEDEQKLIEKFIENLLPSDGDFWIGLRRREEKQSNSTACQDLYAWTDGSISQFRNWYVDEPSCGSEVCVVMYHQPSAPAGIGGPYMFQWNDDRCNMKNNFICKYSDEKPAVPSREAEGEETELTTPVLPEETQEEDAKKTFKESREAALNLAYILIPSIPLLLLLVVTTVVCWVWICRKRQKTGAARP

SEQ ID NO: 15686 - protein, 1843 aa, Homo sapiens
MWLVTFLLLLDSLHKARPEDVGTSLYFVNDSLQQLPCTASGYPIPAIRWLKDGRPLPADSRWTKRITGLTISDLRTEDSGTYICEVTNTFGSAEATGILMVIDPLHVTLTPKKLKTGIGSTVILSCALTGSPEFTIRWYRNTELVLPDEAISIRGLSNETLLITSAQKSHSGAYQCFATRKAQTAQDFAIIALEDGTPRIVSSFSEKVVNPGEQFSLMCAAKGAPPPTVTWALDDEPIVRDGSHRTNQYTMSDGTTISHMNVTGPQIRDGGVYRCTARNLVGSAEYQARINVRGPPSIRAMRNITAVAGRDTLINCRVIGYPYYSIKWYKDALLLPDNHRQVVFENGTLKLTDVQKGMDEGEYLCSVLIQPQLSISQSVHVAVKVPPLIQPFEFPPASIGQLLYIPCVVSSGDMPIRITWRKDGQVIISGSGVTIESKEFMSSLQISSVSLKHNGNYTCIASNAAATVSRERQLIVRVPPRFVVQPNNQDGIYGKAGVLNCSVDGYPPPKVMWKHAKGSGNPQQYHPVPLTGRIQILPNSSLLIRHVLEEDIGYYLCQASNGVGTDISKSMFLTVKIPAMITSHPNTTIAIKGHAKELNCTARGERPIIIRWEKGDTVIDPDRVMRYAIATKDNGDEVVSTLKLKPADRGDSVFFSCHAINSYGEDRGLIQLTVQEPPDPPELEIREVKARSMNLRWTQRFDGNSIITGFDIEYKNKSDSWDFKQSTRNISPTINQANIVDLHPASVYSIRMYSFNKIGRSEPSKELTISTEEAAPDGPPMDVTLQPVTSQSIQVTWKAPKKELQNGVIRGYQIGYRENSPGSNGQYSIVEMKATGDSEVYTLDNLKKFAQYGVVVQAFNRAGTGPSSSEINATTLEDVPSQPPENVRALSITSDVAVISWSEPPRSTLNGVLKGYRVIFWSLYVDGEWGEMQNITTTRERVELRGMEKFTNYSVQVLAYTQAGDGVRSSVLYIQTKEDVPGPPAGIKAVPSSASSVVVSWLPPTKPNGVIRKYTIFCSSPGSGQPAPSEYETSPEQLFYRIAHLNRGQQYLLWVAAVTSAGRGNSSEKVTIEPAGKAPAKIISFGGTVTTPWMKDVRLPCNSVGDPAPAVKWTKDSEDSAIPVSMDGHRLIHTNGTLLLRAVKAEDSGYYTCTATNTGGFDTIIVNLLVQVPPDQPRLTVSKTSASSITLTWIPGDNGGSSIRGFVLQYSVDNSEEWKDVFISSSERSFKLDSLKCGTWYKVKLAAKNSVGSGRISEIIEAKTHGREPSFSKDQHLFTHINSTHARLNLQGWNNGGCPITAIVLEYRPKGTWAWQGLRANSSGEVFLTELREATWYELRMRACNSAGCGNETAQFATLDYDGSTIPPIKSAQGEGDDVKKLFTIGCPVILATLGVALLFIVRKKRKEKRLKRLRDAKSLAEMLISKNNRSFDTPVKGPPQGPRLHIDIPRVQLLIEDKEGIKQLGDDKATIPVTDAEFSQAVNPQSFCTGVSLHHPTLIQSTGPLIDMSDIRPGTNPVSRKNVKSAHSTRNRYSSQWTLTKCQASTPARTLTSDWRTVGSQHGVTVTESDSYSASLSQDTDKGRNSMVSTESASSTYEELARAYEHAKLEEQLQHAKFEITECFISDSSSDQMTTGTNENADSMTSMSTPSEPGICRFTASPPKPQDADRGKNVAVPIPHRANKSDYCNLPLYAKSEAFFRKADGREPCPVVPPREASIRNLARTYHTQARHLTLDPASKSLGLPHPGAPAAASTATLPQRTLAMPAPPAGTAPPAPGPTPAEPPTAPSAAPPAPSTEPPRAGGPHTKMGGSRDSLLEMSTSGVGRSQKQGAGAYSKSYTLV

SEQ ID NO: 15687 - protein, 79 aa, Homo sapiens
MGLSIFLLLCVLGEFSRSRERAGLRLDPFTPMRRPHHPPHLSSGPQPGGEEERGFLCASIYLQLSGAQPGSHTEDFQWH

SEQ ID NO: 15688 - protein, 139 aa, Homo sapiens
MKLVSVALMYLGSLAFLGADTARLDVASEFRKKWNKWALSRGKRELRMSSSYPTGLADVKAGPAQTLIRPQDMKGASRSPEDSCLSSPSPRPQQSGCRPHPSQALPPEHEQLPGPPELWLPLRDVHGAEAGTPDLPVHR

SEQ ID NO: 15689 - protein, 559 aa, Homo sapiens
MATATIALQVNGQQGGGSEPAAAAAVVAAGDKWKPPQGTDSIKMENGQSTAAKLGLPPLTPEQQEALQKAKKYAMEQSIKSVLVKQTIAHQQQQLTNLQMAAVTMGFGDPLSPLQSMAAQRQRALAIMCRVYVGSIYYELGEDTIRQAFAPFGPIKSIDMSWDSVTMKHKGFAFVEYEVPEAAQLALEQMNSVMLGGRNIKVGRPSNIGQAQPIIDQLAEEARAFNRIYVASVHQDLSDDDIKSVFEAFGKIKSCTLARDPTTGKHKGYGFIEYEKAQSSQDAVSSMNLFDLGGQYLRVGKAVTPPMPLLTPATPGGLPPAAAVAAAAATAKITAQEAVAGAAVLGTLGTPGLVSPALTLAQPLGTLPQAVMAAQAPGVITGVTPARPPIPVTIPSVGVVNPILASPPTLGLLEPKKEKEEEELFPESERPEMLSEQEHMSISGSSARHMVMQKLLRKQESTVMVLRNMVDPKDIDDDLEGEVTEECGKFGAVNRVIIYQEKQGEEEDAEIIVKIFVEFSIASETHKAIQALNGRWFAGRKVVAEVYDQERFDNSDLSA

SEQ ID NO: 15690 - protein, 158 aa, Homo sapiens
MAATGTAAAAATGRLLLLLLALAANAGTGFAVAEPQIAMFCGKLNMHVNIQTGKWEPDPTGTKSCFETKEEVLQYCQEMYPELQITNVMEANQRVSIDNWCRRDKKQCKSRFVTPFKCLVGEFVSDVLLVPEKCQFFHKERMEVCENHQHWHTVVKEV

SEQ ID NO: 15691 - protein, 75 aa, Homo sapiens
MRQGLLVLALVLVLVLVLAAGSQVQEWYPRESHALNWNKGQEEAGGVRGKGEQSGPAPRAPRLQTIGRMFRASRV

SEQ ID NO: 15692 - protein, 76 aa, Homo sapiens
MAAGLARLLLLLGLSAGGPAPAGAAKMKVVEEPNAFGVNNPFLPQASRLQAKRDPSPVSETGFHRVSQDGLDLLTS

SEQ ID NO: 15693 - protein, 2459 aa, Homo sapiens
MSAVGLVLLVLALRLRATTVKPEEGSFCSNSQVAFRDACYEFVPLGRTFRDAQSWCEGQGGHLVFIQDEGTQWFLQKHISQDREWWIGLTWNLARNGTTEGPGTWLDTSNVTYSNWHGGQAAAAPDTCGHIGRGPSSEWVTSDCAQTFAFMCEFRVGQSLACEGLNATVHCGLGQVIQVQDAVYGRQNPHFCTQDAGRPSDLEQGCSWANVKEEVAGQCQELQSCQVAADETYFGNLCPTQGSYLWVQYQCREALQLMVSSESFIFDNVTISLTWLLSPYIGNLSCIISTGDSHTFDPYNPPSVSSNVTHQFTSPGEFTVFAECTTSEWHVTAQRQVTVRDKMETLSVTACSGLSQSGAGPLCQAVFGDPLWIQVELDGGTGVTYTVLLGDITLAESTTQKGSLPYNLILDRETQKLMGPGRHRLEIQATGNTTTSTISRNITVHLVELLSGLQASWASDHLELGQDLLITISLAQGTPEELTFEVAGLNATFSHEQVSFGEPFGICRLAVPVEGTFLVTMLVRNAFSNLSLEIGNITITAPSGLQEPSGMNAEGKSKDKGDMEVYIQPGPYVDPFTTVTLGWPDNDKELRFQWSCGSCWALWSSCVERQLLRTDQRELVVPASCLPPPDSAVTLRLAVLRGQELENRAEQCLYVSAPWELRPRVSCERNCRPVNASKDILLRVTMGEDSPVAMFSWYLDNTPTEQAEPLLDACRLRGFWPRSLTLLQSNTSTLLLNSSFLQSRGEVIRIRATALTRHAYGEDTYVISTVPPREVPACTIAPEEGTVLTSFAIFCNASTALGPLEFCFCLESGSCLHCGPEPALPSVYLPLGEENNDFVLTVVISATNRAGDTQQTQAMAKVALGDTCVEDVAFQAAVSEKIPTALQGEGGPEQLLQLAKAVSSMLNQEHESQGSGQSLSIDVRQKVREHVLGSLSAVTTGLEDVQRVQELAEVLREVTCRSKELTPSAQWEASLALQHASEALLTVSAKARPEDQRRQAATRDLFQAVGSVLEASLSNRPEEPAEASSSQIATVLRLLRVMEHVQTTLLLGKLPGGLPAMLATPSISVYTNRIQPWSWQGSSLRPDAADSATFMLPAASSLSSLEGGQEPVDIKIMSFPKSPFPARSHFDVSGTVGGLRVTSPSGQLIPVKNLSENIEILLPRHSQRHSQPTVLNLTSPEALWVNVTSGEATLGIQLHWRPDIALTLSLGYGYHPNKSSYDAQTHLVPMVAPDELPTWILSPQDLRFGEGVYYLTVVPESDLEPAPGRDLTVGITTFLSHCVFWDEVQETWDDSGCQVGPRTSPYQTHCLCNHLTFFGSTFLVMSNAINIHQTAELFATFEDNPVVVTTVGCLCVVYVLVVIWARRKDAQDQAKVKVTVLEDNDPFAQYHYLVTVYTGHRRGAATSSKVTVTLYGLDGEREPHHLADPDTPVFERGAVDAFLLSTLFPLGELRSLRLWHDNSGDRPSWYVSRVLVYDLVMDRKWYFLCNSWLSINVGDCVLDKVFPVATEQDRKQFSHLFFMKTSAGFQDGHIWYSIFSRCARSSFTRVQRVSCCFSLLLCTMLTSIMFWGVPKDPAEQKMDLGKIEFTWQEVMIGLESSILMFPINLLIVQIFQNTRPRVAKEQNTGKWDRGSPNLTPSPQPMEDGLLTPEAVTKDVSRIVSSLFKALKVPSPALGWDSVNLMDINSLLALVEDVIYPQNTSGQVFWEEAKKREDPVTLTLGSSEMKEKSQCPKPKAARSGPWKDSAYRQCLYLQLEHVEQELRLVGPRGFSQPHSHAQALRQLQTLKGGLGVQPGTWAPAHASALQVSKPPQGLPWWCILVGWLLVAATSGVAAFFTMLYGLHYGRASSLRWLISMAVSFVESMFVTQPLKVLGFAAFFALVLKRVDDEEDTVAPLPGHLLGPDPYALFRARRNSSRDVYQPPLTAAIEKMKTTHLKEQKAFALIREILAYLGFLWMLLLVAYGQRDPSAYHLNRHLQHSFTRGFSGVLGFREFFKWANTTLVSNLYGHPPGFITDGNSKLVGSAQIRQVRVQESSCPLAQQPQAYLNGCRAPYSLDAEDMADYGEGWNATTLSNGSTRARTNVKGIPSGANSLCTGEEATWSPWGLIAKARQEFSAISLTTPGWTPUPELCLWSPLSTTPTSTCSALSRURURPALWAPFLRTRPCRASACTPSPTAGTPSWURQSSSTSSSSSTTWWCRASAUVKRRGAISAASGTFWSWPSSWPAGAPWRCLURGLSWPKGTSSAAGTTGRKASASVRQQQPMPPLATSLPSWYSCPQUSFGICSGUIPKUTUSRQPYAVPGATFQALULSSLPCSWLTPSRQTUYLVGNSVPTKPSLMRRRRWSAFSWESSTTRRSWTIAQCLAPSSLDPALFLUHLWCUTCLSLSSWWPSVRSKNTISCRRKGRSUICCUUKYSVSWALSLRERSLEAAGSSLGLCPRLATLDQHKLCPRT

SEQ ID NO: 15694 - protein, 521 aa, Homo sapiens
MAAEPNKTEIQTLFKRLRAVPTNKACFDCGAKNPSWASITYGVFLCIDCSGVHRSLGVHLSFIRSTELDSNWNWFQLRCMQVGGNANATAFFRQHGCTANDANTKYNSRAAQMYREKIRQLGSAALARHGTDLWIDNMSSAVPNHSPEKKDSDFFTEHTQPPAWDAPATEPSGTQQPAPSTESSGLAQPEHGPNTDLLGTSPKASLELKSSIIGKKKPAAAKKGLGAKKGLGAQKVSSQSFSEIERQAQVAEKLREQQAADAKKQAEESMVASMRLAYQELQIDRKKEEKKLQNLEGKKREQAERLGMGLVSRSSVSHSVLSEMQVIEQETPVSAKSSRSQLDLFDDVGTFASGPPKYKDNPFSLGESFGSRWDTDAAWGMDRVEEKEPEVTISSIRPISERATNRREVESRSSGLESSEARQKFAGAKAISSDMFFGREVDAEYEARSRLQQLSGSSAISSSDLFGDMDGAHGAGSVSLGNVLPTADIAQFKQGVKSVAGKMAVLANGVMNSLQDRYGSY

SEQ ID NO: 15695 - protein, 459 aa, Homo sapiens
MSSQSSSLSEACSREAYSSHNWALPPASRSNPQPAYPWATRRMKEEAIKPPLKAFMKQRRMGLNDFIQKIANNSYACKHPEVQSILKISQPQEPELMNANPSPPPSPSQQINLGPSSNPHAKPSDFHFLKVIGKGSFGKVLLARHKAEEVFYAVKVLQKKAILKKKEEKHIMSERNVLLKNVKHPFLVGLHFSFQTADKLYFVLDYINGGELFYHLQRERCFLEPRARFYAAEIASALGYLHSLNIVYRDLKPENILLDSQGHIVLTDFGLCKENIEHNSTTSTFCGTPEYLAPEVLHKQPYDRTVDWWCLGAVLYEMLYGLPPFYSRNTAEMYDNILNKPLQLKPNITNSARHLLEGLLQKDRTKRLGAKDDFMEIKSHVFFSLINWDDLINKKITPPFNPNVSGPNDLRHFDPEFTEEPVPNSIGKSPDSVLVTASVKEAAEAFLGFSYAPPTDSFL

SEQ ID NO: 15696 - protein, 510 aa, Homo sapiens
MPTVEELYRNYGILADATEQVGQHKDAYQVILDGVKGGTKEKRLAAQFIPKFFKHFPELADSAINAQLDLCEDEDVSIRRQAIKELPQFATGENLPRVADILTQLLQTDDSAEFNLVNNALLSIFKMDAKGTLGGLFSQILQGEDIVRERAIKFLSTKLKTLPDEVLTKEVEELILTESKKVLEDVTGEEFVLFMKILSGLKSLQTVSGRQQLVELVAEQADLEQTFNPSDPDCVDRLLQCTRQAVPLFSKNVHSTRFVTYFCEQVLPNLGTLTTPVEGLDIQLEVLKLLAEMSSFCGDMEKLETNLRKLFDKLLEYMPLPPEEAENGENAGNEEPKLQFSYVECLLYSFHQLGRKLPDFLTAKLNAEKLKDFKIRLQYFARGLQVYIRQLRLALQGKTGEALKTEENKIKVVALKITNNINVLIKDLFHIPPSYKSTVTLSWKPVQKVEIGQKRASEDTTSGSPPKKSSAGPKRDARQIYNPPSGKYSSNLGNFNYGERFRLGTRNMRD

SEQ ID NO: 15697 - protein, 963 aa, Homo sapiens
MAAHLKKRVYEEFTKVVQPQEEIATKKLRLTKPSKSAALHIDLCKATSPADALQYLLQFARKPVEAESVEGVVRILLEHYYKENDPSVRLKIASLLGLLSKTAGFSPDCIMDDAINILQNEKSHQVLAQLLDTLLAIGTKLPENQAIQMRLVDVACKHLTDTSHGVRNKCLQLLGNLGSLEKSVTKDAEGLAARDVQKIIGDYFSDQDPRVRTAAIKAMLQLHERGLKLHQTIYNQACKLLSDDYEQVRSAAVQLIWVVSQLYPESIVPIPSSNEEIRLVDDAFGKICHMVSDGSWVVRVQAAKLLGSMEQVSSHFLEQTLDKKLMSDLRRKRTAHERAKELYSSGEFSSGRKWGDDAPKEEVDTGAVNLIESGACGAFVHGLEDEMYEVRIAAVEALCMLAQSSPSFAEKCLDFLVDMFNDEIEEVRLQSIHTMRKISNNITLREDQLDTVLAVLEDSSRDIREALHELLCCTNVSTKEGIHLALVELLKNLTKYPTDRDSIWKCLKFLGSRHPTLVLPLVPELLSTHPFFDTAEPDMDDPAYIAVLVLIFNAAKTCPTMPALFSDHTFRHYAYLRDSLSHLVPALRLPGRKLVSSAVSPSIIPQEDPSQQFLQQSLERVYSLQHLDPQGAQELLEFTIRDLQRLGELQSELAGVADFSATYLRCQLLLIKALQEKLWNVAAPLYLKQSDLASAAAKQIMEETYKMEFMYSGVENKQVVIIHHMRLQAKALQLIVTARTTRGLDPLFGMCEKFLQEVDFFQRYFIADLPHLQDSFVDKLLDLMPRLMTSKPAEVVKILQTMLRQSAFLHLPLPEQIHKASATIIEPAGESDNPLRFTSGLVVALDVDATLEHVQDPQNTVKVQVLYPDGQAQMIHPKPADFRNPGPGRHRLITQVYLSHTAWTEACQVEVRLLLAYNSSARIPKCPWMEGGEMSPQVETSIEGTIPFSKPVKVYIMPKPARR

SEQ ID NO: 15698 - protein, 246 aa, Homo sapiens
MAPKPGAEWSTALSHLVLGVVSLHAAVSTAECTNGHLMCAGCFIHLLADARLKEEQATCPNCRCEISKSLCCRNLAVEKAVSELPSECGFCLRQFPRSLLERHQKEECQDRVTQCKYKRIGCPWHGPFHELTVHEAACAHPTKTGSELMEILDGMDQSHRKEMQLYNSIFSLLSFEKIGYTEVQFRPYRTDDFITRLYYETPRFTVLNQTWVLKARVNDSERNPNLSCKRTLSFQLLLKSKVTAPL

SEQ ID NO: 15699 - protein, 85 aa, Homo sapiens
MWSWKCLLFWAVLVTATLCTARPSPTLPEQDALPSSEDDDDDDDSSSEEKETDNTKPNPVAPYWTSPEKMEKKLHAVPAAKTVKF

SEQ ID NO: 15700 - protein, 189 aa, Homo sapiens
MTSGSVFFYILIFGKYFSHGGGQDVKCSLGYFPCGNITKCLPQLLHCNGVDDCGNQADEDNCGDNNGWSLQFDKYFASYYKMTSQYPFEAETPECLVGSVPVQCLCQGLELDCDETNLRAVPSVSSNVTAMSLQWNLIRKLPPDCFKNYHDLQKLYLQNNKITSISIYAFRGLNSLTKLSRAVKDGSEK

SEQ ID NO: 15701 - protein, 267 aa, Homo sapiens [sequence omitted]

SEQ ID NO: 15702 - protein, 142 aa, Homo sapiens
MRSLLLLSAFCLLEAALAAEVKKPAAAAAPGTAEKLSPKATTASQAKAVLSAEQLRDEEVHAGLGELLRSLSNSTARNVTWKLGSRLYGPSSVSFADDFVRSSKQHYNCEHSKINFRDKRSALQSINEWAAQTTDGKLPEVT

SEQ ID NO: 15703 - protein, 184 aa, Homo sapiens
MASLVSLELGLLLAVLVVTATASPPAGLLSLLTSGQGALDQEALGGLLNTLADRVHCANGPCGKACVDIPQLLEEAVGAGAPGSAGGVLAALLDHVRSGSCFHALPSPQYFVDFVFQQHSSEVPMTLAELSALMQRLGVGREAHSDHSHRHRGASSRDPVPLISSSNSSSVWDTVCLSARDVMA

SEQ ID NO: 15704 - protein, 917 aa, Homo sapiens
MDGAAGPGDGPAREALQSLSQRLRVQEQEMELVKAALAEALRLLRLQVPPSSLQGSGTPAPPGDSLAAPPGLPPTCTPSLVSRGTQTETEVELKSSPGPPGLSNGPPAPQGASEEPSGTQSEGGGSSSSGAGSPGPPGILRPLQPPQRADTPRRNSSSSSSPSERPRQKLSRKAISSANLLVRSGSTESRGGKDPLSSPGGPGSRRSNYNLEGISVKMFLRGRPITMYIPSGIRSLEELPSGPPPETLSLDWVYGYRGRDSRSNLFVLRSGEVVYFIACVVVLYRPGGGPGGPGGGGQRHYRGHTDCVRCLAVHPDGVRVASGQTAGVDKDGKPLQPVVHIWDSETLLKLQEIGLGAFERGVGALAFSAADQGAFLCVVDDSNEHMLSVWDCSRGMKLAEIKSTNDSVLAVGFNPRDSSCIVTSGKSHVHFWNWSGGVGVPGNGTLTRKQGVFGKYKKPKFIPCFVFLPDGDILTGDSEGNILTWGRSPSDSKTPGRGGAKETYGIVAQAHAHEGSIFALCLRRDGTVLSGGGRDRRLVQWGPGLVALQEAEIPEHFGAVRAIAEGLGSELLVGTTKNALLRGDLAQGFSPVIQGHTDELWGLCTHPSQNRFLTCGHDRQLCLWDGESHALAWSIDLKETGLCADFHPSGAVVAVGLNTGRWLVLDTETREIVSDVIDGNEQLSVVRYSPDGLYLAIGSHDNVIYIYSVSSDGAKSSRFGRCMGHSSFITHLDWSKDGNFIMSNSGDYEILYWDVAGGCKQLKNRYESRDREWATYTCVLGFHVYVPVRSCQGAEPHVRGPRQPRDQRPIHARRLAPRLAGRQGRQHLPVASAGRWGRGAGARHALSNPLPVPRLLPRRLIAAWRDRLARRRGPAPPCPSLAQSPTTRGRLFPGLTSRHSRSRIFLEGANGAPAHTV

SEQ ID NO: 15705 - protein, 100 aa, Homo sapiens
MLPLLLGLLGPAACWALGPTPGPGSSELRSAFSAARTTPLEGTSEMAVTFDKVYVNIGGDFDVATGQFRCRVPGAYFFSFTAGKAPHKSLSVMLVRNRDE

SEQ ID NO: 15706 - protein, 1156 aa, Homo sapiens
MGDTAPPQAPAGGLGGASGAGLLGGGSVTPRVHSAIVERLRARIAVCRQHHLSCEGRYERGRAESSDRERESTLQLLSLVQHGQGARKAGKHTKATATAATTTAPPPPPAAPPAASQAAATAAPPPPPDYHHHHQQHLLNSSNNGGSGGINGEQQPPASTPGDQRNSALIALQGSLKRKQVVNLSPANSKRPNGFVDNSFLDIKRIRVGENLSAGQGGLQINNGQSQIMSGTLPMSQAPLRKTNTLPSHTHSPGNGLFNMGLKEVKKEPGETLSCSKHMDGQMTQENIFPNRYGDDPGEQLMDPELQELFNELTNISVPPMSDLELENMINATIKQDDPFNIDLGQQSQRSTPRPSLPMEKIVIKSEYSPGLTQGPSGSPQLRPPSAGPAFSMANSALSTSSPIPSVPQSQAQPQTGSGASRALPSWQEVSHAQQLKQIAANRQQHARMQQHQQQHQPTNWSALPSSAGPSPGPFGQEKIPSPSFGQQTFSPQSSPMPGVAGGSGQSKVMANYMYKAGPSAQGGHLDVLMQQKPQDLSRSFINNPHPAMEPRQGNTKPLFHFNSDQANQQMPSVLPSQNKPSLLHYTQQQQQQQQQQQQQQQQQQQQQQQQQQQQQQQQQQSSISAQQQQQQQSSISAQQQQQQQQQQQQQQQQQQQQQQQQQQQPSSQPAQSLPSQPLLRSPLPLQQKLLLQQMQNQPIAGMGYQVSQQQRQDQHSVVGQNTGPSPSPNPCSNPNTGSGYMNSQQSLLNQQLMGKKQTLQRQIMEQKQQLLLQQQMLADAEKIAPQDQINRHLSRPPPDYKDQRRNVGNMQPTAQYSGGSSTISLNSNQALANPVSTHTILTPNSSLLSTSHGTRMPSLSTAVQNMGMYGNLPCNQPNTYSVTSGMNQLTQQRNPKQLLANQNNPMMPRPPTLGPSNNNNVATFGAGSVGNSQQLRPNLTHSMASMPPQRTSNVMITSNTTAPNWASQEGTSKQQEALTSAGVRFPTGTPAAYTPNQSLQQAVGSQQFSQRAVAPPNQLTPAVQMRPMNQMSQTLNGQTMGPLRGLNLRPNQLSTQILPNLNQSGTGLNQSRTGINQPPSLTPSNFPSPNQSSRAFQGTDHSSDLAFDFLSQQNDNMGPALNSDADFIDSLLKTEPGNDDWMKDINLDEILGNNS

SEQ ID NO: 15707 - protein, 60 aa, Homo sapiens
AFGAEVGVRLALFAAFLVTELLPPFQRLIQPEEMWLYRNPYVEAEYFPTKPMFLPALPWL

SEQ ID NO: 15708 - protein, 852 aa, Homo sapiens
MTTEVGSVSEVKKDSSQLGTDATKEKPKEVAENQQNQSSDPEEEKGSQPPPAAESQSSLRRQKREKETSESRGISRFIPPWLKKQKSYTLVVAKDGGDKKEPTQAVVEEQVLDKEEPLPEEQRQAKGDAEEMAQKKQEIKVEVKEEKPSVSKEEKPSVSKVEMQPTELVSKEREEKVKETQEDKLEGGAAKRETKEVQTNELKAEKASQKVTKKTKTVQCKVTLLDGTEYSCDLEKHAKGQVLFDKVCEHLNLLEKDYFGLLFQESPEQKNWLDPAKEIKRQLRNLPWLFTFNVKFYPPDPSQLTEDITRYFLCLQLRQDIASGRLPCSFVTHALLGSYTLQAELGDYDPEEHGSIDLSEFQFAPTQTKELEEKVAELHKTHRGLSPAQADSQFLENAKRLSMYGVDLHHAKDSEGVDIKLGVCANGLLIYKDRLRINRFAWPKILKISYKRSNFYIKVRPAELEQFESTIGFKLPNHRAAKRLWKVCVEHHTFYRLVSPEQPPKAKFLTLGSKFRYSGRTQAQTRQASTLIDRPAPHFERTSSKRVSRSLDGAPIGVMDQSLMKDFPGAAGEISAYGPGLVSIAVVQDGDGRREVRSPTKAPHLQLIEGKSSHETLNIVEEKKRAEVGKDERVITEEMNGKEISPGSGPGEIRKVEPVTQKDSTSLSSESSSSSSESEEEDVGEYRPHHRVTEGTIREEQEYEEEVEEEPRPAAKPPVVKTEMVTISDASQRTEISTKEVPIVQTETKTITYESPQIDGGAGGDSGTLLTAQTITSESVSTTTTTHITKTVKGGISETRIEKRIVITGDGDIDHDQALAQAIREAREQHPDMSVTRVVVHKETELAEEGED

SEQ ID NO: 15709 - protein, 615 aa, Homo sapiens
MAKVNITRDLIRRQIKERGALSFERRYHVTDPFIRRLGLEAELQGHSGCVNCLEWNEKGDLLASGSDDQHTIVWDPLHHKKLLSMHTGHTANIFSVKFLPHAGDRILITGAADSKVHVHDLTVKETIHMFGDHTNRVKRIATAPMWPNTFWSAAEDGLIRQYDLRENSKHSEVLIDLTEYCGQLVEAKCLTVNPQDNNCLAVGASGPFVRLYDIRMIHNHRKSMKQSPSAGVHTFCDRQKPLPDGAAQYYVAGHLPVKLPDYNNRLRVLVATYVTFSPNGTELLVNMGGEQVYLFDLTYKQRPYTFLLPRKCHSSGEVQNGKMSTNGVSNGVSNGLHLHSNGFRLPESRGHVSPQVELPPYLERVKQQANEAFACQQWTQAIQLYSKAVQRAPHNAMLYGNRAAAYMKRKWDGDHYDALRDCLKAISLNPCHLKAHFRLARCLFELKYVAEALECLDDFKGKFPEQAHSSACDALGRDITAALFSKNDGEEKKGPGGGAPVRLRSTSRKDSISEDEMVLRERSYDYQFRYCGHCNTTTDIKEANFFGRRPPTWSVCSKGMSPLSTACSHTPATASWPPVASILLCGSGTPDQRVKTSQAESWKIWRVLHRPTSGA

SEQ ID NO: 15710 - protein, 216 aa, Homo sapiens
MWPPCGTLRTLALARSRGARACSGDGGVSYTQGQSPEPRTREYFYYVDHQGQLFLDDSKMKNFITCFKDPQFLVTFFSRLRPNRSGRYEAAFPFLSPCGRERNFLRCEDRPVVFTHLLTADHGPPRLSYCGGGEALAVPFEPARLLPLAANGRLYHPAPERAGGVGLVRSALAFELSACFEYGPGAPALPSHVRWQGRRLALTMDLAPLLLAARSP

SEQ ID NO: 15711 - protein, 830 aa, Homo sapiens
MTVLQEPVQAAIWQALNHYAYRDAVFLAERLYAEVHSEEALFLLATCYYRSGKAYKAYRLLKGHSCTTPQCKYLLAKCCVDLSKLAEGEQILSGGVFNKQKSHDDIVTEFGDSACFTLSLLGHVYCKTDRLAKGSECYQKSLSLNPFLWSPFESLCEIGEKPDPDQTFKFTSLQNFSNCLPNSCTTQVPNHSLSHRQPETVLTETPQDTIELNRLNLESSNSKYSLNTDSSVSYIDSAVISPDTVPLGTGTSILSKQVQNKPKTGRSLLGGPAALSPLTPSFGILPLETPSPGDGSYLQNYTNTPPVIDVPSTGAPSKKTFRVLQSVARIGQTGTKSVFSQSGNSREVTPILAQTQSSGPQTSTTPQVLSPTITSPPNALPRRSSRLFTSDSSTTKENSKKLKMKFPPKIPNRKTKSKTNKGGITQPNINDSLEITKLDSSIISEGKISTITPQIQAFNLQKAAAEGLMSLLREMGKGYLALCSYNCKEAINILSHLPSHHYNTGWVLCQIGRAYFELSEYMQAERIFSEVRRIENYRVEGMEIYSTTLWHLQKDVALSVLSKDLTDMDKNSPEAWCAAGNCFSLQREHDIAIKFFQRAIQVDPNYAYAYTLLGHEFVLTEELDKALACFRNAIRVNPRHYNAWYGLGMIYYKQEKFSLAEMHFQKALDINPQSSVLLCHIGVVQHALKKSEKALDTLNKAIVIDPKNPLCKFHRASVLFANEKYKSALQELEELKQIVPKESLVYFLIGKVYKKLGQTHLALMNFSWAMDLDPKGANNQIKEAIDKRYLPDDEEPITQEEQIMGTDESQESSMTDADDTQLHAAESDEF

SEQ ID NO: 15712 - protein, 120 aa, Homo sapiens
MGIQGGSVLFGLLLVLAVFCHSGHSLQCYNCPNPTADCKTAVNCSSDFDACLITKAGLQVYNKCWKFEHCNFNDVTTRLRENELTYYCCKKDLCNFNEQLENGGTSLSEKTVLLLVTPFL

SEQ ID NO: 15713 - protein, 39 aa, Homo sapiens
MGLQACLLGLFALILSGKCSYSPEPDQRRTKIPDPRECG

SEQ ID NO: 15714 - protein, 224 aa, Homo sapiens
MRTLFNLLWLALACSPVHTTLSKSDAKKAASKTLLEKSQFSDKPVQDRGLVVTDLKAESVVLEHRSYCSAKARDRHFAGDVLGYVTPWNSHGYDVTKVFGSKFTQISPVWLQLKRRGREMFEARLLALLVIPPAITPGTDQLGMFTHKEFEQLAPVLDGFSLMTYDYSTAHQPGPNAPLSWVRACVQVLDPKSKWRSKILLGLNFYGMDYATSKDAREPVVGAR

SEQ ID NO: 15715 - protein, 950 aa, Homo sapiens
MDYHWRGELGSWRLLLLLLLLAAWKVGSGQLHYSVPEEAKHGTFVGRIAQDLGLELAELVPRLFRVASKRHRDLLEVSLQNGILFVNSRIDREELCGRSAECSIHLEVIVDRPLQVFHVDVEVKDVNDNPPVFRVKDQKLFVSESRMPDSRFPLEGASDADVGANSVLTYRLSSHDYFMLDVNSKNDENKLVELVLRKSLDREDAPAHHLFLTATDGGKPELTGTVQLLVTVLDVNDNAPTFEQSEYEVRIFENADNGTTVIKLNASDPDEGANGAISYSFNSLVETMVIDHFSIDRNTGEIVIRGNLDFEQENLYKILIDATDKGHPPMAGHCTVLVRILDKNDNVPEIALTSLSLPVREDAQFGTVIALISVNDLDSGANGQVTCSLMPHVPFKLVSTFKNYYSLVLDSALDRERVSAYELVVTARDGGSPSLWATASLSVEVADVNDNAPAFAQPEYTVFVKENNPPGCHIFTVSARDADAQENALVSYSLVERRVGERSLSSYISVHTESGKVYALQPLDHEELELLQFQVSARDAGVPPLGSNVTLQVFVLDENDNAPALLEPRVGGTGGAASKLVPRSVGAGHVVAKVRAVDADSGYNAWLSYELQPAASSPRIPFRVGLYTGEISTTRVLDEADSPRHRLLVLVKDHGEPALTATATVLVSLVESGQAPKASSRQSAGVLGPEAALVDVNVYLIIAICAVSSLLVLTLLLYTALRCSALPTEGGCRAGKPTLVCSSAVGSWSYSQQQPQRVCSGEGPPKTDLMAFSPCLPPDLGSVDVGEEQDLNVDHGLKPRQPNPDWRYSASLRAGMHSSVHLEEAGILRAGPGGPDQQWPTVSSATPEPEAGEVSPPVGAGVNSNSWTFKYGPGNPKQSGPGELPDKFIIPGSPAIISIRQEPTNSQIDKSDFITFGKKEETKKKKKKKKGNKTQEKKEKGNSTTDNSDQ

SEQ ID NO: 15716 - protein, 106 aa, Homo sapiens
MAAPGALLVMGTLTLSPRLEYSGVISAHCNLCLLSSSDCHASASGVTGVTGVHHHTQLSFVFLVETGFCHVGRASPELLASSDPPASASQSAGIIGVSQGLNLTWS

SEQ ID NO: 15717 - protein, 298 aa, Homo sapiens
MWSWKCLLFWAVLVTATLCTARPSPTLPEQAQPWGAPVEVESFLVHPGDLLQLRCRLRDDVQSINWLRDGVQLAESNRTRITGEEVEVQDSVPADSGLYACVTSSPSGSDTTYFSVNVSDALPSSEDDDDDDDSSSEEKETDNTKPNRMPVAPYWTSPEKMEKKLHAVPAAKTVKFKCPSSGTPNPTLRWLKNGKEFKPDHRIGGYKVRYATWSIIMDSVVPSDKGNYTCIVENEYGSINHTYQLDVVERSPHRPILQAGLPANKTVALGSNVEFMCKVYSDPQPHIQWLKHIEVNGS

SEQ ID NO: 15718 - protein, 410 aa, Homo sapiens
MEFVKCLGHPEEFYNLVRFRIGGKRKDSLSSSLKTCYKYLNQTSRSFAAVIQALDGEMRNAVCIFYLVLRALDTLEDDMTISVEKKVPLLHNFHSFLYQPDWRFMESKEKDRQVLEDFPTISLEFRNLAEKYQTVIADICRRMGIGMAEFLDKHVTSEQEWDKYCHYVAGLVGIGLSRLFSASEFEDPLVGEDTERANSMGLFLQKTNIIRDYLEDQQGGREFWPQEVWSRYVKKLGDFAKPENIDLAVQCLNELITNALHHIPDVITYLSRLRNQSVFNFCAIPQVMAIATLAACYNNQQVFKGAVKIRKGQAVTLMMDATNMPAVKAIIYQYMEEIYHRIPDSDPSSSKTRQIISTIRTQNLPNCQLISRSHYSPIYLSFVMLLAALSWQYLTTLSQVTEDYVQTGEH

SEQ ID NO: 15719 - protein, 199 aa, Homo sapiens
MTMRHNWTPDLSPLWVLLLCAHVVTLLVRATPVSQTTTAATASVRSTKDPCPSQPPVFPAAKQCPALEVTWPEVEVPLNGTLSLSCVACSRFPNFSILYWLGNGSFIEHLPGRLWEGSTSRERGSTGTQLCKALVLEQLTPALHSTNFSCVLVDPEQVVQRHVVLAQLWVRSPRRGLQEQEELCFHMWGGKGGLCQSSL

SEQ ID NO: 15720 - protein, 659 aa, Homo sapiens
SLLAVVVLLALPVAWGQCNAPEWLPFARPTNLTDEFEFPIGTYLNYECRPGYSGRPFSIICLKNSVWTGAKDRCRRKSCRNPPDPVNGMVHVIKGIQFGSQIKYSCTKGYRLIGSSSATCIISGDTVIWDNETPICDRIPCGLPPTITNGDFISTNRENFHYGSVVTYRCNPGSGGRKVFELVGEPSIYCTSNDDQVGIWSGPAPQCIIPNKCTPPNVENGILVSDNRSLFSLNEVVEFRCQPGFVMKGPRRVKCQALNKWEPELPSCSRVCQPPPDVLHAERTQRDKDNFSPGQEVFYSCEPGYDLRGAASMRCTPQGDWSPAAPTCEVKSCDDFMGQLLNGRVLFPVNLQLGAKVDFVCDEGFQLKGSSASYCVLAGMESLWNSSVPVCEQIFCPNPPAILNGRHTGTPFGDIPYGKEISYACDTHPDRGMTFNLIGESSIRCTSDPQGNGVWSSPAPRCELSVPAACPHPPKIQNGHYIGGHVSLYLPGMTISYICDPGYLLVGKGFIFCTDQGIWSQLDHYCKEVNCSFPLFMNGISKELEMKKVYHYGDYVTLKCEDGYTLEGSPWSQCQADDRWDPPLAKCTSRTHDALIVGTLSGTIFFILLIIFLSWIILKHRKGNNAHENPKEVAIHLHSQGGSSVHPRTLQTNEENSRY

SEQ ID NO: 15721 - protein, 254 aa, Homo sapiens
MNSRQAWRLFLSQGRGDRWVSRPRGHFSPALRREFFTTTTKEGYDRRPVDITPLEQRKLTFDTHALVQDLETHGFDKTQAETIVSALTALSNVSLDTIYKEMVTQAQQEITVQQLMAHLDAIRKDMVILEKSEFANLRAENEKMKIELDQVKQQLMHETSRIRADNKLDINLERSRVTDMFTDQEKQLMETTTEFTKKDTQTKSIISETSNKIDAEIASLKTLMESNKLETIRYLAASVFTCLAIALGFYRFWK

SEQ ID NO: 15722 - protein, 143 aa, Homo sapiens
MWQLWASLCCLLVLANARSRPSFHPLSDELVNYVNKRNTTWQAGHNFYNVDMSYLKRLCGTFLGGPKPPQRVMFTEDLKLPASFDAREQWPQCPTIKEIRDQGSCGSCWAFGAVEAISDRICIHTNAHVSVEVSAEDLLTCCG

SEQ ID NO: 15723 - protein, 167 aa, Homo sapiens
MADQRQRSLSTSGESLYHVLGLDKNATSDDIKKSYRKLALKYHPDKNPDNPEAADKFKEINNAHAILTDATKRNIYDKYGSLGLYVAEQFGEENVNTYFVLSSWWAKALFVFCGLLTCCYCCCCLCCCFNCCCGKCKPKAPEGEETEFYVSPEDLEAQLQSDERGGH

SEQ ID NO: 15724 - protein, 338 aa, Homo sapiens
MYHPAYWVVFSATTALLFIPGVPVRSGDATFPKAMDNVTVRQGESATLRCTIDDRVTRVAWLNRSTILYAGNDKWSIDPRVIILVNTPTQYSIMIQNVDVYDEGPYTCSVQTDNHPKTSRVHLIVQVPPQIMNISSDITVNEGSSVTLLCLAIGRPEPTVTWRHLSVKEGQGFVSEDEYLEISDIKRDQSGEYECSALNDVAAPDVRKVKITVNYPPYISKAKNTGVSVGQKGILSCEASAVPMAEFQWFKEETRLATGLDGMRIENKGRMSTLTFFNVSEKDYGNYTCVATNKLGNTNASITLYGPGAVIDGVNSASRALACLWLSGTLLAHFFIKF

SEQ ID NO: 15725 - protein, 133 aa, Homo sapiens
MRRQWGALLLGALLCAHVLPTCSPLDFHCDNGKCIRRSWVCDGDNDCEDDSDEQDCPPRECEEDEFPCQNGYCIRSLWHCDGDNDCGDNSDEQCDMRKCSDKEFRCSDGSCIAEHWYCDGDTDCKDGSDEENC

SEQ ID NO: 15726 - protein, 45 aa, Homo sapiens
MAYSTVQRVALASGLVLALSLLLPKAFLSRGKRQEPPPTPEEHRL

SEQ ID NO: 15727 - protein, 258 aa, Homo sapiens
MAKYQGEVQSLKLDDDSVIEGVSDQVLVAVVVSFALIATLVYALFRNVHQNIHPENQELVRVLREQLQTEQDAPAATRQQFYTDMYCPICLHQASFPVETNCGHLFCGACIIAYWRYGSWLGAISCPICRQTVTLLLTVFGEDDQSQDVLRLHQDINDYNRRFSGQPRSIMERIMDLPTLLRHAFREMFSVGGLFWMFRIRIILCLMGAFFYLISPLDFVPEALFGILGFLDDFFVIFLLLIYISIMYREVITQRLTR

SEQ ID NO: 15728 - protein, 938 aa, Homo sapiens
MDDSEVESTASILASVKEQEAQFEKLTRALEEERRHVSAQLERVRVSPQDANPLMANGTLTRRHQNGRFVGDADLERQKFSDLKLNGPQDHSHLLYSTIPRMQEPGQIVETYTEEDPEGAMSVVSVETSDDGTTRRTETTVKKVVKTVTTRTVQPVAMGPDGLPVDASSVSNNYIQTLGRDFRKNGNGGPGPYVGQAGTATLPRNFHYPPDGYSRHYEDGYPGGSDNYGSLSRVTRIEERYRPSMEGYRAPSRQDVYGPQPQVRVGGSSVDLHRFHPEPYGLEDDQRSMGYDDLDYGMMSDYGTARRTGTPSDPRRRLRSYEDMIGEEVPSDQYYWAPLAQHERGSLASLDSLRKGGPPPPNWRQPELPEVIAMLGFRLDAVKSNAAAYLQHLCYRNDKVKTDVRKLKGIPVLVGLLDHPKKEVHLGACGALKNISFGRDQDNKIAIKNCDGVPALVRLLRKARDMDLTEVITGTLWNLSSHDSIKMEIVDHALHALTDEVIIPHSGWEREPNEDCKPRHIEWESVLTNTAGCLRNVSSERSEARRKLRECDGLVDALIFIVQAEIGQKDSDSKLVENCVCLLRNLSYQVHREIPQAERYQEAAPNVANNTGPHAASCFGAKKGKDEWFSRGKKPIEDPANDTVDFPKRTSPARGYELLFQPEVVRIYISLLKESKTPAILEASAGAIQNLCAGRWTYGRYIRSALRQEKALSAIADLLTNEHERVVKAASGALRNLAVDARNKELIGKHAIPNLVKNLPGGQQNSSWNFSEDTVISILNTINEVIAENLEAAKKLRETQGIEKLVLINKSGNRSEKEVRAAALVLQTIWGYKELRKPLEKEGWKKSDFQVNLNNASRSQSSHSYDDSTLPLIDRNQKSDKKPDREEIQMSNMGSNTKSLDNNYSTPNERGDHNRTLDRSGDLGDMEPLKGTTPLMKI

SEQ ID NO: 15729 - protein, 56 aa, Homo sapiens
MMVALRGASALLVLFLAAFLPPPQCTQDPAMVHYIYQRFRVLEQGLEKCTQAVTTC

SEQ ID NO: 15730 - protein, 781 aa, Homo sapiens
MWGLVRLLLAWLGGWGCMGRLAAPARAWAGSREHPGPALLRTRRSWVWNQFFVIEEYAGPEPVLIGKLHSDVDRGEGRTKYLLTGEGAGTVFVIDEATGNIHVTKSLDREEKAQYVLLAQAVDRASNRPLEPPSEFIIKVQDINDNPPIFPLGPYHATVPEMSNVGTSVIQVTAHDADDPSYGNSAKLVYTVLDGLPFFSVDPQTGVVRTAIPNMDRETQEEFLVVIQAKDMGGHMGGLSGSTTVTVTLSDVNDNPPKFPQSLYQFSVVETAGPGTLVGRLRAQDPDLGDNALMAYSILDGEGSEAFSISTDLQGRDGLLTVRKPLDFESQRSYSFRVEATNTLIDPAYLRRGPFKDVASVRVAVQDAPEPPAFTQAAYHLTVPENKAPGTLVGQISAADLDSPASPIRYSILPHSDPERCFSIQPEEGTIHTAAPLDREARAWHNLTVLATELDSSAQASRVQVAIQTLDENDNAPQLAEPYDTFVCDSAAPGQLIQVIRALDRDEVGNSSHVSFQGPLGPDANFTVQDNRDGSASLLLPSRPAPPRHAPYLVPIELWDWGQPALSSTATVTVSVCRCQPDGSVASCWPEAHLSAAGLSTGALLAIITCVGALLALVVLFVALRRQKQEALMVLEEEDVRENIITYDDEGGGEEDTEAFDITALQNPDGAAPPAPGPPARRDVLPRARVSRQPRPPGPADVAQLLALRLREADEDPGVPPYDSVQVYGYEGRGSSCGSLSSLGSGSEAGGAPGPAEPLDDWGPLFRTLAELYGAKEPPAP

SEQ ID NO: 15731 - protein, 158 aa, Homo sapiens
RLPLQCVLWGCLLTAVHPEPPTACREKQYLINSQCCSLCQPGQKLVSDCTEFTETECLPCGESEFLDTWNRETHCHQHKYCDPNLGLRVQQKGTSETDTICTCEEGWHCTSEACESCVLHRSCSPGFGVKQIAVRPKTWLCNRQAQTRLMLSVVPRIG

SEQ ID NO: 15732 - protein, 1582 aa, Homo sapiens
MAGPGGWRDREVTDLGHLPDPTGIFSLDKTIGLGTYGRIYLGLHEKTGAFTAVKVMNARKTPLPEIGRRVRVNKYQKSVGWRYSDEEEDLRTELNLLRKYSFHKNIVSFYGAFFKLSPPGQRHQLWMVMELCAAGSVTDVVRMTSNQSLKEDWIAYICREILQGLAHLHAHRVIHRDIKGQNVLLTHNAEVKLVDFGVSAQVSRTNGRRNSFIGTPYWMAPEVIDCDEDPRRSYDYRSDVWSVGITAIEMAEGAPPLCNLQPLEALFVILRESAPTVKSSGWSRKFHNFMEKCTIKNFLFRPTSANMLQHPFVRDIKNERHVVESLTRHLTGIIKKRQKKGIPLIFEREEAIKEQYTVRRFRGPSCTHELLRLPTSSRCRPLRVLHGEPSQPRWLPDREEPQVQALQQLQGAARVFMPLQALDSAPKPLKGQAQAPQRLQGAARVFMPLQAQVKAKASKPLQMQIKAPPRLRRAARVLMPLQAQVRAPRLLQVQSQVSKKQQAQTQTSEPQDLDQVPEEFQGQDQVPEQQRQGQAPEQQQRHNQVPEQELEQNQAPEQPEVQEQAAEPAQAETEAEEPESLRVNAQVFLPLLSQDHHVLLPLHLDTQVLIPVEGQTEGSPQAQAWTLEPPQAIGSVQALIEGLSRDLLRAPNSNNSKPLGPLQTLMENLSSNRFYSQPEQAREKKSKVSTLRQALAKRLSPKRFRAKSSWRPEKLELSDLEARRQRRQRRWEDIFNQHEEELRQVDKDKEDESSDNDEVFHSIQAEVQIEPLKPYISNPKKIEVQERSPSVPNNQDHAHHVKFSSSVPQRSLLEQAQKPIDIRQRSSQNRQNWLAASESSSEEESPVTGRRSQSSPPYSTIDQKLLVDIHVPDGFKVGKISPPVYLTNEWVGYNALSEIFRNDWLTPAPVIQPPEEDGDYVELYDASADTDGDDDDESNDTFEDTYDHANGNDDLDNQVDQANDVCKDHDDDNNKFVDDVNNNYYEAPSCPRASYGRDGSCKQDGYDGSRGKEEAYRGYGSHTANRSHGGSAASEDNAAIGDQEEHAANIGSERRGSEGDGGKGVVRTSEESGALGLNGEENCSETDGPGLKRPASQDFEYLQEEPGGGNEASNAIDSGAAPSAPDHESDNKDISESSTQSDFSANHSSPSKGSGMSADANFASAILYAGFVEVPEESPKQPSEVNVNPLYVSPACKKPLIHMYEKEFTSEICCGSLWGVNLLLGTRSNLYLMDRSGKADITKLIRRRPFRQIQVLEPLNLLITISGHKNRLRVYHLTWLRNKILNNDPESKRRQEEMLKTEEACKAIDKLTGCEHFSVLQHEETTYIAIALKSSIHLYAWAPKSFDESTAIKVCIDQSADSEGDYMSYQAYIRILAKIQAADPVNRFKRPDELLHLLKLKVFPTLDHKPVTVDLAIGSEKRLKIFFSSADGYHLIDAESEVMSDVTLPKNPLEIIIPQNIIILPDCLGIGMMLTFNAEALSVEANEQLFKKILEMWKDIPSSIAFECTQRTTGWGQKAIEVRSLQSRVLESELKRRSIKKLRFLCTRGDKLFFTSTLRNHHSRVYFMTLGKLEELQSNYDV

SEQ ID NO: 15733 - protein, 82 aa, Homo sapiens
MQNPRQYKIPDWFLNRQKDVKDGKYSQVLANGLDNKLREDLERLKKIRAHRGLRHFWGLRVRGQHTKTTGRRGRTVGVSKKK

SEQ ID NO: 15734 - protein, 513 aa, Homo sapiens
MALRAPALLPLLLLLLPLRAAGCPAACRCYSATVECGALRLRVVPLGIPPGTQTLFLQDNNIARLEPGALAPLAALRRLYLHNNSLRALEAGAFRAQPRLLELALTSNRLRGLRSGAFVGLAQLRVLYLAGNQLARLLDFTFLHLPRLQELHLQENSIELLEDQALAGLSSLALLDLSRNQLGTISREALQPLASLQVLRLTENPWRCDCALHWLGAWIKEGGQRLLTSRDRKIMCAEPPRLALQSLLDVSHSSLICIPPSVHVQPLELTANLGEDLRVACQASGYPQPLVTWRKVPQPREGRPRAQAQLEGGLLGLGGHSASDTGSGMLFLSNITLAHAGKYECEASNAGGAARVPFRLLVNASRQQPQQPAQPPPPAARPAGSEPRPEAGSMAFRALGVATQTAIAAAIALLALTALLLVAMICRRRRRRKKARGPPGEGALFVNDYLDGPCTFAQLEELRDERGHEMFVINRSKPLFAEGPAEAPADCGPEQGAGPGLRVPPPVAYEIHC

SEQ ID NO: 15735 - protein, 93 aa, Homo sapiens
MRLLSFVVLALFAVTQAEEGARLLASKSLLNRYAVEGRDLTLQYNIYNVGSSAALDVELSDDSFPPEDFGIVSGMLNVKWDRIAPWTGQPLGS

SEQ ID NO: 15736 - protein, 105 aa, Homo sapiens
MPWPLLLLLAVSGAQTTRPCFPGCQCEVETFGLFDSFSLTRVDCSGLGPHIMPVPIPLDTAHLDLSSNRLEMVNESVLAGPGYTTLAGLDLSHNLLTSISPTAFS

SEQ ID NO: 15737 - protein, 551 aa, Homo sapiens
MNVNIPQLADSLFERTTNSSWVVVFKSLITTHHLMVYGNERFIQYLASRNTLFNLSNFLDKSGLQGYDMSTFIRRYSRYLNEKAVSYRQVAFDFTKVKRGADGVMRTMNTEKLLKTVPIIQNQMDALLDFNVNSNELTNGVINAAFMLLFKDAIRLFAAYNEGIINLLEKYFDMKKNQCKEGLDIYKKFLTRMTRISEFLKVAEQVGIDRGDIPDLSQAPSSLLDALEQHLASLEGKKIKDSTAASRATTLSNAVSSLASTGLSLTKVDEREKQAALEEEQARLKALKEQRLKELAKKPHTSLTTAASPVSTSAGGIMTAPAIDIFSTPSSSNSTSKLPNDLLDLQQPTFHPSVHPMSTASQVASTWGGFTPSPVAQPHPSAGLNVDFESVFGNKSTNVIVDSGGFDELGGLLKPTVASQNQNLPVAKLPPSKLVSDDLDSSLANLVGNLGIGNGTTKNDVNWSQPGEKKLTGGSNWQPKVAPTTAWNAATMAPPVMAYPATTPTGMIGYGIPPQMGSVPVMTQPTLIYSQPVMRPPNPFGPVSGAQIQFM

SEQ ID NO: 15738 - protein, 165 aa, Homo sapiens
MKTLFLGVTLGLAAALSFTLEEEDITGTWYVKAMVVDKDFPEDRRPRKVSPVKVTALGGGKLEATFTFMREDRCIQKKILMRKTEEPGKYSACLSAVEMDQITPALWEALAIDTLRKLRIGTRRPRIRWGQEAHVPAGAAQEGPLHLLLQRPAPWGPAPHGKACG

SEQ ID NO: 15739 - protein, 249 aa, Homo sapiens
MRSLLLLSAFCLLEAALAAEVKKPAAAAAPGTAEKLSPKAATLAERSAGLAFSLYQAMAKDQAVENILVSPVVVASSLGLVSLGGKATTASQAKAVLSAEQLRDEEVHAGLGELLRSLSNSTARNVTWKLGSRLYGPSSVSFADDFVRSSKQHYNCEHSKINFRDKRSALQSINEWAAQTTDGKLPEVTKDVERTDGALLVNAMFFKPHWDEKFHHKMVDNRGFMVTRSYTVGVMMMHRTGLYNYYDDE

SEQ ID NO: 15740 - protein, 262 aa, Homo sapiens
MRPGTALQAVLLAVLLVGLRAATGRLLSGQPVCRGGTQRPCYKVIYFHDTSRRLNFEEAKEACRRDGGQLVSIESEDEQKLIEKFIENLLPSDGDFWIGLRRREEKQSNSTACQDLYAWTDGSISQFRNWYVDEPSCGSEVCVVMYHQPSAPAGIGGPYMFQWNDDRCNMKNNFICKYSDEKPAVPSREAEGEETELTTPVLPEETQEEDAKKTFKESREAALNLAYILIPSIPLLLLLVVTTVVCWVWICRKRQKTGAARP

SEQ ID NO: 15741 - protein, 299 aa, Homo sapiens
MSWIKEGELSLWERFCANIIKAGPMPKHIAFIMDGNRRYAKKCQVERQEGHSQGFNKLAETLRWCLNLGILEVTVYAFSIENFKRSKSEVDGLMDLARQKFSRLMEEKEKLQKHGVCIRVLGDLHLLPLDLQELIAQAVQATKNYNNDISESLLDKCLYTNRSPHPDILIRTSGEVRLSDFLLWQTSHSCLVFQPVLWPEYTFWNLFEAILQFQMNHSVLQKARDMYAEERKRQQLERDQATVTEQLLREGLQASGDAQLRRTRLHKLSARREERVQGFLQALELKRADWLARLGTASA

SEQ ID NO: 15742 - protein, 425 aa, Homo sapiens
MGEEANDDKKPTTKFELERETELRFEVEASQSVQLELLTGMAEIFGTELTRNKKFTFDAGAKVAVFTWHGCSVQLSGRTEVAYVSKDTPMLLYLNTHTALEQMRRQAEKEEERGPRVMVVGPTDVGKSTVCRLLLNYAVRLGRRPTYVELDVGQGSVSIPGTMGALYIERPADVEEGFSIQAPLVYHFGSTTPGTNIKLYNKITSRLADVFNQRCEVNRRASVSGCVINTCGWVKGSGYQALVHAASAFEVDVVVVLDQERLYNELKRDLPHFVRTVLLPKSGGVVERSKDFRRECRDERIREYFYGFRGCFYPHAFNVKFSDVKIYKVGAPTIPDSCLPLGMSQEDNQLKLVPVTPGRDMVHHLLSVSTAEGTEENLSETSVAGFIVVTSVDLEHQVFTVLSPAPRPLPKNFLLIMDIRFMDLK

SEQ ID NO: 15743 - protein, 30 aa, Homo sapiens
MGLQACLLGLFALILSGKCSYSPEPDQRRT

SEQ ID NO: 15744 - protein, 100 aa, Homo sapiens
MRPRGLPPLLVVLLGCWASVSAQTDATPAVTTEGLNSTEAALATFGTFPSTRPPGTPRAPGPSSGPRPTPVTDGGYHVPAPGVHSDPTSRGQPRCCSLCL

SEQ ID NO: 15745 - protein, 134 aa, Homo sapiens
MAPVKISHVVSFSSQDPKYPVENLLNPDSPRRPWLGCPQDKSGQLKVELQLERAVPTGYIDVGNCGCAFLQIDVGHSSWPLDRPFITLLPATTLMSLTDSKQGKNRSGVRMFKDGVVAHACNPSTLGDWDKWII

SEQ ID NO: 15746 - protein, 889 aa, Homo sapiens
MELVKAALAEALRLLRLQVPPSSLQGSGTPAPPGDSSLAAPPGLPPTCTPSLVSRGTQTETEVELKSSPGPPGLSNGPPAPQGASEEPSGTQSEGGGSSSSGAGSPGPPGILRPLQPPQRADTPRRNSSSSSSPSERPRQKLSRKAISSANLLVRSGSTESRGGKDPLSSPGGPGSRRSNYNLEGISVKMFLRGRPITMYIPSGIRSLEELPSGPPPETLSLDWVYGYRGRDSRSNLFVLRSGEVVYFIACVVVLYRPGGGPGGPGGGGQRHYRGHTDCVRCLAVHPDGVRVASGQTAGVDKDGKPLQPVVHIWDSETLLKLQEIGLGAFERGVGALAFSAADQGAFLCVVDDSNEHMLSVWDCSRGMKLAEIKSTNDSVLAVGFNPRDSSCIVTSGKSHVHFWNWSGGVGVPGNGTLTRKQGVFGKYKKPKFIPCFVFLPDGDILTGDSEGNILTWGRSPSDSKTPGRGGAKETYGIVAQAHAHEGSIFALCLRRDGTVLSGGGRDRRLVQWGPGLVALQEAEIPEHFGAVRAIAEGLGSELLVGTTKNALLRGDLAQGFSPVIQGHTDELWGLCTHPSQNRFLTCGHDRQLCLWDGESHALAWSIDLKETGLCADFHPSGAVVAVGLNTGRWLVLDTETREIVSDVIDGNEQLSVVRYSPDGLYLAIGSHDNVIYIYSVSSDGAKSSRFGRCMGHSSFITHLDWSKDGNFIMSNSGDYEILYWDVAGGCKQLKNRYESRDREWATYTCVLGFHVYVPVRSCQGAEPHVRGPRQPRDQRPIHARRLAPRLAGRQGRQHLPVASAGRWGRGAGARHALSNPLPVPRLLPRRLIAAWRDRLARRRGPAPPCPSLAQSPTTRGRLFPGLTSRHSRSRIFLEGANGAPAHTV

SEQ ID NO: 15747 - protein, 165 aa, Homo sapiens
MWQLWASLCCLLVLANARSRPSFHPLSDELVNYVNKRNTTWQAGHNFYNVDMSYLKRLCGTFLGGPKPPQRVMFTEDLKLPASFDAREQWPQCPTIKEIRDQGSCGSCWAFGAVEAISDRICIHTNAHVSVEVSAEDLLTCCGSMCGDGCNGGYPAEAWNFWTRK

SEQ ID NO: 15748 - protein, 113 aa, Homo sapiens
MPSRLRKTRKLRGHVSHGHGRIGKHRKHPGGRGNAGGLHHHRINFDKYEQTRVNAAKNKTGAAPIIDVVRSGYYKVLGKGKLPKQPVIVKAKFFSRRAEEKIKSVGGACVLVA

SEQ ID NO: 15749 - protein, 190 aa, Homo sapiens
MGSWALLWPPLLFTGLLVRPPGTMAQAQYCSVNKDIFEVEENTNVTEPLVDIHVPEGQEVTLGALSTPFAFRIQGNQLFLNVTPDYEEKSLLEAQLLCQSGGTLDTKVNSTVIPETQLQAEDRDKDDILFYTLQEMTAGASDYFSLVSVNRPALRLDRPLDFYERPNMTFWLLVRPSVAGHSGGECGTQP

SEQ ID NO: 15750 - protein, 600 aa, Homo sapiens
MKPFQLDLLFVCFFLFSQELGLQKRGCCLVLGYMAKDKFRRMNEGQVYSFSQQPQDQVVVSGQPVTLLCAIPEYDGFVLWIKDGLALGVGRDLSSYPQYLVVGNHLSGEHHLKILRAELQDDAVYECQAIQAAIRSRPARLTVLVPPDDPVILGGPVISLRAGDPLNLTCHADNAKPAASIIWLRKGEVINGATYSKTLLRDGKRESIVSTLFISPGDVENGQSIVCRATNKAIPGGKETSVTIDIQHPPLVNLSVEPQPVLEDNVVTFHCSAKANPAVTQYRWAKRGQIIKEASGEVYRTTVDYTYFSEPVSCEVTNALGSTNLSRTVDVYFGPRMTTEPQSLLVDLGSDAIFSCAWTGNPSLTIVWMKRGSGVVLSNEKTLTLKSVRQEDAGKYVCRAVVPRVGAGEREVTLTVNGPPIISSTQTQHALHGEKGQIKCFIRSTPPPDRIAWSWKENVLESGTSGRYTVETISTEEGVISTLTISNIVRADFQTIYNCTAWNSFGSDTEIIRLKEQGSEMKSGAGLEAESVPMAVIIGVAVGAGVAFLVLMATIVAFCCARSQRSTGGRSGISGRGTEKKARLRLPRRASKQECNEQGS

SEQ ID NO: 15751 - protein, 174 aa, Homo sapiens
LGSRDSALLWQLLVLLCRQNGSMVGSDIAELLMQDCKKLEKYKRQPPVANLINLTDEDWPVLSSGTPNLLTGEIPPSVETPAQIVEKFTRLLYYGRKKCCGEKQWGDWRPHLAVILSNQAGDPELYQRAIVAIGDTLAGKGLVEAAHFCYLMAHVPFGHYTVKTDHLVLLGSSH

SEQ ID NO: 15752 - protein, 107 aa, Homo sapiens
MSSPQAPEDGQGCGDRGDPPGDLRSVLVTTVLNLEPLDEDLFRGPEAASTVPSGADTNRVELLGALCEGRATWEAHLHLPGLLPAGPAQPHAAPVLHAHCATTRRAA

SEQ ID NO: 15753 - protein, 212 aa, Homo sapiens
MVEMLPTAILLVLAVSVVAKDNATCDGPCGLRFRQNPQGGVRIVGGKAAQHGAWPWMVSLQIFTYNSHRYHTCGGSLLNSRWVLTAAHCFVGKNNVHDWRLVFGAKEITYGNNKPVKAPLQERYVEKIIIHEKYNSATEGNDIALVEITPPISCGRFIGPGCLPHFKAGLPRGSQSCWVAGWGYIEEKGFLECPAGTSPFKTGVAVALELCP

SEQ ID NO: 15754 - protein, 56 aa, Homo sapiens
MIGDILLFGTLLMNAGAVLNFKLKKKDTQGFGEESREPSTGWSAVVRSWLTADSTS

SEQ ID NO: 15755 - protein, 150 aa, Homo sapiens
MPWPLLLLLAVSGAQTTRPCFPGCQCEVETFGLFDSFSLTRVDCSGLGPHIMPVPIPLDTAHLDLSSNRLEMVNESVLAGPGYTTLAGLDLSHNLLTSISPTAFSRLRYLESLDLSHNGLTALPAESFTSSPLSDVNLSHNQLREVSVSA

SEQ ID NO: 15756 - protein, 694 aa, Homo sapiens
MDLHKQWENTETNWHKEKMELLDQFDNERKEWESQWKIMQKKIEELCREVKLWRKININESAKIIDLYHEKTIPEKVIESSPNYPDLGQSEFIRTNHKDGLRKENKREQSLVSGGNQMCKEQKATKKSKVGFLDPLATDNQKECEAWPDLRTSEEDSKSCSGALSTALEELAKVSEELCSFQEEIRKRSNHRRMKSDSFLQEMPNVTNIPHGDPMINNDQCILPISLEKEKQKNRKNLSCTNVLQSNSTKKCGIDTIDLKRNETPPVPPPRSTSRNFPSSDSEQAYERWKERLDHNSWVPHEGRSKRNYNPHFPLRQQEMSMLYPNEGKTSKDGIIFSSLVPEVKIDSKPPSNEDVGLSMWSCDIGIGAKRSPSTSWFQKTCSTPSNPKYEMVIPDHPAKSHPDLHVSNDCSSSVAESSSPLRNFSCGFERTTRNEKLAAKTDEFNRTVFRTDRNCQAIQQNHSCSKSSEDLKPCDTSSTHTGSISQSNDVSGIWKTNAHMPVPMENVPDNPTKKSTTGLVRQMQGHLSPRSYRNMLHEHDWRPSNLSGRPRSADPRSNYGVVEKLLKTYETATESALQNSKCFQDNWTKCNSDVSGGATLSQHLEMLQMEQQFQQKTAVWGGQEVKQGIDPKKITEESMSVNASHGKGFSRPARPANRRLPSRWASRSPSAPPALRRTTHNYTISLRSEALMV

SEQ ID NO: 15757 - protein, 198 aa, Homo sapiens
MRWRTILLQYCFLLITCLLTALEAVPIDIDKTKVQNIHPVESAKIEPPDTGLYYDEYLKQVIDVLETDKHFREKLQKADIEEIKSGRLSKELDLVSHHVRTKLDELKRQEVGRLRMLIKAKLDSLQDIGMDHQALLKQFDHLNHLNPDKFESTDLDMLIKAATSDLEHYDKTRHEEFKKYEMMKEHERREYLKTLNEE

SEQ ID NO: 15758 - protein, 99 aa, Homo sapiens
MGAPGGKINRPRTELKKKLFKRRRVLNRERRLRHRVVGAVIDQGLITRHHLKKRASSARANITLSGKKRRKLLQQIRLAQKEKTAMEVLRSCPRKSRLF

SEQ ID NO: 15759 - protein, 195 aa, Homo sapiens
MQRNASVPNLRGSEERLLALKKPALPALSRTTELQDELSHLRSQIAKIVAADAASASLTPDFLSPGSSNVSSPLPCFGSSFHSTTSFVISDITEETEVEVPELPSVPLLCSASPECCKPEHKAACSSSEEDDCVSLSKASSFADMMGILKDFHRMKQSQDLNRSLLKEEDPAVLISEVLRRKFALKEEDISRKGN

SEQ ID NO: 15760 - protein, 920 aa, Homo sapiens
MGRSNSRSHSSRSKSRSQSSSRSRSRSHSRKKRYSSRSRSRTYSRSRSRDRMYSRDYRRDYRNNRGMRRPYGYRGRGRGYYQGGGGRYHRGGYRPVWNRRHSRSPRRGRSRSRSPKRRSVSSQRSRSRSRRSYRSSRSPRSSSSRSSSPYSKSPVSKRRGSQEKQTKKAEGEPQEESPLKSKSQEEPKDTFEHDPSESIDEFNKSSATSGDIWPGLSAYDNSPRSPHSPSPIATPPSQSSSCSDAPMLSTVHSAKNTPSQHSHSIQHSPERSGSGSVGNGSSRYSPSQNSPIHHIPSRRSPAKTIAPQNAPRDESRGRSSFYPDGGDQETAKTGKFLKRFTDEESRVFLLDRGNTRDKEASKEKGSEKGRAEGEWEDQEALDYFSDKESGKQKFNDSEGDDTEETEDYRQFRKSVLADQGKSFATASHRNTEEEGLKYKSKVSLKGNRESDGFREEKNYKLKETGYVVERPSTTKDKHKEEDKNSERITVKKETQSPEQVKSEKLKDLFDYSPPLHKNLDAREKSTFREESPLRIKMIASDSHRPEVKLKMAPVPLDDSNRPASLTKDRLLASTLVHSVKKEQEFRSIFDHIKLPQASKSTSESFIQHIVSLVHHVKEQYFKSAAMTLNERFTSYQKATEEHSTRQKSPEIHRRIDISPSTLRKHTRLAGEERVFKEENQKGDKKLRCDSADLRHDIDRRRKERSKERGDSKGSRESSGSRKQEKTPKDYKEYKSYKDDSKHKREQDHSRSSSSSASPSSPSSREEKESKKEREEEFKTHHEMKEYSGFAGVSRPRGTFFRIRGRGRARGVFAGTNTGPNNSNTTFQKRPKEEEWDPEYTPKSKKYFLHDDRDDGVDYWAKRGRGRGTFQRGRGRFNFKKSGSSPKWTHDKYQGDGIVEDEEETMENNEEKKDRRKEEKE

SEQ ID NO: 15761 - protein, 426 aa, Homo sapiens
IEPSSWSGSESPAENMERMSDSADKPIDNDAEGVWSPDIEQSFQEALAIYPPCGRRKIILSDEGKMYGRNELIARYIKLRTGKTRTRKQVSSHIQVLARRKSRDFHSKLKDQTAKDKALQHMAAMSSAQIVSATAIHNKLGLPGIPRPTFPGAPGFWPGMIQTGQPGSSQDVKPFVQQAYPIQPAVTAPIPGFEPASAPAPSVPAWQGRSIGTTKLRLVEFSAFLEQQRDPDSYNKHLFVHIGHANHSYSDPLLESVDIRQIYDKFPEKKGGLKELFGKGPQNAFFLVKFWADLNCNIQDDAGAFYGVTSQYESSENMTVTCSTKVCSFGKQVVEKVETEYARFENGRFVYRINRSPMCEYMINFIHKLKHLPEKYMMNSVLENFTILLVVTNRDTQETLLCMACVFEVSNSEHGAQHHIYRLVKD

SEQ ID NO: 15762 - protein, 143 aa, Homo sapiens
MVKLFIGNLPREATEQEIRSLFEQYGKVLECDIIKNYGFVHIEDKTAAEDAIRNLHHYKLHGVNINVEASKNKSKASTKLHVGNISPTCTNQELRAKFEEYGPVIECDIVKDYAFVHMERAEDAVEAIRGLDNTEFQGRIIAD

SEQ ID NO: 15763 - protein, 43 aa, Homo sapiens
MAYSTVQRVALASGLVLALSLLLPKAFLSRGKRQEPPPTPEEN

SEQ ID NO: 15764 - protein, 61 aa, Homo sapiens
MWSWKCLLFWAVLVTATLCTARPSPTLPEQACPDLQEAKWCSASFHSITPLPFGLGTRLSD

SEQ ID NO: 15765 - protein, 42 aa, Homo sapiens
MKSLPILLLLCVAVCSAYPLDGAAREISRKLLRPQKRCETVC

SEQ ID NO: 15766 - protein, 427 aa, Homo sapiens
MSLHGASGGHERSRDRRRSSDRSRDSSHERTESQLTPCIRNVTSPTRQHHVEREKDHSSSRPSSPRPQKASPNGSISSAGNSSRNSSQSSSDGSCKTAGEMVFVYENAKEGARNIRTSERVTLIVDNTRFVVDPSIFTAQPNTMLGRMFGSGREHNFTRPNEKGEYEVAEGIGSTVFRAILDYYKTGIIRCPDGISIPELREACDYLCISFEYSTIKCRDLSALMHELSNDGARRQFEFYLEEMILPLMVASAQSGERECHIVVLTDDDVVDWDEEYPPQMGEEYSQIIYSTKLYRFFKYIENRDVAKSVLKERGLKKIRLGIEGYPTYKEKVKKRPGGRPEVIYNYVQRPFIRMSWEKEEGKSRHVDFQCVKSKSITNLAAAAADIPQDQLVVMHPTPQVDELDILPIHPPSGNSDLDPDAQNPML

SEQ ID NO: 15767 - protein, 234 aa, Homo sapiens
MQRLGATLLCLLLAAAVPTAPAPAPTATSAPVKPGPALSYPQEEATLNEMFREVEELMEDTQHKLRSAVEEMEAEEAAAKASSEVNLANLPPSYHNETNTDTKVGNNTIHVHREIHKITNNQTGQMVFSETVITSVGDEEGRRSHECIIDEDCGPSMYCQFASFQYTCQPCRGQRMLCTRDSECCGDQLCVWGHCTKMATRGSNGTICDNQRDCQPGLCCAFQRGLLFPVCTPL

SEQ ID NO: 15768 - protein, 953 aa, Homo sapiens
MAMEPGALWTFLGHLWLLAGPTCEEDVDECLSDPCLHGGTCSDTVAGYICRCPETWGGRDCSVQLTGCQGHTCPLAATCIPIFESGVHSYVCHCPPGTHGPFCGQNTTFSVMAGSPIQASVPAGGPLGLALRFRTTLPAGTLATRNDTKESLELALVAATLQATLWSYSTTVLVLRLPDLALNDGHWHQVEVVLHLATLELRLWHEGCPARLCVASGPVALASTASATPLPAGISSAQLGDATFAGCLQDVRVDGHLLLPEDLGENVLLGCERREQCRPLPCVHGGSCVDLWTHFRCDCARPHRGPTCADEIPAATFGLGGAPSSASFLLQELPGPNLTVSFLLRTRESAGLLLQFANDSAAGLTVFLSEGRIRAEVPGSPAVVLPGRWDDGLRHLVMLSFGPDQLQDLGQHVHVGGRLLAADSQPWGGPFRGCLQDLRLDGCHLPFFPLPLDNSSQPSELGGRQSWNLTAGCVSEDMCSPDPCFNGGTCLVTWNDFHCTCPANFTGPTCAQQLWCPGQPCLPPATCEEVPDGFVCVAEATFREGPPAAFSGHNASSGRLLGGLSLAFRTRDSEAWLLRAAAGALEGVWLAVRNGSLAGGVRGGHGLPGAVLPIPGPRVADGAWHRVRLAMERPAATTSRWLLWLDGAATPVALRGLASDLGFLQGPGAVRILLAENFTGCLGRVALGGLPLPLARPRPGAAPGAREHFASWPGTPAPILGCRGAPVCAPSPCLHDGACRDLFDAFACACGPGWEGPRCEAHVDPCHSAPCARGRCHTHPDGRFECRCPPGFGGPRCRLPVPSKECSLNVTCLDGSPCEGGSPAANCSCLEGLAGQRCQVPTLPCEANPCLNGGTCRAAGGVSECICNARFSGQFCEVAKGLPLPLPFPLLEVAVPAACACLLLLLLGLLSGILAARKRRQSEGTYSPSQQEVAGARLEMDSVLKVPPEERLI

SEQ ID NO: 15769 - protein, 179 aa, Homo sapiens
MRALVLLLSLFLLGGQAQHVSDWTYSEGALDEAHWPQHYPACGGQRQSPINLQRTKVRYNPSLKGLNMTGYETQAGEFPMVNNGHTDWQAELFLPSLSSPCGEGAKHKGQRQWLCSPSLDSWWEAIIDGGSLWATLAECGLRAEGPEEGRHMEEKSPASQGACSGSRLPISRGPCTFFL

SEQ ID NO: 15770 - protein, 155 aa, Homo sapiens
MLLPLLLSSLLGVLSFTPRPQDHNTDLTCHVDFSRKGVSAQRTVRLRVAYAPRDLVISISRDNTPALEPQPQGNVPYLEAQKGQFLRLLCAADSQPPATLSWVLQNRVLSSSHPWGPRPLGLELPGVKAGDSGRYTCRAENRLGSQQRALDLSVQ

SEQ ID NO: 15771 - protein, 142 aa, Homo sapiens
MWSWKCLLFWAVLVTATLCTARPSPTLPEQDALPSSEDDDDDDDSSSEEKETDNTKPNRMPVAPYWTSPEKMEKKLHAVPAAKTVKFKCPSSGTPNPTLRWLKNGKEFKPDHRIGGYKVRYATWSIIMDSVVPSDKGNYTCI

SEQ ID NO: 15772 - protein, 229 aa, Homo sapiens
MSQGDSNPAAIPHAAEDIQGDDRWMSQHNRFVLDCKDKEPDVLFVGDSMVQLMQQYEIWRELFSPLHALNFGIGGDTTRHVLWRLKNGELENIKPKVIVVWVGTNNHENTAEEVAGGIEAIVQLINTRQPQAKIIVLGLLPRGEKPNPLRQKNAKVNQLLKVSLPKLANVQLLDTDGGFVHSDGAISCHDMFDFLHLTGGGYAKICKPLHELIMQLLEETPEEKQTTIA

SEQ ID NO: 15773 - protein, 947 aa, Homo sapiens
MEFSWGSGQESRRLLLLLLLLAAWEAGNGQLHYSVSEEAKHGTFVGRIAQDLGLELAELVPRLFRVASKGRGGLLEVNLQNGILFVNSRIDREELCRRSAECSIHLEVIVDRPLQVFHVDVEVRDINDNPPVFPATQKNLSIAESRPLDSRFPLEGASDADIGENALLTYRLSPNEYFSLEKPPDDELVKGLGLILRKSLDREEAPEIFLVLTATDGGKPELTGTVQLLITVLDANDNAPAFDRTIYKVRLLENVPNGTLVIKLNASDLDEGLNGDIVYSFSNDISPNVKSKFHIDPITGQIIVKGYIDFEESKSYEIIVEGIDKGQLPLSGHCRVIVEVEDNNDNVPDLEFKSLSLPIREDAPLGTVIALISVSDKDMGVNGLVTCSLTSHVPFKLVSTFKNYYSLVLDSALDRESVSAYELVVTARDGGSPSLWATASVSVEVADVNDNAPAFAQPEYTVFVKENNPPGCHIFTVSAWDADAQENALVSYSLVERRVGERALSSYVSVHAESGKVYALQPLDHEELELLQFQVTARDAGVPPLGSNVTLQVFVLDENDNAPALLAPRAGGTGGAVSELVPWSVGVGHVVAKVRAVDADSGYNAWLSYELQPGTGGARIPFRVGLYTGEISTTRALDETDAPRHRLLVLVKDHGEPALTATATVLVSLVESGQAPKASSRALVGAVGPDAALVDVNVYLIIAICAVSSLLVLTLLLYTALRCSALPTEGACAPGKPTLVCSSAVGSWSYSQQRRPRVCSGEGPPKTDLMAFSPSLPDSRDREDQLQTTEESFAKPRQPNPDWRYSASLRAGMHSSVHLEEAGILRAGPGGPDQQWPTVSSATPEPEAGEVSPPVGAGVNSNSWTFKYGPGNPKQSGPGELPDKFIIPGSPAIISIRQEPTNSQIDKSDFITFGKKEETKKKKKKKKGNKTQEKKEKGNSTTDNSDQ

SEQ ID NO: 15774 - protein, 94 aa, Homo sapiens
MLPCLVVLLAALLSLRLGSDAHGTELPSPPSVWFEAEFFHHILHWTPIPNQSESTCYEVALLSDSDSWQCEPRDPQWLHPREDSATQAQDGPRK

SEQ ID NO: 15775 - protein, 191 aa, Homo sapiens
CIVVLWYGWLHFYAEPKYLIVVRPAPPPSQKKSCSGKTRSRKPLQLVVGTLTPSSVFLSWGFLINPHHDWTLPSHCPNDRFYTIRYREKDKEKKWIFQICPATETIVENLKPNTVYEFGVKDNVEGGIWSKIFNHKTVVGSKKVNGKIQSTYDQDHTVPAYVPRKLIPITIIKQVIQNVTHKDSAKSPEKA

SEQ ID NO: 15776 - protein, 630 aa, Homo sapiens
MPRYGASLRQSCPRSGREQGQDGTAGAPGLLWMGLVLALALALALALALSDSRVLWAPAEAHPLSPQGHPARLHRIVPRLRDVFGWGNLTCPICKGLFTAINLGLKEPNVARVGSVAIKLCNLLKIAPPAVCQSIVHLFEDDMVEVWRRSVLSPSEACGLLLGSTCGHWDIFSSWNISLPTVPKPPPKPPSPPAPGAPVSRILFLTDLHWDHDYLEGTDPDCADPLCCRRGSGLPPASRPGAGYWGEYSKCDLPLRTLESLLSGLGPAGPFDMVYWTGDIPAHDVWHQTRQDQLRALTTVTALVRKFLGPVPVYPAVGNHESTPVNSFPPPFIEGNHSSRWLYEAMAKAWEPWLPAEALRTLRIGGFYALSPYPGLRLISLNMNFCSRENFWLLINSTDPAGQLQWLVGELQAAEDRGDKVHIIGHIPPGHCLKSWSWNYYRIVARYENTLAAQFFGHTHVDEFEVFYDEETLSRPLAVAFLAPSATTYIGLNPGYRVYQIDGNYSGSSHVVLDHETYILNLTQANIPGAIPHWQLLYRARETYGLPNTLPTAWHNLVYRMRGDMQLFQTFWFLYHKGHPPSEPCGTPCRLATLCAQLSARADSPALCRHLMPDGSLPEAQSLWPRPLFC

SEQ ID NO: 15777 - protein, 584 aa, Homo sapiens
MAGDGRRAEAVREGWGVYVTPRAPIREGRGRLAPQNGGSSDAPAYRTPPSRQGRREVRFSDEPPEVYGDFEPLVAKERSPVGKRTRLEEFRSDSAKEEVRESAYYLRSRQRRQPRPQETEEMKTRRTTRLQQQHSEQPPLQPSPVMTRRGLRDSHSSEEDEASSQTDLSQTISKKTVRSIQEAPAVSEDLVIRLRRPPLRYPRYEATSVQQKVNFSEEGETEEDDQDSSHSSVTTVKARSRDSDESGDKTTRSSSQYIESFWQSSQSQNFTAHDKQPSVLSSGYQKTPQEWAPQTARIRTRMQNDSILKSELGNQSPSTSSRQVTGQPQNASFVKRNRWWLLPLIAALASGSFWFFSTPEVETTAVQEFQNQMNQLKNKYQGQDEKLWKRSQTFLEKHLNSSHPRSQPAILLLTAARDAEEALRCLSEQIADAYSSFRSVRAIRIDGTDKATQDSDTVKLEVDQELSNGFKNGQNAAVVHRFESFPAGSTLIFYKYCDHENAAFKDVALVLTVLLEEETLGTSLGLKEVEEKVRDFLKVKFTNSNTPNSYNHMDPDKLNGLWSRISHLVLPVQPENALKRGICL

SEQ ID NO: 15778 - protein, 78 aa, Homo sapiens
MDKFWWHAAWGLCLVPLSLAQIDLNITCRFAGVFHVEKNGRYSISRTEAADLCKAFNSTLPTMAQMEKALSIGFETCR

SEQ ID NO: 15779 - protein, 202 aa, Homo sapiens
MLPCASCLPGSLLLWALLLLLLGSASPQDSEEPDSYTECTDGYEWDPDSQHCRDVNECLTIPEACKGEMKCINHYGGYLCLPRSAAVINDLHGEGPPPPVPPAQHPNPCPPGYEPDDQDSCVDVDECAQALHDCRPSQDCHNLPGSYQCTCPDGYRKIGPECVDIDECRYRYCQHRCVNLPGSFRCQCEPGFQLGPNNRSCV

SEQ ID NO: 15780 - protein, 175 aa, Homo sapiens
MLSEEEKEELKAELVQLEDEITTLRQVLSAKERHLVEIKQKLGMNLMNELKQNFSKSWHDMQTTTAYKKTHETLSHAGQKATAAFSNVGTAISKKFGDMSYSIRHSISMPAMRNSPTFKSFEERVETTVTSLKTKVGGTNPNGGSFEEVLSSTAHASAQSLAGGSRRTKEEELQC

SEQ ID NO: 15781 - protein, 247 aa, Homo sapiens
MRSLLLLSAFCLLEAALAAEVKKPAAAAAPGTAEKLSPKAATLAERSAGLAFSLYQAMAKDQAVENILVSPVVVASSLGLVSLGGKATTASQAKAVLSAEQLRDEEVHAGLGELLRSLSNSTARNVTWKLGSRLYGPSSVSFADDFVRSSKQHYNCEHSKINFRDKRSALQSINEWAAQTTDGKLPEVTKDVERTDGALLVNAMFFKPHWDEKFHHKMVDNRGFMVTRSYTVGVMMMHRTGLYNYYD

SEQ ID NO: 15782 - protein, 234 aa, Homo sapiens
MAPRRARGCRTLGLPALLLLLLLRPPATRGITCPPPMSVEHADIWVKSYSLYSRERYICNSGFKRKAGTSSLTECVLNKATNVAHWTTPSLKCIKPAASSPSSNNTAATTAAIVPGSQLMPSKSPSTGTTEISSHESSHGTPSQTTAKNWELTASASHQPPGVYPQGHSDTTVAISTSTVLLCGLSAVSLLACYLKSRQTPPLASVEMEAMEALPVTWGTSSRDEDLENCSHHL

SEQ ID NO: 15783 - protein, 778 aa, Homo sapiens
MKPFQLDLLFVCFFLFSQELGLQKRGCCLVLGYMAKDKFRRMNEGQVYSFSQQPQDQVVVSGQPVTLLCAIPEYDGFVLWIKDGLALGVGRDLSSYPQYLVVGNHLSGEHHLKILRAELQDDAVYECQAIQAAIRSRPARLTVLVPPDDPVILGGPVISLRAGDPLNLTCHADNAKPAASIIWLRKGEVINGATYSKTLLRDGKRESIVSTLFISPGDVENGQSIVCRATNKAIPGGKETSVTIDIQHPPLVNLSVEPQPVLEDNVVTFHCSAKANPAVTQYRWAKRGQIIKEASGEVYRTTVDYTYFSEPVSCEVTNALGSTNLSRTVDVYFGPRMTTEPQSLLVDLGSDAIFSCAWTGNPSLTIVWMKRGSGVVLSNEKTLTLKSVRQEDAGKYVCRAVVPRVGAGEREVTLTVNGPPIISSTQTQHALHGEKGQIKCFIRSTPPPDRIAWSWKENVLESGTSGRYTVETISTEEGVISTLTISNIVRADFQTIYNCTAWNSFGSDTEIIRLKEQGSEMKSGAGLEAESVPMAVIIGVAVGAGVAFLVLMATIVAFCCARSQRNLKGVVSAKNDIRVEIVHKEPASGREGEEHSTIKQLMMDRGEFQQDSVLKQLEVLKEEEKEFQNLKDPTNGYYSVNTFKEHHSTPTISLSSCQPDLRPAGKQRVPTGMSFTNIYSTLSGQGRLYDYGQRFVLGMGSSSIELCEREFQRGSLSDSSSFLDTQCDSSVSSSGKQDGYVQFDKASKASASSSHHSQSSSQNSDPSRPLQRRMQTHV

SEQ ID NO: 15784 - protein, 59 aa, Homo sapiens
MRKMNTLLLVSLSFLYLKEGDKHMYSTHMCKYKCREEESSKRGLLRVTLCCDRNFCNVF

SEQ ID NO: 15785 - protein, 740 aa, Homo sapiens
MLLWLLLLILTPGREQSGVAPKAVLLLNPPWSTAFKGEKVALICSSISHSLAQGDTYWYHDEKLLKIKHDKIQITEPGNYQCKTRGSSLSDAVHVEFSPDWLILQALHPVFEGDNVILRCQGKDNKNTHQKVYYKDGKQLPNSYNLEKITVNSVSRDNSKYHCTAYRKFYILDIEVTSKPLNIQVQELFLHPVLRASSSTPIEGSPMTLTCETQLSPQRPDVQLQFSLFRDSQTLGLGWSRSPRLQIPAMWTEDSGSYWCEVETVTHSIKKRSLRSQIRVQRVPVSNVNLEIRPTGGQLIEGENMVLICSVAQGSGTVTFSWHKEGRVRSLGRKTQRSLLAELHVLTVKESDAGRYYCAADNVHSPILSTWIRVTVRTLLSPSVPVSHPVLTFRAPRAHTVVGDLLELHCESLRGSPPILYRFYHEDVTLGNSSAPSGGGASFNLSLTAEHSGNYSCDADNGLGAQHSHGVSLRVTVPVSRPVLTLRAPGAQAVVGDLLELHCESLRGSFPILYWFYHEDDTLGNISAHSGGGASFNLSLTTEHSGNYSCEADNGLGAQHSKVVTLNVTGTSRNRTGLTAAGITGLVLSILVLAAAAALLHYARARRKPGGLSATGTSSHSPSECQEPSSSRPSRIDPQEPTHSKPLAPMELEPMYSNVNPGDSNPIYSQIWSIQHTKENSANCPMMHQEHEELTVLYSELKKTHPDDSAGEASSRGRAHEEDDEENYENVPRVLLASDH

SEQ ID NO: 15786 - protein, 610 aa, Homo sapiens
MLDFFTIFSKGGLVLWCFQGVSDSCTGPVNALIRSVLLQVGFQKILTLTYVDKLIDDVHRLFRDKYRTEIQQQSALSLLNGTFDFQNDFLRLLREAEESSKIRAPTTMKKFEDSEKAKKPVRSMIETRGEKPKEKAKNSKKKGAKKEGSDGPLATSKPVPAEKSGLPVGPENGVELSKEELIRRKREEFIQKHGRGMEKSNKSTKSDAPKEKGKKAPRVWELGGCANKEVLDYSTPTTNGTPEAALSEDINLIRGTGSGGQLQDLDCSSSDDEGAAQNSTKPSATKGTLGGMFGMLKGLVGSKSLSREDMESVLDKMRDHLIAKNVAADIAVQLCESVANKLEGKVMGTFSTVTSTVKQALQESLVQILQPQRRVDMLRDIMDAQRRQRPYVVTFCGVNGVGKSTNLAKISFWLLENGFSVLIAACDTFRAGAVEQLRTHTRRLSALHPPEKHGGRTMVQLFEKGYGKDAAGIAMEAIAFARNQGFDVVLVDTAGRMQDNAPLMTALAKLITVNTPDLVLFVGEALVGNEAVDQLVKFNRALADHSMAQTPRLIDGIVLTKFDTIDDKVGAAISMTYITSKPIVFVGTGQTYCDLRSLNAKAVVAALMKA

SEQ ID NO: 15787 - protein, 384 aa, Homo sapiens
MPPFCRNAKLGLLSFLICAGRSLLPLGKNAFWLERIENNNTLWEKAQSQKMRYKTSLVMRKRLRLYRNTLKESSSSSGHHGPQLTAASSPSVFPGLHEEPPQASPSRPLNGLLRLGLPGDMYARPEPFPPGPAARSDALAAAAALHGYGGMNLTVNLAAPHGPGAFFRYMRQPIKQELICKWLAADGTATPSLCSKTFSTMHELVTHVTVEHVGGPEQANHICFWEECPRQGKPFKAKYKLVNHIRVHTGEKPFPCPFPGCGKVFARSENLKIHKRTHTGEKPFRCEFEGCERRFANSSDRKKHSHVHTSDKPYTCKVRGCDKCYTHPSSLRKHMKVHGRSPPPSSGYDSATPSALVSPSSDCGHKSQVASSAAVAARTADLSE

SEQ ID NO: 15788 - protein, 69 aa, Homo sapiens
MRWRTILLQYCFLLITCLLTALEAVPIDIDKTKVQNIHPVESAKIEPPDTGLYYDEYLKQVIDVLETDK

SEQ ID NO: 15789 - protein, 71 aa, Homo sapiens
MAVTALAARTWLGVWGVRTMQARGFGSDQSENVDRGAGSIREAGGAFGKREQAEEERYFRHYRLCFEISLG

SEQ ID NO: 15790 - protein, 204 aa, Homo sapiens
MLPGLRRLLQAPASACLLLMLLALPLAAPSCPMLCTCYSSPPTVSCQANNFSSVPLSLPPSTQRLFLQNNLIRTLRPGTFGSNLLTLWLFSNNLSTIYPGTFRHLQALEELDLGDNRHLRSLEPDTFQGLERLQSLHLYRCQLSSLPGNIFRGLVSLQYLYLQENSLLHLQGKKEKGKSLLCSWRMDALKMEGIPVIVIHCYYY

SEQ ID NO: 15791 - protein, 38 aa, Homo sapiens
MRTLFNLLWLALACSPVHTTLSKSDAKKAASKTLLEKV

SEQ ID NO: 15792 - protein, 146 aa, Homo sapiens
MKPAAREARLPPRSPGLRWALPLLLLLLRLGQILCAGGTPSPIPDPSVATVATGENGITQISSTAESFHKQNGTGTPQVETNTSEDGESSGANDSLRTPEQGSNGTDGASQKTPSSTEPIPVSDLRVALTGVRKAALSWSNGNGTA

SEQ ID NO: 15793 - protein, 1100 aa, Homo sapiens
MASSWKLMLFLSVTMCLSEYSKSLPGLSTSYAALLRIKKSSSSSLFGSKTRPRYSSPSLGTLSASSPSWLGAAQNYYSPINLYHSSDAFKQDESVDYGPVFVQEPDDIIFPTDSDEKKVALNCEVRGNPVPSYRWLRNGTEIDLESDYRYSLIDGTFIISNPSEAKDSGHYQCLATNTVGSILSREATLQFAYLGNFSGRTRSAVSVREGQGVVLMCSPPPHSPEIIYSWVFNEFPSFVAEDSRRFISQETGNLYISKVQTSDVGSYICLVKNTVTNARVLSPPTPLTLRNDGVMGEYEPKIEVHFPFTVTAAKGTTVKMECFALGNPVPTITWMKVNGYIPSKARLRKSQAVLEIPNVQLDDAGIYECRAENSRGKNSFRGQLQVYTYPHWVEKLNDTQLDSGSPLRWECKATGKPRPTYRWLKNGVPLSPQSRVEMVNGVLMIHNVNQSDAGMYQCLAENKYGAIYASAELKILASAPTFALNQLKKTIIVTKDQEVVIECKPQGSPKPTISWKKGDRAVRENKRIAILPDGSLRILNASKSDEGKYVCRGENVFGSAEIIASLSVKEPTRIELTPKRTELTVGESIVLNCKAIHDASLDVTFYWTLKGQPIDFEEEGGHFESIRAQASSADLMIRNILLMHAGRYGCRVQTTADSVSDEAELLVRGPPGPPGIVIVEEITESTATLSWSPAADNHSPISSYNLQARSPFSLGWQTVKTVPEIITGDMESAMAVDLNPWVEYEFRVVATNPIGTGDPSTPSRMIRTNEAVPKTAPTNVSGRSGRRHELVIAWEPVSEEFQNGEGFGYIVAFRPNGTRGWKEKMVTSSEASKFIYRDESVPPLTPFEVKVGVYNNKGDGPFSQIVVICSAEGEPSAAPTDVKATSVSVSEILVAWKHIKESLGRPQGFEVGYWKDMEQEDTAETVKTRGNESFVILTGLEGNTLYHFTVRAYNGAGYGPPSSEVSATTKKSPPSQAPSNLRWEQQGSQVSLGWEPVIPLANESEVVGYKVFYRQEGHSNSQVIETQKLQAVVPLPDAGVYIIEVRAYSEGGDGTASSQIRVPSYSGGKITSAQSTLHSLSTSSSSVTLLLALMIPSTSW

SEQ ID NO: 15794 - protein, 101 aa, Homo sapiens
MWQLWASLCCLLVLANARSRPSFHPLSDELVNYVNKRNTTWQAGHNFYNVDMSYLKRLCGTFLGGPKPPQRVMFTEDLKLPASFDAREQWPQCPTIKEIRD

SEQ ID NO: 15795 - protein, 510 aa, Homo sapiens
MALRAPALLPLLLLLLPLRAAGCPAACRCYSATVECGALRLRVVPLGIPPGTQTLFLQDNNIARLEPGALAPLAALRRLYLHNNSLRALEAGAFRAQPRLLELALTSNRLRGLRSGAFVGLAQLRVLYLAGNQLARLLDFTFLHLPELHLQENSIELLEDQALAGLSSLALLDLSRNQLGTISREALQPLASLQVLRLTENPWRCDCALHWLGAWIKEGGQRLLTSRDRKIMCAEPPRLALQSLLDVSHSSLICIPPSVHVQPLELTANLGEDLRVACQASGYPQPLVTWRKVPQPREGRPRAQAQLEGGLLGLGGHSASDTGSGMLFLSNITLAHAGKYECEASNAGGAARVPFRLLVNASRQQPQQPAQPPPPAARPAGSEPRPEAGSMAFRALGVATQTAIAAAIALLALTALLLVAMICRRRRRRKKARGPPGEGALFVNDYLDGPCTFAQLEELRDERGHEMFVINRSKPLFAEGPAEAPADCGPEQGAGPGLRVPPPVAYEIHC

SEQ ID NO: 15796 - protein, 113 aa, Homo sapiens
MKLLTGLVFCSLVLSVSSRSFFSFLGEAFDGARDMWRAYSDMREANYIGSDKYFHARGNYDAAKRGPGGAWAAEVIRLKCHGMIMAHCNLDLPGLKRSSHFSLLNNWDCRCAP

SEQ ID NO: 15797 - protein, 432 aa, Homo sapiens [sequence omitted]

SEQ ID NO: 15798 - protein, 300 aa, Homo sapiens
MVRTKTWTLKKHFVGYPTNSDFELKTAELPPLKNGEVLLEALFLTVDPYMRVAAKRLKEGDTMMGQQVAKVVESKNVALPKGTIVLASPGWTTHSISDGKDLEKLLTEWPDTIPLSLALGTVGMPGLTAYFGLLEICGVKGGETVMVNAAAGAVGSVVGQIAKLKGCKVVGAVGSDEKVAYLQKLGFDVVFNYKTVESLEETLKKASPDGYDCYFDNVGGEFSNTVIGQMKKFGRIAICGAISTYNRTGPLPPGPPPEIVIYQELRMEAFVVYRWQGDARQKALKDLLKWVLELPYFVID

SEQ ID NO: 15799 - protein, 133 aa, Homo sapiens
MRLLSFVVLALFAVTQAEEGARLLASKSLLNRYAVEGRDLTLQYNIYNVGSSAALDVELSDDSFPPEDFGIVSGMLNVKWDRIAPASNVSHTVVLRPLKAGYFNFTSATITYLAQEDGPVVNQPQDSLVLPGS

SEQ ID NO: 15800 - protein, 119 aa, Homo sapiens
MRTLFNLLWLALACSPVHTTLSKSDAKKAASKTLLEKSQFSDKPVQDRGLVVTDLKAESVVLEHRSYCSAKARDRHFAGDVLGYVTPWNSHGYDVTKVFGSKFTQISPVWLQLKRRGRE

SEQ ID NO: 15801 - protein, 198 aa, Homo sapiens
MAGGRCGPQLTALLAAWIAAVAATAGPEEAALPPEQSRVQPMTASNWTLVMEGEWMLKFYAPWCPSCQQTDSEWEAFAKNGEILQISVGKVDVIQEPGIFEDLQNYILEKKWQSVEPLTGWKSPASLTMSGMAGLFSISGKIWHLHNYFTVTLGIPAWCSYVFFVIATLVFGLFMGLVLVVISECFYVPLPRHLSERS

SEQ ID NO: 15802 - protein, 97 aa, Homo sapiens
MLRGPWRQLWLFFLLLLPGAPEPRGASRPWEGTDEPGSAWAWPGFQRLQEQLRAAGALSKRYWTLFSCQVWPDDCDEDEEAATGPLALGNVRCGHAW

SEQ ID NO: 15803 - protein, 152 aa, Homo sapiens
MNLAISIALLLTVLQVSRGQKVTSLTACLVDQSLRLDCRHENTSSSPIQYEFSLTRETKKHVLFGTVGVPEHTYRSRTNFTSKYNMKVLYLSAFTSKDEGTYTCALHHSGHSPPISSQNVTVLRDKLVKCEGISLLAQNTSWLLLLLLSLSL

SEQ ID NO: 15804 - protein, 358 aa, Homo sapiens
MRHSLTKLLAASGSNSPTRSESPEPAATCSLPSDLTRAAAGEEETAAAGSPGRKQQFGDEGELEAGRGSRGGVAVRAPSPEEMEEEAIASLPGEETEDMDFLSGLELADLLDPRQPDWHLDPGLSSPGPLSSSGGGSDSGGLWRGDDDDEAAAAEMQRFSDLLQRLLNGIGGCSSSSDSGSAEKRRRKSPGGGGGGGSGNDNNQAATKSPRKAAAAAARLNRLKKKEYVMGLESRVRGLAAENQELRAENRELGKRVQALQEESRYLRAVLANETGLARLLSRLSGVGLRLTTSLFRDSPAGDHDYALPVGKQKQDLLEEDDSAGGVCLHVDKDKVSVEFCSACARKASSSLKIFFFR

SEQ ID NO: 15805 - protein, 723 aa, Homo sapiens
MCSGRFQNIQVNPDFPRGRISNSFRRTSSTENKTKTLGKLHQEPRQLQSDGKRKILLEELANSDPKLALTGVPIVQWPKRDKLKFPTRPKVRVPTIPITKPHTMKPAPRLTPVRPAAASPIVSGARRRRVRCRKCKACVQGECGVCHYCRDMKKFGGPGRMKQSCVLRQCLAPRLPHSVTCSLCGEVDQNEETQDFEKKLMECCICNEIVHPGCLQMDGEGLLNEELPNCWECPKCYQEDSSEKAQKRKMEESDEEAVQAKVLRPLRSCDEPLTPPPHSPTSMLQLIHDPVSPRGMVTRSSPGAGPSDHHSASRDERFKRRQLLRLQATERTMVREKENNPSGKKELSEVEKAKIRGSYLTVTLQRPTKELHGTSIVPKLQAITASSANLRHSPRVLVQHCPARTPQRGDEEGLGGEEEEEEEEEEEDDSAEEGGAARLNGRGSWAQDGDESWMQREVWMSVFRYLSRRELCECMRVCKTWYKWCCDKRLWTKIDLSRCKAIVPQALSGIIKRQPVSLDLSWTNISKKQLTWLVNRLPGLKDLLLAGCSWSAVSALSTSSCPLLRTLDLRWAVGIKDPQIRDLLTPPADKPGQDNRSKLRNMTDFRLAGLDITDATLRLIIRHMPLLSRLDLSHCSHLTDQSSNLLTAVGSSTRYSLTELNMAGCNKLTDQTLIYLRRIANVTLIDLRGCKQITRKACEHFISDLSINSLYCLSDEKLIQKIS

SEQ ID NO: 15806 - protein, 151 aa, Homo sapiens [sequence omitted]

SEQ ID NO: 15807 - protein, 182 aa, Homo sapiens
MVRCLGPALLLLLLLGSASSVGGNRCVDAAEACTADARCQRLRSEYVAQCLGRAAQGGCPRARCRRALRRFFARGPPALTHALLFCPCAGPACAERRRQTFVPSCAFSGPGPAPPSCLEPLNFCERSRVCRPRLLAFQVSCTPAPSAPDGCLLDQGARCLRAYAGLVGSPQAPPSPLTTWTT

SEQ ID NO: 15808 - protein, 77 aa, Homo sapiens
MLPCASCLPGSLLLWALLLLLLGSASPQDSEEPDSYTECTDGYEWDPDSQHCRGPAQETGCAQQAPLCRCQRVSDHP

SEQ ID NO: 15809 - protein, 322 aa, Homo sapiens
MGLPERRGLVLLLSLAEILFKIMILEGGGVMNLNPGNNLLHQPPAWTDSYSTCNVSSGFFGGQWHEIHPQYWTKYQVWEWLQHLLDTNQLDANCIPFQEFDINGEHLCSMSLQEFTRAAGTAGQLLYSNLQHLKWNGQCSSDLFQSTHNVIVKTEQTEPSIMNTWKDENYLYDTNYGSTVDLLDSKTFCRAQISMTTTSHLPVAESPDMKKEQDPPAKCHTKKHNPRGTHLWEFIRDILLNPDKNPGLIKWEDRSEGVFRFLKSEAVAQLWGKKKNNSSMTYEKLSRAMRYYYKREILERVDGRRLVYKFGKNARGWRENEN

SEQ ID NO: 15810 - protein, 257 aa, Homo sapiens
MTVVGNPRSWSCQWLPILILLLGTGHGPGVEGVTHYKAGDPVILYVNKVGPYHNPQETYHYYQLPVCCPEKIRHKSLSLGEVLDGDRMAESLYEIRFRENVEKRILCHMQLSSAQVEQLRQAIEELYYFEFVVDDLPIRGFVGYMEESGFLPHSHKIGLWTHLDFHLEFHGDRIIFANVSVRDVKPHSLDGLRPDEFLGLTHTYSVRWSETSVERRSDRRRGDDGGFFPRTLEIHWLSIINSMVLVFLLVGFVAVIL

SEQ ID NO: 15811 - protein, 1241 aa, Homo sapiens
MSGGGGGGGSAPSRFADYFVICGLDTETGLEPDELSALCQYIQASKARDGASPFISSTTEGENFEQTPLRRTFKSKVLARYPENVEWNPFDQDAVGMLCMPKGLAFKTQADPREPQFHAFIITREDGSRTFGFALTFYEEVTSKQICSAMQTLYHMHNAEYDVLHAPPADDRDQSSMEDGEDTPVTKLQRFNSYDISRDTLYVSKCICLITPMSFMKACRSVLEQLHQAVTSPQPPPLPLESYIYNVLYEVPLPPPGRSLKFSGVYGPIICQRPSTNELPLFDFPVKEVFELLGVENVFQLFTCALLEFQILLYSQHYQRLMTVAETITALMFPFQWQHVYVPILPASLLHFLDAPVPYLMGLHSNGLDDRSKLELPQEANLCFVDIDNHFIELPEDLPQFPNKLEFVQEVSEILMAFGIPPEGNLHCSESASKLKRLRASELVSDKRNGNIAGSPLHSYELLKENETIARLQALVKRTGVSLEKLEVREDPSSNKDLKVQCDEEELRIYQLNIQIREVFANRFTQMFADYEVFVIQPSQDKESWFTNREQMQNFDKASFLSDQPEPYLPFLSRFLETQMFASFIDNKIMCHDDDDKDPVLRVFDSRVDKIRLLNVRTPTLRTSMYQKCTTVDEAEKAIELRLAKIDHTAIHPHLLDMKIGQGKYEPGFFPKLQSDVLSTGPASNKWTKRNAPAQWRRKDRQKQHTEHLRLDNDQREKYIQEARTMGSTIRQPKLSNLSPSVIAQTNWKFVEGLLKECRNKTKRMLVEKMGREAVELGHGEVNITGVEENTLIASLCDLLERIWSHGLQVKQGKSALWSHLLHYQDNRQRKLTSGSLSTSGILLDSERRKSDASSLMPPLRISLIQDMRHIQNIGEIKTDVGKARAWVRLSMEKKLLSRHLKQLLSDHELTKKLYKRYAFLRCDDEKEQFLYHLLSFNAVDYFCFTNVFTTILIPYHILIVPSKKLGGSMFTANPWICISGELGETQIMQIPRNVLEMTFECQNLGKLTTVQIGHDNSGLYAKWLVEYVMVRNEITGHTYKFPCGRWLGKGMDDGSLERILVGELLTSQPEVDERPCRTPPLQQSPSVIRRLVTISPNNKPKLNTGQIQESIGEAVNGIVKHFHKPEKERGSLTLLLCGECGLVSALEQAFQHGFKSPRLFKNVFIWDFLEKAQTYYETLEKNEVVPEENWHTRARNFCRFVTAINNTPRNIGKDEITSYTTGLPCWLTAPSLHTCMRMWH

SEQ ID NO: 15812 - protein, 92 aa, Homo sapiens
MWQLWASLCCLLVLANARSRPSFHPLSDELVNYVNKRNTTWQAGHNFYNVDMSYLKRLCGTFLGGPKPPQRVMFTEDLKLPASFDAREQWPQ

SEQ ID NO: 15813 - protein, 113 aa, Homo sapiens
MRNAVCIFYLVLRALDTLEDDMTISVEKKVPLLHNFHSFLYQPDWRFMESKEKDRQVLEDFPTISLEFRNLAEKYQTVIADICRRMGIGMAEFLDKHVTSEQEWDKPQSLKTP

SEQ ID NO: 15814 - protein, 695 aa, Homo sapiens
MAATGTAAAAATGRLLLLLLVGLTAPALALAGYIEALAANAGTGFAVAEPQIAMFCGKLNMHVNIQTGKWEPDPTGTKSCFETKEEVLQYCQEMYPELQITNVMEANQRVSIDNWCRRDKKQCKSRFVTPFKCLVGEFVSDVLLVPEKCQFFHKERMEVCENHQHWHTVVKEACLTQGMTLYSYGMLLPCGVDQFHGTEYVCCPQTKIIGSVSKEEEEEDEEEEEEEDEEEDYDVYKSEFPTEADLEDFTEAAVDEDDEDEEEGEEVVEDRDYYYDTFKGDDYNEENPTEPGSDGTMSDKEITHDVKVPPTPLPTNDVDVYFETSADDNEHARFQKAKEQLEIRHRNRMDRVKKEWEEAELQAKNLPKAERQTLIQHFQAMVKALEKEAASEKQQLVETHLARVEAMLNDRRRMALENYLAALQSDPPRPHRILQALRRYVRAENKDRLHTIRHYQHVLAVDPEKAAQMKSQVMTHLHVIEERRNQSLSLLYKVPYVAQEIQEEIDELLQEQRADMDQFTASISETPVDVRVSSEESEEIPPFHPFHPFPALPENEGSGVGEQDGGLIGAEEKVINSKNKVDENMVIDETLDVKEMIFNAERVGGLEEERESVGPLREDFSLSSSALIGLLVIAVAIATVIVISLVMLRKRQYGTISHGIVEVDPMLTPEERHLNKMQNHGYENPTYKYLEQMQI

SEQ ID NO: 15815 - protein, 166 aa, Homo sapiens
MRSLLLLSAFCLLEAALAAEVKKPAAAAAPGTAEKLSPKAATLAERSAGLAFSLYQAMAKDQAVENILVSPVVVASSLGLVSLGGKATTASQAKAVLSAEQLRDEEVHAGLGELLRSLSNSTARNVTWKLGSRLYGPSSVSFADDFVRSSKQHYNCEHSKINFRDK

SEQ ID NO: 15816 - protein, 154 aa, Homo sapiens
MAGIPGLLFLLFFLLCAVGQVSPYSAPWKPTWPAYRLPVVLPQSTLNLAKPDFGAEAKLEVSSSCGPQCHKGTPLPTYEEAKQYLSYETLYANGSRTETQVGIYILSSSGDGAQHRDSGSSGKSRRKRQIYGYDSRFSIFGKDFLLNYPFSTSV

SEQ ID NO: 15817 - protein, 183 aa, Homo sapiens
MLPCASCLPGSLLLWALLLLLLGSASPQDSEEPDSYTECTDGYEWDPDSQHCRDVNECLTIPEACKGEMKCINHYGGYLCLPRSAAVINDLHGEGPPPPVPPAQHPNPCPPGYEPDDQDSCVDVDECAQALHDCRPSQDCHNLPGSYQCTCPDGYRKIGPECVDIDECRYRYCQHRCVNLPGS

SEQ ID NO: 15818 - protein, 39 aa, Homo sapiens
MRWRTILLQYCFLLITCLLTALEAVPIDIDKTKVQNIHP

SEQ ID NO: 15819 - protein, 219 aa, Homo sapiens
MAPRRARGCRTLGLPALLLLLLLRPPATRGITCPPPMSVEHADIWVKSYSLYSRERYICNSGFKRKAGTSSLTECVLNKATNVAHWTTPSLKCIKPAASSPSSNNTAATTAAIVPGSQLMPSKSPSTGTTEISSHESSHGTPSQTTAKNWELTASASHQPPGVYPQGHSDTTVAISTSTVLLCGLSAVSLLACYLKSRASVCSCHPRSAGHTCSVGSVC

SEQ ID NO: 15820 - protein, 219 aa, Homo sapiens
MAIFSVYVVNKAGGLIYQLDSYAPRAEAEKTFSYPLDLLLKLHDERVLVAFGQRDGIRVGHAVLAINGMDVNGRYTADGKEVLEYLGNPANYPVSIRFGRPRLTSNEKLMLASMFHSLFAIGSQLSPEQGSSGIEMLETDTFKLHCYQTLTGIKFVVLADPRQAGIDSLLRKIYEIYSDFALKNPFYSLEMPIRCELFDQNLKLALEVAEKAGTFGPGS

SEQ ID NO: 15821 - protein, 218 aa, Homo sapiens
MARCFSLVLLLTSIWTTRLLVQGSLRAEDTWTNSCIPEIITTKDPIFNTQTATQTTEFIVSDSTYSVASPYSTIPAPTTTPPAPASTSIPRRKKLICVTEVFMETSTMSTETEPFVENKAAFKNEAAGFGGVPTALLVLALLFFGAAAGLGFCYVKRYVKAFPFTNKNQQKEMIETKVVKEEKANDSNPNEESKKTDKNPEESKSPSKTTVRCLEAEV

SEQ ID NO: 15822 - protein, 131 aa, Homo sapiens
MRTLFNLLWLALACSPVHTTLSKSDAKKAASKTLLEKSQFSDKPVQDRGLVVTDLKAESVVLEHRSYCSAKARDRHFAGDVLGYVTPWNSHGYDVTKVFGSKFTQISPVWLQLKRRGREMFEVTGLHDVDQ

SEQ ID NO: 15823 - protein, 35 aa, Homo sapiens
MSLDIQSLDIQCEELSDARWAELLPLLQQCQVVRL

SEQ ID NO: 15824 - protein, 598 aa, Homo sapiens
MPDRLDTSVSCFVVKIWGGKENIYQLLIEWKVCLDGLKYLGQQIHARNQNEIIFGLNDGYYGAPFEHKGYSNAQKTILLQVDQNCVRNSYDVFSLLRLHRAQCAIKQTQVTVQKIGKEIEEKLRLTSTSNELKKKSECLQLKILVLQNELERQKKALGREVALLHKQQIALQDKGSAFSAEHLKLQLQKESLNELRKECTAKRELFLKTNAQLTIRCRQLLSELSYIYPIDLNEHKDYFVCGVKLPNSEDFQAKDDGSIAVALGYTAHLVSMISFFLQVPLRYPIIHKGSRSTIKDNINDKLTEKEREFPLYPKGGEKLQFDYGVYLLNKNIAQLRYQHGLGTPDLRQTLPNLKNFMEHGLMVRCDRHHTSSAIPVPKRQSSIFGGADVGFSGGIPSPDKGHRKRASSENERLQYKTPPPSYNSALAQPVTTVPSMGETERKITSLSSSLDTSLDFSKENKKKGEDLVGSLNGGHANVHPSQEQGEALSGHRATVNGTLLPSEQAGSASVQLPGEFHPVSEAELCCTVEQAEEIIGLEATGFASGDQLEAFNCIPVDSAVAVECDEQVLGEFEEFSRRIYALNENVSSFRRPRRSSDK

SEQ ID NO: 15825 - protein, 295 aa, Homo sapiens
MRSLLLLSAFCLLEAALAAEVKKPAAAAAPGTAEKLSPKAATLAERSAGLAFSLYQAMAKDQAVENILVSPVVVASSLGLVSLGGKATTASQAKAVLSAEQLRDEEVHAGLGELLRSLSNSTARNVTWKLGSRLYGPSSVSFADDFVRSSKQHYNCEHSKINFRDKRSALQSINEWAAQTTDGKLPEVTKDVERTDGALLVNAMFFKPHWDEKFHHKMVDNRGFMVTRSYTVGVMMMHRTGLYNYYDDEKEKLQIVEMPLAHKLSSLIILMPHHVEPLERLEKLLTKEQLKIWMG

SEQ ID NO: 15826 - protein, 950 aa, Homo sapiens
MLYSSRGDPEGQPLLLSLLILAMWVVGSGQLHYSVPEEAEHGTFVGRIAQDLGLELAELVPRLFQLDSKGRGDLLEVNLQNGILFVNSRIDREELCGRSAECSIHLEVIVDRPLQVFHVDVEVKDINDNPPVFPATQKNLFIAESRPLDSRFPLEGASDADIGENALLTYRLSPNEYFFLDVPTSNQQVKPLGLVLRKLLDREETPELHLLLTATDGGKPELTGTVQLLITVLDNNDNAPVFDRTLYTVKLPENVSIGTLVIHPNASDLDEGLNGDIIYSFSSDVSPDIKSKFHMDPLSGAITVIGHMDFEESRAHKIPVEAVDKGFPPLAGHCTLLVEVVDVNDNAPQLTIKTLSVPVKEDAQLGTVIALISVIDLDADANGQVTCSLTPHVPFKLVSTYKNYYSLVLDRALDRESVSAYELVVTARDGGSPSLWATARVSVEVADVNDNAPAFAQSEYTVFVKENNPPGCHIFTVSARDADAQENALVSYSLVERRLGERSLSSYVSVHAESGKVYALQPLDHEELELLQFQVSARDAGVPPLGSNVTLQVFVLDENDNAPALLTPRMRGTDGAVSEMVLRSVGAGVVVGKVRAVDADSGYNAWLSYELQPETASASIPFRVGLYTGEISTTRALDETDAPRQRLLVLVKDHGEPALTATATVLVSLVESGQAPKSSSRASVGATGPEVTLVDVNVYLIIAICAVSSLLVLTLLLYTVLRCSAMPTEGECAPGKPTLVCSSAVGSWSYSQQRRQRVCSGEGKQKTDLMAFSPGLSPCAGSTERTGEPSASSDSTGKPRQPNPDWRYSASLRAGMHSSVHLEEAGILRAGPGGPDQQWPTVSSATPEPEAGEVSPPVGAGVNSNSWTFKYGPGNPKQSGPGELPDKFIIPGSPAIISIRQEPTNSQIDKSDFITFGKKEETKKKKKKKKGNKTQEKKEKGNSTTDNSDQ

SEQ ID NO: 15827 - protein, 83 aa, Homo sapiens
MRPRGLPPLLVVLLGCWASVSAQTDATPAVTTEGLNSTEAALATFGTFPSTRPPGTPRAPGPSSGPRPTPVTDGSHSVTQAGV

SEQ ID NO: 15828 - protein, 101 aa, Homo sapiens
MEFAELIKTPRVDNVVLHRPFYPAVEGTLCLTGHHLILSSRQDNTEELWLLHSNIDAIDKRFVGSLGTIIIKCKDFRIIQLDIPGMEECLNIASSIENPSC

SEQ ID NO: 15829 - protein, 374 aa, Homo sapiens
MSVPAFIDISEEDQAAELRAYLKSKGAEISEENSEGGLHVDLAQIIEACDVCLKEDDKDVESVMNSVVSLLLILEPDKQEALIESLCEKLVKFREGERPSLRLQLLSNLFHGMDKNTPVRYTVYCSLIKVAASCGAIQYIPTELDQVRKWISDWNLTTEKKHTLLRLLYEALVDCKKSDAASKVMVELLGSYTEDNASQARVDAHRCIVRALKDPNAFLFDHLLTLKPVKFLEGELIHDLLTIFVSAKLASYVKFYQNNKDFIDSLGLLHEQNMAKMRLLTFMGMAVENKEISFDTMQQELQIGADDVEAFVIDAVRTKMVYCKIDQTQRKVVVSHSTHRTFGKQQWQQLYDTLNAWKQNLNKVKNSLLSLSDT

SEQ ID NO: 15830 - protein, 98 aa, Homo sapiens
MWQLWASLCCLLVLANARSRPSFHPLSDELVNYVNKRNTTWQAGHNFYNVDMSYLKRLCGTFLGGPKPPQRVMFTEDLKLPASFDAREQWPQCPTIKE

SEQ ID NO: 15831 - protein, 113 aa, Homo sapiens
MCKGLAGLPASCLRSAKDMKHRLGFLLQKSDSCEHNSSHNKKDKVVICQRVSQEEVKKWAESLENLISHECGLAAFKAFLKSEYSEENIDFWISCEEYKKIKSPSKLSPKAKY

SEQ ID NO: 15832 - protein, 383 aa, Homo sapiens
MFCPLKLILLPVLLDYSLGLNDLNVSPPELTVHVGDSALMGCVFQSTEDKCIFKIDWTLSPGEHAKDEYVLYYYSNLSVPIGRFQNRVHLMGDILCNDGSLLLQDVQEADQGTYICEIRLKGESQVFKKAVVLHVLPEEPKELMVHVGGLIQMGCVFQSTEVKHVTKEEIVFRYYHKLRMSVEYSQSWGHFQNRVNLVGDIFRNDGSIMLQGVRESDGGNYTCSIHLGNLVFKKTIVLHVSPEEPRTLVTPAALRPLVLGGNQLVIIVGIVCATILLLPVLILIVKKTCGNKSSVNSTVLVKNTKKTNPEIKEKPCHFERCEGEKHIYSPIIVREVIEEEEPSEKSEATYMTMHPVWPSLRSDRNNSLEKKSGGGMPKTQQAF

SEQ ID NO: 15833 - protein, 512 aa, Homo sapiens
MDRVLLRWISLFWLTAMVEGLQVTVPDKKKVAMLFQPTVLRCHFSTSSHQPAVVQWKFKSYCQDRMGESLGMSSTRAQSLSKRNLEWDPYLDCLDSRRTVRVVASKQGSTVTLGDFYRGREITIVHDADLQIGKLMWGDSGLYYCIITTPDDLEGKNEDSVELLVLVRKGYRIQADKERDSMKVLYYVEKELAQFDPARRMRGRYNNTISELSSLHEEDSNFRQSFHQMRSKQFPVSGDLESNPDYWSGVMGGSSGASRGPSAMEYNKEDRESFRHSQPRSKSEMLSRKNFATGVPAVSMDELAAFADSYGQRPRRADGNSHEARGGSRFERSESRAHSGFYQDDSLEEYYGQRSRSREPLTDADRGWAFSPARRRPAEDAHLPRLVSRTPGTAPKYDHSYLGSARERQARPEGASRGGSLETPSKRSAQLGPRSASYYAWSPPGTYKAGSSQDDQEDASDDALPPYSELELTRGPSYRGRDLPYHSNSEKKRKKEPAKKTNDFPTRMSLVV

SEQ ID NO: 15834 - protein, 177 aa, Homo sapiens
MGLSIFLLLCVLGLSQAATPKIFNGTECGRNSQPWQVGLFEGTSLRCGGVLIDHRWVLTAAHCSGSRYWVRLGEHSLSQLDWTEQIRHSGFSVTHPGYLGASTSHEHDLRLLRLRLPVRVTSSVQPLPLPNDCATAGTECHVSGWGITNHPRSKGPRARGQGSGWVQVWDAGREVES

SEQ ID NO: 15835 - protein, 191 aa, Homo sapiens
MLIFWTITLFLLGAAKGKEVCYEDLGCFSDTEPWGGTAIRPLKILPWSPEKIGTRFLLYTNENPNNFQILLLSDPSTIEASNFQMDRKTRFIIHGFIDKGDESWVTDMCKKLFEVEEVNCICVDWKKGSQATYTQAANNVRVVGAQVAQMLDILLTEYSYPPSKVHLIGHSLGAHVAGEAGSKTPGLSRIT

SEQ ID NO: 15836 - protein, 175 aa, Homo sapiens
MWQLWASLCCLLVLANARSRPSFHPLSDELVNYVNKRNTTWQAGHNFYNVDMSYLKRLCGTFLGGPKPPQRVMFTEDLKLPASFDAREQWPQCPTIKEIRDQGSCGSCWAFGAVEAISDRICIHTNAHVSVEVSAEDLLTCCGSMCGDGCNGGYPAEAWNFWTRKGLVSGGLYES

SEQ ID NO: 15837 - protein, 376 aa, Homo sapiens
MKDVPGFLQQSQNSGPGQPAVWHRLEELYTKKLWHQLTLQVLDFVQDPCFAQGDGLIKLYENFISEFEHRVNPLSLVEIILHVVRQMTDPNVALTFLEKTREKVKSSDEAVILCKTAIGALKLNIGDLQVTKETIEDVEEMLNNLPGVTSVHSRFYDLSSKYYQTIGNHASYYKDALRFLGCVDIKDLPVSEQQERAFTLGLAGLLGEGVFNFGELLMHPVLESLRNTDRQWLIDTLYAFNSGNVERFQTLKTAWGQQPDLAANEAQLLRKIQLLCLMEMTFTRPANHRQLTFEEIAKSAKITVNEVELLVMKALSVGLVKGSIDEVDKRVHMTWVQPRVLDLQQIKGMKDRLEFWCTDVKSMEMLVEHQAHDILT

SEQ ID NO: 15838 - protein, 39 aa, Homo sapiens
MPPKDDKKKKDAGKSAKKDKDPVNKSGGKAKKKLWSLRD

SEQ ID NO: 15839 - protein, 86 aa, Homo sapiens
MRLLSFVVLALFAVTQAEEGARLLASKSLLNRYAVEGRDLTLQYNIYNVGSRLALPVHLDREESWLSGSLTGDSPLIFWTGQPLGS

SEQ ID NO: 15840 - protein, 540 aa, Homo sapiens
MDVCVRLALWLLWGLLLHQGQSLSHSHSEKATGTSSGANSEESTAAEFCRIDKPLCHSEDEKLSFEAVRNIHKLMDDDANGDVDVEESDEFLREDLNYHDPTVKHSTFHGEDKLISVEDLWKAWKSSEVYNWTVDEVVQWLITYVELPQYEETFRKLQLSGHAMPRLAVTNTTMTGTVLKMTDRSHRQKLQLKALDTVLFGPPLLTRHNHLKDFMLVVSIVIGVGGCWFAYIQNRYSKEHMKKMMKDLEGLHRAEQSLHDLQERLHKAQEEHRTVEVEKVHLEKKLRDEINLAKQEAQRLKELREGTENERSRQKYAEEELEQVREALRKAEKELESHSSWYAPEALQKWLQLTHEVEVQYYNIKKQNAEKQLLVAKEGAEKIKKKRNTLFGTFHVAHSSSLDDVDHKILTAKQALSEVTAALRERLHRWQQIEILCGFQIVNNPGIHSLVAALNIDPSWMGSTRPNPAHFIMTDDVDDMDEEIVSPLSMQSPSLQSSVRQRLTEPQHGLGSQRGSSLKANRLSSKGFDPFRFGVLPPHE

SEQ ID NO: 15841 - protein, 104 aa, Homo sapiens
MNLQPIFWIGLISSVCCVFAQTDENRCLKANAKSCGECIQAGPNCGWCTNSTFLQEGMPTSARCDDLEALKKKGCPPDDIENPRGSKDIKKNKNVTNRSKGTAE

SEQ ID NO: 15842 - protein, 147 aa, Homo sapiens
MRLLSFVVLALFAVTQAEEGARLLASKSLLNRYAVEGRDLTLQYNIYNVGSSAALDVELSDDSFPPEDFGIVSGMLNVKWDRIAPASNVSHTVVLRPLKAGYFNFTSATITYLAQEDGPVVIGSTSAPGQGGILAQREFDRRFSPHF

SEQ ID NO: 15843 - protein, 731 aa, Homo sapiens
MSQSGAVSCCPGATNGSLGRSDGVAKMSPKDLFEQRKKYSNSNVIMHETSQYHVQHLATFIMDKSEAITSVDDAIRKLVQLSSKEKIWTQEMLLQVNDQSLRLLDIESQSAQTPGASRVRAMYPQEELEDFPLPTVQRSQTVLNQLRYPSVLLLVCQDSEQSKPDVHFFHCDEVEAELVHEDIESALADCRLGKKMRPQTLKGHQEKIRQRQSILPPPQGPAPIPFQHRGGDSPEAKNRVGPQVPLSEPGFRRRESQEEPRAVLAQKIEKETQILNCALDDIEWFVARLQKAAEAFKQLNQRKKGKKKGKKAPAEGVLTLRARPPSEGEFIDCFQKIKLAINLLAKLQKHIQNPSAAELVHFLFGPLDLIVNTCSGPDIARSVSCPLLSRDAVDFLRGHLVPKEMSLWESLGESWMRPRSEWPREPQVPLYVPKFHSGWEPPVDVLQEAPWEVEGLASAPIEEVSPVSRQSIRNSQKHSPTSEPTPPGDALPPVSSPHTHRGYQPTPAMAKYVKILYDFTARNANELSVLKDEVLEVLEDGRQWWKLRSRSGQAGYVPCNILGEARPEDAGAPFEQAGQKYWGPASPTHKLPPSFPGNKDELMQHMDEVNDELIRKISNIRAQPQRHFRVERSQPVSQPLTYESGPDEVRAWLEAKAFSPRIVENLGILTGPQLFSLNKEELKKVCGEEGVRVYSQLTMQKAFLEKQQSGSELEELMNKFHSMNQRRGEDS

SEQ ID NO: 15844 - protein, 520 aa, Homo sapiens
MTVSGKKQTMGFEVPGVSSEENGHSFHTPQKGPPIEDAIASSDVLETASKSANPPHTIQASEEQSSTPAPVKKSGKLRQQIDVKAELEKRQGGKQLLNLVVIGHVDAGKSTLMGHMLYLLGNINKRTMHKYEQESKKAGKASFAYAWVLDETGEERERGVTMDVGMTKFETTTKVITLMDAPGHKDFIPNMITGAAQADVAVLVVDASRGEFEAGFETGGQTREHGLLVRSLGVTQLAVAVNKMDQVNWQQERFQEITGKLGHFLKQAGFKESDVGFIPTSGLSGENLITRSQSSELTKWYKGLCLLEQIDSFKPPQRSIDKPFRLCVSDVFKDQGSGFCITGKIEAGYIQTGDRLLAMPPNETCTVKGITLHDEPVDWAAAGDHVSLTLVGMDIIKINVGCIFCGPKVPIKACTRFRARILIFNIEIPITKGFPVLLHYQTVSEPAVIKRLISVLNKSTGEVTKKKPKFLTKGQNALVELQTQRPIALELYKDFKELGRFMLRYGGSTIAAGVVTEIKE

SEQ ID NO: 15845 - protein, 235 aa, Homo sapiens
MFRDFGEPGPSSGNGGGYGGPAQPPAAAQAAQQKFHLVPSINTMSGSQELQWMVQPHFLGPSSYPRPLTYPQYSPPQPRPGVIRALGPPPGVRRRPCEQETDKLEDEKSGLQREIEELQKQKERLELVLEAHRPICKIPEGAKEGDTGSTSGTSSPPAPCRPVPCISLSPGPVLEPEALHTPTLMTTPSLTPFTPSLVFTYPSTPEPCASAHRKSSSSSGDPSSDPLGSPTLLAL

SEQ ID NO: 15846 - protein, 165 aa, Homo sapiens
MGSWALLWPPLLFTGLLVRPPGTMAQAQYCSVNKDIFEVEENTNVTEPLVDIHVPEGQEVTLGALSTPFAFRIQGNQLFLNVTPDYEEKSLLEAQLLCQSGGTLTKEIRVEEDTKVNSTVIPETQLQAEDRDKDDILFYTLQEMTAGASDYFSLVSVNRPALRLD

SEQ ID NO: 15847 - protein, 324 aa, Homo sapiens
MRSLLLLSAFCLLEAALAAEVKKPAAAAAPGTAEKLSPKAATLAERSAGLAFSLYQAMAKDQAVENILVSPVVVASSLGLVSLGGKATTASQAKAVLSAEQLRDEEVHAGLGELLRSLSNSTARNVTWKLGSRLYGPSSVSFADDFVRSSKQHYNCEHSKINFRDKRSALQSINEWAAQTTDGKLPEVTKDVERTDGALLVNAMFFKPHWDEKFHHKMVDNRGFMVTRSYTVGVMMMHRTGLYNYYDDEKEKLQIVEMPLAHKLSSLIILMPHHVEPLERLEKLLTKEQLKIWMGKMQKKAVAISLPKGVVEVTHDLQVRGGPA

SEQ ID NO: 15848 - protein, 274 aa, Homo sapiens
MASDSGNQGTLCTLEFAVQMTCQSCVDAVRKSLQGVAGVQDVEVHLEDQMVLVHTTLPSQEVQALLEGTGRQAVLKGMGSGQLQNLGAAVAILGGPGTVQGVVRFLQLTPERCLIEGTIDGLEPGLHGLHVHQYGDLTNNCNSCGNHFNPDGASHGGPQDSDRHRGDLGNVRADADGRAIFRMEDEQLKVWDVIGRSLIIDEGEDDLGRGGHPLSKITGNSGERLACGIIARSAGLFQNPKQICSCDGLTIWEERGRPIAGKGRKESAQPPAHL

SEQ ID NO: 15849 - protein, 88 aa, Homo sapiens
MLPCLVVLLAALLSLRLGSDAHVESPGWLALWQSGARVLPYSGKPGSQAHLLWKWKRLKLTGTDGLGRIEKYAQGQTPNPQTSSSTHF

SEQ ID NO: 15850 - protein, 935 aa, Homo sapiens
MTTEVGSVSEVKKDSSQLGTDATKEKPKEVAENQQNQSSDPEEEKGSQPPPAAESQSSLRRQKREKETSESRGISRFIPPWLKKQKSYTLVVAKDGGDKKEPTQAVVEEQVLDKEEPLPEEQRQAKGDAEEMAQKKQEIKVEVKEEKPSVSKEEKPSVSKVEMQPTELVSKEREEKVKETQEDKLEGGAAKRETKEVQTNELKAEKASQKVTKKTKTVQCKVTLLDGTEYSCDLEKHAKGQVLFDKVCEHLNLLEKDYFGLLFQESPEQKNWLDPAKEIKRQLRNLPWLFTFNVKFYPPDPSQLTEDITRYFLCLQLRQDIASGRLPCSFVTHALLGSYTLQAELGDYDPEEHGSIDLSEFQFAPTQTKELEEKVAELHKTHRGLSPAQADSQFLENAKRLSMYGVDLHHAKDSEGVDIKLGVCANGLLIYKDRLRINRFAWPKILKISYKRSNFYIKVRPAELEQFESTIGFKLPNHRAAKRLWKVCVEHHTFYRLVSPEQPPKAKFLTLGSKFRYSGRTQAQTRQASTLIDRPAPHFERTSSKRVSRSLDGAPIGVMDQSLMKDFPGAAGEISAYGPGLVSIAVVQDGDGRREVRSPTKAPHLQLIEGKSSHETLNIVEEKKRAEVGKDERVITEEMNGKEISPGSGPGEIRKVEPVTQKDSTSLSSESSSSSSESEEEDVGEYRPHHRVTEGTIREEQEYEEEVEEEPRPAAKVVEREEAVPEASPVTQAGASVITVETVIQENVGAQKIPGEKSVHEGALKQDMGEEAEEEPQKVNGEVSHVDIDVLPQIICCSEPPVVKTEMVTISDASQRTEISTKEVPIVQTETKTITYESPQIDGGAGGDSGTLLTAQTITSESVSTTTTTHITKTVKGGISETRIEKRIVITGDGDIDHDQALAQAIREAREQHPDMSVTRVVVHKETELAEEGED

SEQ ID NO: 15851 - protein, 133 aa, Homo sapiens
MAALTIATGTGNWFSALALGVTLLKCLLIPTYHSTDFEVHRNWLAITHSLPISQWYYEATSEWTLDYPPFFAWFEYILSHVAKYFDQEMLNVHNLNYSSSRTLLFQRFSVIFMDVLFVYAVRDCFCFFPNVSM

SEQ ID NO: 15852 - protein, 179 aa, Homo sapiens
MATTVSTQRGPAKLAKNYGMTRMDPYCRLRLGYAVYETPTAHNGAKNPRWNKVIHCTVPPGVDSFYLEIFDERAFSMDDRIAWTHITIPESLRQGKVEDKWYSLSGRQGDDKEGMINLVMSYALLPAAMVMPPQPVVLMPTVYQQGVGYVPITDIVNFGTAPHFIEKFPRRCRNICQSL

SEQ ID NO: 15853 - protein, 386 aa, Homo sapiens
MADHSFSDGVPSDSVEAAKNASNTEKLTDQVMQNPRVLAALQERLDNVPHTPSSYIETLPKAVKRRINALKQLQVRCAHIEAKFYEEVHDLERKYAALYQPLFDKRREFITGDVEPTDAESEWHSENEEEEKLAGDMKSKVVVTEKAAATAEEPDPKGIPEFWFTIFRNVDMLSELVQEYDEPILKHLQDIKVKFSDPGQPMSFVLEFHFEPNDYFTNSVLTKTYKMKSEPDKADPFSFEGPEIVDCDGCTIDWKKGKNVTVKTIKKKQKHKGRGTVRTITKQVPNESFFNFFNPLKASGDGESLDEDSEFTLASDFEIGHFFRERIVPRAVLYFTGEAIEDDDNFEEGEEGEEEELEGDEEGEDEDDAEINPKKEPSQPAECKQQ

SEQ ID NO: 15854 - protein, 172 aa, Homo sapiens
MATWALLLLAAMLLGNPGLEVSVSPKGKNTSGRESGFGWAIWMEGLVFSRLSPEYYDLARAHLRDEEKSCPCLAQEGPQGDLLTKTQELGRDYRTCLTIVQKLKKMVDKPTQRSVSNAATRVCRTGRSRWRDVCRNFMRRYQSRVTQGLVAGETAQQICEDLRLCIPSTGPL

SEQ ID NO: 15855 - protein, 47 aa, Homo sapiens
MIGDILLFGTLLMNAGAVLNFKLKKKDTQGFGEESREPSTGLERESD

SEQ ID NO: 15856 - protein, 420 aa, Homo sapiens
MRWRTILLQYCFLLITCLLTALEAVPIDIDKTKVQNIHPVESAKIEPPDTGLYYDEYLKQVIDVLETDKHFREKLQKADIEEIKSGRLSKELDLVSHHVRTKLDELKRQEVGRLRMLIKAKLDSLQDIGMDHQALLKQFDHLNHLNPDKFESTDLDMLIKAATSDLEHYDKTRHEEFKKYEMMKEHERREYLKTLNEEKRKEEESKFEEMKKKHENHPKVNHPGSKDQLKEVWEETDGLDPNDFDPKTFFKLHDVNSDGFLDEQELEALFTKELEKVYDPKNEEDDMVEMEEERLRMREHVMNEVDTNKDRLVTLEEFLKATEKKEFLEPDSWETLDQQQFFTEEELKEYENIIALQENELKKKADELQKQKEELQRQHDQLEAQKLEYHQVIQQMEQKKLQQGIPPSGPAGELKFEPHI

SEQ ID NO: 15857 - protein, 110 aa, Homo sapiens
MWQLWASLCCLLVLANARSRPSFHPLSDELVNYVNKRNTTWQAGHNFYNVDMSYLKRLCGTFLGGPKPPQRVMFTEDLKLPASFDAREQWPQCPTIKEIRDQGSCGSCWL

SEQ ID NO: 15858 - protein, 98 aa, Homo sapiens
MAEQSDEAVKYYTLEEIQKHNHSKSTWLILHHKVYDLTKFLEEHPGGEEVLREQAGGDATENFEDVGHSTDAREMSKTFIIGELHPDDRPKLNKPPEP

SEQ ID NO: 15859 - protein, 127 aa, Homo sapiens
MAKGRVAERSQLGAHHTTPVGDGAAGTRGLAAPGSRDHQKEKSWVEAGSARMSLLILVSIFLSAAFVMFLVYKNFPQLSEEERVNMKVPRDMDDAKALGKVLSKYKDTFYVQVLVAYFATYILYPFN

SEQ ID NO: 15860 - protein, 718 aa, Homo sapiens
MLQQELLSRTSLETQKLDLMTEVSELKLKLVGMEKEQREQEEKQRKAEELLQELRHLKIKVEELENERNQYEWKLKATKAEVAQLQEQVALKDAEIERLHSQLSRTAALHSESHTERDQEIQRLKMGMETLLLANEDKDRRIEELTGLLNQYRKVKEIVMVTQGPSERTLSINEEEPEGGFSKWNATNKDPEELFKQEMPPRCSSPTVGPPPLPQKSLETRAQKKLSCSLEDLRSESVDKCMDGNQPFPVLEPKDSPFLAEHKYPTLPGKLSGATPNGEAAKSPPTICQPDATGSSLLRLRDTESGWDDTAVVNDLSSTSSGTESGPQSPLTPDGKRNPKGIKKFWGKIRRTQSGNFYTDTLGMAEFRRGGLRATAGPRLSRTRDSKGQKSDANAPFAQWSTERVCAWLEDFGLAQYVIFARQWVSSGHTLLTATPQDMEKELGIKHPLHRKKLVLAVKAINTKQEEKSALLDHIWVTRWLDDIGLPQYKDQFHESRVDRRMLQYLTVNDLLFLKVTSQLHHLSIKCAIHVLHVNKFNPHCLHRRPADESNLSPSEVVQWSNHRVMEWLRSVDLAEYAPNLRGSGVHGGLIILEPRFTGDTLAMLLNIPPQKTLLRRHLTTKFNALIGPEAEQEKREKMASPAYTPLTTTAKVRPRKLGFSHFGNIRKKKFDESTDYICPMEPSDGVSDSHRVYSGYRGLSPLDAPELDGLDQVGQIS

SEQ ID NO: 15861 - protein, 555 aa, Homo sapiens
MADRGGVGEAAAVGASPASVPGLNPTLGWRERLRAGLAGTGASLWFVAGLGLLYALRIPLRLCENLAAVTVFLNSLTPKFYVALTGTSSLISGLIFIFEWWYFHKHGTSFIEQVSVSHLQPLMGGTESSISEPGSPSRNRENETSRQNLSECKVWRNPLNLFRGAEYRRYTWVTGKEPLTYYDMNLSAQDHQTFFTCDTDFLRPSDTVMQKAWRERNPPARIKAAYQALELNNDCATAYVLLAEEEATTIVDAERLFKQALKAGETIYRQSQQCQHQSPQHEAQLRRDTNVLVYIKRRLAMCARKLGRIREAVKIMRDLMKEFPPLTMLNIHENLLESLLELQAYPDVQAVLAKYDDISLPKSAAICYTAALLKTRTVSEKFSPETASRRGLSTAEINAVEAIHRAVEFNPHVPKYLLEMKSLILPPEHILKRGDSEAIAYAFFHLQHWKRIEGALNLLQCTWEGTFRMIPYPLEKGHLFYPYPSCTETADRELLPTFHHVSVYPKKELPLFIHFTAGFCSSTAMIAILTHQFPEIMGIFAKAVVGVKTQKENAD

SEQ ID NO: 15862 - protein, 747 aa, Homo sapiens
MGRSNSRSHSSRSKSRSQSSSRSRSRSHSRKKRYSSRSRSRTYSRSRSRDRMYSRDYRRDYRNNRGMRRPYGYRGRGRGYYQGGGGRYHRGGYRPVWNRRHSRSPRRGRSRSRSPKRRSVSSQRSRSRSRRSYRSSRSPRSSSSRSSSPYSKSPVSKRRGSQEKQTKKAEGEPQEESPLKSKSQEEPKDTFEHDPSESIDEFNKSSATSGDIWPGLSAYDNSPRSPHSPSPIATPPSQSSSCSDAPMLSTVHSAKNTPSQHSHSIQHSPERSGSGSVGNGSSRYSPSQNSPIHHIPSRRSPAKTIAPQNAPRDESRGRSSFYPDGGDQETAKTGKFLKSPPLHKNLDAREKSTFREESPLRIKMIASDSHRPEVKLKMAPVPLDDSNRPASLTKDRLLASTLVHSVKKEQEFRSIFDHIKLPQASKSTSESFIQHIVSLVHHVKEQYFKSAAMTLNERFTSYQKATEEHSTRQKSPEIHRRIDISPSTLRKHTRLAGEERVFKEENQKGDKKLRCDSADLRHDIDRRRKERSKERGDSKGSRESSGSRKQEKTPKDYKEYKSYKDDSKHKREQDHSRSSSSSASPSSPSSREEKESKKEREEEFKTHHEMKEYSGFAGVSRPRGTFFRIRGRGRARGVFAGTNTGPNNSNTTFQKRPKEEEWDPEYTPKSKKYFLHDDRDDGVDYWAKRGRGRGTFQRGRGRFNFKKSGSSPKWTHDKYQGDGIVEDEEETMENNEEKKDRRKEEKE

SEQ ID NO: 15863 - protein, 53 aa, Homo sapiens
MILNKALLLGALALTTVMSPCGGEDIVGSISDSLLLYRDGQWVCKTKVEKSDS

SEQ ID NO: 15864 - protein, 1437 aa, Homo sapiens
MIWYVATFIASVIGTRGLAAEGAHGLREEPEFVTARAGESVVLRCDVIHPVTGQPPPYVVEWFKFGVPIPIFIKFGYYPPHVDPEYAGRASLHDKASLRLEQVRSEDQGWYECKVLMLDQQYDTFHNGSWVHLTINAPPTFTETPPQYIEAKEGGSITMTCTAFGNPKPIVTWLKEGTLLGASGKYQVSDGSLTVTSVSREDRGAYTCRAYSIQGEAVHTTHLLVQGPPFIVSPPENITVNISQDALLTCRAEAYPGNLTYTWYWQDENVYFQNDLKLRVRILIDGTLIIFRVKPEDSGKYTCVPSNSLGRSPSASAYLTVQYPARVLNMPPVIYVPVGIHGYIRCPVDAEPPATVVKWNKDGRPLQVEKNLGWTLMEDGSIRIEEATEEALGTYTCVPYNTLGTMGQSAPARLVLKDPPYFTVLPGWEYRQEAGRELLIPCAAAGDPFPVITWRKVGKPSRSKHSALPSGSLQFRALSKEDHGEWECVATNVVTSITASTHLTVIGTSPHAPGSVRVQVSMTTANVSWEPGYDGGYEQTFSVWMKRAQFGPHDWLSLPVPPGPSWLLVDTLEPETAYQFSVLAQNKLGTSAFSEVVTVNTLAFPITTPEPLVLVTPPRCLIANRTQQGVLLSWLPPANHSFPIDRYIMEFRVAERWELLDDGIPGTEGEFFAKDLSQDTWYEFRVLAVMQDLISEPSNIAGVSSTDIFPQPDLTEDGLARPVLAGIVATICFLAAAILFSTLAACFVNKQRKRKLKRKKDPPLSITHCRKSLESPLSSGKVSPESIRTLRAPSESSDDQGQPAAKRMLSPTREKELSLYKKTKRAISSKKYSVAKAEAEAEATTPIELISRGPDGRFVMDPAEMEPSLKSRRIEGFPFAEETDMYPEFRQSDEENEDPLVPTSVAALKSQLTPLSSSQESYLPPPAYSPRFQPRGLEGPGGLEGRLQATGQARPPAPRPFHHGQYYGYLSSSSPGEVEPPPFYVPEVGSPLSSVMSSPPLPTEGPFGHPTIPEENGENASNSTLPLTQTPTGGRSPEPWGRPEFPFGGLETPAMMFPHQLPPCDVPESLQPKAGLPRGLPPTSLQVPAAYPGILSLEAPKGWAGKSPGRGPVPAPPAAKWQDRPMQPLVSQGQLRHTSQGMGIPVLPYPEPAEPGAHGGPSTFGLDTRWYEPQPRPRPSPRQARRAEPSLHQVVLQPSRLSPLTQSPLSSRTGSPELAARARPRPGLLQQAEMSEITLQPPAAVSFSRKSTPSTGSPSQSSRSGSPSYRPAMGFTTLATGYPSPPPGPAPAGPGDSLDVFGQTPSPRRTGEELLRPETPPPTLPTSGTLPPAPGNAAAPERLEALKYQRIKKPKKSSKGSSKSKKRSDDSASQTQQLPNSQVLWPDEAVCLRKKKRHSRPDPFARLSDLCHRQLPEDQTAILNSVDHDDPGHATLL

SEQ ID NO: 15865 - protein, 936 aa, Homo sapiens
MVYSRRGSLGSRLLLLWLLLAYWKAGSGQLHYSIPEEAKHGTFVGRIAQDLGLELAELVPRLFRVASKGRGDLLEVNLQNGILFVNSRIDREELCRRRAECSIHLEVIVDRPLQVFHVEVAVKDINDNPPRFSRQEQRLFILESRMPDSRFPLEGASDLDIGANAQLRYRLNPNEYFDLDVKTNEEETNFLELVLRKSLDREETQEHRLLVIATDGGKPELTGTVQLLINVLDANDNAPEFDKSIYNVRLLENAPSGTLVIKLNASDADEGINKEIVYFFSNLVLDDVKSKFIINSNTGEIKVNGELDYEDYNSYEINIDAMDKSTFPLSGHCKVVVKLLDVNDNTPEMAITTLFLPVKEDAPLSTVIALISVSDRDSGANGQVTCSLMPHVPFKLVSTFKNYYSLVLDSALDRESVSVYELVVTARDGGSPSLWATASVSVEVADVNDNAPAFAQPQYTVFVKENNPPGCHIFTVSARDADAQENALVSYSLVERRVGERPLSSYVSVHAESGKVYALQPLDHEEVELLQFQVSARDAGVPPLGSNVTLQVFVLDENDNAPALLVPRVGGTGGAVSELVPRSVGAGHVVAKVRAVDPDSGYNAWLSYELQPAPGSARIPFRVGLYTGEISTTRSLDETEAPRHRLLVLVKDHGEPPLTATATVLVSLVESGQAPKASSRASAGAVGPEAALVDVNVYLIIAICAVSSLLVLTLLLYTALRCSAQPTEAVCTRGKPTLLCSSAVGSWSYSQQRRQRVCSGEAPPKTDLMAFSPSLPQGPTSTDNPRQPNPDWRYSASLRAGMHSSVHLEEAGILRAGPGGPDQQWPTVSSATPEPEAGEVSPPVGAGVNSNSWTFKYGPGNPKQSGPGELPDKFIIPGSPAIISIRQEPTNSQIDKSDFITFGKKEETKKKKKKKKGNKTQEKKEKGNSTTDNSDQ

SEQ ID NO: 15866 - protein, 364 aa, Homo sapiens
MALTAHPSCLLALLVAGLAQGIRGPLRAQDLGPQPLELKEAFKLFQIQFNRSYLSPEEHAHRLDIFAHNLAQAQRLQEEDLGTAEFGVTPFSDLTEEEFGQLYGYRRAAGGVPSMGREIRSEEPEESVPFSCDWRKVASAISPIKDQKNCNCCWAMAAAGNIETLWRISFWDFVDVSVQELLDCGRCGDGCHGGFVWDAFITVLNNSGLASEKDYPFQGKVRAHRCHPKKYQKVAWIQDFIMLQNNEHRIAQYLATYGPITVTINMKPLQLYRKGVIKATPTTCDPQLVDHSVLLVGFGSVKSEEGIWAETVSSQSQPQPPHPTPYWILKNSWGAQWGEKVSVIYWGRGQGRTGLFPPSRPYVP

SEQ ID NO: 15867 - protein, 181 aa, Homo sapiens
MKYAENVPHNMTEKEFWTRFFQSHYFHRDRLNTGSKDLFAECAKIDEKGLKTMVSLGVKNPLLDLTALEDKPLDEGYGISSVPSASNSKSIKENSNAAIIKRFNHHSAMVLAAGLRKQEAQNEQTSEPSNMDGNSGDADCFQPAVKRVWAKKYEPFGAQVSPNTLCDCKYCIRLFPVTQFF

SEQ ID NO: 15868 - protein, 307 aa, Homo sapiens
MALKQEMAKSLLKTASLSGRTKLLHQTGLSLYSTSHGFYEEEVKKTLQQFPGGSIDLQKEDNGIGILTLNNPSRMNAFSGVMMLQLLEKVIELENWTEGKGLIVRGAKNTFSSGSDLNAVKSLGTPEDGMAVCMFMQNTLTRFMRLPLISVALVQGWALGGGAEFTTACDFRLMTPESKIRFVHKEMGIIPSWGGTTRLVEIIGSRQALKVLSGALKLDSKNALNIGMVEEVLQSSDETKSLEEAQEWLKQFIQGPPEVIRALKKSVCSGRELYLEEALQNERDLLGTVWGGPANLEAIAKKGKFNK

SEQ ID NO: 15869 - protein, 308 aa, Homo sapiens
MAALGGDGLRLLSVSRPERPPESAALGGLGPGLCCWVSVFSCLSLACSYVGSLYVWKSELPRDHPAVIKRRFTSVLVVSSLSPLCVLLWRELTGIQPGTSLLTLMGFRLEGIFPAALLPLLLTMILFLGPLMQLSMDCPCDLADGLKVVLAPRSWARCLTDMRWLRNQVIAPLTEELVFRACMLPMLAPCMGLGPAVFTCPLFFGVAHFHHIIEQLRFRQSSVGNIFLSAGHLIGPVLCHSFCNYMGFPAVCAALEHPQRRPLLAGYALGVGLFLLLLQPLTDPKLYGSLPLCVLLERAGDSEAPLCS

SEQ ID NO: 15870 - protein, 578 aa, Homo sapiens
MAVRWTWAGKSCLLLAFLTVAYIFVELLVSTFHASAGAGRARELGSRRLSDLQKNTEDLSRPLYKKPPADSRALGEWGKASKLQLNEDELKQQEELIERYAINIYLSDRISLHRHIEDKRMYECKSQKFNYRTLPTTSVIIAFYNEAWSTLLRTIHSVLETSPAVLLKEIILVDDLSDRVYLKTQLETYISNLDRVRLIRTNKREGLVRARLIGATFATGDVLTFLDCHCECNSGWLEPLLERIGRDETAVVCPVIDTIDWNTFEFYMQIGEPMIGGFDWRLTFQWHSVPKQERDRRISRIDPIRSPTMAGGLFAVSKKYFQYLGTYDTGMEVWGGENLELSFRVWQCGGKLEIHPCSHVGHVFPKRAPYARPNFLQNTARAAEVWMDEYKEHFYNRNPPARKEAYGDISERKLLRERLRCKSFDWYLKNVFPNLHVPEDRPGWHGAIRSRGISSECLDYNSPDNNPTGANLSLFGCHGQGGNQFFEYTSNKEIRFNSVTELCAEVPEQKNYVGMQNCPKDGFPVPANIIWHFKEDGTIFHPHSGLCLSAYRTPEGRPDVQMRTCDALDKNQIWSFEK

SEQ ID NO: 15871 - protein, 29 aa, Homo sapiens
MKYSCCALVLAVLGTELLGSLCSTVRSPR

SEQ ID NO: 15872 - protein, 38 aa, Homo sapiens
MGSGWVPWVVALLVNLTRLDSSMTQGTDSPVMWGCLWH

SEQ ID NO: 15873 - protein, 148 aa, Homo sapiens
MWQLWASLCCLLVLANARSRPSFHPLSDELVNYVNKRNTTWQAGHNFYNVDMSYLKRLCGTFLGGPKPPQRVMFTEDLKLPASFDAREQWPQCPTIKEIRDQGSCGSCWAFGAVEAISDRICIHTNAHVSVEVSAEDLLTCCGSMCGD

SEQ ID NO: 15874 - protein, 1632 aa, Homo sapiens
MTESSMKKLASTLLDAITDKDPLVQEQVCSALCSLGEARPVETLRACEEYLRQHDKLAHPYRAAVLRAMERVLSSRASELDKDTASTIILLASSEMTKTKDLVWDWQQAASGVLVAVGRQFISKVMEELLRRLHPGTLPHCAVLHTLASLSVANAFGVVPFLPSVLSSLLPVLGVAKQDTVRVAFCSALQRFSEGALEYLANLDRAPDPTVRKDAFATDIFSAYDVLFHQWLQSREAKLRLAVVEALGPMSHLLPSERLEEQLPKLLPGILALYKKHAETFYLSKSLGQILEAAVSVGSRTLETQLDALLAALHSQICVPVESSSPLVMSNQKEVLRCFTVLACSSPDRLLAFLLPRLDTSNERTRVGTLQVVRHVINSAAAQMEDKKPFILSSMRLPLLDTNSKVKRAVVQVISAMAHHGYLEQPGGEAMIEYIVQQCALPPEQEPEKPGPGSKDPKADSVRAISVRTLYLVSTTVDRMSHVLWPYLLQFLTPVRFTGALTPLCRSLVHLAQKRQEAGADAFLIQYDAHASLPSPYAVTGRLLVVSSSPYLGDGRGAAALRLLSVLHPNIHPLLGQHWETTVPLLLGYLDEHTEETLPQEEWEEKLLMFLRDTLAIISDNAWICQLSLELCRQLPCYDEAPQEKNFLYKCIGTTLGAASSKEVVRKHLQELLETARYQEEAEREGLACCFGICAISHLEDTLAQLEDFVRSEVFRKSIGILNIFKDRSENEVEKVKSALILCYGHVAARAPRELVLAKVESDILRNICQHFSTKDPALKLCLVQSVCMVSRAICSSTQAGSFHFTRKAELVAQMMEFIRAEPPDSLRTPIRKKAMLTCTYLVSVEPALDEQARADVIHGCLHSIMALLPEPKEEDGGCQKSLYLETLHALEDLLTSLLQRNMTPQGLQIMIEHLSPWIKSPRGHERARALGLSALLLRYFLEHLRVSALVPFHNLGLLIGLFSPRCADLWPATRQEAVDCVYSLLYLQLGYEGFSRDYRDDVAERLLSLKDGLVHPDPAILFHTCHSVGQIIAKRLPPDQLISLLLTMFEALGDPEKNCSRAATVMINCLLQERGGVLQEKVPEIVSVLRSKLQEAQGEHVLPAAQHSVYLLATQHCAAVVSSLLGSPLPLDSHTCMLWRALAVEPRLAAQVLGLLLEKMSRDVPFKESRAFLLGRTPDRVATLLPLSATCALFEVMSTPAAGPAVLELYPQLFVVLLLRVSCTVGVQLPRNLQAQERRGASPALATRNLEPCSSAVDTLRSMLLRSGSEDVVQRMDLEGGWELLRTSAGHEEGATRLARAMAEHAGPRLPLVLKTLACTHSSAYENQRVTTTAFLAELLNSNVANDLMLLDSLLESLAARQKDTCASVRRLVLRGLANLASGCPDKVRTHGPQLLTAMIGGLDDGDNPHSPVALEAMLGLARLVHLVESWDLRSGLLHVAIRIRPFFDSEKMEFRTASIRLFGHLNKVCHGDCEDVFLDQVVGGLAPLLLHLQDPQATVASACRFALRMCGPNLACEELSAAFQKHLQEGRALHFGEFLNTTCKHLMHHFPDLLGRLLTTCLFYFKSSWENVRAAAPLFTGFLVLHSEPRQQPQVDLDQLIAALQILLKDPAPEVRTRAAEALGRLVKLA

SEQ ID NO: 15875 - protein, 183 aa, Homo sapiens
MQRLGATLLCLLLAAAVPTAPAPAPTATSAPVKPGPALSYPQEEATLNEMFREVEELMEDTQHKLRSAVEEMEAEEAAAKASSEVNLANLPPSYHNETNTDTKVGNNTIHVHREIHKECIIDEDCGPSMYCQFASFQYTCQPCRGQRMLCTRDSECCGDQLCVWGHCTKMATRGSNGTICDNQ

SEQ ID NO: 15876 - protein, 471 aa, Homo sapiens
MEAAPPGPPWPLLLLLLLLLALCGCPAPAAASPLLLFANRRDVRLVDAGGVKLESTIVVSGLEDAAAVDFQFSKGAVYWTDVSEEAIKQTYLNQTGAAVQNVVISGLVSPDGLACDWVGKKLYWTDSETNRIEVANLNGTSRKVLFWQDLDQPRAIALDPAHGYMYWTDWGETPRIERAGMDGSTRKIIVDSDIYWPNGLTIDLEEQKLYWADAKLSFIHRANLDGSFRQKVVEGSLTHPFALTLSGDTLYWTDWQTRSIHACNKRTGGKRKEILSALYSPMDIQVLSQERQPFFHTRCEEDNGGCSHLCLLSPSEPFYTCACPTGVQLQDNGRTCKAGAEEVLLLARRTDLRRISLDTPDFTDIVLQVDDIRHAIAIDYDPLEGYVYWTDDEVRAIRRAYLDGSGAQTLVNTEINDPDGIAVDWVARNLYWTDTGTDRIEVTRLNGTSRKILVSEDLDEPRAIALHPVMG

SEQ ID NO: 15877 - protein, 360 aa, Homo sapiens
MAGKRSGWSRAALLQLLLGVNLVVMPPTRARSLRFVTLLYRHGDRSPVKTYPKDPYQEEEWPQGFGQLTKEGMLQHWELGQALRQRYHGFLNTSYHRQEVYVRSTDFDRTLMSAEANLAGLFPPNGMQRFNPNISWQPIPVHTVPITEDRQTHGLRLPPWASPQTMQRLSRLKDFSFRFLFGIYQQAEKARLQGGVLLAQIRKNLTLMATTSQLPKLLVYSAHDTTLVALQMALDVYNGEQAPYASCHIFELYQEDSGNFSVEMYFRNESDKAPWPLSLPGCPHRCPLQDFLRLTEPVVPKDWQQECQLASGPADTEVIVALAVCGSILFLLIVLLLTVLFRMQAQPPGYRHVADGEDHA

SEQ ID NO: 15878 - protein, 141 aa, Homo sapiens
MSEDEEKVKLRRLEPAIQKFIKIVIPTDLERLRKHQINIEKYQRCRIWDKLHEEHINAGRTVQQLRSNIREIEKLCLKVRKDDLVLLKRMIDPVKEEASAATAEFLQLHLESVEELKKQFNDEETLLQPPLTRSMTVGGLN

SEQ ID NO: 15879 - protein, 146 aa, Homo sapiens
MKTLFLGVTLGLAAALSFTLEEEDITGTWYVKAMVVDKDFPEDRRPRKVSPVKVTALGGGNLEATFTFMREDRCIQKKILMRKTEEPGKFSAYGGRKLIYLQELPGTDDYVFYCKDQRRGGLRYMGKLVGPCRCPHLGSPGHLTCR

SEQ ID NO: 15880 - protein, 136 aa, Homo sapiens
MSWKKALRIPGDLRVATVTLMLAMLSSLLAEGRDSPEDFVFQFKGMCYFTNGTERVRLVTRYIYNREEYARFDSDVGVYRAVTPQGRPDAEYWNSQKEVLEGTRAELDTVCRHNYEVAFRGILQRRGMVTGLSRSW

SEQ ID NO: 15881 - protein, 208 aa, Homo sapiens
MASPGCLWLLAVALLPWTCASRALQHLDPPAPLPLVIWHGMGDSCCNPLSMGAIKKMVEKKIPGIYVLSLEIGKTLMEEGSGSEMPFTSHDQSDLGWGTTSSLVQAEYWHDPIKEDVYRNHSIFLADINQERGINESYKKNLMALKKFVMVKFLNDSIVDPVDSEWFGFYRSGQAKETIPLQETSLYTQDRLGLKEMDNAGQLVFLAT

SEQ ID NO: 15882 - protein, 543 aa, Homo sapiens
MAVNSSGYSRWCCFADSWQREKLASMESPEEPGASMDENYFVNYTFKDRSHSGRVAQGIMKLCLEEELFADVTISVEGREFQLHRLVLSAQSCFFRSMFTSNLKEAHNRVIVLQDVSESVFQLLVDYIYHGTVKLRAEELQEIYEVSDMYQLTSLFEECSRFLARTVQVGNCLQVMWLADRHSDPELYTAAKHCAKTHLAQLQNTEEFLHLPHRLLTDIISDGVPCSQNPTEAIEAWINFNKEEREAFAESLRTSLKEIGENVHIYLIGKESSRTHSLAVSLHCAEDDSISVSGQNSLCHQITAACKHGGDLYVVGGSIPRRMWKCNNATVDWEWCAPLPRDRLQHTLVSVPGKDAIYSLGGKTLQDTLSNAVIYYRVGDNVWTETTQLEVAVSGAAGANLNGIIYLLGGEENDLDFFTKPSRLIQCFDTETDKCHVKPYVLPFAGRMHAAVHKDLVFIVAEGDSLVCYNPLLDSFTRLCLPEAWSSAPSLWKIASCNGSIYVFRDRYKKGDANTYKLDPATSAVTVTRGIKVLLTNLQFVLA

SEQ ID NO: 15883 - protein, 95 aa, Homo sapiens
MENHKSNNKENITIVDISRKINQLPEAERNLLENGSVYVGLNAALCGLIANSLFRRILNVTKARIAAGLPMAGIPFLTTDLTYRCFVIWIVKPVP

SEQ ID NO: 15884 - protein, 196 aa, Homo sapiens
MAETEALSKLREDFRMQNKSVFILGASGETGRVLLKEILEQGLFSKVTLIGRRKLTFDEEAYKNVNQEVVDFEKLDDYASAFQGHDVGFCCLGTTRGKAGAGEVEAKVEELKFDRYSVFRPGVLLCDRQESRPGEWLVRKFFGSLPDSWASGHSVPVVTVVRAMLNNVVRPRDKQMELLENKAIHDLGKAHGSLKP

SEQ ID NO: 15885 - protein, 119 aa, Homo sapiens
MGIQGGSVLFGLLLVLAVFCHSGHSLQCYNCPNPTADCKTAVNCSSDFDACLITKAELGYHYVAQAGRRQSSHFSLLKCWDYRCEPSHWPHCPYFNWGYKCITSVGSLSIAISTTSQPA

SEQ ID NO: 15886 - protein, 138 aa, Homo sapiens
MALPPGPAALRHTLLLLPALLSSGWGELEPQIDGQTWAERALRENERHAFTCRVAGGPGTPRLAWYLDGQLQEASTSRLLSVGGEAFSGGTSTFTVTAHRAQHELNCSLQDPRSGRSANASVILNVQFKPEIAQVGAK

SEQ ID NO: 15887 - protein, 508 aa, Homo sapiens
MADDIDIEAMLEAPYKKDENKLSSANGHEERSKKRKKSKSRSRSHERKRSKSKERKRSRDRERKKSKSRERKRSRSKERRRSRSRSRDRRFRGRYRSPYRRRSRSKSPFRKDKSPVREPIDNLTPEERDARTVFCMQLAARIRPRDLEEFFSTVGKVRDVRMISDRNSRRSKGIAYVEFVDVSSVPLAIGLTGQRVLGVPIIVQASQAEKNRAAAMANNLQKGSAGPMRLYVGSLHFNITEDMLRGIFEPFGRIESIQLMMDSETGRSKGYGFITFSDSECAKKALEQLNGFELAGRPMKVGHVTERTDASSASSFLDSDELERTGIDLGTTGRLQLMARLAEGTGLQIPPAAQQALQMSGSLAFGAVAEFSFVIDLQTRLSQQTEASALAAAASVQPLATQCFQLSNMFNPQTEEEVGWDTEIKDDVIEECNKHGGVIHIYVDKNSAQGNVYVKCPSIAAAIAAVNALHGRWFAGKMITAAYVPLPTYHNLFPDSMTATQLLVPSRR

SEQ ID NO: 15888 - protein, 115 aa, Homo sapiens
MRTLFNLLWLALACSPVHTTLSKSDAKKAASKTLLEKSQFSDKPVQDRGLVVTDLKAESVVLEHRSYCSAKARDRHFAGDVLGYVTPWNSHGYDVTKVFGSKFTQISPVWLQLKR

SEQ ID NO: 15889 - protein, 25 aa, Homo sapiens
MWTALVLIWIFSLSLSESHAASNDP

SEQ ID NO: 15890 - protein, 3972 aa, Homo sapiens
MAHSCRWRFPARPGTTGGGGGGGRRGLGGAPRQRVPALLLPPGPPVGGGGPGAPPSPPAVAAAAAAAGSSGAGVPGGAAAASAASSSSASSSSSSSSSASSGPALLRVGPGFDAALQVSAAIGTNLRRFRAVFGESGGGGGSGEDEQFLGFGSDEEVRVRSPTRSPSVKTSPRKPRGRPRSGSDRNSAILSDPSVFSPLNKSETKSGDKIKKKDSKSIEKKRGRPPTFPGVKIKITHGKDISELPKGNKEDSLKKIKRTPSATFQQATKIKKLRAGKLSPLKSKFKTGKLQIGRKGVQIVRRRGRPPSTERIKTPSGLLINSELEKPQKVRKDKEGTPPLTKEDKTVVRQSPRRIKPVRIIPSSKRTDATIAKQLLQRAKKGAQKKIEKEAAQLQGRKVKTQVKNIRQFIMPVVSAISSRIIKTPRRFIEDEDYDPPIKIARLESTPNSRFSAPSCGSSEKSSAASQHSSQMSSDSSRSSSPSVDTSTDSQASEEIQVLPEERSDTPEVHPPLPISQSPENESNDRRSRRYSVSERSFGSRTTKKLSTLQSAPQQQTSSSPPPPLLTPPPPLQPASSISDHTPWLMPPTIPLASPFLPASTAPMQGKRKSILREPTFRWTSLKHSRSEPQYFSSAKYAKEGLIRKPIFDNFRPPPLTPEDVGFASGFSASGTAASARLFSPLHSGTRFDMHKRSPLLRAPRFTPSEAHSRIFESVTLPSNRTSAGTSSSGVSNRKRKRKVFSPIRSEPRSPSHSMRTRSGRLSSSELSPLTPPSSVSSSLSISVSPLATSALNPTFTFPSHSLTQSGESAEKNQRPRKQTSAPAEPFSSSSPTPLFPWFTPGSQTERGRNKDKAPEELSKDRDADKSVEKDKSRERDREREKENKRESRKEKRKKGSEIQSSSALYPVGRVSKEKVVGEDVATSSSAKKATGRKKSSSHDSGTDITSVTLGDTTAVKTKILIKKGRGNLEKTNLDLGPTAPSLEKEKTLCLSTPSSSTVKHSTSSIGSMLAQADKLPMTDKRVASLLKKAKAQLCKIEKSKSLKQTDQPKAQGQESDSSETSVRGPRIKHVCRRAAVALGRKRAVFPDDMPTLSALPWEEREKILSSMGNDDKSSIAGSEDAEPLAPPIKPIKPVTRNKAPQEPPVKKGRRSRRCGQCPGCQVPEDCGVCTNCLDKPKFGGRNIKKQCCKMRKCQNLQWMPSKAYLQKQAKAVKKKEKKSKTSEKKDSKESSVVKNVVDSSQKPTPSAREDPAPKKSSSEPPPRKPVEEKSEEGNVSAPGPESKQATTPASRKSSKQVSQPALVIPPQPPTTGPPRKEVPKTTPSEPKKKQPPPPESGPEQSKQKKVAPRPSIPVKQKPKEKEKPPPVNKQENAGTLNILSTLSNGNSSKQKIPADGVHRIRVDFKEDCEAENVWEMGGLGILTSVPITPRVVCFLCASSGHVEFVYCQVCCEPFHKFCLEENERPLEDQLENWCCRRCKFCHVCGRQHQATKQLLECNKCRNSYHPECLGPNYPTKPTKKKKVWICTKCVRCKSCGSTTPGKGWDAQWSHDFSLCHDCAKLFAKGNFCPLCDKCYDDDDYESKMMQCGKCDRWVHSKCENLSGTEDEMYEILSNLPESVAYTCVNCTERHPAEWRLALEKELQISLKQVLTALLNSRTTSHLLRYRQAAKPPDLNPETEESIPSRSSPEGPDPPVLTEVSKQDDQQPLDLEGVKRKMDQGNYTSVLEFSDDIVKIIQAAINSDGGQPEIKKANSMVKSFFIRQMERVFPWFSVKKSRFWEPNKVSSNSGMLPNAVLPPSLDHNYAQWQEREENSHTEQPPLMKKIIPAPKPKGPGEPDSPTPLHPPTPPILSTDRSREDSPELNPPPGIEDNRQCALCLTYGDDSANDAGRLLYIGQNEWTHVNCALWSAEVFEDDDGSLKNVHMAVIRGKQLRCEFCQKPGATVGCCLTSCTSNYHFMCSRAKNCVFLDDKKVYCQRHRDLIKGEVVPENGFEVFRRVFVDFEGISLRRKFLNGLEPENIHMMIGSMTIDCLGILNDLSDCEDKLFPIGYQCSRVYWSTTDARKRCVYTCKIVECRPPVVEPDINSTVEHDENRTIAHSPTSFTESSSKESQNTAEIISPPSPDRPPHSQTSGSCYYHVISKVPRIRTPSYSPTQRSPGCRPLPSAGSPTPTTHEIVTVGDPLLSSGLRSIGSRRHSTSSLSPQRSKLRIMSPMRTGNTYSRNNVSSVSTTGTATDLESSAKVVDHVLGPLNSSTSLGQNTSTSSNLQRTVVTVGNKNSHLDGSSSSEMKQSSASDLVSKSSSLKGEKTKVLSSKSSEGSAHNVAYPGIPKLAPQVHNTTSRELNVSKIGSFAEPSSVSFSSKEALSFPHLHLRGQRNDRDQHTDSTQSANSSPDEDTEVKTLKLSGMSNRSSIINEHMGSSSRDRRQKGKKSCKETFKEKHSSKSFLEPGQVTTGEEGNLKPEFMDEVLTPEYMGQRPCNNVSSDKIGDKGLSMPGVPKAPPMQVEGSAKELQAPRKRTVKVTLTPLKMENESQSKNALKESSPASPLQIESTSPTEPISASENPGDGPVAQPSPNNTSCQDSQSNNYQNLPVQDRNLMLPDGPKPQEDGSFKRRYPRRSARARSNMFFGLTPLYGVRSYGEEDIPFYSSSTGKKRGKRSAEGQVDGADDLSTSDEDDLYYYNFTRTVISSGGEERLASHNLFREEEQCDLPKISQLDGVDDGTESDTSVTATTRKSSQIPKRNGKENGTENLKIDRPEDAGEKEHVTKSSVGHKNEPKMDNCHSVSRVKTQGQDSLEAQLSSLESSRRVHTSTPSDKNLLDTYNTELLKSDSDNNNSDDCGNILPSDIMDFVLKNTPSMQALGESPESSSSELLNLGEGLGLDSNREKDMGLFEVFSQQLPTTEPVDSSVSSSISAEEQFELPLELPSDLSVLTTRSPTVPSQNPSRLAVISDSGEKRVTITEKSVASSESDPALLSPGVDPTPEGHMTPDHFIQGHMDADHISSPPCGSVEQGHGNNQDLTRNSSTPGLQVPVSPTVPIQNQKYVPNSTDSPGPSQISNAAVQTTPPHLKPATEKLIVVNQNMQPLYVLQTLPNGVTQKIQLTSSVSSTPSVMETNTSVLGPMGGGLTLTTGLNPSLPTSQSLFPSASKGLLPMSHHQHLHSFPAATQSSFPPNISNPPSGLLIGVQPPPDPQLLVSESSQRTDLSTTVATPSSGLKKRPISRLQTRKNKKLAPSSTPSNIAPSDVVSNMTLINFTPSQLPNHPSLLDLGSLNTSSHRTVPNIIKRSKSSIMYFEPAPLLPQSVGGTAATAAGTSTISQDTSHLTSGSVSGLASSSSVLNVVSMQTTTTPTSSASVPGHVTLTNPRLLGTPDIGSISNLLIKASQQSLGIQDQPVALPPSSGMFPQLGTSQTPSTAAITAASSICVLPSTQTTGITAASPSGEADEHYQLQHVNQLLASKTGIHSSQRDLDSASGPQVSNFTQTVDAPNSMGLEQNKALSSAVQASPTSPGGSPSSPSSGQRSASPSVPGPTKPKPKTKRFQLPLDKGNGKKHKVSHLRTSSSEAHIPDQETTSLTSGTGTPGAEAEQQDTASVEQSSQKECGQPAGQVAVLPEVQVTQNPANEQESAEPKTVEEEESNFSSPLMLWLQQEQKRKESITEKKPKKGLVFEISSDDGFQICAESIEDAWKSLTDKVQEARSNARLKQLSFAGVNGLRMLGILHDAVVFLIEQLSGAKHCRNYKFRFHKPEEANEPPLNPHGSARAEVHLRKSAFDMFNFLASKHRQPPEYNPNDEEEEEVQLKSARRATSMDLPMPMRFRHLKKTSKEAVGVYRSPIHGRGLFCKRNIDAGEMVIEYAGNVIRSIQTDKREKYYDSKGIGCYMFRIDDSEVVDATMHGNAARFINHSCEPNCYSRVINIDGQKHIVIFAMRKIYRGEELTYDYKFPIEDASNKLPCNCGAKKCRKFLN

SEQ ID NO: 15891 - protein, 242 aa, Homo sapiens
MSVPAFIDISEEDQVRKWISDWNLTTEKKHTLLRLLYEALVDCKKSDAASKVMVELLGSYTEDNASQARVDAHRCIVRALKDPNAFLFDHLLTLKPVKFLEGELIHDLLTIFVSAKLASYVKFYQNNKDFIDSLGLLHEQNMAKMRLLTFMGMAVENKEISFDTMQQELQIGADDVEAFVIDAVRTKMVYCKIDQTQRKVVVSHSTHRTFGKQQWQQLYDTLNAWKQNLNKVKNSLLSLSDT

SEQ ID NO: 15892 - protein, 125 aa, Homo sapiens
MDFWLWPLYFLPVSGALRILPEVKVEGELGGSVTIKCPLPEMHVRIYLCREMAGSGTCGTVVSTTNFIKAEYKGRVTLKQYPRKNLFLVENTSHHGKSSQCLRLQNGFICPICSRCLHMPVLPNS

SEQ ID NO: 15893 - protein, 5762 aa, Homo sapiens
MGAPSACRTLVLALAAMLVVPQAETQGPVEPSWENAGHTMDGGAPTSSPTRRVSFVPPVTVFPSLSPLNPAHNGRVCSTWGDFHYKTFDGDVFRFPGLCNYVFSEHCRAAYEDFNVQLRRGLVGSRPVVTRVVIKAQGLVLEASNGSVLINGQREELPYSRTGLLVEQSGDYIKVSIRLVLTFLWNGEDSALLELDPKYANQTCGLCGDFNGLPAFNEFYAHNARLTPLQFGNLQKLDGPTEQCPDPLPLPAGNCTDEEGICHRTLLGPAFAECHALVDSTAYLAACAQDLCRCPTCPCATFVEYSRQCAHAGGQPRNWRCPELCPRTCPLNMQHQECGSPCTDTCSNPQRAQLCEDHCVDGCFCPPGTVLDDITHSGCLPLGQCPCTHGGRTYSPGTSFNTTCSSCTCSGGLWQCQDLPCPGTCSVQGGAHISTYDEKLYDLHGDCSYVLSKKCADSSFTVLAELRKCGLTDNENCLKAVTLSLDGGDTAIRVQADGGVFLNSIYTQLPLSAANITLFTPSSFFIVVQTGLGLQLLVQLVPLMQVFVRLDPAHQGQMCGLCGNFNQNQADDFTALSGVVEATGAAFANTWKAQAACANARNSFEDPCSLSVENENYARHWCSRLTDPNSAFSRCHSIINPKPFHSNCMFDTCNCERSEDCLCAALSSYVHACAAKGVQLSDWRDGVCTKYMQNCPKSQRYAYVVDACQPTCRGLSEADVTCSVSFVPVDGCTCPAGTFLNDAGACVPAQECPCYAHGTVLAPGEVVHDEGAVCSCTGGKLSCLGASLQKSTGCAAPMVYLDCSNSSAGTPGAECLRSCHTLDVGCFSTHCVSGCVCPPGLVSDGSGGCIAEEDCPCVHNEATYKPGETIRVDCNTCTCRNRRWECSHRLCLGTCVAYGDGHFITFDGDRYSFEGSCEYILAQDYCGDNTTHGTFRIVTENIPCGTTGTTCSKAIKLFVESYELILQEGTFKAVARGPGGDPPYKIRYMGIFLVIETHGMAVSWDRKTSVFIRLHQDYKGRVCGLCGNFDDNAINDFATRSRSVVGDALEFGNSWKLSPSCPDALAPKDPCTANPFRKSWAQKQCSILHGPTFAACRSQVDSTKYYEACVNDACACDSGGDCECFCTAVAAYAQACHDAGLCVSWRTPDTCPLFCDFYNPHGGCEWHYQPCGAPCLKTCRNPSGHCLVDLPGLEGCYPKCPPSQPFFNEDQMKCVAQCGCYDKDGNYYDVGARVPTAENCQSCNCTPSGIQCAHSLEACTCTYEDRTYSYQDVIYNTTDGLGACLIAICGSNGTIIRKAVACPGTPATTPFTFTTAWVPHSTTSPALPVSTVCVREVCRWSSWYNGHRPEPGLGGGDFETFENLRQRGYQVCPVLADIECRAAQLPDMPLEELGQQVDCDRMRGLMCANSQQSPPLCHDYELRVLCCEYVPCGPSPAPGTSPQPSLSASTEPAVPTPTQTTATEKTTLWVTPSIRSTAALTSQTGSSSGPVTVTPSAPGTTTCQPRCQWTEWFDEDYPKSEQLGGDVESYDKIRAAGGHLCQQPKDIECQAESFPNWTLAQVGQKVHCDVHFGLVCRNWEQEGVFKMCYNYRIRVLCCSDDHCRGRATTPPPTTELETATTTTTQALFSTPQPTSSPGLTRAPPASTTAVPTLSEGLTSPRYTSTLGTATTGGPTTPAGSTEPTVPGVATSTLPTRSALPGTTGSLGTWRPSQPPTLAPTTMATSRARPTGTASTASKEPLTTSLAPTLTSELSTSQAETSTPRTETTMSPLTNTTTSQGTTRCQPKCEWTEWFDVDFPTSGVAGGDMETFENIRAAGGKMCWAPKSIECRAENYPEVSIDQVGQVLTCSLETGLTCKNEDQTGRFNMCFNYNVRVLCCDDYSHCPSTPATSSTATPSSTPGTTWILTKPTTTATTTASTGSTATPTSTLRTAPPPKVLTTTATTPTVTSSKATPSSSPGTATALPALRSTATTPTATSVTPIPSSSLGTTWTRLSQTTTPTATMSTATPSSTPETAHTSTVLTATATTTGATGSVATPSSTPGTAHTTKVPTTTTTGFTATPSSSPGTALTPPVWISTTTTPTTRGSTVTPSSIPGTTHTATVLTTTTTTVATGSMATPSSSTQTSGTPPSLTTTATTITATGSTTNPSSTPGTTPIPPVLTTTATTPAATSNTVTPSSALGTTHTPPVPNTMATTHGRSLPPSSPHTVRTAWTSATSGILGTTHITEPSTVTSHTLAATTGTTQHSTPALSSPHPSSRTTESPPSPGTTTPGHTTATSRTTATATPSKTRTSTLLPSSPTSAPITTVVTMGCEPQCAWSEWLDYSYPMPGPSGGDFDTYSNIRAAGGAVCEQPLGLECRAQAQPGVPLRELGQVVECSLDFGLVCRNREQVGKFKMCFNYEIRVFCCNYGHCPSTPATSSTAMPSSTPGTTWILTELTTTATTTESTGSTATPSSTPGTTWILTEPSTTATVTVPTGSTATASSTQATAGTPHVSTTATTPTVTSSKATPFSSPGTATALPALRSTATTPTATSFTAIPSSSLGTTWTRLSQTTTPTATMSTATPSSTPETVHTSTVLTTTATTTGATGSVATPSSTPGTAHTTKVLTTTTTGFTATPSSSPGTARTLPVWISTTTTPTTRGSTVTPSSIPGTTHTPTVLTTTTTTVATGSMATPSSSTQTSGTPPSLTTTATTITATGSTTNPSSTPGTTPIPPVLTTTATTPAATSSTVTPSSALGTTHTPPVPNTTATTHGRSLSPSSPHTVRTAWTSATSGTLGTTHITEPSTGTSHTPAATTGTTQHSTPALSSPHPSSRTTESPPSPGTTTPGHTRATSRTTATATPSKTRTSTLLPSSPTSAPITTVVTMGCEPQCAWSEWLDYSYPMPGPSGGDFDTYSNIRAAGGAVCEQPLGLECRAQAQPGVPLRELGQVVECSLDFGLVCRNREQVGKFKMCFNYEIRVFCCNYGHCPSTPATSSTATPSSTPGTTWILTEQTTAATTTATTGSTAIPSSTPGTAPPPKVLTSTATTPTATSSKATSSSSPRTATTLPVLTSTATKSTATSFTPIPSFTLGTTGTLPEQTTTPMATMSTIHPSSTPETTHTSTVLTTKATTTRATSSMSTPSSTPGTTWILTELTTAATTTAATGPTATPSSTPGTTWILTEPSTTATVTVPTGSTATASSTRATAGTLKVLTSTATTPTVISSRATPSSSPGTATALPALRSTATTPTATSVTAIPSSSLGTAWTRLSQTTTPTATMSTATPSSTPETVHTSTVLTTTTTTTRATGSVATPSSTPGTAHTTKVPTTTTTGFTATPSSSPGTALTPPVWISTTTTPTTRGSTVTPSSIPGTTHTATVLTTTTTTVATGSMATPSSSTQTSGTPPSLTTTATTITATGSTTNPSSTPGTTPIPPVLTTTATTPAATSSTVTPSSALGTTHTPPVPNTTATTHGRSLPPSSPHTVRTAWTSATSGILGTTHITEPSTVTSHTPAATTSTTQHSTPALSSPHPSSRTTESPPSPGTTTPGHTRGTSRTTATATPSKTRTSTLLPSSPTSAPITTVVTTGCEPQCAWSEWLDYSYPMPGPSGGDFDTYSNIRAAGGAVCEQPLGLECRAQAQPGVPLRELGQVVECSLDFGLVCRNREQVGKFKMCFNYEIRVFCCNYGHCPSTPATSSTATPSSTPGTTWILTKLTTTATTTESTGSTATPSSTPGTTWILTEPSTTATVTVPTGSTATASSTQATAGTPHVSTTATTPTVTSSKATPFSSPGTATALPALRSTATTPTATSFTAIPSSSLGTTWTRLSQTTTPTATMSTATPSSTPETAHTSTVLTTTATTTRATGSVATPSSTPGTAHTTKVPTTTTTGFTVTPSSSPGTARTPPVWISTTTTPTTSGSTVTPSSVPGTTHTPTVLTTTTTTVATGSMATPSSSTQTSGTPPSLITTATTITATGSTTNPSSTPGTTPIPPVLTTTATTPAATSSTVTPSSALGTTHTPPVPNTTATTHGRSLSPSSPHTVRTAWTSATSGTLGTTHITEPSTGTSHTPAATTGTTQHSTPALSSPHPSSRTTESPPSPGTTTPGHTTATSRTTATATPSKTRTSTLLPSSPTSAPITTVVTTGCEPQCAWSEWLDYSYPMPGPSGGDFDTYSNIRAAGGAVCEQPLGLECRAQAQPGVPLGELGQVVECSLDFGLVCRNREQVGKFKMCFNYEIRVFCCNYGHCPSTPATSSTAMPSSTPGTTWILTELTTTATTTASTGSTATPSSTPGTAPPPKVLTSPATTPTATSSKATSSSSPRTATTLPVLTSTATKSTATSVTPIPSSTLGTTGTLPEQTTTPVATMSTIHPSSTPETTHTSTVLTTKATTTRATSSTSTPSSTPGTTWILTELTTAATTTAATGPTATPSSTPGTTWILTELTTTATTTASTGSTATPSSTPGTTWILTEPSTTATVTVPTGSTATASSTQATAGTPHVSTTATTPTVTSSKATPSSSPGTATALPALRSTATTPTATSFTAIPSSSLGTTWTRLSQTTTPTATMSTATPSSTPETVHTSTVLTATATTTGATGSVATPSSTPGTAHTTKVPTTTTTGFTATPSSSPGTALTPPVWISTTTTPTTTTPTTSGSTVTPSSIPGTTHTARVLTTTTTTVATGSMATPSSSTQTSGTPPSLTTTATTITATGSTTNPSSTPGTTPITPVLTSTATTPAATSSKATSSSSPRTATTLPVLTSTATKSTATSFTPIPSSTLWTTWTVPAQTTTPMSTMSTIHTSSTPETTHTSTVLTTTATMTRATNSTATPSSTLGTTRILTELTTTATTTAATGSTATLSSTPGTTWILTEPSTIATVMVPTGSTATASSTLGTAHTPKVVTTMATMPTATASTVPSSSTVGTTRTPAVLPSSLPTFSVSTVSSSVLTTLRPTGFPSSHFSTPCFCRAFGQFFSPGEVIYNKTDRAGCHFYAVCNQHCDIDRFQGACPTSPPPVSSAPLSSPSPAPGCDNAIPLRQVNETWTLENCTVARCVGDNRVVLLDPKPVANVTCVNKHLPIKVSDPSQPCDFHYECECICSMWGGSHYSTFDGTSYTFRGNCTYVLMREIHARFGNLSLYLDNHYCTASATAAAARCPRALSIHYKSMDIVLTVTMVHGKEEGLILFDQIPVSSGFSKNGVLVSVLGTTTMRVDIPALGVSVTFNGQVFQARLPYSLFHNNTEGQCGTCTNNQRDDCLQRDGTTAASCKDMAKTWLVPDSRKDGCWAPTGTPPTASPAAPVSSTPTPTPCPPQPLCDLMLSQVFAECHNLVPPGPFFNACISDHCRGRLEVPCQSLEAYAELCRARGVCSDWRGATGGLCDLTCPPTKVYKPCGPIQPATCNSRNQSPQLEGMAEGCFCPEDQILFNAHMGICVQACPCVGPDGFPKFPGERWVSNCQSCVCDEGSVSVQCKPLPCDAQGQPPPCNRPGFVTVTRPRAENPCCPETVCVCNTTTCPQSLPVCPPGQESICTQEEGDCCPTFRCRPQLCSYNGTFYGVGATFPGALPCHMCTCLSGDTQDPTVQCQEDACNNTTCPQGFEYKRVAGQCCGECVQTACLTPDGQPVQLNETWVNSHVDNCTVYLCEAEGGVHLLTPQPASCPDVSSCRGSLRKTGCCYSCEEDSCQVRINTTILWHQGCETEVNITFCEGSCPGASKYSAEAQAMQHQCTCCQERRVHEETVPLHCPNGSAILHTYTHVDECGCTPFCVPAPMAPPHTRGFPAQEATAV

SEQ ID NO: 15894 - protein, 195 aa, Homo sapiens
MNRFLLLMSLYLLGSARGTSSQPNELSGSIDHQTSVQQLPGEQPSGEQPSGEHLSGEQPLSELESGEQPSDEQPSGEHGSGEQPSGEQASGEQPSGEHASGEQASGAPISSTSTGTILNCYTCAYMNDQGKCLRGEGTCITQNSQQCMLKKIFEGGKLQFMVQGCENMCPSMNLFSHGTRMQIICCRNQSFCNKI

SEQ ID NO: 15895 - protein, 620 aa, Homo sapiens
MAPDSDPFPEGPLLKLLPLDARDRGTQRCRLGPAALHALGARLGSAVKISLPDGGSCLCTAWPRRDGADGFVQLDPLCASPGAAVGASRSRRSLSLNRLLLVPCPPLRRVAVWPVLRERAGAPGARNTAAVLEAAQELLRNRPISLGHVVVAPPGAPGLVAALHIVGGTPSPDPAGLVTPRTRVSLGGEPPSEAQPQPEVPLGGLSEAADSLRELLRLPLRYPRALTALGLAVPRGVLLAGPPGVGKTQLVRAVAREAGAELLAVSAPALQGSRPGETEENVRRVFQRARELASRGPSLLFLDEMDALCPQRGSRAPESRVVAQVLTLLDGASGDREVVVVGATNRPDALDPALRRPGRFDREVVIGTPTLKQRKEILQVITSKMPISSHVDLGLLAEMTVGYVGADLTALCREAAMHALLHSEKNQDNPVIDEIDFLEAFKNIQPSSFRSVIGLMDIKPVDWEEIGGLEDVKLKLKQSIEWPLKFPWEFVRMGLTQPKGVLLYGPPGCAKTTLVRALATSCHCSFVSVSGADLFSPFVGDSEKVLSQIFRQARASTPAILFLDEIDSILGARSASKTGCDVQERVLSVLLNELDGVGLKTIERRGSKSSQQGKYKELKK

SEQ ID NO: 15896 - protein, 285 aa, Homo sapiens
MLLLVTSLLLCELPHPAFLLIPEKSDLRTVAPASSLNVRFDSRTMNLSWDCQENTTFSKCFLTDKKNRVVEPRLSNNECSCTFREICLHEGVTFEVHVNTSQRGFQQKLLYPNSGREGTAAQNFSCFIYNADLMNCTWARGPTAPRDVQYFLYIRNSKRRREIRCPYYIQDSGTHVGCHLDNLSGLTSRNYFLVNGTSREIGIQFFDSLLDTKKIERFNPPSNVTVRCNTTHCLVRWKQPRTYQKLSYLDFQYQLDVHRKNTQPGTENLLVLTTGTSALCTFMCS

SEQ ID NO: 15897 - protein, 176 aa, Homo sapiens
MAIFSVYVVNKAGGLIYQLDSYAPRAEAEKTFSYPLDLLLKLHDERVLVAFGQRDGIRVGHAVLAINGMDVNGRLFAIGSQLSPEQGSSGIEMLETDTFKLHCYQTLTGIKFVVLADPRQAGIDSLLRKIYEIYSDFALKNPFYSLEMPIRCELFDQNLKLALEVAEKAGTFGPGS

SEQ ID NO: 15898 - protein, 195 aa, Homo sapiens
MVTSSFPISVAVFALITLQVGTQDSFIAAVYEHAVILPNKTETPVSQEDALNLMNENIDILETAIKQAAEQGARIIVTPEDALYGWKFTRETVFPYLEDIPDPQVNWIPCQDPHRFGHTPVQARLSCLAKDNSIYVLANLGDKKPCNSRDSTCPPNGYFQYNTNVVYNTEGKLVARYHKEVVFMHQMVPKCIIMT

SEQ ID NO: 15899 - protein, 514 aa, Homo sapiens
MAAFKLDFLPEMMVDHCSLNSSPVSKKMNGTLDHPDQPDLDAIKMFVGQVPRTWSEKDLRELFEQYGAVYEINVLRDRSQNPPQSKGCCFVTFYTRKAALEAQNALHNMKVLPGMHHPIQMKPADSEKNNAVEDRKLFIGMISKKCTENDIRVMFSSFGQIEECRILRGPDGLSRGCAFVTFTTRAMAQTAIKAMHQAQTMEGCSSPMVVKFADTQKDKEQKRMAQQLQQQMQQISAASVWGNLAGLNTLGPQYLALYLQLLQQTASSGNLNTLSSLHPMGGLNAMQLQNLAALAAAASAAQNTPSGTNALTTSSSPLSVLTSSAGSSPSSSSSNSVNPIASLGALQTLAGATAGLNVGSLAGMAALNGGLGSSGLSNGTGSTMEALTQAYSGIQQYAAAALPTLYNQNLLTQQSIGAAGSQKEGPEGANLFIYHLPQEFGDQDLLQMFMPFGNVVSAKVFIDKQTNLSKCFGFVSYDNPVSAQAAIQSMNGFQIGMKRLKVQLKRSKNDSKPY

SEQ ID NO: 15900 - protein, 300 aa, Homo sapiens
MSFPPHLNRPPMGIPALPPGIPPPQFPGFPPPVPPGTPMIPVPMSIMAPAPTVLVPTVSMVGKHLGARKDHPGLKAKENDENCGPTTTVFVGNISEKASDMLIRQLLAKCGLVLSWKRVQGASGKLQAFGFCEYKEPESTLRALRLLHDLQIGEKKLLVKVDAKTKAQLDEWKAKKKASNGNARPETVTNDDEEALDEETKRRDQMIKGAIEVLIREYSSELNAPSQESDSHPRKKKKEKKEDIFRRFPVAPLIPYPLITKEDINAIEMEEDKRDLISREISKFRDTHKVVFLSFHLIPI

SEQ ID NO: 15901 - protein, 620 aa, Homo sapiens
MDRVLLRWISLFWLTAMVEGLQVTVPDKKKVAMLFQPTVLRCHFSTSSHQPAVVQWKFKSYCQDRMGESLGMSSTRAQSLSKRNLEWDPYLDCLDSRRTVRVVASKQGSTVTLGDFYRGREITIVHDADLQIGKLMWGDSGLYYCIITTPDDLEGKNEDSVELLVLEWVFVGLVLLGVFLFFVLVGICWCQCCPHSCCCYVRCPCCPDSCCCPQALYEAGKAAKAGYPPSVSGVPGPYSIPSVPLGGAPSSGMLMDKPHPPPLAPSDSTGGSHSVRKGYRIQADKERDSMKVLYYVEKELAQFDPARRMRGRYNNTISELSSLHEEDSNFRQSFHQMRSKQFPVSGDLESNPDYWSGVMGGSSGASRGPSAMEYNKEDRESFRHSQPRSKSEMLSRKNFATGVPAVSMDELAAFADSYGQRPRRADGNSHEARGGSRFERSESRAHSGFYQDDSLEEYYGQRSRSREPLTDADRGWAFSPARRRPAEDAHLPRLVSRTPGTAPKYDHSYLGSARERQARPEGASRGGSLETPSKRSAQLGPRSASYYAWSPPGTYKAGSSQDDQEDASDDALPPYSELELTRGPSYRGRDLPYHSNSEKKRKKEPAKKTNDFPTRMSLVV

SEQ ID NO: 15902 - protein, 60 aa, Homo sapiens
MDAVSQVPMEVVLPKHILDIWVIVLIILATIVIMTSLLLCPATAVIIYRMRTHPILSGAV

SEQ ID NO: 15903 - protein, 391 aa, Homo sapiens
MAAVVENVVKLLGEQYYKDAMEQCHNYNARLCAERSVRLPFLDSQTGVAQSNCYIWMEKRHRGPGLASGQLYSYPARRWRKKRRAHPPEDPRLSFPSIKPDTDQTLKKEGLISQDGSSLEALLRTDPLEKRGAPDPRVDDDSLGEFPVTNSRARKRILEPDDFLDDLDDEDYEEDTPKRRGKGKSKGKGVGSARKKLDASILEDRDKPYACDICGKRYKNRPGLSYHYAHSHLAEEEGEDKEDSQPPTPVSQRSEEQKSKKGPDGLALPNNYCDFCLGDSKINKKTGQPEELVSCSDCGRSGHPSCLQFTPVMMAAVKTYRWQCIECKCCNICGTSENDDQLLFCDDCDRGYHMYCLTPSMSEPPEGSWSCHLCLDLLKEKASIYQNQNSS

SEQ ID NO: 15904 - protein, 161 aa, Homo sapiens
MRGGKCNMLSSLGCLLLCGSITLALGNAQKLPKDAEPKYLIVVRPAPPPSQKKSCSGKTRSRKPLQLVVGTLTPSSVFLSWGFLINPHHDWTLPSHCPNDRFYTIRYREKDKEKKWIFQICPATETIVENLKPNTVYEFGVKDNVEGGIWSKIFNHKTVVG

SEQ ID NO: 15905 - protein, 299 aa, Homo sapiens
MVTSSFPISVAVFALITLQVGTQDSFIAAVYEHAVILPNKTETPVSQEDALNLMNENIDILETAIKQAAEQGARIIVTPEDALYGWKFTRETVFPYLEDIPDPQVNWIPCQDPHRFGHTPVQARLSCLAKDNSIYVLANLGDKKPCNSRDSTCPPNGYFQYNTNVVYNTEGKLVARYHKVCTLLKCKTTNLTTCGRPVETASTRFEMFSLSGTFGTEYVFPEVLLTEIHLSPGKFEVLKDGRLVNKNGSSGPILTVSLFGRWYTKDSLYSSCGTSNSAITYLLIFILLMIIALQNIVML

SEQ ID NO: 15906 - protein, 142 aa, Homo sapiens
MHPDLGPLCTLLYVTLTILCSSVSSDLAPYFTSEPLSAVQKLGGPVVLHCSAQPVTTRISWLHNGKTLDGNLEHVKIHQGTLTILSLNSSLLGYYQCLANNSIGAIVSGPATVSVAVLGDFGSSTKHVITAEEKSAGFIGCR

SEQ ID NO: 15907 - protein, 76 aa, Homo sapiens
MKYSCCALVLAVLGTELLGSLCSTVRSPRFRGRIQQERKNIRPNIILVLTDDQDVELGSLQVMNKTRKIMEHGGAT

SEQ ID NO: 15908 - protein, 610 aa, Homo sapiens
MSGQSLTDRITAAQHSVTGSAVSKTVCKATTHEIMGPKKKHLDYLIQCTNEMNVNIPQLADSLFERTTNSSWVVVFKSLITTHHLMVYGNERFIQYLASRNTLFNLSNFLDKSGLQGYDMSTFIRRYSRYLNEKAVSYRQVAFDFTKVKRGADGVMRTMNTEKLLKTVPIIQNQMDALLDFNVNSNELTNGVINAAFMLLFKDAIRLFAAYNEGIINLLEKYFDMKKNQCKEGLDIYKKFLTRMTRISEFLKVAEQVGIDRGDIPDLSQAPSSLLDALEQHLASLEGKKIKDSTAASRATTLSNAVSSLASTGLSLTKVDEREKQAALEEEQARLKALKEQRLKELAKKPHTSLTTAASPVSTSAGGIMTAPAIDIFSTPSSSNSTSKLPNDLLDLQQPTFHPSVHPMSTASQVASTWGGFTPSPVAQPHPSAGLNVDFESVFGNKSTNVIVDSGGFDELGGLLKPTVASQNQNLPVAKLPPSKLVSDDLDSSLANLVGNLGIGNGTTKNDVNWSQPGEKKLTGGSNWQPKVAPTTAWNAATMNGMHFPQYAPPVMAYPATTPTGMIGYGIPPQMGSVPVMTQPTLIYSQPVMRPPNPFGPVSGAQIQFM

SEQ ID NO: 15909 - protein, 134 aa, Homo sapiens
MEERGDSEPTPGCSGLGPGGVRGFGDGGGAPSWAPEDAWMGTHPKYLEMMELDIGDATQVYVAFLVYLDLMESKSWHEVNCVGLPELQLICLVGTEIEGEGLQTVVPTPITASLSHNRIREILKASRKLQEYFS

SEQ ID NO: 15910 - protein, 437 aa, Homo sapiens
MDRVLLRWISLFWLTAMVEGLQVTVPDKKKVAMLFQPTVLRCHFSTSSHQPAVVQWKFKSYCQDRMGESLGMSSTRAQSLSKRNLEWDPYLDCLDSRRTVRVVASKQGSTVTLGDFYRGREITIVHDADLQIGKLMWGDSGLYYCIITTPDDLEGKNEDSVELLVLGRTGLLADLLPSFAVEIMPEWVFVGLVLLGVFLFFVLVGICWCQCCPHSCCCYVRCPCCPDSCCCPQALYEAGKAAKAGYPPSVSGVPGPYSIPSVPLGGAPSSGMLMDKPHPPPLAPSDSTGGSHSVRKGYRIQADKERDSMKVLYYVEKELAQFDPARRMRGRYNNTISELSSLHEEDSNFRQSFHQMRSKQFPVSGDLESNPDYWSGVMGGSSGASRGPSAMEYNKEDRESFRHRMTFQPGCPLWSDVVNISLDNEKSDMDYGDKTQI

SEQ ID NO: 15911 - protein, 841 aa, Homo sapiens
GPLRLLALLLLLLLLLLLQLQHLAAAAADPLLGGQGPAKDCEKDQFQCRNERCIPSVWRCDEDDDCLDHSDEDDCPKKTCADSDFTCDNGHCIHERWKCDGEEECPDGSDESEATCTKQVCPAEKLSCGPTSHKCVPASWRCDGEKDCEGGADEAGCATSLGTCRGDEFQCGDGTCVLAIKHCNQEQDCPDGSDEAGCLQVPPTFLGNRRRPRGLNECLHNNGGCSHICTDLKIGFECTCPAGFQLLDQKTCGDIDECKDPDACSQICVNYKGYFKCECYPGYEMDLLTKNCKAAAGKSPSLIFTNRHEVRRIDLVKRNYSRLIPMLKNVVALDVEVATNRIYWCDLSYRKIYSAYMDKASDPKEQEVLIDEQLHSPEGLAVDWVHKHIYWTDSGNKTISVATVDGGRRRTLFSRNLSEPRAIAVDPLRGFMYWSDWGDQAKIEKSGLNGVDRQTLVSDNIEWPNGITLDLLSQRLYWVDSKLHQLSSIDFSGGNRKTLISSTDFLSHPFGIAVFEDKVFWTDLENEAIFSANRLNGLEISILAENLNNPHDIVIFHELKQPRAPDACELSVQPNGGCEYLCLPAPQISSHSPKYTCACPDTMWLGPDMKRCYRAPQSTSTTTLASTMTRTVPATTRAPGTTVHRSTYQNHSTETPSLTAAVPSSVSVPRAPSISPSTLSPATSNHSQHYANEDSKMGSTVTAAVIGIIVPIVVIALLCMSGYLIWRNWKRKNTKSMNFDNPVYRKTTEEEDEDELHIGRTAQIGHVYPAAISSFDRPLWAEPCLGETREPEDPAPALKELFVLPGEPRSQLHQLPKNPLSELPVVKSKRVALSLEDDGLP

SEQ ID NO: 15912 - protein, 82 aa, Homo sapiens
MPGLLNWITGAALPLTASDVTSCVSGYALGLTASLTYGNLEAQPFQGLFVYPLDECTTVIGFEAVIADRVVTVQIKDKAKLE

SEQ ID NO: 15913 - protein, 1011 aa, Homo sapiens
MPAARPPAAGLRGISLFLALLLGSPAAALERDALPEGDASPLGPYLLPSGAPERGSPGKEHPEERVVTAPPSSSQSAEVLGELVLDGTAPSAHHDIPALSPLLPEEARPKHALPPKKKLPSLKQVNSARKQLRPKATSAATVQRAGSQPASQGLDLLSSSTEKPGPPGDPDPIVASEEASEVPLWLDRKESAVPTTPAPLQISPFTSQPYVAHTLPQRPEPGEPGPDMAQEAPQEDTSPMALMDKGENELTGSASEESQETTTSTIITTTVITTEQAPALCSVSFSNPEGYIDSSDYPLLPLNNFLECTYNVTVYTGYGVELQVKSVNLSDGELLSIRGVDGPTLTVLANQTLLVEGQVIRSPTNTISVYFRTFQDDGLGTFQLHYQAFMLSCNFPRRPDSGDVTVMDLHSGGVAHFHCHLGYELQGAKMLTCINASKPHWSSQEPICSAPCGGAVHNATIGRVLSPSYPENTNGSQFCIWTIEAPEGQKLHLHFERLLLHDKDRMTVHSGQTNKSALLYDSLQTESVPFEGLLSEGNTIRIEFTSDQARAASTFNIRFEAFEKGHCYEPYIQNGNFTTSDPTYNIGTIVEFTCDPGHSLEQGPAIIECINVRDPYWNDTEPLCRAMCGGELSAVAGVVLSPNWPEPYVEGEDCIWKIHVGEEKRIFLDIQFLNLSNSDILTIYDGDEVMPHILGQYLGNSGPQKLYSSTPDLTIQFHSDPAGLIFGKGQGFIMNYIEVSRNDSCSDLPEIQNGWKTTSHTELVRGARITYQCDPGYDIVGSDTLTCQWDLSWSSDPPFCEKIMYCTDPGEVDHSTRLISDPVLLVGTTIQYTCNPGFVLEGSSLLTCYSRETGTPIWTSRLPHCVSEESLACDNPGLPENGYQILYKRLYLPGESLTFMCYEGFELMGEVTIRCILGQPSHWNGPLPVCKEAAAETSLEGGNMALAIFIPVLIISLLLGGAYIYITRCRYYSNLRLPLMYSHPYSQITVETEFDNPIYETGETREYEVSI

SEQ ID NO: 15914 - protein, 158 aa, Homo sapiens
MAFITYVLLAGMALGIQKRFSPEVLGLCASTALVWVVMEVLALLLGLYLATVRSDLSTFHLLAYSGYKYVGMILSVLTGLLFGSDGYYVALAWTSSALMYFIVSLVHPPIPLPSLEGKPPPPGQASVLLSSRCALCGQQPWAPTAWGAPSPGSVSSST

SEQ ID NO: 15915 - protein, 2054 aa, Homo sapiens
MFNLMKKDKDKDGGRKEKKEKKEKKERMSAAELRSLEEMSLRRGFFNLNRSSKRESKTRLEISNPIPIKVASGSDLHLTDIDSDSNRGSVILDSGHLSTASSSDDLKGEEGSFRGSVLQRAAKFGSLAKQNSQMIVKRFSFSQRSRDESASETSTPSEHSAAPSPQVEVRTLEGQLVQHPGPGIPRPGHRSRAPELVTKKFPVDLRLPPVVPLPPPTLRELELQRRPTGDFGFSLRRTTMLDRGPEGQACRRVVHFAEPGAGTKDLALGLVPGDRLVEINGHNVESKSRDEIVEMIRQSGDSVRLKVQPIPELSELSRSWLRSGEGPRREPSDAKTEEQIAAEEAWNETEKVWLVHRDGFSLASQLKSEELNLPEGKVRVKLDHDGAILDVDEDDVEKANAPSCDRLEDLASLVYLNESSVLHTLRQRYGASLLHTYAGPSLLVLGPRGAPAVYSEKVMHMFKGCRREDMAPHIYAVAQTAYRAMLMSRQDQSIILLGSSGSGKTTSCQHLVQYLATIAGISGNKVFSVEKWQALYTLLEAFGNSPTIINGNATRFSQILSLDFDQAGQVASASIQTMLLEKLRVARRPASEATFNVFYYLLACGDGTLRTELHLNHLAENNVFGIVPLAKPEEKQKAAQQFSKLQAAMKVLGISPDEQKACWFILAAIYHLGAAGATKEAAEAGRKQFARHEWAQKAAYLLGCSLEELSSAIFKHQHKGGTLQRSTSFRQGPEESGLGDGTGPKLSALECLEGMAAGLYSELFTLLVSLVNRALKSSQHSLCSMMIVDTPGFQNPEQGGSARGASFEELCHNYTQDRLQRLFHERTFVQELERYKEENIELAFDDLEPPTDDSVAAVDQASHQSLVRSLARTDEARGLLWLLEEEALVPGASEDTLLERLFSYYGPQEGDKKGQSPLLHSSKPHHFLLGHSHGTNWVEYNVTGWLNYTKQNPATQNAPRLLQDSQKKIISNLFLGRAGSATVLSGSIAGLEGGSQLALRRATSMRKTFTTGMAAVKKKSLCIQMKLQVDALIDTIKKSKLHFVHCFLPVAEGWAGEPRSASSRRVSSSSELDLPSGDHCEAGLLQLDVPLLRTQLRGSRLLDAMRMYRQGYPDHMVFSEFRRRFDVLAPHLTKKHGRNYIVVDERRAVEELLECLDLEKSSCCMGLSRVFFRAGTLARLEEQRDEQTSRNLTLFQAACRGYLARQHFKKRKIQDLAIRCVQKNIKKNKGVKDWPWWKLFTTVRPLIEVQLSEEQIRNKDEEIQQLRSKLEKAEKERNELRLNSDRLESRISELTSELTDERNTGESASQLLDAETAERLRAEKEMKELQTQYDALKKQMEVMEMEVMEARLIRAAEINGEVDDDDAGGEWRLKYERAVREVDFTKKRLQQEFEDKLEVEQQNKRQLERRLGDLQADSEESQRALQQLKKKCQRLTAELQDTKLHLEGQQVRNHELEKKQRRFDSELSQAHEEAQREKLQREKLQREKDMLLAEAFSLKQQLEEKDMDIAGFTQKVVSLEAELQDISSQESKDEASLAKVKKQLRDLEAKVKDQEEELDEQAGTIQMLEQAKLRLEMEMERMRQTHSKEMESRDEEVEEARQSCQKKLKQMEVQLEEEYEDKQKVLREKRELEGKLATLSDQVNRRDFESEKRLRKDLKRTKALLADAQLMLDHLKNSAPSKREIAQLKNQLEESEFTCAAAVKARKAMEVEIEDLHLQIDDIAKAKTALEEQLSRLQREKNEIQNRLEEDQEDMNELMKKHKAAVAQASRDLAQINDLQAQLEEANKEKQELQEKLQALQSQVEFLEQSMVDKSLVSRQEAKIRELETRLEFERTQVKRLESLASRLKENMEKLTEERDQRIAAENREKEQNKRLQRQLRDTKEEMGELARKEAEASRKKHELEMDLESLEAANQSLQADLKLAFKRIGDLQAAIEDEMESDENEDLINSLQDMVTKYQKRKNKLEGDSDVDSELEDRVDGVKSWLSKNKGPSKAASDDGSLKSSSPTSYWKSLAPDRSDDEHDPLDNTSRPRYSHSYLSDSDTEAKLTETNA

SEQ ID NO: 15916 - protein, 298 aa, Homo sapiens
MPGLLNWITGAALPLTASDVTSCVSGYALGLTASLTYGNLEAQPFQGLFVYPLDECTTVIGFEAVIADRVVTVQIKDKAKLESGHFDASHVRSPTVTGNILQDGVSIAPHSCTPGKVTLDEDLERILFVANLGTIAPMENVTIFISTSSELPTLPSGAVRVLLPAVCAPTVPQFCTKSTGTSNQQAQGKDRHCFGAWAPGSWNKLCLATLLNTEVSNPMEYEFNFQLEIRGPCLLAGGEIEAAWPWSHCRSGAPNGAGMSLISGLDLGVPQRTPLSPDLMSLYPPCLSMPLRGGESHS

SEQ ID NO: 15917 - protein, 203 aa, Homo sapiens
MRSLLLLSAFCLLEAALAAEVKKPAAAAAPGTAEKLSPKAATLAERSAGLAFSLYQAMAKDQAVENILVSPVVVASSLGLVSLGGKATTASQAKAVLSAEQLRDEEVHAGLGELLRSLSNSTARNVTWKLGSRLYGPSSVSFADDFVRSSKQHYNCEHSKINFRDKRSALQSINEWAAQTTDGKLPEVTKDVERTDGALLVNA

SEQ ID NO: 15918 - protein, 108 aa, Homo sapiens
MGIQGGSVLFGLLLVLAVFCHSGHSLQCYNCPNPTADCKTAVNCSSDFDACLITKAGLQVYNKCWKFEHCNFNDVTTRLRENELTYYCCKKDLCNFNEQLENGSEPGA

SEQ ID NO: 15919 - protein, 103 aa, Homo sapiens
MASRSMRLLLLLSCLAKTGVLGDIIMRPSCAPGWFYHKSNCYGYFRKLRNWSDAELECQSYGNGAHLASILSLKEASTIAEYISGYQRSQPIWIGLHDPQKTF

SEQ ID NO: 15920 - protein, 763 aa, Homo sapiens
MPMDLILVVWFCVCTARTVVGFGMDPDLQMDIVTELDLVNTTLGVAQVSGMHNASKAFLFQDIEREIHAAPHVSEKLIQLFRNKSEFTILATVQQKPSTSGVILSIRELEHSYFELESSGLRDEIRYHYIHNGKPRTEALPYRMADGQWHKVALSVSASHLLLHVDCNRIYERVIDPPDTNLPPGINLWLGQRNQKHGLFKGIIQDGKIIFMPNGYITQCPNLNHTCPTCSDFLSLVQGIMDLQELLAKMTAKLNYAETRLSQLENCHCEKTCQVSGLLYRDQDSWVDGDHCRNCTCKSGAVECRRMSCPPLNCSPDSLPVHIAGQCCKVCRPKCIYGGKVLAEGQRILTKSCRECRGGVLVKITEMCPPLNCSEKDHILPENQCCRVCRGHNFCAEGPKCGENSECKNWNTKATCECKSGYISVQGDSAYCEDIDECAAKMHYCHANTVCVNLPGLYRCDCVPGYIRVDDFSCTEHDECGSGQHNCDENAICTNTVQGHSCTCKPGYVGNGTICRAFCEEGCRYGGTCVAPNKCVCPSGFTGSHCEKDIDECALRTHTCWNDSACINLAGGFDCLCPSGPSCSGDCPHEGGLKHNGQVWTLKEDRCSVCSCKDGKIFCRRTACDCQNPSADLFCCPECDTRVTSQCLDQNGHKLYRSGDNWTHSCQQCRCLEGEVDCWPLTCPNLSCEYTAILEGECCPRCVSDPCLADNITYDIRKTCLDSYGVSRLSGSVWTMAGSPCTTCKCKNGRVCCSVDFECLQNN

SEQ ID NO: 15921 - protein, 111 aa, Homo sapiens
MHPDLGPLCTLLYVTLTILCSSVSSDLAPYFTSEPLSAVQKLGGPVVLHCSAQPVTTRISWLHNGKTLDGNLEHVKIHQGTLTILSLNSSLLGYYQCLANNSIGAIVSGPA

SEQ ID NO: 15922 - protein, 98 aa, Homo sapiens
MKLLSLVAVVGCLLVPPAEANKSSEDIRCKCICPPYRNISGHIYNQNVSQKDCNCLHVVEPMPVPGHDVEAYCLLCECRSSLSSTCPWWVPCCSTWPS

SEQ ID NO: 15923 - protein, 1701 aa, Homo sapiens
MGNSDSQYTLQGSKNHSNTITGAKQIPCSLKIRGIHAKEEKSLHGWGHGSNGAGYKSRSLARSCLSHFKSNQPYASRLGGPTCKVSRGVAYSTHRTNAPGKDFQGISAAFSTENGFHSVGHELADNHITSRDCNGHLLNCYGRNESIASTPPGEDRKSPRVLIKTLGKLDGCLRVEFHNGGNPSKVPAEDCSEPVQLLRYSPTLASETSPVPEARRGSSADSLPSHRPSPTDSRLRSSKGSSLSSESSWYDSPWGNAGELSEAEGSFLAPGMPDPSLHASFPPGDAKKPFNQSSSLSSLRELYKDANLGSLSPSGIRLSDEYMGTHASLSNRVSFASDIDVPSRVAHGDPIQYSSFTLPCRKPKAFVEDTAKKDSLKARMRRISDWTGSLSRKKRKLQEPRSKEGSDYFDSRSDGLNTDVQGSSQASAFLWSGGSTQILSQRSESTHAIGSDPLRQNIYENFMRELEMSRTNTENIETSTETAESSSESLSSLEQLDLLFEKEQGVVRKAGWLFFKPLVTVQKERKLELVARRKWKQYWVTLKGCTLLFYETYGKNSMDQSSAPRCALFAEDSIVQSVPEHPKKENVFCLSNSFGDVYLFQATSQTDLENWVTAVHSACASLFAKKHGKEDTLRLLKNQTKNLLQKIDMDSKMKKMAELQLSVVSDPKNRKAIENQIQQWEQNLEKFHMDLFRMRCYLASLQGGELPNPKSLLAAASRPSKLALGRLGILSVSSFHALVCSRDDSALRKRTLSLTQRGRNKKGIFSSLKGLDTLARKGKEKRPSITQVDELLHIYGSTVDGVPRDNAWEIQTYVHFQDNHGVTVGIKPEHRVEDILTLACKMRQLEPSHYGLQLRKLVDDNVEYCIPAPYEYMQQQVYDEIEVFPLNVYDVQLTKTGSVCDFGFAVTAQVDERQHLSRIFISDVLPDGLAYGEGLRKGNEIMTLNGEAVSDLDLKQMEALFSEKSVGLTLIARPPDTKATLCTSWSDSDLFSRDQKSLLPPPNQSQLLEEFLDNFKKNTANDFSNVPDITTGLKRSQTDGTLDQVSHREKMEQTFRSAEQITALCRSFNDSQANGMEGPRENQDPPPRSLARHLSDADRLRKVIQELVDTEKSYVKDLSCLFELYLEPLQNETFLTQDEMESLFGSLPEMLEFQKVFLETLEDGISASSDFNTLETPSQFRKLLFSLGGSFLYYADHFKLYSGFCANHIKVQKVLERAKTDKAFKAFLDARNPTKQHSSTLESYLIKPVQRVLKYPLLLKELVSLTDQESEEHYHLTEALKAMEKVASHINEMQKIYEDYGTVFDQLVAEQSGTEKEVTELSMGELLMHSTVSWLNPFLSLGKARKDLELTVFVFKRAVILVYKENCKLKKKLPSNSRPAHNSTDLDPFKFRWLIPISALQVRLGNPAGTENNSIWELIHTKSEIEGRPETIFQLCCSDSESKTNIVKVIRSILRENFRRHIKCELPLEKTCKDRLVPLKNRVPVSAKLASSRSLKVLKNSSSNEWTGETGKGTLLDSDEGSLSSGTQSSGCPTAEGRQDSKSTSPGKYPHPGLADFADNLIKESDILSDEDDDHRQTVKQGSPTKDIEIQFQRLRISEDPDVHPEAEQQPGPESGEGQKGGEQPKLVRGHFCPIKRKANSTKRDRGTLLKAQIRHQSLDSQSENATIDLNSVLEREFSVQSLTSVVSEECFYETESHGKS

SEQ ID NO: 15924 - protein, 601 aa, Homo sapiens
MAGASELGTGPGAAGGDGDDSLYPIAVLIDELRNEDVQLRLNSIKKLSTIALALGVERTRSELLPFLTDTIYDEDEVLLALAEQLGNFTGLVGGPDFAHCLLPPLENLATVEETVVRDKAVESLRQISQEHTPVALEAYFVPLVKRLASGDWFTSRTSACGLFSVCYPRASNAVKAEIRQQFRSLCSDDTPMVRRAAASKLGEFAKVLELDSVKSEIVPLFTSLASDEQDSVRLLAVEACVSIAQLLSQDDLETLVMPTLRQAAEDKSWRVRYMVADRFSELQKAMGPKITLNDLIPAFQNLLKDCEAEVRAAAAHKVKELGENLPIEDRETIIMNQILPYIKELVSDTNQHVKSALASVIMGLSTILGKENTIEHLLPLFLAQLKDECPDVRLNIISNLDCVNEVIGIRQLSQSLLPAIVELAEDAKWRVRLAIIEYMPLLAGQLGVEFFDEKLNSLCMAWLVDHVYAIREAATNNLMKLVQKFGTEWAQNTIVPKVLVMANDPNYLHRMTTLFCINALSEACGQEITTKQMLPIVLKMAGDQVANVRFNVAKSLQKIGPILDTNALQGEVKPVLQKLGQDEDMDVKYFAQEAISVLALA

SEQ ID NO: 15925 - protein, 263 aa, Homo sapiens
MRPRGLPPLLVVLLGCWASVSAQTDATPAVTTEGLNSTEAALATFGTFPSTRPPGTPRAPGPSSGPRPTPVTDVAVLCVCDLSPAQCDINCCCDPDCSSVDFSVFSACSVPVVTGDSQFCSQKAVIYSLNFTANPPQRVFELVDQINPSIFCIHITNYKPALSFINPEVPDENNFDTLMKTSDGFTLNAESYVSFTTKLDIPTAAKYEYGVPLQTSDSFLRFPSSLTSSLCTDNNPAGQAYWFTPVIPALWEAEARGSLERFW

SEQ ID NO: 15926 - protein, 257 aa, Homo sapiens
MVGAGISTPSGIPDFRSPGSGLYSNLQQYDLPYPEAIFELPFFFHNPKPFFTLAKELYPGNYKPNVTHYFLRLLHDKGLLLRLYTQNIDGLERVSGIPASKLVEAHGTFASATCTVCQRPFPGEDIRADVMADRVPRCPVCTGVVKPDIVFFGEPLPQRFLLHVVDFPMADLLLILGTSLEVEPFASLTEAVRSSVPRLLINRDLVGPLAWHPRSRDVAQLGDVVHGVESLVELLGWTEEMRDLVQRETGKLDGPDK

SEQ ID NO: 15927 - protein, 58 aa, Homo sapiens
MLPCASCLPGSLLLWALLLLLLGSASPQDSEEPDSYTVGTVRAAGLGQEGCQRVSDHP

SEQ ID NO: 15928 - protein, 106 aa, Homo sapiens
MGSWALLWPPLLFTGLLVRPPGTMAQAQYCSVNKDIFEVEENTNVTEPLVDIHVPEGQEVTLGALSTPFAFRIQGNQLFLNVTPDYEKAGPFRDEAAWAHTLSTDH

SEQ ID NO: 15929 - protein, 185 aa, Homo sapiens
MLIFWTITLFLLGAAKGKEVCYEDLGCFSDTEPWGGTAIRPLKILPWSPEKIGTRFLLYTNENPNNFQILLLSDPSTIEASNFQMDRKTRFIIHGFIDKGDESWVTDMCKTEYSYPPSKVHLIGHSLGAHVAGEAGSKTPGLSRITGLDPVEASFESTPEEVRLDPSDADFVDVIHTDAAPLIPF

SEQ ID NO: 15930 - protein, 516 aa, Homo sapiens
MAAPEQPLAISRGCTSSSSLSPPRGDRTLLVRHLPAELTAEEKEDLLKYFGAQSVRVLSDKGRLKHTAFATFPNEKAAIKALTRLHQLKLLGHTLVVEFAKEQDRVHSPCPTSGSEKKKRSDDPVEDDKEKKELGYLTVENGIAPNHGLTFPLNSCLKYMYPPPSSTILANIVNALASVPKFYVQVLHLMNKMNLPTPFGPITARPPMYEDYMPLHAPLPPTSPQPPEEPPLPDEDEELSSEESEYESTDDEDRQRMNKLMELANLQPKRPKTIKQRHVRKKRKIKDMLNTPLCPSHSLHPVLLPSDVFDQPQPVGNKRIEFHISTDMPAAFKKDLEKEQNCEEKNHDLPATEVDASNIGFGKIFPKPNLDITEEIKEDSDEMPSECISRRELEKGRISREEMETLSVFRSYEPGEPNCRIYVKNLAKHVQEKDLKYIFGRYVDFSSETQRIMFDIRLMKEGRMKGQAFIGLPNEKAAAKALKEANGYVLFGKPMVVQFARSARPKQDPKEGKRKC

SEQ ID NO: 15931 - protein, 39 aa, Homo sapiens
MDTTAAAALPAFVALLLLSPWPLLGSAQGQFSAEKACSY

SEQ ID NO: 15932 - protein, 214 aa, Homo sapiens
MILNKALLLGALALTTVMSPCGGEDIVADHVASCGVNLYQFYGPSGQYTHEFDGDEQFYVDLERKETAWRWPEFSKFGGFDPQGALRNMAVAKHNLNIMIKRYNSTAATNEVPEVTVFSKSPVTLGQPNTLICLVDNIFPPVVNITWLSNGQSVTEGVSETSFLSKSDHSFFKISYLTFLPSADEIYDCKVEHWGLDQPLLKHWGASPSTGAEE

SEQ ID NO: 15933 - protein, 1493 aa, Homo sapiens
MLWPRNLTSWDDSSSVSSGISDTIDNLSTDDINTSSSISSYANTPASSRKNLDVQTDAEKHSQVERNSLWSGDDVKKSDGGSDSGIKMEPGSKWRRNPSDVSDESDKSTSGKKNPVISQTGSWRRGMTAQVGITMPRTKPSAPAGALKTPGTGKTDDAKVSEKGRLSPKASQVKRSPSDAGRSSGDESKKPLPSSSRTPTANANSFGFKKQSGSAAGLAMITASGVTVTSRSATLGKIPKSSALVSRSAGRKSSMDGAQNQDDGYLALSSRTNLQYRSLPRPSKSNSRNGAGNRSSTSSIDSNISSKSAGLPVPKLREPSKTALGSSLPGLVNQTDKEKGISSDNESVASCNSVKVNPAAQPVSSPAQTSLQPGAKYPDVASPTLRRLFGGKPTKQVPIATAENMKNSVVISNPHATMTQQGNLDSPSGSGVLSSGSSSPLYSKNVDLNQSPLASSPSSAHSAPSNSLTWGTNASSSSAVSKDGLGFQSVSSLHTSCESIDISLSSGGVPSHNSSTGLIASSKDDSLTPFVRTNSVKTTLSESDPHLDRNTLPKKGLRYTPTSQLRTQEDAKEWLRSHSAGGLQDTAANSPFSSGSSVTSPSGTRFNFSQLASPTTVTQMSLSNPTMLRTHSLSNADGQYDPYTDSRFRNSSMSLDEKSRTMSRSGSFRDGFEEVHGSSLSLVSSTSSVYSTPEEKCQSEIRKLRRELDASQEKVSALTTQLTANAHLVAAFEQSLGNMTIRLQSLTMTAEQKDSELNELRKTIELLKKQNAAAQAAINGVINTPELNCKGNGTAQSADLRIRRQHSSDSVSSINSATSHSSVGSNIESDSKKKKRKNWLRSSFKQAFGKKKSPKSASSHSDIEEMTDSSLPSSPKLPHNGSTGSTPLLRNSHSNSLISECMDSEAETVMQLRNELRDKEMKLTDIRLEALSSAHQLDQLREAMNRMQSEIEKLKAENDRLKSESQGSGCSRAPSQVSISASPRQSMGLSQHSLNLTESTSLDMLLDDTGECSARKEGGRHVKIVVSFQEEMKWKEDSRPHLFLIGCIGVSGKTKWDVLDGVVRRLFKEYIIHVDPVSQLGLNSDSVLGYSIGEIKRSNTSETPELLPCGYLVGENTTISVTVKGLAENSLDSLVFESLIPKPILQRYVSLLIEHRRIILSGPSGTGKTYLANRLSEYIVLREGRELTDGVIATFNVDHKSSKELRQYLSNLADQCNSENNAVDMPLVIILDNLHHVSSLGEIFNGLLNCKYHKCPYIIGTMNQATSSTPNLQLHHNFRWVLCANHTEPVKGFLGRFLRRKLMETEISGRVRNMELVKIIDWIPKVWHHLNRFLEAHSSSDVTIGPRLFLSCPIDVDGSRVWFTDLWNYSIIPYLLEAVREGLQLYGRRAPWEDPAKWVMDTYPWAASPQQHEWPPLLQLRPEDVGFDGYSMPREGSTSKQMPPSDAEGDPLMNMLMRLQEAANYSSPQSYDSDSNSNSHHDDILDSSLESTL

SEQ ID NO: 15934 - protein, 147 aa, Homo sapiens
MDFWLWPLYFLPVSGALRILPEVKVEGELGGSVTIKCPLPEMHVRIYLCREMAGSGTCGTVVSTTNFIKAEYKGRVTLKQYPRKNLFLVEVTQLTESDSGVYACGAGMNTDRGKTQKVTLNVHSEYEPSWEEQPMPETPKWFHLPYL

SEQ ID NO: 15935 - protein, 823 aa, Homo sapiens
MTVLQEPVQAAIWQALNHYAYRDAVFLAERLYAEVHSEEALFLLATCYYRSGKAYKAYRLLKGHSCTTPQCKYLLAKCCVDLSKLAEGEQILSGGVFNKQKSHDDIVTEFGDSACFTLSLLGHVYCKTDRLAKGSECYQKSLSLNPFLWSPFESLCEIGEKPDPDQTFKFTSLQNFSNCLPNSCTTQVPNHSLSHRQPETVLTETPQDTIELNRLNLESSNSKYSLNTDSSVSYIDSAVISPDTVPLGTGTSILSKQVQNKPKTGRSLLGGPAALSPLTPSFGILPLETPSPGDGSYLQNYTNTPPVIDVPSTGAPSKKSVARIGQTGTKSVFSQSGNSREVTPILAQTQSSGPQTSTTPQVLSPTITSPPNALPRRSSRLFTSDSSTTKENSKKLKMKFPPKIPNRKTKSKTNKGGITQPNINDSLEITKLDSSIISEGKISTITPQIQAFNLQKAAAGLMSLLREMGKGYLALCSYNCKEAINILSHLPSHHYNTGWVLCQIGRAYFELSEYMQAERIFSEVRRIENYRVEGMEIYSTTLWHLQKDVALSVLSKDLTDMDKNSPEAWCAAGNCFSLQREHDIAIKFFQRAIQVDPNYAYAYTLLGHEFVLTEELDKALACFRNAIRVNPRHYNAWYGLGMIYYKQEKFSLAEMHFQKALDINPQSSVLLCHIGVVQHALKKSEKALDTLNKAIVIDPKNPLCKFHRASVLFANEKYKSALQELEELKQIVPKESLVYFLIGKVYKKLGQTHLALMNFSWAMDLDPKGANNQIKEAIDKRYLPDDEEPITQEEQIMGTDESQESSMTDADDTQLHAAESDEF

SEQ ID NO: 15936 - protein, 364 aa, Homo sapiens
MNVYHFKKGTEICNYSYSSNILSIRLNRQRLLVCLEESIYIHNIKDMKLLKTLLDIPANPTGLCALSINHSNSYLAYPGSLTSGEIVLYDGNSLKTVCTIAAHEGTLAAITFNASGSKLASASEKGTVIRVFSVPDGQKLYEFRRGMKRYVTISSLVFSMDSQFLCASSNTETVHIFKLEQVTNSRPEEPSTWSGYMGKMFMAATNYLPTQVSDMMHQDRAFATARLNFSGQRNICTLSTIQKLPRLLVASSSGHLYMYNLDPQDGGECVLIKTHSLLGSGTTEENKENDLRPSLPQSYAATVARPSASSASTVPGYSEDGGALRGEVIPEHEFATGPVCLDDENEFPPIILCRGNQKGKTKQS

SEQ ID NO: 15937 - protein, 113 aa, Homo sapiens
MKSLRVLLVILWLQLSWVWSQQKEVEQNSGPLSVPEGAIASLNCTYSDRGSQSFFWYRQYSGKSPELIMFIYSNGDKEDGRFTAQLNKASQYVSLLIRDSQPSDSATYLCAVN

SEQ ID NO: 15938 - protein, 471 aa, Homo sapiens
MVALPMVLVLLLVLSRGESELDAKIPSTGDATEWRNPHLSMLGSCQPAPSCQKCILSHPSCAWCKQLNFTASGEAEARRCARREELLARGCPLEELEEPRGQQEVLQDQPLSQGARGEGATQLAPQRVRVTLRPGEPQQLQVRFLRAEGYPVDLYYLMDLSYSMKDDLERVRQLGHALLVRLQEVTHSVRIGFGSFVDKTVLPFVSTVPSKLRHPCPTRLERCQSPFSFHHVLSLTGDAQAFEREVGRQSVSGNLDSPEGGFDAILQAALCQEQIGWRNVSRLLVFTSDDTFHTAGDGKLGGIFMPSDGHCHLDSNGLYSRSTEFDYPSVGQVAQALSAANIQPIFAVTSAALPVYQELSKLIPKSAVGELSEDSSNVVQLIMDAYNSLSSTVTLEHSSLPPGVHISYESQCEGPEKREGKAEDRGQCNHVRINQTGLCRVWGLQDWPTGHQLQYSLCPYQCDPGLGPYLG

SEQ ID NO: 15939 - protein, 354 aa, Homo sapiens
MQLQFRSWMLAALTLLVVFLIFADISEIEEEIGAEVVINGSSSPAVVDRSNESIKHNIQPASSKWRHNQTLSLRIRKQILKFLDAEKDISVLKGTLKPGDIIHYIFDRDSTMNVSQNLYELLPRTSPLKNKHFGTCAIVGNSGVLLNSGCGQEIDAHSFVIRCNLAPVQEYARDVGLKTDLVTMNPSVIQRAFEDLVNATWREKLLQRLHSLNGSILWIPAFMARGGKERVEWVNELILKHHVNVRTAYPSLRLLHAVRGYWLTNKVHIKRPTTGLLMYTLATRFCKQIYLYGFWPFPLDQNQNPVKYHYYDSLKYGYTSQASPHTMPLEFKALKSLHEQGALKLTVGQCDGAT

SEQ ID NO: 15940 - protein, 38 aa, Homo sapiens
MATRVRTASIWAGVQWLSLLTTTSASRVQVVLLPQPPE

SEQ ID NO: 15941 - protein, 570 aa, Homo sapiens
MHQPPESTAAAAAAADISARKMAHPAMFPRRGSGSGSASALNAAGTGVGSNATSSEDFPPPSLLQPPPPAASSTSGPQPPPPQSLNLLSQAQLQAQPLAPGGTQMKKKSGFQITSVTPAQISASISSNNSIAEDTESYDDLDESHTEDLSSSEILDVSLSRATDLGEPERSSSEETLNNFQEAETPGAVSPNQPHLPQPHLPHLPQQNVVINGNAHPHHLHHHHQIHHGHHLQHGHHHPSHVAVASASITGGPPSSPVSRKLSTTGSSDSITPVAPTSAVSSSGSPASVMTNMRAPSTTGGIGINSVTGTSTVNNVNITAVGSFNPNVTSSMLGNVNISTSNIPSAAGVSVGPGVTSGVNVNILSGMGNGTISSSAAVSSVPNAAAGMTGGSVSSQQQQPTVNTSRFRVVKLDSSSEPFKKGRWTCTEFYEKENAVPATEGVLINKVVETVKQNPIEVTSERESTSGSSVSSSVSTLSHYTESVGSGEMGAPTVVVQQQQQQQQQQQQQPALQGVTLQQMDFGSTGPQSIPAVSIPQSISQSQISQVQLQSQELSYLTMKVVLLIVYLCM

SEQ ID NO: 15942 - protein, 701 aa, Homo sapiens
MGHLLSKEPRNRPSQKRPRCCSWCRRRRPLLRLPRRTPAKVPPQPAAPRSRDCFFRGPCMLCFIVHSPGAPAPAGPEEEPPLSPPPRDGAYAAASSSQHLARRYAALAAEDCAAAARRFLLSSAAAAAAAAASASSPASCCKELGLAAAAAWEQQGRSLFLASLGPVRFLGPPAAVQLFRGPTPSPAELPTPPEMVCKRKGAGVPACTPCKQPRCGGGGCGGGGGGGGGGGPAGGGASPPRPPDAGCCQAPEQPPQPLCPPPSSPTSEGAPTEAGGDAVRAGGTAPLSAQQQHECGDADCRESPENPCDCHREPPPETPDINQLPPSILLKIFSNLSLDERCLSASLVCKYWRDLCLDFQFWKQLDLSSRQQVTDELLEKIASRSQNIIEINISDCRSMSDNGVCVLAFKCPGLLRYTAYRCKQLSDTSIIAVASHCPLLQKVHVGNQDKLTDEGLKQLGSKCRELKDIHFGQCYKISDEGMIVIAKGCLKLQRIYMQENKLVTDQSVKAFAEHCPELQYVGFMGCSVTSKGVIHLTKLRNLSSLDLRHITELDNETVMEIVKRCKNLSSLNLCLNWIINDRCVEVIAKEGQNLKELYLVSCKITDYALIAIGRYSMTIETVDVGWCKEITDQGATLIAQSSKSLRYLGLMRCDKVNEVTVEQLVQQYPHITFSTVLQDCKRTLERAYQMGWTPNMSAASS

SEQ ID NO: 15943 - protein, 101 aa, Homo sapiens
MSEGVDLIDIYADEEFNQDPEFNNTDQIDLYDDVLTATSQPSDDRSSSTEPPPPVRQEPSPKPNNKTPAILYTYSGLRNRRAAVYVGSFSWVGLISERELS

SEQ ID NO: 15944 - protein, 208 aa, Homo sapiens
MVQEHDEPILKHLKDIKVKFSDAGQPMSFVLEFHFEPNEYFTNEVLTKTYRMRSEPDDSDPFSFDGPEIMGCTGCQIDWKKGKNVTLKTIKKKQKHKGRGTVRTVTKTVSNDSFFNFFAPPEVPESGDLDDDAEAILAADFEIGHFLRERIIPRSVLYFTGEAIEDDDDDYDEEGEEADEEGEEEGDEENDPDYDPKKDQNPAECKQQ

SEQ ID NO: 15945 - protein, 90 aa, Homo sapiens
MAVASDFYLRYYVGHKGKFGHEFLEFEFRPDGKLRYANNSNYKNDVMIRKEAYVHKSVMEELKRIIDDSEITKEDDALWPPPDRVGRQNK

SEQ ID NO: 15946 - protein, 172 aa, Homo sapiens
MSCTIEKALADAKALVERLRDHDDAAESLIEQTTALNKRVEAMKQYQEEIQELNEVARHRPRSTLVMGIQQENRQIRELQQENKELRTSLEEHQSALELIMSKYREQMFRLLMASKKDDPGIIMKLKEQHSKIDMVHRNKSEGFFLDASRHILEAPQHGLERRHLEANQNVH

SEQ ID NO: 15947 - protein, 523 aa, Homo sapiens
MESSKPGPVQVVLVQKDQHSFELDEKALASILLQDHIRDLDVVVVSVAGAFRKGKSFILDFMLRYLYSQKESGHSNWLGDPEEPLTGFSWRGGSDPETTGIQIWSEVFTVEKPGGKKVAVVLMDTQGAFDSQSTVKDCATIFALSTMTSSVQIYNLSQNIQEDDLQQLQLFTEYGRLAMDEIFQKPFQTLMFLVRDWSFPYEYSYGLQGGMAFLDKRLQVKEHQHEEIQNVRNHIHSCFSDVTCFLLPHPGLQVATSPDFDGKLKDIAGEFKEQLQALIPYVLNPSKLMEKEINGSKVTCRGLLEYFKAYIKIYQGEDLPHPKSMLQATAEANNLAAAASAKDIYYNNMEEVCGGEKPYLSPDILEEKHCEFKQLALDHFKKTKKMGGKDFSFRYQQELEEEIKELYENFCKHNGSKNVFSTFRTPAVLFTGIVALYIASGLTGFIGLEVVAQLFNCMVGLLLIALLTWGYIRYSGQYRELGGAIDFGAAYVLEQASSHIGNSTQATVRDAVVGRPSMDKKAQ

SEQ ID NO: 15948 - protein, 101 aa, Homo sapiens
MSRSVALAVLALLSLSGLEAIQRTPKIQVYSRHPADIEVDLLKNGERIEKVEHSDLSFSKDWSFYLLYYTEFTPTEKDEYACRVNHVTLSQPKIVKWDRDM

SEQ ID NO: 15949 - protein, 145 aa, Homo sapiens
MLLLLLLPLLWGRERVEGQKSNRKDYSLTMQSSVTVQEGMCVHVRCSFSYPVDSQTDSDPVHGYWFRAGNDISWKAPVATNNPAWAVQEETRDRFHLLGDPQTKNCTLSIRDARMSDAGRYFFRMEKGNIKWNYKYDQLSVNVTE

SEQ ID NO: 15950 - protein, 160 aa, Homo sapiens
MSPRRTLPRPLSLCLSLCLCLCLAAALGSAQSGSCRDKKNCKVVFSQQELRKRLTPLQYHVTQEKGTESAFEGEYTHHKDPGIYKCVVCGTPLFKSETKFDSGSGWPSFHDVINSEAITFTDDFSYGMHRVETSCSQVSSSFLKTQYIAFRTPGCAKYSN

SEQ ID NO: 15951 - protein, 57 aa, Homo sapiens
MFFGGEGSLTYTLVIICFLTLRLSASQNCLKKSLEDVVIDIQSSLSKGIRGNEPVYT

SEQ ID NO: 15952 - protein, 733 aa, Homo sapiens
MVSYWDTGVLLCALLSCLLLTGSSSGSKLKDPELSLKGTQHIMQAGQTLHLQCRGEAAHKWSLPEMVSKESERLSITKSACGRNGKQFCSTLTLNTAQANHTGFYSCKYLAVPTSKKKETESAIYIFISDTGRPFVEMYSEIPEIIHMTEGRELVIPCRVTSPNITVTLKKFPLDTLIPDGKRIIWDSRKGFIISNATYKEIGLLTCEATVNGHLYKTNYLTHRQTNTIIDVQISTPRPVKLLRGHTLVLNCTATTPLNTRVQMTWSYPDEKNKRASVRRRIDQSNSHANIFYSVLTIDKMQNKDKGLYTCRVRSGPSFKSVNTSVHIYDKAFITVKHRKQQVLETVAGKRSYRLSMKVKAFPSPEVVWLKDGLPATEKSARYLTRGYSLIIKDVTEEDAGNYTILLSIKQSNVFKNLTATLIVNVKPQIYEKAVSSFPDPALYPLGSRQILTCTAYGIPQPTIKWFWHPCNHNHSEARCDFCSNNEESFILDADSNMGNRIESITQRMAIIEGKNKMASTLVVADSRISGIYICIASNKVGTVGRNISFYITDVPNGFHVNLEKMPTEGEDLKLSCTVNKFLYRDVTWILLRTVNNRTMHYSISKQKMAITKEHSITLNLTIMNVSLQDSGTYACRARNVYTGEEILQKKEITIRDQEAPYLLRNLSDHTVAISSSTTLDCHANGVPEPQITWFKNNHKIQQEPELYTSTSPSSSSSSPLSSSSSSSSSSSS

SEQ ID NO: 15953 - protein, 682 aa, Homo sapiens
MGPWGWKLRWTVALLLAAAGTAVGDRCERNEFQCQDGKCISYKWVCDGSAECQDGSDESQETCLSVTCKSGDFSCGGRVNRCIPQFWRCDGQVDCDNGSDEQGCPVATCRPDEFQCSDGNCIHGSRQCDREYDCKDMSDEVGCVNVTLCEGPNKFKCHSGECITLDKVCNMARDCRDWSDEPIKECGTNECLDNNGGCSHVCNDLKIGYECLCPDGFQLVAQRRCEDIDECQDPDTCSQLCVNLEGGYKCQCEEGFQLDPHTKACKAVGSIAYLFFTNRHEVRKMTLDRSEYTSLIPNLRNVVALDTEVASNRIYWSDLSQRMICSTQLDRAHGVSSYDTVISRDIQAPDGLAVDWIHSNIYWTDSVLGTVSVADTKGVKRKTLFRENGSKPRAIVVDPVHGFMYWTDWGTPAKIKKGGLNGVDIYSLVTENIQWPNGITLDLLSGRLYWVDSKLHSISSIDVNGGNRKTILEDEKRLAHPFSLAVFEDKVFWTDIINEAIFSANRLTGSDVNLLAENLLSPEDMVLFHNLTQPREAEAAVATQETSTVRLKVSSTAVRTQHTTTRPVPDTSRLPGATPGLTTVEIVTMSHQALGDVAGRGNEKKPSSVRALSIVLPIVLLVFLCLGVFLLWKNWRLKNINSINFDNPVYQKTTEDEVHICHNQDGYSYPSRQMVSLEDDVA

SEQ ID NO: 15954 - protein, 217 aa, Homo sapiens
MLLPWATSAPGLAWGPLVLGLFGLLAASQPQAVPPYASENQTCRDQEKEYYEPQHRICCSRCPPAKCSRIRDTVCATCAENSYNEHWNYLTICQLCRPCDPVMGLEEIAPCTSKRKTQCRCQPGMFCAAWALECTHCELLSDCPPGTEAELKDEVGKGNNHCVPCKAGHFQNTSSPSARCQPHTRCENQGLVEAAPGTAQSDTTCKNPLEPLPPEMS

SEQ ID NO: 15955 - protein, 309 aa, Homo sapiens
MTFYVASLALELIWMLSSPAGPSSYKVGTMAEKFDCHYCRDPLQGKKYVQKDGHHCCLKCFDKFCANTCVECRKPIGADSKEVHYKNRFWHDTCFRCAKCLHPLANETFVAKDNKILCNKCTTREDSPKCKGCFKAIVAGDQNVEYKGTVWHKDCFTCSNCKQVIGTGSFFPKGEDFYCVTCHETKFAKHCVKCNKAITSGGITYQDQPWHADCFVCVTCSKKLAGQRFTAVEDQYYCVDCYKNFVAKKCAGCKNPITGFGKGSSVVAYEGQSWHDYCFHCKKCSVNLANKRFVFHQEQVYCPDCAKKL

SEQ ID NO: 15956 - protein, 240 aa, Homo sapiens
MSGGWMAQVGAWRTGALGLALLLLLGLGLGLEAAASPLSTPTSAQAAGIEPCTQKGQCPPPPGLPCPCTGVSDCSGGTDKKLRNCSRLACLAGELRCTLSDDCIPLTWRCDGHPDCPDSSDELGCGTNEILPEGDATTMGPPVTLESVTSLRNATTMGPPVTLESVPSVGNATSSSAGDQSGSPTAYGVIAAAAVLSASLVTATLLLLSWLRAQERLRPLGLLVAMKESLLLSEQKTSLP

SEQ ID NO: 15957 - protein, 362 aa, Homo sapiens
MEEAQRSYILTQGPLPNTCGHFWEMVWEQKSRGVVMLNRVMEKGSLKCAQYWPQKEEKEMIFEDTNLKLTLISEDIKSYYTVRQLELENLTTQETREILHFHYTTWPDFGVPESPASFLNFLFKVRESGSLSPEHGPVVVHCSAGIGRSGTFCLADTCLLLMDKRKDPSSVDIKKVLLEMRKFRMGLIQTADQLRFSYLAVIEGAKFIMGDSSVQDQWKELSHEDLEPPPEHIPPPPRPPKRILEPHNGKCREFFPNHQWVKEETQEDKDCPIKEEKGSPLNAAPYGIESMSQDTEVRSRVVGGSLRGAQAASPAKGEPSLPEKDEDHALSYWKPFLVNMCVATVLTAGAYLCYRFLFNSNT

SEQ ID NO: 15958 - protein, 828 aa, Homo sapiens
MRPRPEGRGLRAGVALSPALLLLLLLPPPPTLLGRLWAAGTPSPSAPGARQDGALGAGRVKRGWVWNQFFVVEEYTGTEPLYVGKIHSDSDEGDGAIKYTISGEGAGTIFLIDELTGDIHAMERLDREQKTFYTLRAQARDRATNRLLEPESEFIIKVQDINDSEPRFLHGPYIGSVAELSPTGTSVMQVMASDADDPTYGSSARLVYSVLDGEHHFTVDPKTGVIRTAVPDLDRESQERYEVVIQATDMAGQLGGLSGSTTVTIVVTDVNDNPPRFPQKMYQFSIQESAPIGTAVGRVKAEDSDVGENTDMTYHLKDESSSGGDVFKVTTDSDTQEAIIVVQKRLDFESQPVHTVILEALNKFVDPRFADLGTFRDQAIVRVAVTDVDEPPEFRPPSGLLEVQEDAQVGSLVGVVTARDPDAANRPVRYAIDRESDLDQIFDIDADTGAIVTGKGLDRETAGWHNITVLAMEADNHAQLSRASLRIRILDVNDNPPELATPYEAAVCEDAKPGQLIQTISVVDRDEPQGGHRFYFRLVPEAPSNPHFSLLDIQDNTAAVHTQHVGFNRQEQDVFFLPILVVDSGPPTLSSTGTLTIRICGCDSSGTIQSCNTTAFVMAASLSPGALIALLVCVLILVVLVLLILTLRRHHKSHLSSDEDEDMRDNVIKYNDEGGGEQDTEAYDMSALRSLYDFGELKGGDGGGSAGGGAGGGSGGGAGSPPQAHLPSERHSLPQGPPSPEPDFSVFRDFISRKVALADGDLSVPPYDAFQTYAFEGADSPAASLSSLHSGSSGSEQDFAYLSSWGPRFRPLAALYAGHRGDDEAQAS

SEQ ID NO: 15959 - protein, 49 aa, Homo sapiens
MELEAMSRYTSPVNPAVFPHLTVVLLAIGMFFTAWFFVYPFTEQPEDQH

SEQ ID NO: 15960 - protein, 46 aa, Homo sapiens
MAAAGAFRLRRAASALLLRSPRLPARELSAPARLYHKKVSQICEVL

SEQ ID NO: 15961 - protein, 1181 aa, Homo sapiens
MAVAVAMAGALIGSEPGPAEELAKLEYLSLVSKVCTELDNHLGINDKDLAEFVISLAEKNTTFDTFKASLVKNGAEFTDSLISNLLRLIQTMRPPAKPSTSKDPVVKPKTEKEKLKELFPVLCQPDNPSVRTMLDEDDVKVAVDVLKELEALMPSAAGQEKQRDAEHRDRTKKKKRSRSRDRNRDRDRDRERNRDRDHKRRHRSRSRSRSRTRERNKVKSRYRSRSRSQSPPKDRKDRDKYGERNLDRWRDKHVDRPPPEEPTIGDIYNGKVTSIMQFGCFVQLEGLRKRWEGLVHISELRREGRVANVADVVSKGQRVKVKVLSFTGTKTSLSMKDVDQETGEDLNPNRRRNLVGETNEETSMRNPDRPTHLSLVSAPEVEDDSLERKRLTRISDPEKWEIKQMIAANVLSKEEFPDFDEETGILPKVDDEEDEDLEIELVEEEPPFLRGHTKQSMDMSPIKIVKNPDGSLSQAAMMQSALAKERRELKQAQREAEMDSIPMGLNKHWVDPLPDAEGRQIAANMRGIGMMPNDIPEWKKHAFGGNKASYGKKTQMSILEQRESLPIYKLKEQLVQAVHDNQILIVIGETGSGKTTQITQYLAEAGYTSRGKIGCTQPRRVAAMSVAKRVSEEFGCCLGQEVGYTIRFEDCTSPETVIKYMTDGMLLRECLIDPDLTQYAIIMLDEAHERTIHTDVLFGLLKKTVQKRQDMKLIVTSATLDAVKFSQYFYEAPIFTIPGRTYPVEILYTKEPETDYLDASLITVMQIHLTEPPGDILVFLTGQEEIDTACEILYERMKSLGPDVPELIILPVYSALPSEMQTRIFDPAPPGSRKVVIATNIAETSLTIDGIYYVVDPGFVKQKVYNSKTGIDQLVVTPISQAQAKQRAGRAGRTGPGKCYRLYTERAYRDEMLTTNVPEIQRTNLASTVLSLKAMGINDLLSFDFMDAPPMETLITAMEQLYTLGALDDEGLLTRLGRRMAEFPLEPMLCKMLIMSVHLGCSEEMLTIVSMLSVQNVFYRPKDKQALADQKKAKFHQTEGDHLTLLAVYNSWKNNKFSNPWCYENFIQARSLRRAQDIRKQMLGIMDRHKLDVVSCGKSTVRVQKAICSGFFRNAAKKDPQEGYRTLIDQQVVYIHPSSALFNRQPECPKHFLPVVAVAVSLEQCLSKFEDLNKELGLVTC

SEQ ID NO: 15962 - protein, 537 aa, Homo sapiens
MQVEKGATGISLSPHLPGELAICSRSGAVCLWSPEDGLRQIYRDPETLVFRDSSSWRWADFTAHPRVLTVGDRTGVKMLDTQGPPGCGLLLFRLGAEASCQKGERVLLTQYLGHSSPKCLPPTLHLVCTQFSLYLVDERLPLVPMLKWNHGLPSPLLLARLLPPPRPSCVQPLLLGGQGGQLQLLHLAGEGASVPRLAGPPQSLPSRIDSLPAFPLLEPKIQWRLQERLKAPTIGLAAVVPPLPSAPTPGLVLFQLSAAGDVFYQQLRPQVDSSLRRDAGPPGDTQPDCHAPTASWTSQDTAGCSQWLKALLKVPLAPPVWTAPTFTHRQMLGSTELRREEEEGQRLGVLRKAMARGQLLLQRDLGSLPAAEPPPAPESGLEDKLSERLGEAWAGRGAAWWERQQGRTSEPGRQTRRPKRRTQLSSSFSLSGHVDPSEDTSSPHSPEWPPADALPLPPTTPPSQELTPDACAQGVPSEQRQMLRDYMAKLPPQRDTPGCATTPPHSQASSVRATRSQQHTPVLSSSQPLRKKPRMGF

SEQ ID NO: 15963 - protein, 337 aa, Homo sapiens
MLGVAAGMTHSNMANALASATCERCKGGFAPAEKIVNSNGELYHEQCFVCAQCFQQFPEGLFYEFEGRKYCEHDFQMLFAPCCHQCGEFIIGRVIKAMNNSWHPECFRCDLCQEVLADIGFVKNAGRHLCRPCHNREKARGLGKYICQKCHAIIDEQPLIFKNDPYHPDHFNCANCGKELTADARELKGELYCLPCHDKMGVPICGACRRPIEGRVVNAMGKQWHVEHFVCAKCEKPFLGHRHYERKGLAYCETHYNQLFGDVCFHCNRVIEGDVVSALNKAWCVNCFACSTCNTKLTLKNKFVEFDMKPVCKKCYEKFPLELKKRLKKLAETLGRK

SEQ ID NO: 15964 - protein, 556 aa, Homo sapiens [sequence omitted]

SEQ ID NO: 15965 - protein, 1022 aa, Homo sapiens
MRVQLLQDLQDFFRKKAEIETEYSRNLEKLAERFMAKTRSTKDHQQYKKDQNLLSPVNCWYLLLNQVRRESKDHATLSDIYLNNVIMRFMQISEDSTRMFKKSKEIAFQLHEDLMKVLNELYTVMKTYHMYHAESISAESKLKEAEKQEEKQIGRSGDPVFHIRLEERHQRRSSVKKIEKMKEKRQAKYSENKLKSIKARNEYLLTLEATNASVFKYYIHDLSDLIDCCDLGYHASLNRALRTYLSAEYNLETSRHEGLDIIENAVDNLEPRSDKQRFMEMYPAAFCPPMKFEFQSHMGDEVCQVSAQQPVQAELMLRYQQLQSRLATLKIENEEVKKTTEATLQTIQDMVTIEDYDVSECFQHSRSTESVKSTVSETYLSKPSIAKRRANQQETEQFYFMKLREYLEGSNLITKLQAKHDLLQRTLGEGHRAEYMTTSRGRRNSHTRHQDSGQVIPLIVESCIRFINLYGLQHQGIFRVSGSQVEVNDIKNSFERGENPLADDQSNHDINSVAGVLKLYFRGLENPLFPKERFNDLISCIRIDNLYERALHIRKLLLTLPRSVLIVMRYLFAFLNHLSQYSDENMMDPYNLAICFGPTLMPVPEIQDQVSCQAHVNEIIKTIIIHHETIFPDAKELDGPVYEKCMAGDDYCDSPYSEHGTLEEVDQDAGTEPHTSEDECEPIEAIAKFDYVGRSARELSFKKGASLLLYHRASEDWWEGRHNGIDGLVPHQYIVVQDMDDTFSDTLSQKADSEASSGPVTEDKSSSKDMNSPTDRHPDGYLARQRKRGEPPPPVRRPGRTSDGHCPLHPPHALSNSSVDLGSPSLASHPRGLLQNRGLNNDSPERRRRPGHGSLTNISRHDSLKKIDSPPIRRSTSSGQYTGFNDHKPLDPETIAQDIEETMNTALNELRELERQSTAKHAPDVVLDTLEQVKNSPTPATSTESLSPLHNVALRSSEPQIRRSTSSSSDTMSTFKPMVAPRMGVQLKPPALRPKPAVLPKTNPTIGPAPPPQGPTDKSCTM

SEQ ID NO: 15966 - protein, 749 aa, Homo sapiens
MIPFLPMFSLLLLLIVNPINANNHYDKILAHSRIRGRDQGPNVCALQQILGTKKKYFSTCKNWYKKSICGQKTTVLYECCPGYMRMEGMKGCPAVLPIDHVYGTLGIVGATTTQRYSDASKLREEIEGKGSFTYFAPSNEAWDNLDSDIRRGLESNVNVELLNALHSHMINKRMLTKDLKNGMIIPSMYNNLGLFINHYPNGVVTVNCARIIHGNQIATNGVVHVIDRVLTQIGTSIQDFIEAEDDLSSFRAAAITSDILEALGRDGHFTLFAPTNEAFEKLPRGVLERIMGDKVASEALMKYHILNTLQCSESIMGGAVFETLEGNTIEIGCDGDSITVNGIKMVNKKDIVTNNGVIHLIDQVLIPDSAKQVIELAGKQQTTFTDLVAQLGLASALRPDGEYTLLAPVNNAFSDDTLSMDQRLLKLILQNHILKVKVGLNELYNGQILETIGGKQLRVFVYRTAVCIENSCMEKGSKQGRNGAIHIFREIIKPAEKSLHEKLKQDKRFSTFLSLLEAADLKELLTQPGDWTLFVPTNDAFKGMTSEEKEILIRDKNALQNIILYHLTPGVFIGKGFEPGVTNILKTTQGSKIFLKEVNDTLLVNELKSKESDIMTTNGVIHVVDKLLYPADTPVGNDQLLEILNKLIKYIQIKFVRGSTFKEIPVTVYSPEIKYTRISTGGGETEETLKKLLQEEVTKVTKFIEGGDGHLFEDEEIKRLLQGDTPVRKLQANKKVQGSRRRLREGRSQ

SEQ ID NO: 15967 - protein, 781 aa, Homo sapiens
MIPFLPMFSLLLLLIVNPINANNHYDKILAHSRIRGRDQGPNVCALQQILGTKKKYFSTCKNWYKKSICGQKTTVLYECCPGYMRMEGMKGCPAVLPIDHVYGTLGIVGATTTQRYSDASKLREEIEGKGSFTYFAPSNEAWDNLDSDIRRGLESNVNVELLNALHSHMINKRMLTKDLKNGMIIPSMYNNLGLFINHYPNGVVTVNCARIIHGNQIATNGVVHVIDRVLTQIGTSIQDFIEAEDDLSSFRAAAITSDILEALGRDGHFTLFAPTNEAFEKLPRGVLERIMGDKVASEALMKYHILNTLQCSESIMGGAVFETLEGNTIEIGCDGDSITVNGIKMVNKKDIVTNNGVIHLIDQVLIPDSAKQVIELAGKQQTTFTDLVAQLGLASALRPDGEYTLLAPVNNAFSDDTLSMDQRLLKLILQNHILKVKVGLNELYNGQILETIGGKQLRVFVYRTAVCIENSCMEKGSKQGRNGAIHIFREIIKPAEKSLHEKLKQDKRFSTFLSLLEAADLKELLTQPGDWTLFVPTNDAFKGMTSEEKEILIRDKNALQNIILYHLTPGVFIGKGFEPGVTNILKTTQGSKIFLKEVNDTLLVNELKSKESDIMTTNGVIHVVDKLLYPADTPVGNDQLLEILNKLIKYIQIKFVRGSTFKEIPVTVYRPTLTKVKIEGEPEFRLIKEGETITEVIHGEPIIKKYTKIIDGVPVEITEKETREERIITGPEIKYTRISTGGGETEETLKKLLQEDTPVRKLQANKKVQGSRRRLREGRSQ

SEQ ID NO: 15968 - protein, 2046 aa, Homo sapiens
MELAHSLLLNEEAYNQLGEVQKAEFIFEWLRYLEKLLLATSRNDVREKQKTLVEQLLSLLNSSPGPPTRKLLAKNLAILYSIGDTFSVHEAIDKCNDLIRSKDDSPSYLPTKLAAVVCLGSLYKKLGRILGNTFTDTVGNILKAMKSAESQGRYEIMLSLQNILNGLGAAAAPCHRDVYKAARSCLTDRSMAVRCAAAKCLLELQNEAIFMWSTDLDSVATLCFKSFEGSNYDVRISVSKLLGIILAKAVISKHPGTAASRQSIRRVSLEEVLELLGTGFLRGSSGFLRASGDMLKGTSSVSRDVRVGVTQAYVVFVSTLGGAWLEKNFAAFFSHILSLASPSHPKATQTQIDAVCCRRCVSFILRTTIGGLLGEKAQLAAVKDICQAIWKLKKVMDAVMSDGNLETRLGSTDVAASQHMLVCALQELGNLIHNLGTTAAPLLQDSSTGLLDSILSVILHPSISVRLAAAWCLHCIAVALPSYLTPLLDRCLERLTGHKSSPEAVTGFSFAVAALLGAVKHCPLGIPHGKGKIIMTLAEDLLCSAAQNSRLSAQRTQAGWLLISALMTLGPAVVSHHLARVLLLWKCVFPASPKDLETEKSRGDSFTWQVTLEGRAGALCAIKSFVSHCGDLLTEEVTQRLLPPLPCAVDLLTQLSSILKMYGSPLKTPSVVYRQRLYELLILLPPETYEGNLCAILRELAADLTAPDIQVAASTFLLPPLCHQDDLLILSPFLQETDHRFIEEQLLLGNGVACGSLEYDPYSIYEKDVEGDSVPKPLPPALSVISSASKLFGVVCAHVGETQRLLILEQLLDSIKHTKGARQQVVQLHVVSSVSSFLKYVAGSKGCLGPEEMKRFALTLVMGALESPNPLLRCAAAESWARLAQVVDDGAFTAGLAQVSFDKLKSARDVVTRTGHSLALGSLHRYLGGISSSQHLNSCIGILYTLAQDSTSPDVQTWALHSLSLIIDSAGPLYYVHVEPTLSLIIMLLLNVPPTHAEVHQSLGRCLNALITTLGPELQGNSTSISTLRTSCLLGCAVMQDNPDCLVQAQAISCLQQLHMFAPRHVNLSSLVSCLCVNLCSPYLLLRRAVLACLRQLVQREAAEVSEHAVMLAKDSREELTPDANIREVGLEGALLILLDKETDERLCHDIKETLNYMLTSMAVEKLSLWLKLCKDVLAASADFTAVTCVDTMQEEEGDKGDDASVLTTRRDEKSHPFTNPRWATRVFAAECVCRIINQCENANSAHFDIALAQEMKKRDSRNDFLVLHLADLIRMAFMAATDHSDQLRLSGLEMLLVVIRRFATVPEPEFPGHVILEQYQANVGAALRPAFTSETPPDVTAKACQVCSAWIASGVVSDLNDLRRVHQLLVSSLTKIQAGKEALSHLYNESASTMEILAVLKAWAEVYIIAVQRHKNHRQPLKTTTCLEDGIRNGSCSSDGLLDLVYADLGTLSRLWLAALQDFALLTLPSEFASQLPAEGGAFYTAETSENAKLHYYNSWALILHATALWLTSTGFVVADPDEGASNLSRPVTPTSMCQGSSSGATIKSPEDVYTDRFHLILGISVEFLCSLRSDATMESITACLHALQALLDVPWPRSKIGSDQDLGIELLNVLHRVILTRESPSIQLASLEVVRQIICAAQEHVKEKRRSAEVDDGAAEKETLPEFGEGKDTGGLVPGKSLVFATLELCVCILVRQLPELNPKLTGSPGVKATKPQILLEDGSRLVSAALVILSELPAVCSPEGSISILPTILYLTIGVLRETAVKLPGGQLSSTVAASLQALKGILSSPMARAEKSRTAWTDLLRSALTTILDCWDPVDETHQELDEVSLLTAITVFILSTSPEVTTIPCLQKRCIDKFKATLEIKDPVVQIKTYQLLHSIFQYPNPAVSYPYIYSLASCIMEKLQEIDKRKPENTAELEIFQEGIKVLETLVTVAEEHHRAQLVACLLPILISFLLDENSLGSATSIMRNLHDFALQNLMQIGPQYSSVFKSLVASSPALKARLEAAIKGNQESVKVKIPTSKYTKSPGKNSSIQLKTSFL

SEQ ID NO: 15969 - protein, 123 aa, Homo sapiens
MGAAAAEADRTLFVGNLETKVTEELLFELFHQAGPVIKVKIPKDKDGKPKQFAFVNFKHEVSVPYAMNLLNGIKLYGRPIKIQFRSVVMPHKMSVCHIPNIMLEIQALPPHLLAAGTKGLWIT

SEQ ID NO: 15970 - protein, 92 aa, Homo sapiens
MVLVLHHILIAVVQFLRRGQQVFLKPDEPPPPPQPCADSLQETVYTYLLDGRLSSPRSGWAAMGWASQTCQGSPWPGWWLHWLLIPKCWSCR

SEQ ID NO: 15971 - protein, 274 aa, Homo sapiens
MIISHFPKCVAVFALLALSVGALDTFIAAVYEHAVILPNRTETPVSKEEALLLMNKNIDVLEKAVKLAAKQGAHIIVTPEDGIYGWIFTRESIYPYLEDIPDPGVNWIPCRDPWRFGNTPVQQRLSCLAKDNSIYVVANIGDKKPCNASDSQCPPDGRYQYNTDVVFDSQGKLLARYHKYNLFAPEIQFDFPKDSELVTFDTPFGKFGIFTCFDIFSHDPAVVVVDEFQLTAFSTPQHGTTRCPSSRLFPSIQHGPRPWESIYLLQIPTTPACT

SEQ ID NO: 15972 - protein, 43 aa, Homo sapiens
MKFQYKEDHPFEYRKKEGEKIRKKYPDRVPAPGLVWGQPASSC

SEQ ID NO: 15973 - protein, 1286 aa, Homo sapiens
MAEAGLRGWLLWALLLRLAQSEPYTTIHQPGYCAFYDECGKNPELSGSLMTLSNVSCLSNTPARKITGDHLILLQKICPRLYTGPNTQACCSAKQLVSLEASLSITKALLTRCPACSDNFVNLHCHNTCSPNQSLFINVTRVAQLGAGQLPAVVAYEAFYQHSFAEQSYDSCSRVRVPAAATLAVGTMCGVYGSALCNAQRWLNFQGDTGNGLAPLDITFHLLEPGQAVGSGIQPLNEGVARCNESQGDDVATCSCQDCAASCPAIARPQALDSTFYLGQMPGSLVLIIILCSVFAVVTILLVGFRVAPARDKSKMVDPKKGTSLSDKLSFSTHTLLGQFFQGWGTWVASWPLTILVLSVIPVVALAAGLVFTELTTDPVELWSAPNSQARSEKAFHDQHFGPFFRTNQVILTAPNRSSYRYDSLLLGPKNFSGILDLDLLLELLELQERLRHLQVWSPEAQRNISLQDICYAPLNPDNTSLYDCCINSLLQYFQNNRTLLLLTANQTLMGQTSQVDWKDHFLYCANAPLTFKDGTALALSCMADYGAPVFPFLAIGGYKGKDYSEAEALIMTFSLNNYPAGDPRLAQAKLWEEAFLEEMRAFQRRMAGMFQVTFMAERSLEDEINRTTAEDLPIFATSYIVIFLYISLALGSYSSWSRVMVDSKATLGLGGVAVVLGAVMAAMGFFSYLGIRSSLVILQVVPFLVLSVGADNIFIFVLEYQRLPRRPGEPREVHIGRALGRVAPSMLLCSLSEAICFFLGALTPMPAVRTFALTSGLAVILDFLLQMSAFVALLSLDSKRQEASRLDVCCCVKPQELPPPGQGEGLLLGFFQKAYAPFLLHWITRGVVVGAPVYFVTTLGYNFSSEAGMNAICSSAGCNNFSFTQKIQYATEFPEQSYLAIPASSWVDDFIDWLTPSSCCRLYISGPNKDKFCPSTVNSLNCLKNCMSITMGSVRPSVEQFHKYLPWFLNDRPNIKCPKGGLAAYSTSVNLTSDGQVLASRFMAYHKPLKNSQDYTEALRAARELAANITADLRKVPGTDPAFEVFPYTITNVFYEQYLTILPEGLFMLSLCLVPTFAVSCLLLGLDLRSGLLNLLSIVMILVDTVGFMALWGISYNAVSLINLVSAVGMSVEFVSHITRSFAISTKPTWLERAKEATISMGSAVFAGVAMTNLPGILVLGLAKAQLIQIFFFRLNLLITLLGLLHGLVFLPVILSYVGPDVNPALALEQKRAEEAVAAVMVASCPNHPSRVSTADNIYVNHSFEGSIKGAGAISNFLPNNGRQF

SEQ ID NO: 15974 - protein, 792 aa, Homo sapiens
MVACRAIGILSRFSAFRILRSRGYICRNFTGSSALLTRTHINYGVKGDVAVVRINSPNSKVNTLSKELHSEFSEVMNEIWASDQIRSAVLISSKPGCFIAGADINMLAACKTLQEVTQLSQEAQRIVEKLEKSTKPIVAAINGSCLGGGLEVAISCQYRIATKDRKTVLGTPEVLLGALPGAGGTQRLPKMVGVPAALDMMLTGRSIRADRAKKMGLVDQLVEPLGPGLKPPEERTIEYLEEVAITFAKGLADKKISPKRDKGLVEKLTAYAMTIPFVRQQVYKKVEEKVRKQTKGLYPAPLKIIDVVKTGIEQGSDAGYLCESQKFGELVMTKESKALMGLYHGQVLCKKNKFGAPQKDVKHLAILGAGLMGAGIAQVSVDKGLKTILKDATLTALDRGQQQVFKGLNDKVKKKALTSFERDSIFSNLTGQLDYQGFEKADMVIEAVFEDLSLKHRVLKEVEAVIPDHCIFASNTSALPISEIAAVSKRPEKVIGMHYFSPVDKMQLLEIITTEKTSKDTSASAVAVGLKQGKVIIVVKDGPGFYTTRCLAPMMSEVIRILQEGVDPKKLDSLTTSFGFPVGAATLVDEVGVDVAKHVAEDLGKVFGERFGGGNPELLTQMVSKGFLGRKSGKGFYIYQEGVKRKDLNSDMDSILASLKLPPKSEVSSDEDIQFRLVTRFVNEAVMCLQEGILATPAEGDIGAVFGLGFPPCLGGWSRRLGRKLTLAWSPCCVSFNEVLFLYSGPFRFVDLYGAQKIVDRLKKYEAAYGKQFTPCQLLADHANSPNKKFYQ

SEQ ID NO: 15975 - protein, 415 aa, Homo sapiens
MAGPNQLCIRRWTTKHVAVWLKDEGFFEYVDILCNKHRLDGITLLTLTEYDLRSPPLEIKVLGDIKRLMLSVRKLQKIHIDVLEEMGYNSDSPMGSMTPFISALQSTDWLCNGELSHDCDGPITDLNSDQYQYMNGKNKHSVRRLDPEYWKTILSCIYVFIVFGFTSFIMVIVHERVPDMQTYPPLPDIFLDSVPRIPWAFAMTEVCGMILCYIWLLVLLLHKHRSILLRRLCSLMGTVFLLRCFTMFVTSLSVPGQHLQCTGKIYGSVWEKLHRAFAIWSGFGMTLTGVHTCGDYMFSGHTVVLTMLNFFVTEYTPRSWNFLHTLSWVLNLFGIFFILAAHEHYSIDVFIAFYITTRLFLYYHTLANTRAYQQSRRARIWFPMFSFFECNVNGTVPNEYCWPFSKPAIMKRLIG

SEQ ID NO: 15976 - protein, 842 aa, Homo sapiens
MALVLGSLLLLGLCGNSFSGGQPSSTDAPKAWNYELPATNYETQDSHKAGPIGILFELVHIFLYVVQPRDFPEDTLRKFLQKAYESKIDYDKPETVILGLKIVYYEAGIILCCVLGLLFIILMPLVGYFFCMCRCCNKCGGEMHQRQKENGPFLRKCFAISLLVICIIISIGIFYGFVANHQVRTRIKRSRKLADSNFKDLRTLLNETPEQIKYILAQYNTTKDKAFTDLNSINSVLGGGILDRLRPNIIPVLDEIKSMATAIKETKEALENMNSTLKSLHQQSTQLSSSLTSVKTSLRSSLNDPLCLVHPSSETCNSIRLSLSQLNSNPELRQLPPVDAELDNVNNVLRTDLDGLVQQGYQSLNDIPDRVQRQTTTVVAGIKRVLNSIGSDIDNVTQRLPIQDILSAFSVYVNNTESYIHRNLPTLEEYDSYWWLGGLVICSLLTLIVIFYYLGLLCGVCGYDRHATPTTRGCVSNTGGVFLMVGVGLSFLFCWILMIIVVLTFVFGANVEKLICEPYTSKELFRVLDTPYLLNEDWEYYLSGKLFNKSKMKLTFEQVYSDCKKNRGTYGTLHLQNSFNISEHLNINEHTGSISSELESLKVNLNIFLLGAAGRKNLQDFAACGIDRMNYDSYLAQTGKSPAGVNLLSFAYDLEAKANSLPPGNLRNSLKRDAQTIKTIHQQRVLPIEQSLSTLYQSVKILQRTGNGLLERVTRILASLDFAQNFITNNTSSVIIEETKKYGRTIIGYFEHYLQWIEFSISEKVASCKPVATALDTAVDVFLCSYIIDPLNLFWFGIGKATVFLLPALIFAVKLAKYYRRMDSEDVYDDVETIPMKNPSQH

SEQ ID NO: 15977 - protein, 65 aa, Homo sapiens
MLLVLLSVVLLALSSAQSTDNDVNYEDFTFTIPACRKHHHSSRGTDQQDIPRSNHSGNLEFSGRK

SEQ ID NO: 15978 - protein, 395 aa, Homo sapiens
MLDDNNHLIQCIMDSQNKGKTSECSQYQQMLHTNLVYLATIADSNQNMQSLLPAPPTQNMPMGPGGMNQSGPPPPPRSHNMPSDGMVGGGPPAPHMQNQMNGQMPGPNHMPMQGPGPNQLNMTNSSMNMPSSSHGSMGGYNHSVPSSQSMPVQNQMTMSQGQPMGNYGPRPNMSMQPNQGPMMHQQPPSQQYNMPQGGGQHYQGQQPPMGMMGQVNQGNHMMGQRQIPPYRPPQQGPPQQYSGQEDYYGDQYSHGGQGPPEGMNQQYYPDGHNDYGYQQPSYPEQGYDRPYEDSSQHYYEGGNSQYGQQQDAYQGPPPQQGYPPQQQQYPGQQGYPGQQQGYGPSQGGPGPQYPNYPQGQGQQYGGYRPTQPGPPQPPQQRPYGYDQGQYGNYQQ

SEQ ID NO: 15979 - protein, 870 aa, Homo sapiens
MALKNINYLLIFYLSFSLLIYIKNSFCNKNNTRCLSNSCQNNSTCKDFSKDNDCSCSDTANNLDKDCDNMKDPCFSNPCQGSATCVNTPGERSFLCKCPPGYSGTICETTIGSCGKNSCQHGGICHQDPIYPVCICPAGYAGRFCEIDHDECASSPCQNGAVCQDGIDGYSCFCVPGYQGRHCDLEVDECASDPCKNEATCLNEIGRYTCICPHNYSGVNCELEIDECWSQPCLNGATCQDALGAYFCDCAPGFLGDHCELNTDECASQPCLHGGLCVDGENRYSCNCTGSGFTGTHCETLMPLCWSKPCHNNATCEDSVDNYTCHCWPGYTGAQCEIDLNECNSNPCQSNGECVELSSEKQYGRITGLPSSFSYHEASGYVCICQPGFTGIHCEEDVNECSSNPCQNGGTCENLPGNYTCHCPFDNLSRTFYGGRDCSDILLGCTHQQCLNNGTCIPHFQDGQHGFSCLCPSGYTGSLCEIATTLSFEGDGFLWVKSGSVTTKGSVCNIALRFQTVQPMALLLFRSNRDVFVKLELLSGYIHLSIQVNNQSKVLLFISHNTSDGEWHFVEVIFAEAVTLTLIDDSCKEKCIAKAPTPLESDQSICAFQNSFLGGLPVGMTSNGVALLNFYNMPSTPSFVGCLQDIKIDWNHITLENISSGSSLNVKAGCVRKDWCESQPCQSRGRCINLWLSYQCDCHRPYEGPNCLRGKFCRQSRLPSTVCGNEKTNLTCYNGGNCTEFQTELKCMCRPGFTGEWCEKDIDECASDPCVNGGLCQDLLNKFQCLCDVAFAGERCEVDLADDLISDIFTTIGSVTVALLLILLLAIVASVVTSNKRATQGTYSPSRQEKEGSRVEMWNLMPPPAMERLI

SEQ ID NO: 15980 - protein, 240 aa, Homo sapiens
MLLWPLRGWAARALRCFGPGSRGSPASGPGPRRVQRRAWPPDKEQEKEKKSVVLTEPVSKWRNVRGHNPLGLMYHDASRWGLTLQTYVQLTMLDRHTRPQVSSVRLMERSIHSARYIFVENLYRSGKMPEVDYVVLSEWFDWILRNMDVSVDLIVYLRTNPETCYQRLKKRCREEEKVIPLEYLEAIHHLHEEWLIKGSLFPMAAPVLVIEADHHMERMLELFEQNRDRILTPENRKHCP

SEQ ID NO: 15981 - protein, 1838 aa, Homo sapiens
MGAMTQLLAGVFLAFLALATEGGVLKKVIRHKRQSGVNATLPEENQPVVFNHVYNIKLPVGSQCSVDLESASGEKDLAPPSEPSESFQEHTVDGENQIVFTHRINIPRRACGCAAAPDVKELLSRLEELENLVSSLREQCTAGAGCCLQPATGRLDTRPFCSGRGNFSTEGCGCVCEPGWKGPNCSEPECPGNCHLRGRCIDGQCICDDGFTGEDCSQLACPSDCNDQGKCVNGVCICFEGYAGADCSREICPVPCSEEHGTCVDGLCVCHDGFAGDDCNKPLCLNNCYNRGRCVENECVCDEGFTGEDCSELICPNDCFDRGRCINGTCYCEEGFTGEDCGKPTCPHACHTQGRCEEGQCVCDEGFAGVDCSEKRCPADCHNRGRCVDGRCECDDGFTGADCGELKCPNGCSGHGRCVNGQCVCDEGYTGEDCSQLRCPNDCHSRGRCVEGKCVCEQGFKGYDCSDMSCPNDCHQHGRCVNGMCVCDDGYTGEDCRDRQCPRDCSNRGLCVDGQCVCEDGFTGPDCAELSCPNDCHGQGRCVNGQCVCHEGFMGKDCKEQRCPSDCHGQGRCVDGQCICHEGFTGLDCGQHSCPSDCNNLGQCVSGRCICNEGYSGEDCSEVSPPKDLVVTEVTEETVNLAWDNEMRVTEYLVVYTPTHEGGLEMQFRVPGDQTSTIIQELEPGVEYFIRVFAILENKKSIPVSARVATYLPAPEGLKFKSIKETSVEVEWDPLDIAFETWEIIFRNMNKEDEGEITKSLRRPETSYRQTGLAPGQEYEISLHIVKNNTRGPGLKRVTTTRLDAPSQIEVKDVTDTTALITWFKPLAEIDGIELTYGIKDVPGDRTTIDLTEDENQYSIGNLKPDTEYEVSLISRRGDMSSNPAKETFTTGLDAPRNLRRVSQTDNSITLEWRNGKAAIDSYRIKYAPISGGDHAEVDVPKSQQATTKTTLTGLRPGTEYGIGVSAVKEDKESNPATINAATELDTPKDLQVSETAETSLTLLWKTPLAKFDRYRLNYSLPTGQWVGVQLPRNTTSYVLRGLEPGQEYNVLLTAEKGRHKSKPARVKASTAKEPEIGNLNVSDITPESFNLSWMATDGIFETFTIEIIDSNRLLETVEYNISGAERTAHISGLPPSTDFIVYLSGLAPSIRTKTISATATTEPKPQLGTLIFSNITPKSFNMSWTTQAGLFAKIVINVSDAHSLHESQQFTVSGDAKQAHITGLVENTGYDVSVAGTTLAGDPTRPLTAFVITEAEPEVDNLLVSDATPDGFRLSWTADEGVFDNFVLKIRDTKKQSEPLEITLLAPERTRDITGLREATEYEIELYGISKGRRSQTVSAIATTAMGSPKEVIFSDITENSATVSWRAPTAQVESFRITYVPITGGTPSMVTVDGTKTQTRLVKLIPGVEYLVSIIAMKGFEESEPVSGSFTTALDGPSGLVTANITDSEALARWQPAIATVDSYVISYTGEKVPEITRTVSGNTVEYALTDLEPATEYTLRIFAEKGPQKSSTITAKFTTDLDSPRDLTATEVQSETALLTWRPPRASVTGYLLVYESVDGTVKEVIVGPDTTSYSLADLSPSTHYTAKIQALNGPLRSNMIQTIFTTIGLLYPFPKDCSQAMLNGDTTSGLYTIYLNGDKAEALEVFCDMTSDGGGWIVFLRRKNGRENFYQNWKAYAAGFGDRREEFWLGLDNLNKITAQGQYELRVDLRDHGETAFAVYDKFSVGDAKTRYKLKVEGYSGTAGDSMAYHNGRSFSTFDKDTDSAITNCALSYKGAFWYRNCHRVNLMGRYGDNNHSQGVNWFHWKGHEHSIQFAEMKLRPSNFRNLEGRRKRA

SEQ ID NO: 15982 - protein, 144 aa, Homo sapiens
MIKFFLMVNKQGQTRLSKYYEHVDINKRTLLETEVIKSCLSRSNEQCSFIEYKDFKLIYRQYAALFIVVGVNDTENEMAIYEFIHNFVEVLDEYFSRVSELDIMFNLDKVHIILDEMVLNGCIVETNRARILAPLLILDKMSES

SEQ ID NO: 15983 - protein, 117 aa, Homo sapiens
MIISHFPKCVAVFALLALSVGALDTFIAAVYEHAVILPNRTETPVSKEEALLLMNKNIDVLEKAVKLAAKQGAHIIVTPEDGIYGWIFTRESIYPYLEDIPDPGVNWIPCRDPWRNH

SEQ ID NO: 15984 - protein, 127 aa, Homo sapiens
MKTGLFFLCLLGTAAAIPTNARLLSDHSKPTAETVAPDNTAIPSLRAEAEENEKETAVSTEDDSHHKAEKSSVLKSKEESHEQSAEQGKSSSQELGLKDQEDSDGHLSVNLEYAPTEGTLDIKEDMS

SEQ ID NO: 15985 - protein, 112 aa, Homo sapiens
MALQSTLGAVWLGLLLNSLWKVAESKDQVFQPSTVASSEGAVVEIFCNHSVSNAYNFFWYLHFPGCAPRLLVKGSKPSQQGRYNMTYERFSSSLLILQVREADAAVYYCAVE

SEQ ID NO: 15986 - protein, 431 aa, Homo sapiens
MFFGGEGSLTYTLVIICFLTLRLSASQNCLKKSLEDVVIDIQSSLSKGIRGNEPVYTSTQEDCINSCCSTKNISGDKACNLMIFDTRKTARQPNCYLFFCPNEEACPLKPAKGLMSYRIITDFPSLTRNLPSQELPQEDSLLHGQFSQAVTPLAHHHTDYSKPTDISWRDTLSQKFGSSDHLEKLFKMDEASAQLLAYKEKGHSQSSQFSSDQEIAHLLPENVSALPATVAVASPHTTSATPKPATLLPTNASVTPSGTSQPQLATTAPPVTTVTSQPPTTLISTVFTRAAATLQAMATTAVLTTTFQAPTDSKGSLETIPFTEISNLTLNTGNVYNPTALSMSNVESSTMNKTASWEGREASPGSSSQGSVPENQYGLPFEKWLLIGSLLFGVLFLVIGLVLLGRILSESLRRKRYSRLDYLINGIYVDI

SEQ ID NO: 15987 - protein, 323 aa, Homo sapiens
MKETDLIIMDLRQFLMCLSLCTAFALSKPTEKKDRVHHEPQLSDKVHNDAQSFDYDHDAFLGAEEAKTFDQLTPEESKERLGMIVDKIDADKDGFVTEGELKSWIKHAQKKYIYDNVENQWQEFDMNQDGLISWDEYRNVTYGTYLDDPDPDDGFNYKQMMVRDERRFKMADKDGDLIATKEEFTAFLHPEEYDYMKDIVVQETMEDIDKNADGFIDLEEYIGDMYSHDGNTDEPEWVKTEREQFVEFRDKNRDGKMDKEETKDWILPSDYDHAEAEARHLVYESDQNKDGKLTKEEIVDKYDLFVGSQATDFGEALVRHDEF

SEQ ID NO: 15988 - protein, 598 aa, Homo sapiens
MLETYNHLVSLEIPSSKPKLIAQLERGEAPWREERKCPLDLCPESKPEIQLSPSCPLIFSSQQALSQHVWLSHLSQLFSSLWAGNPLHLGKHYPEDQKQQQDPFCFSGKAEWIQEGEDSRLLFGRVSKNGTSKALSSPPEEQQPAQSKEDNTVVDIGSSPERRADLEETDKVLHGLEVSGFGEIKYEEFGPGFIKESNLLSLQKTQTGETPYMYTEWGDSFGSMSVLIKNPRTHSGGKPYVCRECGRGFTWKSNLITHQRTHSGEKPYVCKDCGRGFTWKSNLFTHQRTHSGLKPYVCKECGQSFSLKSNLITHQRAHTGEKPYVCRECGRGFRQHSHLVRHKRTHSGEKPYICRECEQGFSQKSHLIRHLRTHTGEKPYVCTECGRHFSWKSNLKTHQRTHSGVKPYVCLECGQCFSLKSNLNKHQRSHTGEKPFVCTECGRGFTRKSTLSTHQRTHSGEKPFVCAECGRGFNDKSTLISHQRTHSGEKPFMCRECGRRFRQKPNLFRHKRAHSGAFVCRECGQGFCAKLTLIKHQRAHAGGKPHVCRECGQGFSRQSHLIRHQRTHSGEKPYICRKCGRGFSRKSNLIRHQRTHSG

SEQ ID NO: 15989 - protein, 560 aa, Homo sapiens
MASVFHYFLLVLVFLDTHAAQPFCLPGCTCSEESFGRTLQCTSVSLGKIPGNLSEEFKQVRIENSPLFEMPQGSFINMSTLEYLWLNFNNISVIHLGALEHLPELRELRLEGNKLCSVPWTAFRATPLLRVLDLKRNKIDALPELALQFLVSLTYLDLSSNRLTVVSKSVFLNWPAYQKCRQPDCGAEILSSLVVALHDNPWVCDCRLRGLVQFVKSITLPVILVNSYLICQGPLSKAGQLFHETELSACMKPQISTPSANITIRAGQNVTLRCLAQASPSPSIAWTYPLSMWREFDGLLGGKHLTPVLTSSTGEDTALSELAIPAAHLVDSGNYTCMASNSIGKSNLVISLHVQPAQALHAPDSLSIPSEGNAYIDLRVVKQTVHGILLEWLAVADTSKEEWFTLYIASDEAFRKEVVHIGPGINTYAVDDLLPGTKYEACLSLEGQPPHQGQCVAFVTGRDAGGLEAREHLLHVTVVLCVVLLAVPVGAYAWAAQGPCSCSKWVLRGCLHRRKAPSCTPAAPQSKDGSFREHPAVCDDGEGHIDTEGDKEKGGTEDNS

SEQ ID NO: 15990 - protein, 1055 aa, Homo sapiens
MASLEEPLAPRPQGPLPAAGDEPGCGPGKLRPEPRLSAAGGGSAAGPGPAPEWPGRGRAERAAPPRPPLSSAGRPSPAGGPGALSARGGGCGWVAARAPLALAFSSRVPSSSPSFFYFWPPPPPPPPSFLPSSSAFHLPVRLPGREGAAAAAAAGGGGDAGGGGGGGQEAAPLSVPTSSSHRGGGGSGGGRRRLFLSPALQGLLLPARAGPRPPPPPRLPLGQAARRAGSPGFPGAGPGGGGQTPRRPQGASFALAAAAALLFGSDMEDGPSNNASCFRRLTECFLSPSLTDEKVKAYLSLHPQVLDEFVSESVSAETVEKWLKRKNNKSEDESAPKEVSRYQDTNMQGVVYELNSYIEQRLDTGGDNQLLLYELSSIIKIATKADGFALYFLGECNNSLCIFTPPGIKEGKPRLIPAGPITQGTTVSAYVAKSRKTLLVEDILGDERFPRGTGLESGTRIQSVLCLPIVTAIGDLIGILELYRHWGKEAFCLSHQEVATANLAWASVAIHQVQVCRGLAKQTELNDFLLDVSKTYFDNIVAIDSLLEHIMIYAKNLVNADRCALFQVDHKNKELYSDLFDIGEEKEGKPVFKKTKEIRFSIEKGIAGQVARTGEVLNIPDAYADPRFNREVDLYTGYTTRNILCMPIVSRGSVIGVVQMVNKISGSAFSKTDENNFKMFAVFCALALHCANMYHRIRHSECIYRVTMEKLSYHSICTSEEWQGLMQFTLPVRLCKEIELFHFDIGPFENMWPGIFVYMVHRSCGTSCFELEKLCRFIMSVKKNYRRVPYHNWKHAVTVAHCMYAILQNNHTLFTDLERKGLLIACLCHDLDHRGFSNSYLQKFDHPLAALYSTSTMEQHHFSQTVSILQLEGHNIFSTLSSSEYEQVLEIIRKAIIATDLALYFGNRKQLEEMYQTGSLNLNNQSHRDRVIGLMMTACDLCSVTKLWPVTKLTANDIYAEFWAEGDEMKKLGIQPIPMMDRDKKDEVPQGQLGFYNAVAIPCYTTLTQILPPTEPLLKACRDNLSQWEKVIRGEETATWISSPSVAQKAAASED

SEQ ID NO: 15991 - protein, 1054 aa, Homo sapiens
MGDTLSPGHGNHRESSPFLSPLEASRGIDYYDRNLALFEEELDIRPKVSSLLGKLVSYTNLTQGAKEHEEAESGEGTRRRAAEAPSMGTLMGVYLPCLQNIFGVILFLRLTWMVGTAGVLQALLIVLICCCCTLLTAISMSAIATNGVVPAGGSYFMISRSLGPEFGGAVGLCFYLGTTFAAAMYILGAIEILLTYIAPPAAIFYPSGAHDTSNATLNNMRVYGTIFLTFMTLVVFVGVKYVNKFASLFLACVIISILSIYAGGIKSIFDPPVFPVCMLGNRTLSRDQFDICAKTAVVDNETVATQLWSFFCHSPNLTTDSCDPYFMLNNVTEIPGIPGAAAGVLQENLWSAYLEKGDIVEKHGLPSADAPSLKESLPLYVVADIATSFTVLVGIFFPSVTGIMAGSNRSGDLRDAQKSIPVGTILAIITTSLVYFSSVVLFGACIEGVVLRDKYGDGVSRNLVVGTLAWPSPWVIVIGSFFSTCGAGLQSLTGAPRLLQAIAKDNIIPFLRVFGHGKVNGEPTWALLLTALIAELGILIASLDMVAPILSMFFLMCYLFVNLACAVQTLLRTPNWRPRFKYYHWALSFLGMSLCLALMFVSSWYYALVAMLIAGMIYKYIEYQGAEKEWGDGIRGLSLSAARYALLRLEEGPPHTKNWRPQLLVLLKLDEDLHVKYPRLLTFASQLKAGKGLTIVGSVIQGSFLESYGEAQAAEQTIKNMMEIEKVKGFCQVVVASKVREGLAHLIQSCGLGGMRHNSVVLGWPYGWRQSEDPRAWKTFIDTVRCTTAAHLALLVPKNIAFYPSNHERYLEGHIDVWWIVHDGGMLMLLPFLLRQHKVWRKCRMRIFTVAQMDDNSIQMKKDLAVFLYHLRLEAEVEVVEMHNSDISAYTYERTLMMEQRSQMLRQMRLTKTEREREAQLVKDRHSALRLESLYSDEEDESAVGADKIQMTWTRDKYMTETWDPSHAPDNFRELVHIKPDQSNVRRMHTAVKLNEVIVTRSHDARLVLLNMPGPPRNSEGDENYMEFLEVLTEGLERVLLVRGGGREVITIYS

SEQ ID NO: 15992 - protein, 412 aa, Homo sapiens
MGLSTVPDLLLPLVLLELLVGIYPSGVIGLVPHLGDREKRDSVCPQGKYIHPQNNSICCTKCHKEMGQVEISSCTVDRDTVCGCRKNQYRHYWSENLFQCFNCSLCLNGTVHLSCQEKQNTVCTCHAGFFLRENECVSCSNCKKSLECTKLCLPQIENVKGTEDSGTTVLLPLVIFFGLCLLSLLFIGLMYRYQRWKSKLYSIVCGKSTPEKEGELEGTTTKPLAPNPSFSPTPGFTPTLGFSPVPSSTFTSSSTYTPGDCPNFAAPRREVAPPYQGADPILATALASDPIPNPLQKWEDSAHKPQSLDTDDPATLYAVVENVPPLRWKEFVRRLGLSDHEIDRLELQNGRCLREAQYSMLATWRRRTPRREATLELLGRVLRDMDLLGCLEDIEEALCGPAALPPAPSLLR

SEQ ID NO: 15993 - protein, 125 aa, Homo sapiens
MKLLTHNLLSSHVRGVGSRGFPLRLQATEVRICPVEFNPNFVARMIPKVEWSAFLEAADNLRLIQVPKGPVEGYEENEEFLRTMHHLLLEVEVIEGTLQCPESGRMFPISRGIPNMLLSEEETES

SEQ ID NO: 15994 - protein, 364 aa, Homo sapiens
MLNVTLQGPTLNGTFAQSKCPQVEWLGWLNTIQPPFLWVLFVLATLENIFVLSVFCLHKSSCTVAEIYLGNLAAADLILACGLPFWAITISNNFDWLFGETLCRVVNAIISMNLYSSICFLMLVSIDRYLALVKTMSMGRMRGVRWAKLYSLVIWGCTLLLSSPMLVFRTMKEYSDEGHNVTACVISYPSLIWEVFTNMLLNVVGFLLPLSVITFCTMQIMQVLRNNEMQKFKEIQTERRATVLVLVVLLLFIICWLPFQISTFLDTLHRLGILSSCQDERIIDVITQIASFMAYSNSCLNPLVYVIVGKRFRKKSWEVYQGVCQKGGCRSEPIQMENSMGTLRTSISVERQIHKLQDWAGSRQ

SEQ ID NO: 15995 - protein, 502 aa, Homo sapiens
MEGPVLTLGLLAALAVCGSWGLNEEERLIRHLFQEKGYNKELRPVAHKEESVDVALALTLSNLISLGWTDNRLKWNAEEFGNISVLRLPPDMVWLPEIVLENNNDGSFQISYSCNVLVYHYGFVYWLPPAIFRSSCPISVTYFPFDWQNCSLKFSSLKYTAKEITLSLKQDAKENRTYPVEWIIIDPEGFTENGEWEIVHRPARVNVDPRAPLDSPSRQDITFYLIIRRKPLFYIINILVPCVLISFMVNLVFYLPADSGEKTSVAISVLLAQSVFLLLISKRLPATSMAIPLIGKFLLFGMVLVTMVVVICVIVLNIHFRTPSTHVLSEGVKKLFLETLPELLHMSRPAEDGPSPGALVRRSSSLGYISKAEEYFLLKSRSDLMFEKQSERHGLARRLTTARRPPASSEQAQQELFNELKPAVDGANFIVNHMRDQNNYNEEKDSWNRVARTVDRLCLFVVTPVMVVGTAWIFLQGVYNQPPPQPFPGDPYSYNVQDKRFI

SEQ ID NO: 15996 - protein, 66 aa, Homo sapiens
MRMCTPIRGLLMALAVMFGTAMAFAPIPRITWEHREVHLVQFHEPDIYNYSALLLSEDKDTLYIGA

SEQ ID NO: 15997 - protein, 379 aa, Homo sapiens
MVFKLKTKEEQHSMLGSGFKAERLRVNLRLVINRLKLLEKKKTELAQKARKEIADYLAAGKDERARIRVEHIIREDYLVEAMEILELYCDLLLARFGLIQSMKELDSGLAESVSTLIWAAPRLQSEVAELKIVADQLCAKYSKEYGKLCRTNQIGTVNDRLMHKLSVEAPPKILVERYLIEIAKNYNVPYEPDSVVMAEAPPGVETDLIDVGFTDDVKKGGPGRGGSGGFTAPVGGPDGTVPMPMPMPMPMPSANTPFSYPLPKGPSDFNGLPMGTYQAFPNIHPPQIPATPPSYESVDDINADKNISSAQIVGPGPKPEASAKLPSRPADNYDNFVLPELPSVPDTLPTASAGASTSASEDIDFDDLSRRFEELKKKT

SEQ ID NO: 15998 - protein, 357 aa, Homo sapiens
MDPKGLLSLTFVLFLSLAFGASYGTGGRMMNCPKILRQLGSKVLLPLTYERINKSMNKSIHIVVTMAKSLENSVENKIVSLDPSEAGPPRYLGDRYKFYLENLTLGIRESRKEDEGWYLMTLEKNVSVQRFCLQLRLYEQVSTPEIKVLNKTQENGTCTLILGCTVEKGDHVAYSWSEKAGTHPLNPANSSHLLSLTLGPQHADNIYICTVSNPISNNSQTFSPWPGCRTDPSETKPWAVYAGLLGGVIMILIMVVILQLRRRATLTTTNQYWSQNVLTQDQERCPGCLPMVKRTITRQQWKKKALRSMPKSRNQVLFRRNLTPSQLRTLAPPYMLLPQSLSQSLSRKQIPSQSMLV

SEQ ID NO: 15999 - protein, 118 aa, Homo sapiens
MPSLLLLFTAALLSSWAQLLTDANSWWSLALNPVQRPEMFIIGAQPVCSQLPGLSPGQRKLCQLYQEHMAYIGEGAKTGIKECQHQFRQRRWNCSTADNASVFGRVMQIGSRETAFTH

SEQ ID NO: 16000 - protein, 321 aa, Homo sapiens
MSGNGNAAATAEENSPKMRVIRVGTRKSQLARIQTDSVVATLKASYPGLQFEIIAMSTTGDKILDTALSKIGEKSLFTKELEHALEKNEVDLVVHSLKDLPTVLPPGFTIGAICKRENPHDAVVFHPKFVGKTLETLPEKSVVGTSSLRRAAQLQRKFPHLEFRSIRGNLNTRLRKLDEQQEFSAIILATAGLQRMGWHNRVGQILHPEECMYAVGQEGGCSVPVAVHTAMKDGQLYLTGGVWSLDGSDSIQETMQATIHVPAQHEDGPEDDPQLVGITARNIPRGPQLAAQNLGISLANLLLSKGAKNILDVARQLNDAH

SEQ ID NO: 16001 - protein, 613 aa, Homo sapiens
MLVGSQSFSPGGPNGIIRSQSFAGFSGLQERRSRCNSFIENSSALKKPQAKLKKMHNLGHKNNNPPKEPQPKRVEEVYRALKNGLDEYLEVHQTELDKLTAQLKDMKRNSRLGVLYDLDKQIKTIERYMRRLEFHISKVDELYEAYCIQRRLQDGASKMKQAFATSPASKAARESLTEINRSFKEYTENMCTIEVELENLLGEFSIKMKGLAGFARLCPGDQYEIFMKYGRQRWKLKGKIEVNGKQSWDGEETVFLPLIVGFISIKVTELKGLATHILVGSVTCETKELFAARPQVVAVDINDLGTIKLNLEITWYPFDVEDMTASSGAGNKAAALQRRMSMYSQGTPETPTFKDHSFFSNLPDDIFENGKAAEEKMPLSLSFSDLPNGDCALTSHSTGSPSNSTNPEITITPAEFNLSSLASQNEGMDDTSSASSRNSLGEGQEPKSHLKEEDPEEPRKPASAPSEACRRQSSGAGAEHLFLENDVAEALLQESEEASELKPVELDTSEGNITKQLVKRLTSAEVPMATDRLLSEGSVGGESEGCRSFLDGSLEDAFNGLLLALEPHKEQYKEFQDLNQEVMNLDDILKDAKHLDDQKLNGAASWTEITEGE

SEQ ID NO: 16002 - protein, 112 aa, Homo sapiens
MNSSPGPAIALFLMFGGINGDSVVQTEGQVLPSEGDSLIVNCSYETTQYPSLFWYVQYPGEGPQLHLKAMKANDKGRNKGFEAMYRKETTSFHLEKDSVQESDSAVYFCALS

SEQ ID NO: 16003 - protein, 289 aa, Homo sapiens
MAFRQALQLAACGLAGGSAAVLFSAVAVGKPRAGGDAEPRPAEPPAWAGGARPGPGVWDPNWDRREPLSLINVRKRNVESGEEELASKLDHYKAKATRHIFLIRHSQYHVDGSLEKDRTLTPLGREQAELTGLRLASLGLKFNKIVHSSMTRAIETTDIISRHLPGVCKVSTDLLREGAPIEPDPPVSHWKPEAVQYYEDGARIEAAFRNYIHRADARQEEDSYEIFICHANVIRYIVCRALQFPPEGWLRLSLNNGSITHLVIRPNGRVALRTLGDTGFMPPDKITRS

SEQ ID NO: 16004 - protein, 113 aa, Homo sapiens
MAGIRALFMYLWLQLDWVSRGESVGLHLPTLSVQEGDNSIINCAYSNSASDYFIWYKQESGKGPQFIIDIRSNMDKRQGQRVTVLLNKTVKHLSLQIAATQPGDSAVYFCAEN

SEQ ID NO: 16005 - protein, 1005 aa, Homo sapiens
MAHESERSSRLGVPCGEPAELGGDASEEDHPQVCAKCCAQFTDPTEFLAHQNACSTDPPVMVIIGGQENPNNSSASSEPRPEGHNNPQVMDTEHSNPPDSGSSVPTDPTWGPERRGEESSGHFLVAATGTAAGGGGGLILASPKLGATPLPPESTPAPPPPPPPPPPPGVGSGHLNIPLILEELRVLQQRQIHQMQMTEQICRQVLLLGSLGQTVGAPASPSELPGTGTASSTKPLLPLFSPIKPVQTSKTLASSSSSSSSSSGAETPKQAFFHLYHPLGSQHPFSAGGVGRSHKPTPAPSPALPGSTDQLIASPHLAFPSTTGLLAAQCLGAARGLEATASPGLLKPKNGSGELSYGEVMGPLEKPGGRHKCRFCAKVFGSDSALQIHLRSHTGERPYKCNVCGNRFTTRGNLKVHFHRHREKYPHVQMNPHPVPEHLDYVITSSGLPYGMSVPPEKAEEEAATPGGGVERKPLVASTTALSATESLTLLSTSAGTATAPGLPAFNKFVLMKAVEPKNKADENTPPGSEGSAISGVAESSTATRMQLSKLVTSLPSWALLTNHFKSTGSFPFPYVLEPLGASPSETSKLQQLVEKIDRQGAVAVTSAASGAPTTSAPAPSSSASSGPNQCVICLRVLSCPRALRLHYGQHGGERPFKCKVCGRAFSTRGNLRAHFVGHKASPAARAQNSCPICQKKFTNAVTLQQHVRMHLGGQIPNGGTALPEGGGAAQENGSEQSTVSGARSFPQQQSQQPSPEEELSEEEEEEDEEEEEDVTDEDSLAGRGSESGGEKAISVRGDSEEASGAEEEVGTVAAAATAGKEMDSNEKTTQQSSLPPPPPPDSLDQPQPMEQGSSGVLGGKEEGGKPERSSSPASALTPEGEATSVTLVEELSLQEAMRKEPGESSSRKACEVCGQAFPSQAALEEHQKTHPKEGPLFTCVFCRQGFLERATLKKHMLLAHHQVQPFAPHGPQNIAALSLVPGCSPSITSTGLSPFPRKDDPTIP

SEQ ID NO: 16006 - protein, 85 aa, Homo sapiens
MSSSMWYIMQSIQSKYSLSERLIRTIAAIRSFPHDNVEDLIRGGADVNCTHGTLKPLHCACMVSDADCVELLLEKGAEDSLGVAC

SEQ ID NO: 16007 - protein, 210 aa, Homo sapiens
MGNIFGNLLKSLIGKKEMRILMVGLDAAGKTTILYKLKLGEIVTTIPTIGFNVETVEYKNISFTVWDVGGQDKIRPLWRHYFQNTQGLIFVVDSNDRERVNEAREELMRMLAEDELRDAVLLVFANKQDGHDLGSLQPPPPGFKQFSCLSLPSVHFYKPSSEPLGSPRSSKREPRSLSGTSLTDMSKLSVTGGNPEVLTTGFVEGSRVRS

SEQ ID NO: 16008 - protein, 109 aa, Homo sapiens
MSLLGPKVLLFLAAFIITSDWIPLGVNSQRGDDVTQATPETFTEDPNLVNDPATDETVLAVLADIAPSTDDLDELCRQMAGLPPRRLRRSNYFRLPPCENVDLQRPNGL

SEQ ID NO: 16009 - protein, 397 aa, Homo sapiens
MRKMLAAVSRVLSGASQKPASRVLVASRNFANDATFEIKKCDLHRLEEGPPVTTVLTREDGLKYYRMMQTVRRMELKADQLYKQKIIRGFCHLCDGQFLLPLTQEACCVGLEAGINPTDHLITAYRAHGFTFTRGLSVREILAELTGRKGGCAKGKGGSMHMYAKNFYGGNGIVGAQVPLGAGIALACKYNGKDEVCLTLYGDGAANQGQIFEAYNMAALWKLPCIFICENNRYGMGTSVERAAASTDYYKRGDFIPGLRVDGMDILCVREATRFAAAYCRSGKGPILMELQTYRYHGHSMSDPGVSYRTREEIQEVRSKSDPIMLLKDRMVNSNLASVEELKEIDVEVRKEIEDAAQFATADPEPPLEELGYHIYSSDPPFEVRGANQWIKFKSVS

SEQ ID NO: 16010 - protein, 106 aa, Homo sapiens
MVLVLHHILIAVVQFLRRGQQVFLKPDEPPPPPQPCADSLQDALLSLGSVIDISGLQRAVKEALSAVLPRVETVYTYLLDGESQLVCEDPPHELPQEGKVRCTVAS

SEQ ID NO: 16011 - protein, 294 aa, Homo sapiens
MKQWKARLGCGLESGPMALEQNLSDLQLQAAVEVAGDLEVDCYRAPCSESQEELALQHFMKEKLLAELEGKLRVFENIVAVLNKEVEASHLALATSIHQSQLDRERILSLEQRVVELQQTLAQKDQALGKLEQSLRLMEEASFDGTFLWKITNVTRRCHESACGRTVSLFSPAFYTAKYGYKLCLRLYLNGDGTGKRTHLSLFIVIMRGEYDALLPWPFRNKVTFMLLDQNNREHAIDAFRPDLSSASFQRPQSETNVASGCPLFFPLSKLQSPKHAYVKDDTMFLKCIVETST

SEQ ID NO: 16012 - protein, 71 aa, Homo sapiens
EDVISSIRNFLIYVALLRVSECLPGCDCETSGELTDGHPLTLRGHRGLRTELNGSGEQGGCALKATGICAV

SEQ ID NO: 16013 - protein, 694 aa, Homo sapiens
MTFGQSKLYRSEDYGKNFKDITDLINNTFIRTEFGMAIGPENSGKVVLTAEVSGGSRGGRIFRSSDFAKNFVQTDLPFHPLTQMMYSPQNSDYLLALSTENGLWVSKNFGGKWEEIHKAVCLAKWGSDNTIFFTTYANGSCTDLGALELWRTSDLGKSFKTIGVKIYSFGLGGRFLFASVMADKDTTRRIHVSTDQGDTWSMAQLPSVGQEQFYSILAANDDMVFMHVDEPGDTGFGTIFTSDDRGIVYSKSLDRHLYTTTGGETDFTNVTSLRGVYITSVLSEDNSIQTMITFDQGGRWTHLRKPENSECDATAKNKNECSLHIHASYSISQKLNVPMAPLSEPNAVGIVIAHGSVGDAISVMVPDVYISDDGGYSWTKMLEGPHYYTILDSGGIIVAIEHSSRPINVIKFSTDEGQCWQTYTFTRDPIYFTGLASEPGARSMNISIWGFTESFLTSQWVSYTIDFKDILERNCEEKDYTIWLAHSTDPEDYEDGCILGYKEQFLRLRKSSVCQNGRDYVVTKQPSICLCSLEDFLCDFGYYRPENDSKCVEQPELKGHDLEFCLYGREEHLTTNGYRKIPGDKCQGGVNPVREVKDLKKKCTSNFLSPEKQNSKSNSVPIILAIVGLMLVTVVAGVLIVKKYVCGGRFLVHRYSVLQQHAEANGVDGVDALDTASHTNKSGYHDDSDEDLLE

SEQ ID NO: 16014 - protein, 671 aa, Homo sapiens
MWLLYLLVPALFCRAGGSIPIPQKLFGEVTSPLFPKPYPNNFETTTVITVPTGYRVKLVFQQFDLEPSEGCFYDYVKMLLTFHTDFSNEENGTIMFYKGFLAYYQAVDLDECASRSKSGEEDPQPQCQHLCHNYVGGYFCSCRPGYELQEDRHSCQAECSSELYTEASGYISSLEYPRSYPPDLRCNYSIRVERGLTLHLKFLEPFDIDDHQQVHCPYDQLQIYANGKNIGEFCGKQRPPDLDTSSNAVDLLFFTDESGDSRGWKLRYTTEIIKCPQPKTLDEFTIIQNLQPQYQFRDYFIATCKQGYQLIEGNQVLHSFTAVCQDDGTWHRAMPRCKIKDCGQPRNLPNGDFRYTTTMGVNTYKARIQYYCHEPYYKMQTRAGSRESEQGVYTCTAQGIWKNEQKGEKIPRCLPVCGKPVNPVEQRQRIIGGQKAKMGNFPWQVFTNIHGRGGGALLGDRWILTAAHTLYPKEHEAQSNASLDVFLGHTNVEELMKLGNHPIRRVSVHPDYRQDESYNFEGDIALLELENSVTLGPNLLPICLPDNDTFYDLGLMGYVSGFGVMEEKIAHDLRFVRLPVANPQACENWLRGKNRMDVFSQNMFCAGHPSLKQDACQGDSGGVFAVRDPNTDRWVATGIVSWGIGCSRGYGFYTKVLNYVDWIKKEMEEED

SEQ ID NO: 16015 - protein, 173 aa, Homo sapiens
MRKPAAGFLPSLLKVLLLPLAPAAAQDSTQASTPGSPLSPTEYERFFALLTPTWKAETTCRLRATHGCRNPTLVQLDQYENHGLVPDGAVCSNLPYASWFESFCQFTHYRCSNHVYYAKRVLCSQPVSILSPNTLKEIEASAEVSPTTMTSPISPHFTERQTFQPWPERLSNN

SEQ ID NO: 16016 - protein, 80 aa, Homo sapiens
MFLTIIVCGMVAALSAIRANCHQEPSVCLQAACPESWIGFQRKCFYFSDDTKNWTSSQRFCDSQDADLAQVESFQELVRK

SEQ ID NO: 16017 - protein, 76 aa, Homo sapiens
MESRMWPALLLSHLLPLWPLLLLPLPPPAQGSSSSPRTPPAPARPPCARGGPSAPRHVCVWERAPPPSRSPRVPRS

SEQ ID NO: 16018 - protein, 630 aa, Homo sapiens
MRVKLLLPAAPVLPRQHAGAFISGRDSGWPIPRQAATAPPLPDILSCQLALGAALVNVQIPLLLGQLVEVVAKYTRDHVGSFMTESQNLSTHLLILYGVQGLLTFGYLVLLSHVGERMAVDMRRALFSSLLRQDITFFDANKTGQLVSRLTTDVQEFKSSFKLVISQGLRSCTQVAGCLVSLSMLSTRLTLLLMVATPALMGVGTLMGSGLRKLSRQCQEQIARAMGVADEALGNVRTVRAFAMEQREEERYGAELEACRCRAEELGRGIALFQGLSNIAFNCMVLGTLFIGGSLVAGQQLTGGDLMSFLVASQTVQRSMANLSVLFGQVVRGLSAGARVFEYMALNPCIPLSGGCCVPKEQLRGSVTFQNVCFSYPCRPGFEVLKDFTLTLPPGKIVALVGQSGGGKTTVASLLERFYDPTAGVVMLDGRDLRTLDPSWLRGQVVGFISQEPVLFGTTIMENIRFGKLEASDEEVYTAAREANAHEFITSFPEGYNTVVGERGTTLSGGQKQRLAIARALIKQPTVLILDEATSALDAESERVVQEALDRASAGRTVLVIAHRLSTVRGAHCIVVMADGRVWEAGTHEELLKKGGLYAELIRRQALDAPRTAAPPPKKPEGPRSHQHKS

SEQ ID NO: 16019 - protein, 437 aa, Homo sapiens
MILGLVSCTFFLAVNGLYSSSDDVIELTPSNFNREVIQSDSLWLVEFYAPWCGHCQRLTPEWKKAATALKDVVKVGAVDADKHHSLGGQYGVQGFPTIKIFGSNKNRPEDYQGGRTGEAIVDAALSALRQLVKDRLGGRSGGYSSGKQGRSDSSSKKDVIELTDDSFDKNVLDSEDVWMVEFYAPWCGHCKNLEPEWAAAASEVKEQTKGKVKLAAVDATVNQVLASRYGIRGFPTIKIFQKGESPVDYDGGRTRSDIVSRALDLFSDNAPPPELLEIINEDIAKRTCEEHQLCVVAVLPHILDTGAAGRNSYLEVLLKLADKYKKKMWGWLWTEAGAQSELETALGIGGFGYPAMAAINARKMKFALLKGSFSEQGINEFLRELSFGRGSTAPVGGGAFPTIVEREPWDGRDGELPVEDDIDLSDVELDDLGKDEL

SEQ ID NO: 16020 - protein, 65 aa, Homo sapiens
MVLVLHHILIAVVQFLRRGQQVFLKPDEPPPPPQPCADSLQPAWTPLQRSQDPQGVETTDWRTPC

SEQ ID NO: 16021 - protein, 239 aa, Homo sapiens
MGDLWLFLLLPLSAFHGVKGCLECDPKFIEDVGSLLGNLIPSEVPGRTQLLERQIKEMIHLSFKVSHSDKRLRVLAVQQVVKLRTWLKNEFYKLGNETWKGVFIYQGKLLDVCQNLESKLKELLKNFSEIACSEDCIVVEGPILDCWTCLRMTNRCFKGEYCGDEDPRKAENREIALFLILLATAVILGSAVLLFHFCIFHRRKMKAIRRSLKEYVEKKLEELMGKIDEKEEKDFRLRK

SEQ ID NO: 16022 - protein, 159 aa, Homo sapiens
MFHVSFRYIFGLPPLILVLLPVASSDCDIEGKDGKQYESVLMVSIDQLLDSMKEIGSNCLNNEFNFFKRHICDANKEGMFLFRAARKLRQFLKMNSTGDFDLHLLKVSEGTTILLNCTGQEENKSLKEQKKLNDLCFLKRLLQEIKTCWNKILMGTKEH

SEQ ID NO: 16023 - protein, 1907 aa, Homo sapiens
MLSHGAGLALWITLSLLQTGLAEPERCNFTLAESKASSHSVSIQWRILGSPCNFSLIYSSDTLGAALCPTFRIDNTTYGCNLQDLQAGTIYNFRIISLDEERTVVLQTDPLPPARFGVSKEKTTSTSLHVWWTPSSGKVTSYEVQLFDENNQKIQGVQIQESTSWNEYTFFNLTAGSKYNIAITAVSGGKRSFSVYTNGSTVPSPVKDIGISTKANSLLISWSHGSGNVERYRLMLMDKGILVHGGVVDKHATSYAFHGLTPGYLYNLTVMTEAAGLQNYRWKLVRTAPMEVSNLKVTNDGSLTSLKVKWQRPPGNVDSYNITLSHKGTIKESRVLAPWITETHFKELVPGRLYQVTVSCVSGELSAQKMAVGRTFPDKVANLEANNNGRMRSLVVSWSPPAGDWEQYRILLFNDSVVLLNITVGKEETQYVMDDTGLVPGRQYEVEVIVESGNLKNSERCQGRTVPLAVLQLRVKHANETSLSIMWQTPVAEWEKYIISLADRDLLLIHKSLSKDAKEFTFTDLVPGRKYMATVTSISGDLKNSSSVKGRTVPAQVTDLHVANQGMTSSLFTNWTQAQGDVEFYQVLLIHENVVIKNESISSETSRYSFHSLKSGSLYSVVVTTVSGGISSRQVVVEGRTVPSSVSGVTVNNSGRNDYLSVSWLLAPGDVDNYEVTLSHDGKVVQSLVIAKSVRECSFSSLTPGRLYTVTITTRSGKYENHSFSQERTVPDKVQGVSVSNSARSDYLRVSWVHATGDFDHYEVTIKNKNNFIQTKSIPKSENECVFVQLVPGRLYSVTVTTKSGQYEANEQGNGRTIPEPVKDLTLRNRSTEDLHVTWSGANGDVDQYEIQLLFNDMKVFPPFHLVNTATEYRFTSLTPGRQYKILVLTISGDVQQSAFIEGFTVPSAVKNIHISPNGATDSLTVNWTPGGGDVDSYTVSAFRHSQKVDSQTIPKHVFEHTFHRLEAGEQYQIMIASVSGSLKNQINVVGRTVPAAVTDLRITENSTRHLSFRWTASEGELSWYNIFLYNPDGNLQERAQVDPLVQSFSFQNLLQGRMYKMVIVTHSGELSNESFIFGRTVPASVSHLRGSNRNTTDSLWFNWSPASGDFDFYELILYNPNGTKKENWKDKDLTEWRFQGLVPGRKYVLWVVTHSGDLSNKVTAESRTAPSPPSLMSFADIANTSLAITWKGPPDWTDYNDFELQWLPRDALTVFNPYNNRKSEGRIVYGLRPGRSYQFNVKTVSGDSWKTYSKPIFGSVRTKPDKIQNLHCRPQNSTAIACSWIPPDSDFDGYSIECRKMDTQEVEFSRKLEKEKSLLNIMMLVPHKRYLVSIKVQSAGMTSEVVEDSTITMIDRPPPPPPHIRVNEKDVLISKSSINFTVNCSWFSDTNGAVKYFTVVVREADGSDELKPEQQHPLPSYLEYRHNASIRVYQTNYFASKCAENPNSNSKSFNIKLGAEMESLGGKCDPTQQKFCDGPLKPHTAYRISIRAFTQLFDEDLKEFTKPLYSDTFFSLPITTESEPLFGAIEGVSAGLFLIGMLVAVVALLICRQKVSHGRERPSARLSIRRDRPLSVHLNLGQKGNRKTSCPIKINQFEGHFMKLQADSNYLLSKEYEELKDVGRNQSCDIALLPENRGKNRYNNILPYDATRVKLSNVDDDPCSDYINASYIPGNNFRREYIVTQGPLPGTKDDFWKMVWEQNVHNIVMVTQCVEKGRVKCDHYWPADQDSLYYGDLILQMLSESVLPEWTIREFKICGEEQLDAHRLIRHFHYTVWPDHGVPETTQSLIQFVRTVRDYINRSPGAGPTVVHCSAGVGRTGTFIALDRILQQLDSKDSVDIYGAVHDLRLHRVHMVQTECQYVYLHQCVRDVLRARKLRSEQENPLFPIYENVNPEYHRDPVYSRH

SEQ ID NO: 16024 - protein, 520 aa, Homo sapiens
MSSSSYAKNGTADGPHSPTSQVARGTTTRRSRLKRSDGSTTSTSFILRQGSADSYTSRPSDSDVSLEEDREAIRQEREQQAAIQLERAKSKPVAFAVKTNVSYCGALDEDVPVPSTAISFDAKDFLHIKEKYNNDWWIGRLVKEGCEIGFIPSPLRLENIRIQQEQKRGRFHGGKSSGNSSSSLGEMVSGTFRATPTSTAKQKQKVTEHIPPYDVVPSMRPVVLVGPSLKGYEVTDMMQKALFDFLKHRFDGRISITRVTADISLAKRSVLNNPSKRAIIERSNTRSSLAEVQSEIERIFELARSLQLVVLDADTINHPAQLIKTSLAPIIVHVKVSSPKVLQRLIKSRGKSQSKHLNVQLVAADKLAQCPPEMFDVILDENQLEDACEHLGEYLEAYWRATHTTSSTPMTPLLGRNLGSTALSPYPTAISGLQSQRMRHSNHSTENSPIERRSLMTSDENYHNERARKSRNRLSSSSQHSRDHYPLVEEDYPDSYQDTYKPHRNRGSPGGYSHDSRHRL

SEQ ID NO: 16025 - protein, 164 aa, Homo sapiens
MAPSRNGMVLKPHFHKDWQRRVATWFNQPARKIRRRKARQAKARRIAPRPASGPIRPIVRCPTVRYHTKVRAGRGFSLEELRVAGIHKKGDSSAEELKLATQLTGPVMPVRNVYKKEKARVITEEEKNFKAFASLRMARANARLFGIRAKRAKEAAEQDVEKKK

SEQ ID NO: 16026 - protein, 451 aa, Homo sapiens; identical to SEQ ID NO: 4045

SEQ ID NO: 16027 - protein, 301 aa, Homo sapiens
MNTGVEAGETACKLARKWGYTVKGIQKYKAKIVFAAGNFWGRTLSAISSSTDPTSYDGFGPFMPGFDIIPYNDLPALERALQDPNVAAFMVEPIQGEAGVVVPDPGYLMGVRELCTRHQVLFIADEIQTGLARTGRWLAVDYENVRPDIVLLGKALSGGLYPVSAVLCDDDIMLTIKPGEHGSTYGGNPLGCRVAIAALEVLEEENLAENADKLGIILRNELMKLPSDVVTAVRGKGLLNAIVIKETKDWDAWKVCLRLRDNGLLAKPTHGDIIRFAPPLVIKEDELRESIEIINKTILSF

SEQ ID NO: 16028 - protein, 241 aa, Homo sapiens
MSTVKEQLIEKLIEDDENSQCKITIVGTGAVGMACAISILLKDLADELALVDVALDKLKGEMMDLQHGSLFFSTSKITSGKDYSVSANSRIVIVTAGARQQEGETRLALVQRNVAIMKSIIPAIVHYSPDCKILVVSNPVDILTYIVWKISGLPVTRVIGSGCNLDSARFRYLIGEKLGVHPTSCHGWIIGEHGDSSVPLWSGVNVAGVALKTLDPKLGTDSDKEHWKNIHKQVIQRDYME

SEQ ID NO: 16029 - protein, 1438 aa, Homo sapiens
MSMLKPSGLKAPTKILKPGSTALKTPTAVVAPVEKTISSEKASSTPSSETQEEFVDDFRVGERVWVNGNKPGFIQFLGETQFAPGQWAGIVLDEPIGKNDGSVAGVRYFQCEPLKGIFTRPSKLTRKVQAEDEANGLQTTPASRATSPLCTSTASMVSSSPSTPSNIPQKPSQPAAKEPSATPPISNLTKTASESISNLSEAGSIKKGERELKIGDRVLVGGTKAGVVRFLGETDFAKGEWCGVELDEPLGKNDGAVAGTRYFQCQPKYGLFAPVHKVTKIGFPSTTPAKAKANAVRRVMATTSASLKRSPSASSLSSMSSVASSVSSRPSRTGLLTETSSRYARKISGTTALQEALKEKQQHIEQLLAERDLERAEVAKATSHVGEIEQELALARDGHDQHVLELEAKMDQLRTMVEAADREKVELLNQLEEEKRKVEDLQFRVEEESITKGDLEQKSQISEDPENTQTKLEHARIKELEQSLLFEKTKADKLQRELEDTRVATVSEKSRIMELEKDLALRVQEVAELRRRLESNKPAGDVDMSLSLLQEISSLQEKLEVTRTDHQREITSLKEHFGAREETHQKEIKALYTATEKLSKENESLKSKLEHANKENSDVIALWKSKLETAIASHQQAMEELKVSFSKGLGTETAEFAELKTQIEKMRLDYQHEIENLQNQQDSERAAHAKEMEALRAKLMKVIKEKENSLEAIRSKLDKAEDQHLVEMEDTLNKLQEAEIKVKELEVLQAKCNEQTKVIDNFTSQLKATEEKLLDLDALRKASSEGKSEMKKLRQQLEAAEKQIKHLEIEKNAESSKASSITRELQGRELKLTNLQENLSEVSQVKETLEKELQILKEKFAEASEEAVSVQRSMQETVNKLHQKEEQFNMLSSDLEKLRENLADMEAKFREKDEREEQLIKAKEKLENDIAEIMKMSGDNSSQLTKMNDELRLKERDVEELQLKLTKANENASFLQKSIEDMTVKAEQSQQEAAKKHEEEKKELERKLSDLEKKMETSHNQCQELKARYERATSETKTKHEEILQNLQKTLLDTEDKLKGAREENSGLLQELEELRKQADKAKAAQTAEDAMQIMEQMTKEKTETLASLEDTKQTNAKLQNELDTLKENNLKNVEELNKSKELLTVENQKMEEFRKEIETLKQAAAQKSQQLSALQEENVKLAEELGRSRDEVTSHQKLEEERSVLNNQLLEMKKRESKFIKDADEEKASLQKSISITSALLTEKDAELEKLRNEVTVLRGENASAKSLHSVVQTLESDKVKLELKVKNLELQLKENKRQLSSSSGNTDTQADEDERAQESQIDFLNSVIVDLQRKNQDLKMKVEMMSEAALNGNGDDLNNYDSDDQEKQSKKKPRLFCDICDCFDLHDTEDCPTQAQMSEDPPHSTHHGSRGEERPYCEICEMFGHWATNCNDDETF

SEQ ID NO: 16030 - protein, 320 aa, Homo sapiens
MFCVTPPELETKMNITKGGLVLFSANSNSSCMELSKKIAERLGVEMGKVQVYQEPNRETRVQIQESVRGKDVFIIQTVSKDVNTTIMELLIMVYACKTSCAKSIIGVIPYFPYSKQCKMRKRGSIVSKLLASMMCKAGLTHLITMDLHQKEIQGFFNIPVDNLRASPFLLQYIQEEIPDYRNAVIVAKSPASAKRAQSFAERLRLGIAVIHGEAQDAESDLVDGRHSPPMVRSVAAIHPSLEIPMLIPKEKPPITVVGDVGGRIAIIVVVVTNTIPHEVQKLQCPKIKTVDISMILSEAIRRIHNGESMSYLFRNIGLDD

SEQ ID NO: 16031 - protein, 722 aa, Homo sapiens
MEKNGNNRKLRVCVATCNRADYSKLAPIMFGIKTEPEFFELDVVVLGSHLIDDYGNTYRMIEQDDFDINTRLHTIVRGEDEAAMVESVGLALVKLPDVLNRLKPDIMIVHGDRFDALALATSAALMNIRILHIEGGEVSGTIDDSIRHAITKLAHYHVCCTRSAEQHLISMCEDHDRILLAGCPSYDKLLSAKNKDYMSIIRMWLGDDVKSKDYIVALQHPVTTDIKHSIKMFELTLDALISFNKRTLVLFPNIDAGSKEMVRVMRKKGIEHHPNFRAVKHVPFDQFIQLVAHAGCMIGNSSCGVREVGAFGTPVINLGTRQIGRETGENVLHVRDADTQDKILQALHLQFGKQYPCSKIYGDGNAVPRILKFLKSIDLQEPLQKKFCFPPVKENISQDIDHILETLSALAVDLGGTNLRVAIVSMKGEIVKKYTQFNPKTYEERINLILQMCVEAAAEAVKLNCRILGVGISTGGRVNPREGIVLHSTKLIQEWNSVDLRTPLSDTLHLPVWVDNDGNCAALAERKFGQGKGLENFVTLITGTGIGGGIIHQHELIHGSSFCAAELGHLVVSLDGPDCSCGSHGCIEAYASGMALQREAKKLHDEDLLLVEGMSVPKDEAVGALHLIQAAKLGNAKAQSILRTAGTALGLGVVNILHTMNPSLVILSGVLASHYIHIVKDVIRQQALSSVQDVDVVVSDLVDPALLGAASMVLDYTTRRIY

SEQ ID NO: 16032 - protein, 401 aa, Homo sapiens
MSHCSGYSDPSSFAEDGPEVLDEEGTQEDLEYKLKGLIDLTLDKSAKTRQAALEGIKNALASKMLYEFILERRMTLTDSIERCLKKGKSDEQRAAAALASVLCIQLGPGIESEEILKTLGPILKKIICDGSASMQARQTCATCFGVCCFIATDDITELYSTLECLENIFTKSYLKEKDTTVICSTPNTVLHISSLLAWTLLLTICPINEVKKKLEMHFHKLPSLLSCDDVNMRIAAGESLALLFELARGIESDFFYEDMESLTQMLRALATDGNKHRAKVDKRKQRSVFRDVLRAVEERDFPTETIKFGPERMYIDCWVKKHTYDTFKEVLGSGMQYHLQSNEFLRNVFELGPPVMLDAATLKTMKISRFERHLYNSAAFKARTKARSKCRDKRADVGEFF

SEQ ID NO: 16033 - protein, 389 aa, Homo sapiens
MIRNGRGAAGGAEQPGPGGRRAVRVWCDGCYDMVHYGHSNQLRQARAMGDYLIVGVHTDEEIAKHKGPPVFTQEERYKMVQAIKWVDEVVPAAPYVTTLETLDKYNCDFCVHGNDITLTVDGRDTYEEVKQAGRYRECKRTQGVSTTDLVGRMLLVTKAHHSSQEMSSEYREYADSFGKCPGGRNPWTGVSQFLQTSQKIIQFASGKEPQPGETVIYVAGAFDLFHIGHVDFLEKVHRLAERPYIIAGLHFDQEVNHYKGKNYPIMNLHERTLSVLACRYVSEVVIGAPYAVTAELLSHFKVDLVCHGKTEIIPDRDGSDPYQEPKRRGIFRQIDSGSNLTTDLIVQRIITNRLEYEARNQKKEAKELAFLEAARQQAAQPLGERDGDF

SEQ ID NO: 16034 - protein, 623 aa, Homo sapiens
MAFRGWRPPPPPLLLLLLWVTGQAAPVAGLGSDAELQIERRFVPDECPRTVRSGDFVRYHYVGTFPDGQKFDSRYWDTAEDKADKSPCPQVRVGVNTSPSCRLKQKGVGIYWKDLQFLVRVQNHGLSYDRDSTFNVFVGKGQLITGMDQALVGMCVNERRFVKIPPKLAYGNEGVSGVIPPNSVLHFDVLLMDIWNSEDQVQIHTYFKPPSCPRTIQVSDFVRYHYNGTFLDGTLFDSSHNRMKTYDTYVGIGWLIPGMDKGLLGMCVGEKRIITIPPFLAYGEDGDGKDIPGQASLVFDVALLDLHNPKDSISIENKVVPENCERISQSGDFLRYHYNGTLLDGTLFDSSYSRNRTFDTYIGQGYVIPGMDEGLLGVCIGEKRRIVVPPHLGYGEEGRGNIPGSAVLVFDIHVIDFHNPSDSISITSHYKPPDCSVLSKKGDYLKYHYNASLLDGTLLDSTWNLGKTYNIVLGSGQVVLGMDMGLREMCVGEKRTVIIPPHLGYGEAGVDGEVPGSAVLVFDIELLELVAGLPEGYMFIWNGEVSPNLFEEIDKDGNGEVLLEEFSEYIHAQVASGKGKLAPGFDAELIVKNMFTNQDRNGDGKVTAEEFKLKDQEAKHDEL

SEQ ID NO: 16035 - protein, 180 aa, Homo sapiens
MGDKKSPTRPKRQPKPSSDEGYWDCSVCTFRNSAEAFKCMMCDVRKGTSTRKPRPVSQLVAQQVTQQFVPPTQSKKEKKDKVEKEKSEKETTSKKNSHKKTRPRLKNVDRSSAQHLEVTVGDLTVIITDFKEKTKSPPASSAASADQHSQSGSSSDNTERGMSRSSSPRGEASSLNGESH

SEQ ID NO: 16036 - protein, 308 aa, Homo sapiens
MQIPKHISIEDITATSTSTTGTSHLVKCAEKEKTFCVNGGECFMVKDLSNPSRYLCKCQPGFTGARCTENVPMKVQNQEKAEELYQKRVLTITGICIALLVVGIMCVVAYCKTKKQRKKLHDRLRQSLRSERNNMMNIANGPHHPNPPPENVQLVNQYVSKNVISSEHIVEREAETSFSTSHYTSTAHHSTTVTQTPSHSWSNGHTESILSESHSVIVMSSVENSRHSSPTGGPRGRLNGTGGPRECNSFLRHARETPDSYRDSPHSERHNLIAELRRNKAHRSKCMQIQLSATHLRSSSIPHLGFIL

SEQ ID NO: 16037 - protein, 885 aa, Homo sapiens
MASNQNSPIRTFGLNLSSDSSALGAVASDSEQSKTEEERESRSLFPGSLKPKLGKRDYLEKAGELIKLALKKEEEDDYEAASDFYRKGVDLLLEGVQGESSPTRREAVKRRTAEYLMRAESISSLYGKPQLDDVSQPPGSLSSRPLWNLRSPAEELKAFRVLGVIDKVLLVMDTRTEQTFILKGLRKSSEYSRNRKTIIPRCVPNMVCLHKYIISEESVFLVLQHAEGGKLWSYISKFLNRSPEESFDIKEVKKPTLAKVHLQQPTSSPQDSSSFESRGSDGGSMLKALPLKSSLTPSSQDDSNQEDDGQDSSPKWPDSGSSSEEECTTSYLTLCNEYGQEKIEPGSLNEEPFMKTEGNGVDTKAIKSFPAHLAADSDSPSTQLRAHELKFFPNDDPEAVSSPRTSDSLSRSKNSPMEFFRIDSKDSASELLGLDFGEKLYSLKSEPLKPFFTLPDGDSASRSFNTSESKVEFKAQDTISRGSDDSVPVISFKDAAFDDVSGTDEGRPDLLVNLPGELESTREAAAMGPTKFTQTNIGIIENKLLEAPDVLCLRLSTEQCQAHEEKGIEELSDPSGPKSYSITEKHYAQEDPRMLFVAAVDHSSSGDMSLLPSSDPKFQGLGVVESAVTANNTEESLFRICSPLSGANEYIASTDTLKTEEVLLFTDQTDDLAKEEPTSLFQRDSETKGESGLVLEGDKEIHQIFEDLDKKLALASRFYIPEGCIQRWAAEMVVALDALHREGIVCRDLNPNNILLNDRGHIQLTYFSRWSEVEDSCDSDAIERMYCAPEVGAITEETEACDWWSLGAVLFELLTGKTLVECHPAGINTHTTLNMPECVSEEARSLIQQLLQFNPLERLGAGVAGVEDIKSHPFFTPVDWAELMR

SEQ ID NO: 16038 - protein, 138 aa, Homo sapiens
MSLLGPKVLLFLAAFIITSDWIPLGVNSQRGDDVTQATPETFTEDPNLVNDPATDETVLAVLADIAPSTDDLASLSEKNTTAECWDEKFTCTRLYSVHRPVKQCIHQLCFTSLRRMYIVNKEICSRLVCKEHEAMKDP

SEQ ID NO: 16039 - protein, 507 aa, Homo sapiens
MQEQTLQLEQQSKLKEYEAAVEQLKSEQIRAQAEERRKTLSEETRQHQARAQYQDKLARQRYEDQLKQQQLLNEENLRKQEESVQKQEAMRRATVEREMELRHKNEMLRVEAEARARAKAERENADIIREQIRLKAAEHRQTVLESIRTAGTLFGEGFRAFVTDWDKVTATVAGLTLLAVGVYSAKNATLVAGRFIEARLGKPSLVRETSRITVLEALRHPIQVSRRLLSRPQDALEGVVLSPSLEARVRDIAIATRNTKKNRSLYRNILMYGPPGTGKTLFAKKLALHSGMDYAIMTGGDVAPMGREGVTAMHKLFDWANTSRRGLLLFVDEADAFLRKRATEKISEDLRATLNAFLYRTGQHSNKFMLVLASNQPEQFDWAINDRINEMVHFDLPGQEERERLVRMYFDKYVLKPATEGKQRLKLAQFDYGRKCSEVARLTEGMSGREIAQLAVSWQATAYASEDGVLTEAMMDTRVQDAVQQHQQKMCWLKAEGPGRGDEPSPS

SEQ ID NO: 16040 - protein, 113 aa, Homo sapiens
MLLLLVPVLEVIFTLGGTRAQSVTQLDSHVSVSEGTPVLLRCNYSSSYSPSLFWYVQHPNKGLQLLLKYTSAATLVKGINGFEAEFKKSETSFHLTKPSAHMSDAAEYFCVVS

SEQ ID NO: 16041 - protein, 1006 aa, Homo sapiens
MRMVHILTSVVCDLVLDAAHEKSTESSSGPKREEIMESILFKCSDFVVVQFKDMDSSYAKRDAFTDSAISAKVNGEHKEKDLEPWDAGELTANEELEALENDVSNGWDPNDMFRYNEENYGVVSTYDSSLSSYTVPLERDNSEEFLKREARANQLAEEIESSAQYKARVALENDDRSEEEKYTAVQRNSSEREGHSINTRENKYIPPGQRNREVISWGSGRQNSPRMGQPGSGSMPSRSTSHTSDFNPNSGSDQRVVNGGVPWPSPCPSPSSRPPSRYQSGPNSLPPRAATPTRPPSRPPSRPSRPPSHPSAHGSPAPVSTMPKRMSSEGPPRMSPKAQRHPRNHRVSAGRGSISSGLEFVSHNPPSEAATPPVARTSPSGGTWSSVVSGVPRLSPKTHRPRSPRQNSIGNTPSGPVLASPQAGIIPTEAVAMPIPAASPTPASPASNRAVTPSSEAKDSRLQDQRQNSPAGNKENIKPNETSPSFSKAENKGISPVVSEHRKQIDDLKKFKNDFRLQPSSTSESMDQLLNKNREGEKSRDLIKDKIEPSAKDSFIENSSSNCTSGSSKPNSPSISPSILSNTEHKRGPEVTSQGVQTSSPACKQEKDDKEEKKDAAEQVRKSTLNPNAKEFNPRSFSQPKPSTTPTSPRPQAQPSPSMVGHQQPTPVYTQPVCFAPNMMYPVPVSPGVQPLYPIPMTPMPVNQAKTYRAVPNMPQQRQDQHHQSAMMHPASAAGPPIAATPPAYSTQYVAYSPQQFPNQPLVQHVPHYQSQHPHVYSPVIQGNARMMAPPTHAQPGLVSSSATQYGAHEQTHAMYVSTGSLAQQYAHPNATLHPHTPHPQPSATPTGQQQSQHGGSHPAPSPVQHHQHQAAQALHLASPQQQSAIYHAGLAPTPPSMTPASNTQSPQNSFPAAQQTVFTIHPSHVQPAYTNPPHMAHVPQAHVQSGMVPSHPTAHAPMMLMTTQPPGGPQAALAQSALQPIPVSTTAHFPYMTHPSVQAHHQQQL

SEQ ID NO: 16042 - protein, 101 aa, Homo sapiens
MKPSLLCRPLSCFLMLLPWPLATLTSTTLWQCPPGEEPDLDPGQGTLCRPCPPGTFSAAWGSSPCQPHARCSLWRRLEAQVGMATRDTLCGDCWPGWFGPW

SEQ ID NO: 16043 - protein, 403 aa, Homo sapiens
MADPKYADLPGIARNEPDVYETSDLPEDDQAEFDAELEELTSTSVEHIIVNPNAAYDKFKDKRVGTKGLDFSDRIGKTKRTGYESGEYEMLGEGLGVKETPQQKYQRLLHEVQELTTEVEKIKTTVKESATEEKLTPVLLAKQLAALKQQLVASHLEKLLGPDAAINLTDPDGALAKRLLLQLEATKNSKGGSGGKTTGTPPDSSLVTYELHSRPEQDKFSQAAKVAELEKRLTELETAVRCDQDAQNPLSAGLQGACLMETVELLQAKVSALDLAVLDQVEARLQSVLGKVNEIAKHKASVEDADTQSKVHQLYETIQRWSPIASTLPELVQRLVTIKQLHEQAMQFGQLLTHLDTTQQMIANSLKDNTTLLTQVQTTMRENLATVEGNFASIDERMKKLGK

SEQ ID NO: 16044 - protein, 529 aa, Homo sapiens
MSDSYLPSYYSPSIGFSYSLGEAAWSTGGDTAMPYLTSYGQLSNGEPHFLPDAMFGQPGALGSTPFLGQHGFNFFPSGIDFSAWGNNSSQGQSTQSSGYSSNYAYAPSSLGGAMIDGQSAFANETLNKAPGMNTIDQGMAALKLGSTEVASNVPKVVGSAVGSGSITSNIVASNSLPPATIAPPKPASWADIASKPAKQQPKLKTKNGIAGSSLPPPPIKHNMDIGTWDNKGPVAKAPSQALVQNIGQPTQGSPQPVGQQANNSPPVAQASVGQQTQPLPPPPPQPAQLSVQQQAAQPTRWVAPRNRGSGFGHNGVDGNGVGQSQAGSGSTPSEPHPVLEKLRSINNYNPKDFDWNLKHGRVFIIKSYSEDDIHRSIKYNIWCSTEHGNKRLDAAYRSMNGKGPVYLLFSVNGSGHFCGVAEMKSAVDYNTCAGVWSQDKWKGRFDVRWIFVKDVPNSQLRHIRLENNENKPVTNSRDTQEVPLEKAKQVLKIIASYKHTTSIFDDFSHYEKRQEEEESVKKERQGRGK

SEQ ID NO: 16045 - protein, 879 aa, Homo sapiens
MGTPRAQHPPPPQLLFLILLSCPWIQGSDRDPTLATPPAGQTLAVPSLPRATEPGTGPLTTAVTPNGVRGAGPTAPELLTPPPGTTAPPPPSPASPGPPLGPEGGEEETTTTIITTTTVTTTVTSPVLCNNNISEGEGYVESPDLGSPVSRTLGLLDCTYSIHVYPGYGIEIQVQTLNLSQEEELLVLAGGGSPGLAPRLLANSSMLGEGQVLRSPTNRLLLHFQSPRVPRGGGFRIHYQAYLLSCGFPPRPAHGDVSVTDLHPGGTATFHCDSGYQLQGEETLICLNGTRPSWNGETPSCMASCGGTIHNATLGRIVSPEPGGAVGPNLTCRWVIEAAEGRRLHLHFERVSLDEDNDRLMVRSGGSPLSPVIYDSDMDDVPERGLISDAQSLYVELLSETPANPLLLSLRFEAFEEDRCFAPFLAHGNVTTTDPEYRPGALATFSCLPGYALEPPGPPNAIECVDPTEPHWNDTEPACKAMCGGELSEPAGVVLSPDWPQSYSPGQDCVWGVHVQEEKRILLQVEILNVREGDMLTLFDGDGPSARVLAQLRGPQPRRRLLSSGPDLTLQFQAPPGPPNPGLGQGFVLHFKEVPRNDTCPELPPPEWGWRTASHGDLIRGTVLTYQCEPGYELLGSDILTCQWDLSWSAAPPACQKIMTCADPGEIANGHRTASDAGFPVGSHVQYRCLPGYSLEGAAMLTCYSRDTGTPKWSDRVPKCALKYEPCLNPGVPENGYQTLYKHHYQAGESLRFFCYEGFELIGEVTITCVPGHPSQWTSQPPLCKVAYEELLDNRKLEVTQTTDPSRQLEGGNLALAILLPLGLVIVLGSGVYIYYTKLQGKSLFGFSGSHSYSPITVESDFSNPLYEAGDTREYEVSI

SEQ ID NO: 16046 - protein, 590 aa, Homo sapiens
MDILKSESYGTVVRISPQDFPQNPGFGDVSDSEVWLDSHLGSPGLKVTGFTFQNNCLNEETVVPKTFTKDAPQGCKELGSSGLDCQPLESQGESAEGMSQRCEECGKGIRATSDIALHWEINTQKISRCQECQKKLSDCLQGKHTNNCHGEKPYECAECGKVFRLCSQLNQHQRIHTGEKPFKCTECGKAFRLSSKLIQHQRIHTGEKPYRCEECGKAFGQSSSLIHHQRIHTGERPYGCRECGKAFSQQSQLVRHQRTHTGERPYPCKECGKAFSQSSTLAQHQRMHTGEKAQILKASDSPSLVAHQRIHAVEKPFKCDECGKAFRWISRLSQHQLIHTGEKPYKCNKCTKAFGCSSRLIRHQRTHTGEKPFKCDECGKGFVQGSHLIQHQRIHTGEKPYVCNDCGKAFSQSSSLIYHQRIHKGEKPYECLQCGKAFSMSTQLTIHQRVHTGERPYKCNECGKAFSQNSTLFQHQIIHAGVKPYECSECGKAFSRSSYLIEHQRIHTRAQWFYEYGNALEGSTFVSRKKVNTIKKLHQCEDCEKIFRWRSHLIIHQRIHTGEKPYKCNDCGKAFNRSSRLTQHQKIHMG

SEQ ID NO: 16047 - protein, 423 aa, Homo sapiens [sequence omitted]

SEQ ID NO: 16048 - protein, 271 aa, Homo sapiens [sequence omitted]

SEQ ID NO: 16049 - protein, 344 aa, Homo sapiens
MAAAGARPVELGFAESAPAWRLRSEQFPSKVGGRPAWLGAAGLPGPQALACELCGRPLSFLLQVYAPLPGRPDAFHRCIFLFCCREQPCCAGLRVFRNQLPRKNDFYSYEPPSENPPPETGESVCLQLKSGAHLCRVCGCLGPKTCSRCHKAYYCSKEHQTLDWRLGHKQACAQPDHLDHIIPDHNFLFPEFEIVIETEDEIMPEVVEKEDYSEIIGSMGEALEEELDSMAKHESREDKIFQKFKTQIALEPEQILRYGRGIAPIWISGENIPQEKDIPDCPCGAKRILEFQVMPQLLNYLKADRLGKSIDWGILAVFTCAESCSLGTGYTEEFVWKQDVTDTP

SEQ ID NO: 16050 - protein, 3048 aa, Homo sapiens
MNLHQVLTGAVNPGDHCFSVGSIGDQRFTAYASGCDIVILGSDFERLQIIPGAKHGNIQVGCVDCSMQQGKIAASYGNVISIFEPVNLPKQKKNLELYSQWQKSGQFFLESIAHNITWDPTGSRLLTGSSYLQLWSNTNLEKPTEDENLNKTDLNFGDWKCIWHCKTASQVHLMKFSPDGEFFATAGKDDCLLKVWYNVENWRTAVTSPDGSSEKQSQGEIDFSFVYLAHPRAVNGFSWRKTSKYMPRASVCNVLLTCCKDNVCRLWVETFLPNDCLLYGGDCSHWTESINLTNNFKRNASSKERVQNALEVNLRHFRRGRRRSLALVAHTGYLPHQQDPHHVHRNTPLHANALCHFHIAASINPATDIPLLPSITSLSLNENEEKTGPFVVHWLNNKELHFTLSMEVFLQQLRKSFEQPSSEASVEDSNQADVKSDEETDDGVDDLKINPEKKELGCDKMVPNSSFTSLSSAAIDHQIEVLLSEWSKNADMLFSIHPMDGSLLVWHVDWLDEYQPGMFRQVQVSFVSRIPVAFPTGDANSLCKSIMMYACTKNVDLAIQQGKQKPSGLTRSTSMLISSGHNKSSNSLKLSIFTPNVMMISKHADGSLNQWLVSFAEESAFSTVLSISHKSRYCGHRFHLNDLACHSVLPLLLTTSHHNALRTPDVDNPEQPFDALNIEECSLTQQNKSTVDVAFQDPSAVYSELILWRVDPVGPLSFSGGVSELARINSLHVSAFSNVAWLPTLIPSYCLGAYCNSPSACFVASDGQYLRLYEAVIDAKKLLSELSNPEISKYVGEVFNIVSQQSTARPGCIIALDPITKLHGRKTQLLHVFEEDFILNNLEKKSLGKDSILSNAGSSPNGFSEKFYLIVIECTQDNRSLLHMWNLHLKSIPVSLDEKVDTKLSEAVWQPEEHYSSSPEKILSPFSQKYQACRANLQSTSRLTLFSEMVYSQELHLPEGVEIISIKPSAGHLSSSSIYPACSAPYLLATSCSDEKVRFWRCRVTDGESATSKNGKIDLAYIWEEWPLLIEDGLQSNSSITVPGRPVEVSCAHTNRLAVAYKQPASNSRSSQDFVMHVSIFECESTGGSCWVLEQTIHLDELSTVLDSGISVDSNLVAYNKQDMYLSSKENITSNTKHLVHLDWMSREDGSHILTVGIGSKLFMYGPLAGKVQDQTGKETLAFPLWESTKVVPLSKFVLLRSVDLVSSVDGSPPFPVSLSWVRDGILVVGMDCEMHVYCQWQPSSKQEPVITDSYSGSTPSITSLIKQSNSSSGLHPPKKTLTRSMTSLAQKICGKKTAFDPSVDMEDSGLFEAAHVLSPTLPQYHPLQLLELMDLGKVRRAKAILSHLVKCIAGEVVALNEAESNHERRLRSLTISASGSTTRDPQAFNKAENTDYTEIDSVPPLPLYALLAADDDSCYSSLEKSSNESTLSKSNQLSKESYDELFQTQLLMTDTHMLETDEENTKPRVIDLSQYSPTYFGPEHAQVLSGHLLHSSLPGLSRMEQMSLMALADTIATTSTDIGESRDRSQGGETLDECGLKFLLAVRLHTFLTTSLPAYRAQLLHQGLSTSHFAWAFHSVAEEELLNMLPAMQKDDPTWSELRAMGVGWWVRNTRILRKCIEKVAKAAFYRKNDPLDAAIFYLAMKKKAVIWGLYRAEKNTRMTQFFGHNFEDERWRKAALKNAFSLLGKQRFEHSAAFFLLAGCLRDAIEVCLEKLNDIQLALVIARLYESEFDTSAAYKSILRKKVLGIDSPVSELCSLNINMHHDPFLRSMAYWILEDYSGALETLIKQPIRENDDQVLSASNPTVFNFYNYLRTHPLLLRRHFGSSDTFSTHMSLTGKSGLAGTINLSERRLFFTTASAHLKAGCPMLALEVLSKMPKVIKKTRPFYRASSFLDTSKDCSPSSPLKLDAREDKSSAVDWSQSLINGFGSSSEGSSEKQSNSTLSFDWSQPSVVFQDDSLELKWDSDNDEENEDVPISMKELKPLQRKTDKKLDDISSNYTESFSTLDENDLLNPSEDIIAVQLKFRACLKILTVELRTLSTGYEIDGGKLRYQLYHWLEKEVIALQRTCDFCSDAEELQSAFGRNEDEFGLNEDAEDLPHQTKVKQLRENFQEKRQWLLKYQSLLRMFLSYCILHGSHGGGLASVRMELILLLQESQQETSEPLFSSPLSEQTSVPLLFACTANAKTVVANPLLHLSNLTHDILHAIINFDSPPHPDIQSNKVYVMHTLAASLSACIYQCLCGSHNYSSFQTNQFTGMVYQTVLLPHRPSLKTGSLDEALTPNTSPAQWPGITCLIRLLNSSGEEAQSGLTVLLCEILTAVYLSLFIHGLATHSSNELFRIVAHPLNEKMWSAVFGGGAHVPSKEQTHSKTLPVSSLVEEGEKQNKRFRPSKMSCRESAPLTPSSAPVSQESLAVKEKFIPPELSIWDYFIAKPFLPSSQSRAEYDSEESLGSDDDDNDDDDDVLASDFHLQEHSNSNSYSWSLMRLAMVQLVLNNLKTFYPFAGHDLAELPVSSPLCHAVLKTLQCWEQVLLRRLEIHGGPPQNYIASHTAEESLSAGPAILRHKALLEPTNTPFKSKHHLALSVKRLWQYLVKQEEIQETFIKNIFTKKRCLNESLEDNSETIKNSMMEEPNINKIEADLGYPGGKARIIHKESDIITAFAVNKANRNCIAIASSHDVQELDVSGILATQVYTWVDDDIEVETKGSEDFLVIHARDDLTAVQGTTPYTHSNPGTPINMPWLGSTQTGRGASVMIKKAINNVRRMTSHPTLPYYLTGAQDGSVRMFEWGHSQQITCFRSGGNSRVTRMRFNYQGNKFGIVDADGYLSLYQTNWKCCPVTGSMPKPYLTWQCHNKTANDFVFVSSSSLIATAGLSTDNRNVCLWDTLVAPANSLVHAFTCHDSGATVLAYAPKHQLLISGGRKGFTYVFDLCQRQQRQLFQSHDSPVKAVAVDPTEEYFVTGSAEGNIKIWSLSTFGLLHTFVSEHARQSIFRNIGTGVMQIETGPANHIFSCGADGTMKMRILPDQFSPLNEVLKNDVKFML

SEQ ID NO: 16051 - protein, 282 aa, Homo sapiens
MRFARSKRGLRLKTVDSCFQDLKESRLVEDTFTIDEVSEVLNGLQAVVHSEVESELINTAYTNVLLLRQLFAQAEKWYLKLQTDISELENRELLEQVAEFEKAEITSSNKKPILDVTKPKLAPLNEGGTAELLNKEILRLQEENEKLKSRLKTIEIQATNALDEKSKLEKALQDLQLDQGNQKDFIKAQDLSNLENTVAALKSEFQKTLNDKTENQKSLEENLATAKHDLLRVQEQLHMAEKELEKKFQQTAAYRNMKEILTKKNDQIKDLRKRLAQYEPED

SEQ ID NO: 16052 - protein, 229 aa, Homo sapiens
QAEQTHRSILLGLLLGAGRTPQPDSALIRQALAERWSQWSLRGGLEMLPQALETHLTSRGVSVLRGQPVCGLSLQAEGRWKGFGHLVPSSEDPGVLGIVYDSVAFPEQDGSPPGLRVTVMLGGSWLQTLEASGCVLSQELFQQRAQEAAATQLGLKEMPSHCLVHLHKNCIPQYTLGHWQKLESARQFLTAHRLPLTLAGASYEGVAVNDCIESGRQAAVSVLGTEPNS

SEQ ID NO: 16053 - protein, 547 aa, Homo sapiens
MAVISLLFLAVMYVVHHPLMVSDRMDLDTLARSRQLEKRMSEEMRLLEMEFEERKRAAEQRQKAENFWTGDTSSDQLVLGKKDMGWPFQADGQEGPLGWMLGNLWNTGLFCLFLVFELLRQNMQHEPAFDSSSEEEEEEVRVVPVTSYNWLTDFPSQEALDSFYKHYVQNAIRDLPCTCEFVESFVDDLIEACRVLSRQEAHPQLEDCLGIGAAFEKWGTLHETQKFDILVPIVPPQGTMFVLEMRDPALGRRCGCVLVESECVCKREKLLGDVLCLVHHHRDPSAVLGKCSSSIKAALCTGFHLDVCKTVQWFRNMMGNAWALVAHKYDFKLSLPPSTTSCKLRLDYRSGRFLSIHLVLGVQREDTLVYLVSQAPDQEQLTSVDWPESFVACEHLFLKLVGRFAPENTCHLKCLQIILSLRQHQSLPHGASRPILTSYHFKTALMHLLLRLPLTDWAHNMLSQRLQDILWFLGRGLQQRSLHHFLIGNNFLPLTIPIPKTFRNAEPVNLFQHLVLNPKAHSQAVEEFQNLLTQVKTLPHAPLAAAP

SEQ ID NO: 16054 - protein, 135 aa, Homo sapiens
MAIGFNVETVTYKNLKFQVWDLGGQTSIRPYWRCYYSNTDAVIYVVDSCDRDRIGISKSELVAMLEEEELRKAILVVFANKQDMEQAMTSSEMANSLGLPALKDRKWQIFKTSATKGTGLDEAMEWLVETLKSRQ

SEQ ID NO: 16055 - protein, 490 aa, Homo sapiens
MNCYLLLRFMLGIPLLWPCLGATENSQTKKVKQPVRSHLRVKRGWVWNQFFVPEEMNTTSHHIGQLRSDLDNGNNSFQYKLLGAGAGSTFIIDERTGDIYAIQKLDREERSLYILRAQVIDIATGRAVEPESEFVIKVSDINDNEPKFLDEPYEAIVPEMSPEGTLVIQVTASDADDPSSGNNARLLYSLLQGQPYFSVEPTTGVIRISSKMDRELQDEYWVIIQAKDMIGQPGALSGTTSVLIKLSDVNDNKPIFKESLYRLTVSESAPTGTSIGTIMAYDNDIGENAEMDYSIEEDDSQTFDIITNHETQEGIVILKKKVDFEHQNHYGIRAKVKNHHVPEQLMKYHTEASTTFIKIQVEDVDEPPLFLLPYYVFEVFEETPQGSFVGVVSATDPDNRKSPIRYSITRSKVFNINDNGTITTSNSLDREISAWYNLSITATEKYNIEQISSIPLYVQVLNINDHAPEFSQYYETYVCENAGSGQGLFF

SEQ ID NO: 16056 - protein, 676 aa, Homo sapiens
MDCQAEVNCGLHLVIQTSSLPEKNKVEFKLNKDTSSFPGRLLQHDLERNYSSRQGDHINLVSSSLSSFPILQRSSEEKILYSDRLSLERQKLTVCPIINGEDHLRLLNFQHNFITRIQNISNLQKLISLDLYDNQIEEISGLSTLRCLRVLLLGKNRIKKISNLENLKSLDVLDLHGNQITKIENINHLCELRVLNLARNFLSHVDNLNGLDSLTELNLRHNQITFVRDVDNLPCLQHLFLSFNNISSFDSVSCLADSSSLSDITFDGNPIAQESWYKHTVLQNMMQLRQLDMKRITEEERRMASVLAKKEEEKKRESHKQSLLKEKKRLTINNVARQWDLQQQRVANIATNEDRKDSDSPQDPCQIDGSTLSAFPEETGPLDSGLNNALQGLSVIDTYLVEVDGDTLSLYGSGALESLDRNWSVQTAGMITTVSFTFIEFDEIVQVLPKLKIKFPNSLHLKFKETNLVMLQQFNALAQLRRIDQLTIDPQGNPVVNFTLWKYYVLFRLSHFSMQKINGTEVTQNDMIMAERLFGILAHVASSELPQYRLISILGDARKKQFRYLLESKGKKPGIINEENNDSKRLVGENTNRATLNYTTRDFYNEKLEEIKEKKKFCKTYIEDLVKEATEINMKNEALQKLWPQMFIELVRDAVIEIRNKNSYMKLCLQQITDQK

SEQ ID NO: 16057 - protein, 393 aa, Homo sapiens
MAELQMLLEEEIPSGKRALIESYQNLTRVADYCENNYIQATDKRKALEETKAYTTQSLASVAYQINALANNVLQLLDIQASQLRRMESSINHISQTVDIHKEKVARREIGILTTNKNTSRTHKIIAPANMERPVRYIRKPIDYTVLDDVGHGVKWLKAKHGNNQPARTGTLSRTNPPTQKPPSPPMSGRGTLGRNTPYKTLEPVKPPTVPNDYMTSPARLGSQHSPGRTASLNQRPRTHSGSSGGSGSRENSGSSSIGIPIAVPTPSPPTIGPVADSPTPPPPPPPDDIPMFDDSPPPPPPPPVDYEDEEAAVVQYNDPYADGDPAWAPKNYIEKVVAIYDYTKDKDDELSFMEGAIIYVIKKNDDGWYEGVCNRVTGLFPGNYVESIMHYTD

SEQ ID NO: 16058 - protein, 299 aa, Homo sapiens
MVLKAFFPTCCVSTDSGLLVGRWVPEQSSAVVLAVLHFPFIPIQVKQLLAQVRQASQVGVAVLGTWCHCRQEPEESLGRFLESLGAVFPHEPWLRLCRERGGTFWSCEATHRQAPTAPGAPGEDQVMLIFYDQRQVLLSQLHLPTVLPDRQAGATTASTGGLAAVFDTVARSEVLFRSDRFDEGPVRLSHWQSEGVEASILAELARRASGPICLLLASLLSLVSAVSACRVFKLWPLSFLGSKLSTCEQLRHRLEHLTLIFSTRKAENPAQLMRCGPALVSAGLGACPLAPSPSPSAPR

SEQ ID NO: 16059 - protein, 662 aa, Homo sapiens
MQVSSLNEVKIYSLSCGKSLPEWLSDRKKRALQKKDVDVRRRIELIQDFEMPTVCTTIKVSKDGQYILATVVTFEILSDDYSKIVFLHNDRYIEFHSQSGFYYKTRIPKFGRDFSYHYPSCDLYFVGASSEVYRLNLEQGRYLNPLQTDAAENNVCDINSVHGLFATGTIEGRVECWDPRTRNRVGLLDCALNSVTADSEINSLPTISALKFNGALTMAVGTTTGQVLLYDLRSDKPLLVKDHQYGLPIKSVHFQDSLDLILSADSRIVKMWNKNSGKIFTSLEPEHDLNDVCLYPNSGMLLTANETPKMGIYYIPVLGPAPRWCSFLDNLTEELEENPESTVYDDYKFVTKKDLENLGLTHLIGSPFLRAYMHGFFMDIRLYHKVKLMVNPFAYEEYRKDKIRQKIEETRAQRVQLKKLPKVNKELALKLIEEEEEKQKSTWKKKVKSLPNILTDDRFKVMFENPDFQVDEESEEFRLLNPLVSKISEKRKKKLRLLEQQELREKEEEEEPEGKPSDAESSESSDDEKAWVEEVRKQRRLLQQEEKVKRQERLKEDQQTVLKPQFYEIKAGEEFRSFKDSATKQKLMNKTLEDRLKIEAKNGTLSVSDTTVGSKQLTFTLKRSEQQKKQQEAEKLHRQERKRLRRSAGHLKSRHKRGRSFH

SEQ ID NO: 16060 - protein, 106 aa, Homo sapiens
MWGVFLLYVSMKMGGTTGQNIDQPTEMTATEGAIVQINCTYQTSGFNGLFWYQQHAGEAPTFLSYNVLDGLEEKGRFSSFLSRSKGYSYLLLKELQMKDSASYLCA

SEQ ID NO: 16061 - protein, 1011 aa, Homo sapiens
MAPPTGVLSSLLLLVTIAGCARKQCSEGRTYSNAVISPNLETTRIMRVSHTFPVVDCTAACCDLSSCDLAWWFEGRCYLVSCPHKENCEPKKMGPIRSYLTFVLRPVQRPAQLLDYGDMMLNRGSPSGIWGDSPEDIRKDLTFLGKDWGLEEMSEYSDDYRELEKDLLQPSGKQEPRGSAEYTDWGLLPGSEGAFNSSVGDSPAVPAETQQDPELHYLNESASTPAPKLPERSVLLPLPTTPSSGEVLEKEKASQLQEQSSNSSGKEVLMPSHSLPPASLELSSVTVEKSPVLTVTPGSTEHSIPTPPTSAAPSESTPSELPISPTTAPRTVKELTVSAGDNLIITLPDNEVELKAFVAPAPPVETTYNYEWNLISHPTDYQGEIKQGHKQTLNLSQLSVGLYVFKVTVSSENAFGEGFVNVTVKPARRVNLPPVAVVSPQLQELTLPLTSALIDGSQSTDDTEIVSYHWEEINGPFIEEKTSVDSPVLRLSNLDPGNYSFRLTVTDSDGATNSTTAALIVNNAVDYPPVANAGPNHTITLPQNSITLNGNQSSDDHQIVLYEWSLGPGSEGKHVVMQGVQTPYLHLSAMQEGDYTFQLKVTDSSRQQSTAVVTVIVQPENNRPPVAVAGPDKELIFPVESATLDGSSSSDDHGIVFYHWEHVRGPSAVEMENIDKAIATVTGLQVGTYHFRLTVKDQQGLSSTSTLTVAVKKENNSPPRARAGGRHVLVLPNNSITLDGSRSTDDQRIVSYLWIRDGQSPAAGDVIDGSDHSVALQLTNLVEGVYTFHLRVTDSQGASDTDTATVEVQPDPRKSGLVELTLQVGVGQLTEQRKDTLVRQLAVLLNVLDSDIKVQKIRAHSDLSTVIVFYVQSRPPFKVLKAAEVARNLHMRLSKEKADFLLFKVLRVDTAGCLLKCSGHGHCDPLTKRCICSHLWMENLIQRYIWDGESNCGIKHRSTEHNSSLMVSESEFDSDQDTIFSREKMERGNPKVSMNGSIRNGASFSYCSKDR

SEQ ID NO: 16062 - protein, 203 aa, Homo sapiens
MGMLFFVGIRKVILFLLTPNSAGALNKWYKYNHDLPARIIVYRAGVGDGQLKTLIEYEVPQLLSSVAESSSNTSSRLSVIVVRKKCMPRFFTEMNRTVQNPPLGTVVDSEATRNEWYDFYLISQVACRGTVSPTYYNVIYDDNGLKPDHMQRLTFKLCHLYYNWPGIVSVPAPCQYAHKLTFLVAQSIHKEPSLELANHLFYL

SEQ ID NO: 16063 - protein, 1260 aa, Homo sapiens
MGSVTGAVLKTLLLLSTQNWNRVEAGNSYDCDDPLVSALPQASFSSSSELSSSHGPGFARLNRRDGAGGWSPLVSNKYQWLQIDLGERMEVTAVATQGGYGSSNWVTSYLLMFSDSGWNWKQYRQEDSIWGFSGNANADSVVYYRLQPSIKARFLRFIPLEWNPKGRIGMRIEVFGCAYRSEVVDLDGKSSLLYRFDQKSLSPIKDIISLKFKTMQSDGILLHREGPNGDHITLQLRRARLFLLINSGEAKLPSTSTLVNLTLGSLLDDQHWHSVLIQRLGKQVNFTVDEHRHHFHARGEFNLMNLDYEGNVSFSCSQPQSMPVTFLSSRSYLALPDFSGEEEVSATFQFRTWNKAGLLLFSELQLISGGILLFLSDGKLKSNLYQPGKLPSDITAGVELNDGQWHSVSLSAKKNHLSVAVDGQMASAAPLLGPEQIYSGGTYYFGGCPDKSFGSKCKSPLGGFQGCMRLISISGKVVDLISVQQGSLGNFSDLQIDSCGISDRCLPNYCEHGGECSQSWSTFHCNCTNTGYRGATCHNSIYEQSCEAYKHRGNTSGFYYIDSDGSGPLEPFLLYCNMTETAWTIIQHNGSDLTRVRNTNPENPYAGFFEYVASMEQLQATINRAEHCEQEFTYYCKKSRLVNKQDGTPLSWWVGRTNETQTYWGGSSPDLQKCTCGLEGNCIDSQYYCNCDADRNEWTNDTGLLAYKEHLPVTKIVITDTGRLHSEAAYKLGPLLCQGDRSFWNSASFDTEASYLHFPTFHGELSADVSFFFKTTASSGVFLENLGIADFIRIELRSPTVVTFSFDVGNGPFEISVQSPTHFNDNQWHHVRVERNMKEASLQVDQLTPKTQPAPADGHVLLQLNSQLFVGGTATRQRGFLGCIRSLQLNGMTLDLEERAQVTPEVQPGCRGHCSSYGKLCRNGGKCRERPIGFFCDCTFSAYTGPFCSNEISAYFGSGSSVIYNFQENYLLSKNSSSHAASFHGDMKLSREMIKFSFRTTRTPSLLLFVSSFYKEYLSVIIAKNGDLQIRYKLNKYQEPDVVNFDFKNMADGQLHHIMINREEGVVFIEIDDNRRRQVHLSSGTEFSAVKSLVLGRILEHSDVDQDTALAGAQGFTGCLSAVQLSHVAPLKAALHPSHPDPVTVTGHVTESSCMAQPGTDATSRERTHSFADHSGTIDDREPLANAIKSDSAVIGGLIAVVIFILLCITAIAVRIYQQKRLYKRSEAKRSENVDSAEAVLKSELNIQNAVNENQKEYFF

SEQ ID NO: 16064 - protein, 418 aa, Homo sapiens
MQPEGIIFEAENKPSPGTESAGTFILDLSATSRTIISTPQRLTSSGSVLIGSPYTPAPAMVTQTHIAEATGWVPGDRKRARKFIDSDFSESKRSKKGDKNGKGLRHFSMKVCEKVQRKGTTSYNEVADELVSEFTNSNNHLAADSAYDQKNIRRRVYDALNVLMAMNIISKEKKEIKWIGLPTNSAQECQNLEIEKQRRIERIKQKRAQLQELLLQQIAFKNLVQRNRQNEQQNQGPPALNSTIQLPFIIINTSRKTVIDCSISSDKFEYLFNFDNTFEIHDDIEVLKRMGMSFGLESGKCSLEDLKLAKSLVPKALEGYITDISTGPSWLNQGLLLNSTQSVSNLDLTTGATLPQSSVNQGLCLDAEVALATGQFLAPNSHQSSSAASHCSESRGETPCSFNDEDEEDDEEDSSSPE

SEQ ID NO: 16065 - protein, 603 aa, Homo sapiens
MKDYDELLKYYELHETIGTGGFAKVKLACHILTGEMVAIKIMDKNTLGSDLPRIKTEIEALKNLRHQHICQLYHVLETANKIFMVLEENLLFDEYHKLKLIDFGLCAKPKGNKDYHLQTCCGSLAYAAPELIQGKSYLGSEADVWSMGILLYVLMCGFLPFDDDNVMALYKKIMRGKYDVPKWLSPSSILLLQQMLQVDPKKRISMKNLLNHPWIMQDYNYPVEWQSKNPFIHLDDDCVTELSVHHRNNRQTMEDLISLWQYDHLTATYLLLLAKKARGKPVRLRLSSFSCGQASATPFTDIKSNNWSLEDVTASDKNYVAGLIDYDWCEDDLSTGAATPRTSQFTKYWTESNGVESKSLTPALCRTPANKLKNKENVYTPKSAVKNEEYFMFPEPKTPVNKNQHKREILTTPNRYTTPSKARNQCLKETPIKIPVNSTGTDKLMTGVISPERRCRSVELDLNQAHMEETPKRKGAKVFGSLERGLDKVITVLTRSKRKGSARDGPRRLKLHYNVTTTRLVNPDQLLNEIMSILPKKHVDFVQKGYTLKCQTQSDFGKVTMQFELEVCQLQKPDVVGIRRQRLKGDAWVYKRLVEDILSSCKV

SEQ ID NO: 16066 - protein, 1241 aa, Homo sapiens
MVFLEEFEARSCLAEEEIKTEQEVVEGMDISTRSKDPGSAERTAQKRKFPSPPHSSNGHSPQDTSTSPIKKKKKPGLLNSNNKEQSELRHGPFYYMKQPLTTDPVDVVPQDGRNDFYCWVCHREGQVLCCELCPRVYHAKCLRLTSEPEGDWFCPECEKITVAECIETQSKAMTMLTIEQLSYLLKFAIQKMKQPGTDAFQKPVPLEQHPDYAEYIFHPMDLCTLEKNAKKKMYGCTEAFLADAKWILHNCIIYNGGNHKLTQIAKVVIKICEHEMNEIEVCPECYLAACQKRDNWFCEPCSNPHPLVWAKLKGFPFWPAKALRDKDGQVDARFFGQHDRAWVPINNCYLMSKEIPFSVKKTKSIFNSAMQEMEVYVENIRRKFGVFNYSPFRTPYTPNSQYQMLLDPTNPSAGTAKIDKQEKVKLNFDMTASPKILMSKPVLSGGTGRRISLSDMPRSPMSTNSSVHTGSDVEQDAEKKATSSHFSASEESMDFLDKSTASPASTKTGQAGSLSGSPKPFSPQLSAPITTKTDKTSTTGSILNLNLDRSKAEMDLKELSESVQQQSTPVPLISPKRQIRSRFQLNLDKTIESCKAQLGINEISEDVYTAVEHSDSEDSEKSDSSDSEYISDDEQKSKNEPEDTEDKEGCQMDKEPSAVKKKPKPTNPVEIKEELKSTSPASEKADPGAVKDKASPEPEKDFSEKAKPSPHPIKDKLKGKDETDSPTVHLGLDSDSESELVIDLGEDHSGREGRKNKKEPKEPSPKQDVVGKTPPSTTVGSHSPPETPVLTRSSAQTSAAGATATTSTSSTVTVTAPAPAATGSPVKKQRPLLPKETAPAVQRVVWNSSSKFQTSSQKWHMQKMQRQQQQQQQQNQQQQPQSSQGTRYQTRQAVKAVQQKEITQSPSTSTITLVTSTQSSPLVTSSGSMSTLVSSVNADLPIATASADVAADIAKYTSKMMDAIKGTMTEIYNDLSKNTTGSTIAEIRRLRIEIEKLQWLHQQELSEMKHNLELTMAEMRQSLEQERDRLIAEVKKQLELEKQQAVDETKKKQWCANCKKEAIFYCCWNTSYCDYPCQQAHWPEHMKSCTQSATAPQQEADAEVNTETLNKSSQGSSSSTQSAPSETASASKEKETSAEKSKESGSTLDLSGSRETPSSILLGSNQGSVSKRCDKQPAYAPTTTDHQPHPNYPAQKYHSRSNKSSWSSSDEKRGSTRSDHNTSTSTKSLLPKESRLDTFWD

SEQ ID NO: 16067 - protein, 537 aa, Homo sapiens
MDMGNPGTLSPTKPGSQYYQYSSNNPRRRPLHSSAMEVQTKKVRKVPPGLPSSVYAPSASTADYNRDSPGYPSSKPATSTFPSSFFMQDGHHSSDPWSSSSGMNQPGYAGMLGNSSHIPQSSSYCSLHPHERLSYPSHSSADINSSLPPMSTFHRSGTNHYSTSSCTPPANGTDSIMANRGSGAAGSSQTGDALGKALASIYSPDHTNNSFSSNPSTPVGSPPSLSAGTAVWSRNGGQASSSPNYEGPLHSLQSRIEDRLERLDDAIHVLRNHAVGPSTAMPGGHGDMHGIIGPSHNGAMGGLGSGYGTGLLSANRHSLMVGTHREDGVALRGSHSLLPNQVPVPQLPVQSATSPDLNPPQDPYRGMPPGLQGQSVSSGSSEIKSDDEGDENLQDTKSSEDKKLDDDKKDIKSITSNNDDEDLTPEQKAEREKERRMANNARERLRVRDINEAFKELGRMVQLHLKSDKPQTKLLILHQAVAVILSLEQQVRERNLNPKAACLKRREEEKVSSEPPPLSLAGPHPGMGDASNHMGQM

SEQ ID NO: 16068 - protein, 215 aa, Homo sapiens
MGKTFSQLGSWREDENKSILSSKPAIGSKAVNYSSTGSSKSFCSCVPCEGTADASFVTCPTCQGSGKIPQELEKQLVALIPYGDQRLKPKHTKLFVFLAVLICLVTSSFIVFFLFPRSVIVQPAGLNSSTVAFDEADIYLNITMFYAVATKIRDENTYKICTWLEIKVHHVLLHIQGTLTCSYLSHSEQLVFQSYEYVDCRGNASVPHQLTPHPP

SEQ ID NO: 16069 - protein, 916 aa, Homo sapiens
MEMPLPPDDQELRNVIDKLAQFVARNGPEFEKMTMEKQKDNPKFSFLFGGEFYSYYKCKLALEQQQLICKQQTPELEPAATMPPLPQPPLAPAAPIPPAQGAPSMDELIQQSQWNLQQQEQHLLALRQEQVTAAVAHAVEQQMQKLLEETQLDMNEFDNLLQPIIDTCTKDAISAGKNWMFSNAKSPPHCELMAGHLRNRITADGAHFELRLHLIYLINDVLHHCQRKQARELLAALQKVVVPIYCTSFLAVEEDKQQKIARLLQLWEKNGYFDDSIIQQLQSPALGLGQYQATLINEYSSVVQPVQLAFQQQIQTLKTQHEEFVTSLAQQQQQQQQQQQQLQMPQMEAEVKATPPPPAPPPAPAPAPAIPPTTQPDDSKPPIQMPGSSEYEAPGGVQDPAAAGPRGPGPHDQIPPNKPPWFDQPHPVAPWGQQQPPEQPPYPHHQGGPPHCPPWNNSHEGMWGEQRGDPGWNGQRDAPWNNQPDAAWNSQFEGPWNSQHEQPPWGGGQREPPFRMQRPPHFRGPFPPHQQHPQFNQPPHPHNFNRFPPRFMQDDFPPRHPFERPPYPHRFDYPQGDFPAEMGPPHHHPGHRMPHPGINEHPPWAGPQHPDFGPPPHGFNGQPPHMRRQGPPHINHDDPSLVPNVPYFDLPAGLMAPLVKLEDHEYKPLDPKDIRLPPPMPPSERLLAAVEAFYSPPSHDRPRNSEGWEQNGLYEFFRAKMRARRRKGQEKRNSGPSRSRSRSKSRGRSSSRSNSRSSKSSGSYSRSRSRSCSRSYSRSRSRSRSRSRSSRSRSRSQSRSRSKSYSPGRRRRSRSRSPTPPSSAGLGSNSAPPIPDSRLGEENKGHQMLVKMGWSGSGGLGAKEQGIQDPIKGGDVRDKWDQYKGVGVALDDPYENYRRNKSYSFIARMKARDECK

SEQ ID NO: 16070 - protein, 742 aa, Homo sapiens
MASVHESLYFNPMMTNGVVHANVFGIKDWVTPYKIAVLVLLNEMSRTGEGAVSLMERRRLNQLLLPLLQGPDITLSKLYKLIEESCPQLANSVQIRIKLMAEGELKDMEQFFDDLSDSFSGTEPEVHKTSVVGLFLRHMILAYSKLSFSQVFKLYTALQQYFQNGEKKTVEDADMELTSRDEGERKMEKEELDVSVREEEVSCSGPLSQKQAEFFLSQQASLLKNDETKALTPASLQKELNNLLKFNPDFAEAHYLSYLNNLRVQDVFSSTHSLLHYFDRLILTGAESKSNGEEGYGRSLRYAALNLAALHCRFGHYQQAELALQEAIRIAQESNDHVCLQHCLSWLYVLGQKRSDSYVLLEHSVKKAVHFGLPRAFAGKTANKLMDALKDSDLLHWKHSLSELIDISIAQKTAIWRLYGRSTMALQQAQMLLSMNSLEAVNAGVQQNNTESFAVALCHLAELHAEQGCFAAASEVLKHLKERFPPNSQHAQLWMLCDQKIQFDRAMNDGKYHLADSLVTGITALNSIEGVYRKAVVLQAQNQMSEAHKLLQKLLVHCQKLKNTEMVISVLLSVAELYWRSSSPTIALPMLLQALALSKEYRLQYLASETVLNLAFAQLILGIPEQALSLLHMAIEPILADGAILDKGRAMFLVAKCQVASAASYDQPKKAEALEAAIENLNEAKNYFAKVDCKERIRDVVYFQARLYHTLGKTQERNRCAMLFRQLHQELPSHGVPLINHL

SEQ ID NO: 16071 - protein, 1024 aa, Homo sapiens
MELPFVTHLFLPLVFLTGCPTYMDVVIVLDGSNSIYPWSEVQTFLRRLVGKLFIDPEQIQVGLVQYGESPVHEWSLGDFRTKEEVVRAAKNLSRREGRETKTAQAIMVACTEGFSQSHGGRPEAARLLVVVTDGESHDGEELPAALKACEAGRVTRYGIAVLGHYLRRQRDPSSFLREIRTIASDPDERFFFNVTDEAALTDIVDALGDRIFGLEGSHAENESSFGLEMSQIGFSTHRLKDGILFGMVGAYDWGGSVLWLEGGHRLFPPRMALEDEFPPALQNHAAYLGYSVSSMLLRGGRRLFLSGAPRFRHRGKVIAFQLKKDGAVRVAQSLQGEQIGSYFGSELCPLDTDRDGTTDVLLVAAPMFLGPQNKETGRVYVYLVGQQSLLTLQGTLQPEPPQDARFGFAMGALPDLNQDGFADVAVGAPLEDGHQGALYLYHGTQSGVRPHPAQRIAAASMPHALSYFGRSVDGRLDLDGDDLVDVAVGAQGAAILLSSRPIVHLTPSLEVTPQAISVVQRDCRRRGQEAVCLTAALCFQVTSRTPGRWDHQFYMRFTASLDEWTAGARAAFDGSGQRLSPRRLRLSVGNVTCEQLHFHVLDTSDYLRPVALTVTFALDNTTKPGPVLNEGSPTSIQKLVPFSKDCGPDNECVTDLVLQVNMDIRGSRKAPFVVRGGRRKVLVSTTLENRKENAYNTSLSLIFSRNLHLASLTPQRESPIKVECAAPSAHARLCSVGHPVFQTGAKVTFLLEFEFSCSSLLSQVFVKLTASSDSLERNGTLQDNTAQTSAYIQYEPHLLFSSESTLHRYEVHPYGTLPVGPGPEFKTTLRVQNLGCYVVSGLIISALLPAVAHGGNYFLSLSQVITNNASCIVQNLTEPPGPPVHPEELQHTNRLNGSNTQCQVVRCHLGQLAKGTEVSVGLLRLVHNEFFRRAKFKSLTVVSTFELGTEEGSVLQLTEASRWSESLLEVVQTRPILISLWILIGSVLGGLLLLALLVFCLWKLGFFAHKKIPEEEKREEKLEQ

SEQ ID NO: 16072 - protein, 157 aa, Homo sapiens
MLIITGLAYFLLSKRKKRKAAPEVLASPEQYTDPSSSAVSTTGSGDTEQTYTFHGALKEGPSSLFIHMKSILKGTKKPSALQPPNTLMELSLEPADSLAKKKQVHFEDNLVRIVPSLAEGLDDGDSEPEETTSDTTPIIPPPQAPLFLSSLTATGLF

SEQ ID NO: 16073 - protein, 298 aa, Homo sapiens
MAAAGARPVELGFAESAPAWRLRSEQFPSKVGGRPAWLGAAGLPGPQALACELCGRPLSFLLQVYAPLPGRPDAFHRCIFLFCCREQPCCAGLRVFRNQLPRKNDFYSYEPPSENPPPETGESVCLQLKSGAHLCRVCGCLGPKTCSRCHKAYYCSKEHQTLDWRLGHKQACAQPDHLDHIIPDHNFLFPEFEIVIETEDEIMPEVVEKEDYSEIIGSMGEALEEELDSMAKHESREDKIFQKFKTQIALEPEQILRYGRGIAPIWISGENIPQEKDIPDCPCGAKRILEFQFSDTVY

SEQ ID NO: 16074 - protein, 266 aa, Homo sapiens
MGAAAAEADRTLFVGNLETKVTEELLFELFHQAGPVIKVKIPKDKDGKPKQFAFVNFKHEVSVPYAMNLLNGIKLYGRPIKIQFRSGSSHAPQDVSLSYPQHHVGNSSPTSTSPSRYERTMDNMTSSAQIIQRSFSSPENFQRQAVMNSALRQMSYGGKFGSSPLDQSGFSPSVQSHSHSFNQSSSSQWRQGTPSSQRKVRMNSYPYLADRHYSREQRYTDHGSDHHYRGKRDDFFYEDRNHDDWSHDYDNRRDSSRDGKWRSSRH

SEQ ID NO: 16075 - protein, 106 aa, Homo sapiens
MAESLRSPRRSLYKLVGSPPWKEAFRQRCLERMRNSRDRLLNRYRQAGSSGPGNSQNSFLVQEVMEEEWNALQSVENCPEDLAQLEELIDMAVLEEIQQELINQGL

SEQ ID NO: 16076 - protein, 344 aa, Homo sapiens
MGRWALDVAFLWKAVLTLGLVLLYYCFSIGITFYNKWLTKSFHFPLFMTMLHLAVIFLFSALSRALVQCSSHRARVVLSWADYLRRVAPTALATALDVGLSNWSFLYVTVSLYTMTKSSAVLFILIFSLIFKLEELSTQFNVEGFALVLGASFIGGIRWTLTQMLLQKAELGLQNPIDTMFHLQPLMFLGLFPLFAVFEGLHLSTSEKIFRFQDTGLLLRVLGSLFLGGILAFGLGFSEFLLVSRTSSLTLSIAGIFKEVCTLLLAAHLLGDQISLLNWLGFALCLSGISLHVALKALHSRGDGGPKALKGLGSSPDLELLLRSSQREEGDNEEEEYFVAQGQQ

SEQ ID NO: 16077 - protein, 71 aa, Homo sapiens
MGLSTVPDLLLPLVLLELLVGIYPSGVIGLVPHLGDREKRDSVCPQGKYIHPQNNSICCTKCHKGTYLYND

SEQ ID NO: 16078 - protein, 65 aa, Homo sapiens
MAVSTVFSTSSLGIGLFVAVGSVSPSGKEDLGFPTPPSSPLAEVTTLTSYLDKLSTSLDWEPLGD

SEQ ID NO: 16079 - protein, 116 aa, Homo sapiens
MGFLQLLVVAVLASEHRVAGAAEVFGNSSEVYLVVGLIEFSVGKFRYFELNRPFPEEAILHDISSNVTFLIFQIHSQYQNTTVSFSPTLLSNSSETGTASGLVFILRPEQSTCTWY

SEQ ID NO: 16080 - protein, 405 aa, Homo sapiens
MCNEKFSYFPEMEVTQPTSNPVTPKPPYYNILLYSLVPLMLIAGIVICAFWVYRHHKMAYPPVLVPTQDPGPPPPSPLLGLKPLQLLEVKARGRFGCVWKAQLLNEYVAVKIFPIQDKQSWQNEYEVYSLPGMKHENILQFIGAEKRGTSVDVDLWLITAFHEKGSLSDFLKANVVSWNELCHIAETMARGLAYLHEDIPGLKDGHKPAISHRDIKSKNVLLKNNLTACIADFGLALKFEAGKSAGDTHGQVGTRRYMAPEVLEGAINFQRDAFLRIDMYAMGLVLWELASRCTAADGPVDEYMLPFEEEIGQHPSLEDMQEVVVHKKKRPVLRDYWQKHAGMAMLCETIEECWDHDAEARLSAGCVGERITQMQRLTNIITTEDIVTVVTMVTNVDFPPKESSL

SEQ ID NO: 16081 - protein, 1042 aa, Homo sapiens
MENAHTKTVEEVLGHFGVNESTGLSLEQVKKLKERWGSNELPAEEGKTLLELVIEQFEDLLVRILLLAACISFVLAWFEEGEETITAFVEPFVILLILVANAIVGVWQERNAENAIEALKEYEPEMGKVYRQDRKSVQRIKAKDIVPGDIVEIAVGDKVPADIRLTSIKSTTLRVDQSILTGESVSVIKHTDPVPDPRAVNQDKKNMLFSGTNIAAGKAMGVVVATGVNTEIGKIRDEMVATEQERTPLQQKLDEFGEQLSKVISLICIAVWIINIGHFNDPVHGGSWIRGAIYYFKIAVALAVAAIPEGLPAVITTCLALGTRRMAKKNAIVRSLPSVETLGCTSVICSDKTGTLTTNQMSVCRMFILDRVEGDTCSLNEFTITGSTYAPIGEVHKDDKPVNCHQYDGLVELATICALCNDSALDYNEAKGVYEKVGEATETALTCLVEKMNVFDTELKGLSKIERANACNSVIKQLMKKEFTLEFSRDRKSMSVYCTPNKPSRTSMSKMFVKGAPEGVIDRCTHIRVGSTKVPMTSGVKQKIMSVIREWGSGSDTLRCLALATHDNPLRREEMHLEDSANFIKYETNLTFVGCVGMLDPPRIEVASSVKLCRQAGIRVIMITGDNKGTAVAICRRIGIFGQDEDVTSKAFTGREFDELNPSAQRDACLNARCFARVEPSHKSKIVEFLQSFDEITAMTGDGVNDAPALKKAEIGIAMGSGTAVAKTASEMVLADDNFSTIVAAVEEGRAIYNNMKQFIRYLISSNVGEVVCIFLTAALGFPEALIPVQLLWVNLVTDGLPATALGFNPPDLDIMNKPPRNPKEPLISGWLFFRYLAIGCYVGAATVGAAAWWFIAADGGPRVSFYQLSHFLQCKEDNPDFEGVDCAIFESPYPMTMALSVLVTIEMCNALNSLSENQSLLRMPPWENIWLVGSICLSMSLHFLILYVEPLPLIFQITPLNVTQWLMVLKISLPVILMDETLKFVARNYLEPGKECVQPATKSCSFSACTDGISWPFVLLIMPLVIWVYSTDTNFSDMFWS

SEQ ID NO: 16082 - protein, 278 aa, Homo sapiens
MWLFFGITGLLTAALSGHPSPAPPDQLNTSSAESELWEPGERLPVRLTNGSSSCSGTVEVRLEASWEPACGALWDSRAAEAVCRALGCGGAEAASQLAPPTPELPPPPAAGNTSVAANATLAGAPALLCSGAEWRLCEVVEHACRSDGRRARVTCAENRALRLVDGGGACAGRVEMLEHGEWGSVCDDTWDLEDAHVVCRQLGCGWAVQALPGLHFTPGRGPIHRDQVNCSGAEAYLWDCPGLPGQHYCGHKEDAGAVCSESSVTVKIENKESRELML

SEQ ID NO: 16083 - protein, 509 aa, Homo sapiens
MVPKADSGAFLLLFLLVLTVTEPLRPEVTGEVRPHHGKEAVDPRQGRARGGDPSHFHAVNVAQPVRFSSFLGKCPTGWHHYEGTASCYRVYLSGENYWDAAQTCQRLNGSLATFSTDQELRFVLAQEWDQPERSFGWKDQRKLWVGYQYVITGRNRSLEGRWEVAFKGSSEVFLPPDPIFASAMSENDNVFCAQLQCFHFPTLRHHDLHSWHAESCYEKSSFLCKRSQTCVDIKDNVVDEGFYFTPKGDDPCLSCTCHGGEPEMCVAALCERPQGCQQYRKDPKECCKFMCLDPDGNSLFDSMASGMRLVVSCISSFLILSLLLFMVHRLRQRRRERIESLIGANLHHFNLGRRIPGFDYGPDGFGTGLTPLHLSDDGEGGTFHFHDPPPPYTAYKYPDIGQPDDPPPPYEASIHPDSVFYDPADDDAFEPVEVSLPAPGDGGSEGALLRRLEQPLPTAGASLADLEDSADSSSALLVPPDPAQSGSTPAAEALPGGGRHSRSSLNTVV

SEQ ID NO: 16084 - protein, 379 aa, Homo sapiens
MVWRVPPFLLPILFLASHVGAAVDLTLLANLRLTDPQRFFLTCVSGEAGAGRGSDAWGPPLLLEKDDRIVRTPPGPPLRLARNGSHQVTLRGFSKPSDLVGVFSCVGGAGARRTRVIYVHNSPGAHLLPDKVTHTVNKGDTAVLSARVHKEKQTDVIWKSNGSYFYTLDWHEAQDGRFLLQLPNVQPPSSGIYSATYLEASPLGSAFFRLIVRGCGAGRWGPGCTKECPGCLHGGVCHDHDGECVCPPGFTGTRCEQACREGRFGQSCQEQCPGISGCRGLTFCLPDPYGCSCGSGWRGSQCQEACAPGHFGADCRLQCQCQNGGTCDRFSGCVCPSGWHGVHCEKSGWRDWVDTSTEKQNTDEGRFGGHVSAPVGAPG

SEQ ID NO: 16085 - protein, 421 aa, Homo sapiens
MGRPTQWPSLLLLLLLPGPPPVAGLEDAAFPHLGESLQPLPRACPLRCSCPRVDTVDCDGLDLRVFPDNITRAAQHLSLQNNQLQELPYNELSRLSGLRTLNLHNNLISSEGLPDEAFESLTQLQHLCVAHNKNNLISKVPRGALSRQTQLRELYLQHNQLTDSGLDATTFSKLHSLEYLDLSHNQLTTVPAGLPRTLAILHLGRNRIRQVEAARLHGARGLRYLLLQHNQLGSSGLPAGALRPLRGLHTLHLYGNGLDRVPPALPRRLRALVLPHNHVAALGARDLVATPGLTELNLAYNRLASARVHHRAFRRLRALRSLDLAGNQLTRLPMGLPTGLRTLQLQRNQLRMLEPEPLAGLDQLRELSLAHNRLRVGDIGPGTWHELQALQVRHRLVSHTVPRAPPSPCLPCHVPNILVSW

SEQ ID NO: 16086 - protein, 113 aa, Homo sapiens
MLLELIPLLGIHFVLRTARAQSVTQPDIHITVSEGASLELRCNYSYGATPYLFWYVQSPGQGLQLLLKYFSGDTLVQGIKGFEAEFKRSQSSFNLRKPSVHWSDAAEYFCAVG

SEQ ID NO: 16087 - protein, 173 aa, Homo sapiens
MDEDGLPLMGSGIDLTKVPAIQQKRTVAFLNQFVVHTVQFLNRFSTVCEEKLADLSLRIQQIETTLNILDAKLSSIPGLDDVTVEVSPLNVTSVTNGAHPEATSEQPQNSTQDSGLQESEVSAENILTVAKDPRYARYLKMVQVGVPVMAIRNKMISEGLDPDLLEKIKKRKK

SEQ ID NO: 16088 - protein, 61 aa, Homo sapiens
MDEDGLPLMGSGIDLTKVPAIQQKRTVAFLNQFVVHTVQFLNRFSTVCEETGSHFVTHAGV

SEQ ID NO: 16089 - protein, 136 aa, Homo sapiens
MTMETQMSQNVCPRNLWLLQPLTVLLLLASADSQAAPPKAVLKLEPPWINVLQEDSVTLTCQGARSPESDSIQWFHNGNLIPTHTQPSYRFKANNNDSGEYTCQTGQTSLSDPVHLTVLSGQWRKAPGWTWEGQDG

SEQ ID NO: 16090 - protein, 744 aa, Homo sapiens
MAQVAGAALSQAGWYLSDEGIEACTSSPDKVNVNDIILIALNTDLRTIGKKFLPSDINSGKVEKLEGPCVLQIQKIRNVAAPKDNEESQAAPRMLRLQMTDGHISCTAVEFSYMSKISLNTPPGTKVKLSGIVDIKNGFLLLNDSNTTVLGGEVEHLIEKWELQRSLSKHNRSNIGTEGGPPPFVPFGQKCVSHVQVDSRELDRRKTLQVTMPVKPTNDNDEFEKQRTAAIAEVAKSKETKTFGGGGGGARSNLNMNAAGNRNREVLQKEKSTKSEGKHEGVYRELVDEKALKHITEMGFSKEASRQALMDNGNNLEAALNVLLTSNKQKPVMGPPLRGRGKGRGRIRSEDEEDLGNARPSAPSTLFDFLESKMGTLNVEEPKSQPQQLHQGQYRSSNTEQNGVKDNNHLRHPPRNDTRQPRNEKPPRFQRDSQNSKSVLEGSGLPRNRGSERPSTSSVSEVWAEDRIKCDRPYSRYDRTKDTSYPLGSQHSDGAFKKRDNSMQSRSGKGPSFAEAKENPLPQGSVDYNNQKRGKRESQTSIPDYFYDRKSQTINNEAFSGIKIEKHFNVNTDYQNPVRSNSFIGVPNGEVEMPLKGRRIGPIKPAGPVTAVPCDDKIFYNSGPKRRSGPIKPEKILESSIPMEYAKMWKPGDECFALYWEDNKFYRAEVEALHSSGMTAVVKFIDYGNYEEVLLSNIKPIQTEAWEEEGTYDQTLEFRRGGDGQPRRSTRPTQQFYQPPRARN

SEQ ID NO: 16091 - protein, 458 aa, Homo sapiens
MAALGSPSHTFRGLLRELRYLSAATGRPYRDTAAYRYLVKAFRAHRVTSEKLCRAQHELHFQAATYLCLLRSIRKHVALHQEFHGKGDTTRQRIKFSDDRVCKSHLLNCCPHDVLSGTRMDLGECLKVHDLALRADYEIASKEQDFFFELDAMDHLQSFIADCDRRTEVAKKRLAETQEEISAEVAAKAERVHELNEEIGKLLAKVEQLGAEGNVEESQKVMDEVEKARAKKREAEEVYRNSMPASSFQQQKLRVCEVCSAYLGLHDNDRRLADHFGGKLHLGFIEIREKLEELKRVVAEKQEKRNQERLKRREEREREEREKLRRSRSHSKNPKRSRSREHRRHRSRSMSRERKRRTRSKSREKRHRHRSRSSSRSRSRSHQRSRHSSRDRSRERSKRRSSKERFRDQDLASCDRDRSSRDRSPRDRDRKDKKRSYESANGRSEDRRSSEEREAGEI

SEQ ID NO: 16092 - protein, 146 aa, Homo sapiens
MGSTVPRSASVLLLLLLLRRAEQPCGAELTFELPDNAKQCFHEEVEQGVKFSLDYQVITGGHYDVDCYVEDPQGNTIYRETKKQYDSFTYRAEVKGVYQFCFSNEFSTFSHKTVYFDFQVGDEPPILPDMGNRVTALTQGFRVFCL

SEQ ID NO: 16093 - protein, 169 aa, Homo sapiens
MIISHFPKCVAVFALLALSVGALDTFIAAVYEHAVILPNRTETPVSKEEALLLMNKNIDVLEKAVKLAAKQQGAHIIVTPEDGIYGWIFTRESIYPYLEDIPDPGVNWIPCRDPWSMVQHAAPPLGCSLPFSMGQGHGSQSTCCKYPQHQHAHDREWNLRPRSSQGVPL

SEQ ID NO: 16094 - protein, 1092 aa, Homo sapiens
MSYNYVVTAQKPTAVNGCVTGHFTSAEDLNLLIAKNTRLEIYVVTAEGLRPVKEVGMYGKIAVMELFRPKGESKDLLFILTAKYNACILEYKQSGESIDIITRAHGNVQDRIGRPSETGIIGIIDPECRMIGLRLYDGLFKVIPLDRDNKELKAFNIRLEELHVIDVKFLYGCQAPTICFVYQDPQGRHVKTYEVSLREKEFNKGPWKQENVEAEASMVIAVPEPFGGAIIIGQESITYHNGDKYLAIAPPIIKQSTIVCHNRVDPNGSRYLLGDMEGRLFMLLLEKEEQMDGTVTLKDLRVELLGETSIAECLTYLDNGVVFVGSRLGDSQLVKLNVDSNEQGSYVVAMETFTNLGPIVDMCVVDLERQGQGQLVTCSGAFKEGSLRIIRNGIGIHEHASIDLPGIKGLWPLRSDPNRETDDTLVLSFVGQTRVLMLNGEEVEETELMGFVDDQQTFFCGNVAHQQLIQITSASVRLVSQEPKALVSEWKEPQAKNISVASCNSSQVVVAVGRALYYLQIHPQELRQISHTEMEHEVACLDITPLGDSNGLSPLCAIGLWTDISARILKLPSFELLHKEMLGGEIIPRSILMTTFESSHYLLCALGDGALFYFGLNIETGLLSDRKKVTLGTQPTVLRTFRSLSTTNVFACSDRPTVIYSSNHKLVFSNVNLKEVNYMCPLNSDGYPDSLALANNSTLTIGTIDEIQKLHIRTVPLYESPRKICYQEVSQCFGVLSSRIEVQDTSGGTTALRPSASTQALSSSVSSSKLFSSSTAPHETSFGEEVEVHNLLIIDQHTFEVLHAHQFLQNEYALSLVSCKLGKDPNTYFIVGTAMVYPEEAEPKQGRIVVFQYSDGKLQTVAEKEVKGAVYSMVEFNGKLLASINSTVRLYEWTTEKELRTECNHYNNIMALYLKTKGDFILVGDLMRSVLLLAYKPMEGNFEEIARDFNPNWMSAVEILDDDNFLGAENAFNLFVCQKDSAATTDEERQHLQEVGLFHLGEFVNVFCHGSLVMQNLGETSTPTQGSVLFGTVNGMIGLVTSLSESWYNLLLDMQNRLNKVIKSVGKIEHSFHLEILSHRAEDRTSHRFHRR

SEQ ID NO: 16095 - protein, 302 aa, Homo sapiens
MRRGRLLEIALGFTVLLASYTSHGADANLEAGNVKETRASRAKRRGGGGHDALKGPNVCGSRYNAYCCPGWKTLPGGNQCIVPICRHSCGDGFCSRPNMCTCPSGQIAPSCGSRSIQHCNIRCMNGGSCSDDHCLCQKGYIGTHCGQPVCESGCLNGGRCVAPNRCACTYGFTGPQCERDYRTGPCFTVISNQMCQGQLSGIVCTKTLCCATTSMNVKLEHTTVANMLYVPIQQEASNVAAVPGGLEMALSALIWTNVPMEPICAASMQTARIPWDLTAVCARKDTQVMASLVQTLMSALRT

SEQ ID NO: 16096 - protein, 114 aa, Homo sapiens
MKKHLTTFLVILWLYFYRGNGKNQVEQSPQSLIILEGKNCTLQCNYTVSPFSNLRWYKQDTGRGPVSLTIMTFSENTKSNGRYTATLDADTKQSSLHITASQLSDSASYICVVS

SEQ ID NO: 16097 - protein, 49 aa, Homo sapiens
MGFLQLLVVAVLASEHRVAGAAEVFGNSSEDSPFQFLGNRHCQWTGFHP

SEQ ID NO: 16098 - protein, 581 aa, Homo sapiens; identical to SEQ ID NO: 9168

SEQ ID NO: 16099 - protein, 169 aa, Homo sapiens
MVWKWMPLLLLLVCVATMCSAQDRTDLLNVCMDAKHHKTKPGPEDKLHDQCSPWKKNACCTASTSQELHKDTSRLYNFNWDHCGKMEPACKRHFIQDTCLYECSPNLGPWIQQVNQSWRKERFLDVPLCKEDCQRWWEDCHTSHTCKSNWHRGWDWTSAALCEGLWSHS

SEQ ID NO: 16100 - protein, 722 aa, Homo sapiens
MQGKNVLAKALYDNVAESPDELSFRKGDIMTVLEQDTQGLDGWWLCSLHGRQGIVPGNRLKILVVVPTRVGQGYVYEAAQPEQDEYDIPRHLLAPGPQDIYDVPPVRGLLPSQYGQEVYDTPPMAVKGPNGRDPLLEVYDVPPSVEKGLPPSNHHAVYDVPPSVSKDVPDGPLLREETYDVPPAFAKAKPFDPARTPLVLAAPPPDSPPAEDVYDVPPPAPDLYDVPPGLRRPGPGTLYDVPRERVLPPEVADGGVVDSGVYAVPPPAEREAPAEGKRLSASSTGSTRSSQSASSLEVAGPGREPLELEVAVEALARLQQGVSATVAHLLDLAGSAGATGSWRSPSEPQEPLVQDLQAAVAAVQSAVHELLEFARSAVGNAAHTSDRALHAKLSRQLQKMEDVHQTLVAHGQALDAGRGGSGATLEDLDRLVACSRAVPEDAKQLASFLHGNASLLFRRTKATAPGPEGGGTLHPNPTDKTSSIQSRPLPSPPKFTSQDSPDGQYENSEGGWMEDYDYVHLQGKEEFEKTQKELLEKGSITRQGKSQLELQQLKQFERLEQEVSRPIDHDLANWTPAQPLAPGRTGGLGPSDRQLLLFYLEQCEANLTTLTNAVDAFFTAVATNQPPKIFVAHSKFVILSAHKLVFIGDTLSRQAKAADVRSQVTHYSNLLCDLLRGIVATTKAAALQYPSPSAAQDMVERVKELGHSTQQFRRVLGQLAAA

SEQ ID NO: 16101 - protein, 155 aa, Homo sapiens
MAPVAVWAALAVGLELWAAAHALPAQVAFTPYAPEPGSTCRLREYYDQTAQMCCSKCSPGQHAKVFCTKTSDTVCDSCEDSTYTQLWNWVPECLSCGSRCSSDQVETQACTREQNRICTCRPGWYCALSKQEGCRLCAPLRKCRPGFGVARPDLS

SEQ ID NO: 16102 - protein, 57 aa, Homo sapiens
MCLQTLNFGNGFALALCLSFLPNTDVPILACGNDDCRIHIFAQQNDQFQKVLSLCGH

SEQ ID NO: 16103 - protein, 106 aa, Homo sapiens
MKLLTHNLLSSHVRGVGSRGFPLRLQATEVRICPVEFNPNFVARMIPKVEWSAFLEAADNLRLIQVPKGPVEGYEENEEFLRTMHHLLLEVRSGPSLASRATCLPH

SEQ ID NO: 16104 - protein, 118 aa, Homo sapiens
MAPLRPLLILALLAWVALADQESCKGRCTEGFNVDKKCQCDELCSYYQSCCTDYTAECKPQVTRGDVFTMPEDEYTVYDDGEEKNNATVHEQVGGPSLTSDLQAQSKGNPEQTPVLKP

SEQ ID NO: 16105 - protein, 286 aa, Homo sapiens
MAGLGLGSAVPVWLAEDDLGCIICQGLLDWPATLPCGHSFCRHCLEALWGARDARRWACPTCRQGAAQQPHLRKNTLLQDLADKYRRAAREIQAGSDPAHCPCPGSSSLSSAAARPRRRPELQRVAVEKSITEVAQELTELVEHLVDIVRSLQNQRPLSESGPDNELSILGKAFSSGVDLSMASPKLVTSDTAAGKIRDILHDLEEIQEKLQESVTWKEAPEAQMQGSLLPRLECSGTITAASISQAQENSWKPRLPPHAHCLTRATLHSGELLGLLSGPSIQPLT

SEQ ID NO: 16106 - protein, 258 aa, Homo sapiens
MSGVFCFFFFFLGVPEAEVTWFRNKSKLGSPHHLHEGSLLLTNVSSSDQGLYSCRAANLHGELTESTQLLILDPPQVPTQLEDIRALLAATGPNLPSVLTSPLGTQLVLDPGNSALLGCPIKGHPVPNITWFHGGQPIVTATGLTHHILAAGQILQVANLSGGSQGEFSCLAQNEAGVLMQKASLVIQDYWWSVDRLATCSASCGNRGVQQPRLRCLLNSTEVNPAHCAGKVRPAVQPIACNRRDCPSRAMGLASGLT

SEQ ID NO: 16107 - protein, 223 aa, Homo sapiens
MSDEEARQSGGSSQAGVVTVSDVQELMRRKEEIEAQIKANYDVLESQKGIGMNEPLVDCEGYPRSDVDLYQVRTARHNIICLQNDHKAVMKQVEEALHQLHARDKEKQARDMAEAHKEAMSRKLGQSESQGPPRAFAKVNSISPGSPASIAGLQVDDEIVEFGSVNTQNFQSLHNIGSVVQHSEGKPLNVTVIRRGEKHQLRLVPTRWAGKGLLGCNIIPLQR

SEQ ID NO: 16108 - protein, 191 aa, Homo sapiens
MFPFYSCWRTGLLLLLLAVAVRESWQTEEKTCDLVGEKGKESEKELALVKRLKPLFNKSFESTVGQGSDTYIYIFRVCREAGNHTSGAGLVQINKSNGKETVVGRLNETHIFNGSNWIMLIYKGGDEYDNHCGKEQRRAVVMISCNRHTLADGCDFVCRSKPRNVPAAYRGVGDDQLGEESEERDDHLLPM

SEQ ID NO: 16109 - protein, 1130 aa, Homo sapiens
MGSEDHGAQNPSCKIMTFRPTMEEFKDFNKYVAYIESQGAHRAGLAKIIPPKEWKPRQTYDDIDDVVIPAPIQQVVTGQSGLFTQYNIQKKAMTVGEYRRLANSEKYCTPRHQDFDDLERKYWKNLTFVSPIYGADISGSLYDDDVAQWNIGSLRTILDMVERECGTIIEGVNTPYLYFGMWKTTFAWHTEDMDLYSINYLHFGEPKSWYAIPPEHGKRLERLAIGFFPGSSQGCDAFLRHKMTLISPIILKKYGIPFSRITQEAGEFMITFPYGYHAGFNHGFNCAESTNFATLRWIDYGKVATQCTCRKDMVKISMDVFVRILQPERYELWKQGKDLTVLDHTRPTALTSPELSSWSASRASLKAKLLRRQISLKENRHWRKTEEERKPSLERKKEQTKRPGLSSHRKRSQPKKPKPEDPKFPGEGTAGAALLEEAGGSVKEEAGPEVDPEEEEEEPQPLPHGREAEGAEEDGRGKLRPTKAKSERKKKSFGLLPPQLPPPPAHFPSEEALWLPSPLEPPVLGPGPAAMEESPLPAPLNVVPPEVPSEELEAKPRPIIPMLYVVPRPGKAAFNQEHVSCQQAFEHFAQKGPTWKEPVSPMELTGPEDGAASSGAGRMETKARAGEGQAPSTFSKLKMEIKKSRRHPLGRPPTRSPLSVVKQEASSDEEASPFSGEEDVSDPDALRPLLSLQWKNRAASFQAERKFNAAAARTEPYCAICTLFYPYCQALQTEKEAPIASLGEGCPATLPSKSRQKTRPLIPEMCFTSGGENTEPLPANSYIGDDGTSPLIACGKCCLQVHASCYGIRPELVNEGWTCSRCAAHAWTAECCLCNLRGGALQMTTDRRWIHVICAIAVPEARFLNVIERHPVDISAIPEQRWKLKCVYCRKRMKKVSGACIQCSYEHCSTSFHVTCAHAAGVLMEPDDWPYVVSITCLKHKSGGHAVQLLRAVSLGQVVITKNRNGLYYRCRVIGAASQTCYEVNFDDGSYSDNLYPESITSRDCVQLGPPSEGELVELRWTDGNLYKAKFISSVTSHIYQVEFEDGSQLTVKRGDIFTLEEELPKRVRSRLSLSTGAPQEPAFSGEEAKAAKRPRVGTPLATEDSGRSQDYVAFVESLLQVQGRPGAPF

SEQ ID NO: 16110 - protein, 737 aa, Homo sapiens
MADTQYILPNDIGVSSLDCREAFRLLSPTERLYAYHLSRAAWYGGLAVLLQTSPEAPYIYALLSRLFRAQDPDQLRQHALAEGLTEEEYQAFLVYAAGVYSNMGNYKSFGDTKFVPNLPKEKLERVILGSEAAQQHPEEVRGLWQTCGELMFSLEPRLRHLGLGKEGITTYFSGNCTMEDAKLAQDFLDSQNLSAYNTRLFKEVDGEGKPYYEVRLASVLGSEPSLDSEVTSKLKSYEFRGSPFQVTRGDYAPILQKVVEQLEKAKAYAANSHQGQMLAQYIESFTQGSIEAHKRGSRFWIQDKGPIVESYIGFIESYRDPFGSRGEFEGFVAVVNKAMSAKFERLVASAEQLLKELPWPPTFEKDKFLTPDFTSLDVLTFAGSGIPAGINIPNYDDLRQTEGFKNVSLGNVLAVAYATQREKLTFLEEDDKDLYILWKGPSFDVQVGLHELLGHGSGKLFVQDEKGAFNFDQETVINPETGEQIQSWYRSGETWDSKFSTIASSYEECRAESVGLYLCLHPQVLEIFGFEGADAEDVIYVNWLNMVRAGLLALEFYTPEAFNWRQAHMQARFVILRVLLEAGEGLVTITPTTGSDGRPDARVRLDRSKIRSVGKPALERFLRRLQVLKSTGDVAGGRALYEGYATVTDAPPECFLTLRDTVLLRKESRKLIVQPNTRLEGSDVQLLEYEASAAGLIRSFSERFPEDGPELEEILTQLATADARFWKGPSEAPSGQA

SEQ ID NO: 16111 - protein, 155 aa, Homo sapiens
MHKAGLLGLCARAWNSVRMASSGMTRRDPLANKVALVTASTDGIGFAIARRLAQDGAHVVVSSRKQQNVDQAVATLQGEGLSVTGTVCHVGKAEDRERLVATAVKLHGGIDILVSNAAVNPFFGSIMDVTEEVWDKLWMDKEKEESMKETLRIRR

SEQ ID NO: 16112 - protein, 1496 aa, Homo sapiens
MVHVARLLLLLLTFFLRTDAETPPRFTRTPVDQTGVSGGVASFICQATGDPRPKIVWNKKGKKVSNQRFEVIEFDDGSGSVLRIQPLRTPRDEAIYECVASNNVGEISVSTRLTVLREDQIPRGFPTIDMGPQLKVVERTRTATMLCAASGNPDPEITWFKDFLPVDTSNNNGRIKQLRSESIGALQIEQSEESDQGKYECVATNSAGTRYSAPANLYVRELREVRRVPPRFSIPPTNHEIMPGGSVNITCVAVGSPMPYVKWMLGAEDLTPEDDMPIGRNVLELNDVRQSANYTCVAMSTLGVIEAIAQITVKALPKPPGTPVVTESTATSITLTWDSGNPEPVSYYIIQHKPKNSEELYKEIDGVATTRYSVAGLSPYSDYEFRVVAVNNIGRGPPSEPVLTQTSEQAPSSAPRDVQARMLSSTTILVQWKEPEEPNGQIQGYRVYYTMDPTQHVNNWMKHNVADSQITTIGNLVPQKTYSVKVLAFTSIGDGPLSSDIQVITQTGVPGQPLNFKAEPESETSILLSWTPPRSDTIANYELVYKDGEHGEEQRITIEPGTSYRLQGLKPNSLYYFRLAARSPQGLGASTAEISARTMQSTVFAKNFHVKAVMKTSVLLSWEIPENYNSAMPFKILYDDGKMVEEVDGRATQKLIVNLKPEKSYSFVLTNRGNSAGGLQHRVTAKTAPDVLRTKPAFIGKTNLDGMITVQLPEVPANENIKGYYIIIVPLKKSRGKFIKPWESPDEMELDELLKEISRKRRSIRYGREVELKPYIAAHFDVLPTEFTLGDDKHYGGFTNKQLQSGQEYVFFVLAVMEHAESKMYATSPYSDPVVSMDLDPQPITDEEEGLIWVVGPVLAVVFIICIVIAILLYKRKRAESDSRKSSIPNNKEIPSHHPTDPVELRRLNFQTPGMASHPPIPILELADHIERLKANDNLKFSQEYESIDPGQQFTWEHSNLEVNKPKNRYANVIAYDHSRVLLSAIEGIPGSDYVNANYIDGYRKQNAYIATQGSLPETFGDFWRMIWEQRSATVVMMTKLEERSRVKCDQYWPSRGTETHGLVQVTLLDTVELATYCVRTFALYKNGSSEKREVRQFQFTAWPDHGVPEHPTPFLAFLRRVKTCNPPDAGPMVVHCSAGVGRTGCFIVIDAMLERIKHEKTVDIYGHVTLMRAQRNYMVQTEDQYIFIHDALLEAVTCGNTEVPARNLYAYIQKLTQIETGENVTGMELEFKRLASSKAHTSRFISANLPCNKFKNRLVNIMPYESTRVCLQPIRGVEGSDYINASFIDGYRQQKAYIATQGPLAETTEDFWRMLWEHNSTIVVMLTKLREMGREKCHQYWPAERSARYQYFVVDPMAEYNMPQYILREFKVTDARDGQSRTVRQFQFTDWPEQGVPKSGEGFIDFIGQVHKTKEQFGQDGPISVHCSAGVGRTGVFITLSIVLERMRYEGVVDIFQTVKMLRTQRPAMVQTEDQYQFSYRAALEYLGSFDHYAT

SEQ ID NO: 16113 - protein, 819 aa, Homo sapiens
MGPWGWKLRWTVALLLAAAGTAVGDRCERNEFQCQDGKCISYKWVCDGSAECQDGSDESQETCSPKTCSQDEFRCHDGKCISRQFVCDSDRDCLDGSDEASCPVLTCGPASFQCNSSTCIPQLWACDNDPDCEDGSDEWPQRCRGLYVFQGDSSPCSAFEFHCLSGECIHSSWRCDGGPDCKDKSDEENCAVATCRPDEFQCSDGNCIHGSRQCDREYDCKDMSDEVGCVNVTLCEGPNKFKCHSGECITLDKVCNMARDCRDWSDEPIKECGTNECLDNNGGCSHVCNDLKIGYECLCPDGFQLVAQRRCEDIDECQDPDTCSQLCVNLEGGYKCQCEEGFQLDPHTKACKAVGSIAYLFFTNRHEVRKMTLDRSEYTSLIPNLRNVVALDTEVASNRIYWSDLSQRMICSTQLDRAHGVSSYDTVISRDIQAPDGLAVDWIHSNIYWTDSVLGTVSVADTKGVKRKTLFRENGSKPRAIVVDPVHGFMYWTDWGTPAKIKKGGLNGVDIYSLVTENIQWPNGITLDLLSGRLYWVDSKLHSISSIDVNGGNRKTILEDEKRLAHPFSLAVFEDKVFWTDIINEAIFSANRLTGSDVNLLAENLLSPEDMVLFHNLTQPRGVNWCERTTLSNGGCQYLCLPAPQINPHSPKFTCACPDGMLLARDMRSCLTEAEAAVATQETSTVRLKVSSTAVRTQHTTTRPVPDTSRLPGATPGLTTVEIVTMSHQALGDVAGRGNEKKPSSVRALSIVLPIVLLVFLCLGVFLLWKNWRLKNINSINFDNPVYQKTTEDEVHICHNQDGYSYPSRQMVSLEDDVA

SEQ ID NO: 16114 - protein, 389 aa, Homo sapiens
MSLRIDVDTNFPECVVDAGKVTLGTQQRQEMDPRLREKQNEIILRAVCALLNSGGGIIKAEIENKGYNYERHGVGLDVPPIFRSHLDKMQKENHFLIFVKSWNTEAGVPLATLCSNLYHRERTSTDVMDSQEALAFLKCRTQTPTNINVSNSLGPQAAQGSVQYEGNINVSAAALFDRKRLQYLEKLNLPESTHVEFVMFSTDVSHCVKDRLPKCVSAFANTEGGYVFFGVHDETCQVIGCEKEKIDLTSLRASIDGCIKKLPVHHFCTQRPEIKYVLNFLEVHDKGALRGYVCAIKVEKFCCAVFAKVPSSWQVKDNRVRQLPTREWTAWMMEADPDLSRCPEMVLQLSLSSATPRSKPVCIHKNSECLKEQQKRYFPVSARKTSASQ

SEQ ID NO: 16115 - protein, 476 aa, Homo sapiens
MPQLNGGGGDDLGANDELISFKDEGEQEEKSSENSSAERDLADVKSSLVNESETNQNSSSDSEAERRPPPRSESFRDKSRESLEEAAKRQDGGLFKGPPYPGYPFIMIPDLTSPYLPNGSLSPTARTYLQMKWPLLDVQAGSLQSRQALKDARSPSPAHIVSNKVPVVQHPHHVHPLTPLITYSNEHFTPGNPPPHLPADVDPKTGIPRPPHPPDISPYYPLSPGTVGQIPHPLGWLVPQQGQPVYPITTGGFRHPYPTALTVNASMSSFLSSRFPPHMVPPHHTLHTTGIPHPAIVTPTVKQESSQSDVGSLHSSKHQDSKKEEEKKKPHIKKPLNAFMLYMKEMRAKVVAECTLKESAAINQILGRRWHALSREEQAKYYELARKERQLHMQLYPGWSARDNYGKKKKRKRDKQPGETNEHSECFLNPCLSLPPITDLSAPKKCRARFGLDQQNNWCGPCRCKYSKEVSGTVRA

SEQ ID NO: 16116 - protein, 912 aa, Homo sapiens
MPGKRGLGWWWARLPLCLLLSLYGPWMPSSLGKPKGHPHMNSIRIDGDITLGGLFPVHGRGSEGKPCGELKKEKGIHRLEAMLFALDRINNDPDLLPNITLGARILDTCSRDTHALEQSLTFVQALIEKDGTEVRCGSGGPPIITKPERVVGVIGASGSSVSIMVANILRLFKIPQISYASTAPDLSDNSRYDFFSRVVPSDTYQAQAMVDIVRALKWNYVSTVASEGSYGESGVEAFIQKSREDGGVCIAQSVKIPREPKAGEFDKIIRRLLETSNARAVIIFANEDDIRRVLEAARRANQTGHFFWMGSDSWGSKIAPVLHLEEVAEGAVTILPKRMSVRGFDRYFSSRTLDNNRRNIWFAEFWEDNFHCKLSRHALKKGSHVKKCTNRERIGQDSAYEQEGKVQFVIDAVYAMGHALHAMHRDLCPGRVGLCPRMDPVDGTQLLKYIRNVNFSGIAGNPVTFNENGDAPGRYDIYQYQLRNDSAEYKVIGSWTDHLHLRIERMHWPGSGQQLPRSICSLPCQPGERKKTVKGMPCCWHCEPCTGYQYQVDRYTCKTCPYDMRPTENRTGCRPIPIIKLEWGSPWAVLPLFLAVVGIAATLFVVITFVRYNDTPIVKASGRELSYVLLAGIFLCYATTFLMIAEPDLGTCSLRRIFLGLGMSISYAALLTKTNRIYRIFEQGKRSVSAPRFISPASQLAITFSLISLQLLGICVWFVVDPSHSVVDFQDQRTLDPRFARGVLKCDISDLSLICLLGYSMLLMVTCTVYAIKTRGVPETFNEAKPIGFTMYTTCIVWLAFIPIFFGTSQSADKLYIQTTTLTVSVSLSASVSLGMLYMPKVYIILFHPEQNVPKRKRSLKAVVTAATMSNKFTQKGNFRPNGEAKSELCENLEAPALATKQTYVTYTNHAI

SEQ ID NO: 16117 - protein, 103 aa, Homo sapiens
MKPSLLCRPLSCFLMLLPWPLATLTSTTLWQCPPGEEPDLDPGQGTLCRPCPPGTFSAAWGSSPCQPHARCSLWRRLEAQVGMATRDTLCGDCWPGNQPCLPD

SEQ ID NO: 16118 - protein, 148 aa, Homo sapiens
MRVTLATIAWMVSFVSNYSHTANILPDIENEDFIKDCVRIHNKFRSEVKPTASDMLYMTWDPALAQIAKAWASNCQFSHNTRLKPPHKLHPNFTSLGENIWTGSVPIFSVSSAITNWYDEIQDYDFKTRICKKVCGHYTQRELPNLAI

SEQ ID NO: 16119 - protein, 112 aa, Homo sapiens
MPSLLLLFTAALLSSWAQLLTDANSWWSLALNPVQRPEMFIIGAQPVCSQLPGLSPGQRKLCQLYQEHMAYIGEGAKTGIKECQHQFRQRRWNCSTADNASVFGRVMQIGCV

SEQ ID NO: 16120 - protein, 183 aa, Homo sapiens
MEPSSIEKIVEIDAHIGCAMSGLIADAKTLIDKARVETQNHWFTYNETMTVESVTQAVSNLALQFGEEDADPGAMSRPFGVALLFGGVDEKGPQLFHMDPSGTFVQCDARAIGSASEGAQSSLQEVYHKSMTLKEAIKSSLIILKQVMEEKLNATNIELATVQPGQNFHMFTKEELEEVIKDI

SEQ ID NO: 16121 - protein, 250 aa, Homo sapiens
MAFCALTIVALYILSLKDQDRRVPNLPPSNITSSQEPALLPTASSSAPNTSLVTTPASLQVPEITFCEILPCQETYCCPIRGMKEVSSSPVQRQSEEKEFHQRRWSEDKSKSVLARNALSGPDWESDWIDTTISSIQIMEIQQIIDHQYCIQSLQCGTTEPLIVFQCKFTLGNICFHSKRGTKGLESHREISQEMTQGYQHIWSLPVAPFSDSMFHFRVAAPDLADCSTDPYFAGIFFTDYFFYFYRRCA

SEQ ID NO: 16122 - protein, 858 aa, Homo sapiens
MGDHLDLLLGVVLMAGPVFGIPSCSFDGRIAFYRFCNLTQVPQVLNTTERLLLSFNYIRTVTASSFPFLEQLQLLELGSQYTPLTIDKEAFRNLPNLRILDLGSSKIYFLHPDAFQGLFHLFELRLYFCGLSDAVLKDGYFRNLKALTRLDLSKNQIRSLYLHPSFGKLNSLKSIDFSSNQIFLVCEHELEPLQGKTLSFFSLAANSLYSRVSVDWGKCMNPFRNMVLEILDVSGNGWTVDITGNFSNAISKSQAFSLILAHHIMGAGFGFHNIKDPDQNTFAGLARSSVRHLDLSHGFVFSLNSRVFETLKDLKVLNLAYNKINKIADEAFYGLDNLQVLNLSYNLLGELYSSNFYGLPKVAYIDLQKNHIAIIQDQTFKFLEKLQTLDLRDNALTTIHFIPSIPDIFLSGNKLVTLPKINLTANLIHLSENRLENLDILYFLLRVPHLQILILNQNRFSSCSGDQTPSENPSLEQLFLGENMLQLAWETELCWDVFEGLSHLQVLYLNHNYLNSLPPGVFSHLTALRGLSLNSNRLTVLSHNDLPANLEILDISRNQLLAPNPDVFVSLSVLDITHNKFICECELSTFINWLNHTNVTIAGPPADIYCVYPDSFSGVSLFSLSTEGCDEEEVLKSLKFSLFIVCTVTLTLFLMTILTVTKFRGFCFICYKTAQRLVFKDHPQGTEPDMYKYDAYLCFSSKDFTWVQNALLKHLDTQYSDQNRFNLCFEERDFVPGENRIANIQDAIWNSRKIVCLVSRHFLRDGWCLEAFSYAQGRCLSDLNSALIMVVVGSLSQYQLMKHQSIRGFVQKQQYLRWPEDLQDVGWFLHKLSQQILKKEKEKKKDNNIPLQTVATIS

SEQ ID NO: 16123 - protein, 42 aa, Homo sapiens
MISLTDTQKIGMGLTGFGVFFLFFGMILFFDKALLAIGNKLL

SEQ ID NO: 16124 - protein, 143 aa, Homo sapiens
MGWTSLCSGRGVGVEGAWRDGGRGCTDWRSEETQSPSRSTGQDVAAEWGSEESVAESLEAEFEKAAEEVRHLKTKPSDEEMLFIYGHYKQATVGDINTERPGMLDFTGKAKWDAWNELKGTSKEDAMKAYINKVEELKKKYGI

SEQ ID NO: 16125 - protein, 45 aa, Homo sapiens
MNRGVPFRHLLLVLQLALLPAATQGKKVVLGKKGDTVELTCTASQ

SEQ ID NO: 16126 - protein, 173 aa, Homo sapiens
RRRLPGLSMSPRRTLPRPLSLCLSLCLCLCLAAALGSAQSGSCRDKKNCKVVFSQQELRKRLTPLQYHVTQEKGTESAFEGEYTHHKDPGIYKCVVCGTPLFKSETKFDSGSGWPSFHDVINSEAITFTDDFSYGMHRVETSCSQQEGPHQMLPLNLGFPGLQNCEPINFYSF

SEQ ID NO: 16127 - protein, 262 aa, Homo sapiens
MEHFDASLSTYFKALLGPRDTRVKGWFLLDNYIPTFICSVIYLLIVWLGPKYMRNKQPFSCRGILVVYNLGLTLLSLYMFCELVTGVWEGKYNFFCQGTRTAGESDMKIIRVLWWYYFSKLIEFMDTFFFILRKNNHQITVLHVYHHASMLNIWWFVMNWVPCGHSSVCADNHPDQLRGHLAVHIPSWLVVFPDWIHDFPDCSLHKLLHSDLQQERGLPKERPPEGPPEWVHGCCEWTHQQLFTPGKQCEAKEAAEGLKSKN

SEQ ID NO: 16128 - protein, 687 aa, Homo sapiens
MAASTAAGKQRIPKVAKVKNKAPAEVQITAEQLLREAKERELELLPPPPQQKITDEEELNDYKLRKRKTFEDNIRKNRTVISNWIKYAQWEESLKEIQRARSIYERALDVDYRNITLWLKYAEMEMKNRQVNHARNIWDRAITTLPRVNQFWYKYTYMEEMLGNVAGARQVFERWMEWQPEEQAWHSYINFELRYKEVDRARTIYERFVLVHPDVKNWIKYARFEEKHAYFAHARKVYERAVEFFGDEHMDEHLYVAFAKFEENQKEFERVRVIYKYALDRISKQDAQELFKNYTIFEKKFGDRRGIEDIIVSKRRFQYEEEVKANPHNYDAWFDYLRLVESDAEAEAVREVYERAIANVPPIQEKRHWKRYIYLWINYALYEELEAKDPERTRQVYQASLELIPHKKFTFAKMWILYAQFEIRQKNLSLARRALGTSIGKCPKNKLFKVYIELELQLREFDRCRKLYEKFLEFGPENCTSWIKFAELETILGDIDRARAIYELAISQPRLDMPEVLWKSYIDFEIEQEETERTRNLYRRLLQRTQHVKVWISFAQFELSSGKEGSLTKCRQIYEEANKTMRNCEEKEERLMLLESWRSFEEEFGTASDKERVDKLMPEKVKKRRKVQTDDGSDAGWEEYFDYIFPEDAANQPNLKLLAMAKLWKKQQQEKEDAEHHPDEDVDESES

SEQ ID NO: 16129 - protein, 206 aa, Homo sapiens
MILVCDRVSEDGINRQKAQEWCIKHGFELVELSPEELPEEDDDFPESTGVKRIVQALNANVWSNVVMKNDRNQGFSLLNSLTGTNHSIGSADPCHPEQPHLPAADSTESLSDHRGGASNTTDAQVDSIVDPMLDLDIQELASLTTGGGDVENFERLFSKLKEMKDKAATLPHEQRKVHAEKVAKAFWMAIGGDRDEIEGLSSDEEH

SEQ ID NO: 16130 - protein, 217 aa, Homo sapiens
MLGAWAVEGTAVALLRLLLLLLPPAIRGPGLGVAGVAGAAGAGLPESVIWAVNAGGEAHVDVHGIHFRKDPLEGRVGRASDYGMKLPILRSNPEDQILYQTERYNEETFGYEVPIKEEGDYVLVLKFAEVYFAQSQQKMYQSFSLIRDWRRKKRKKKKKNMMKGLISKNRPIRTGCSQAPAHPTPMPRTTAASCFPSWWPSESSFQPSSASAGCENK

SEQ ID NO: 16131 - protein, 444 aa, Homo sapiens
MGSPAHRPALLLLLPPLLLLLLLRVPPSRSFPDTPWCSPIKVKYGDVYCRAPQGGYYKTALGTRCDIRCQKGYELHGSSLLICQSNKRWSDKVICKQKRCPTLAMPANGGFKCVDGAYFNSRCEYYCSPGYTLKGERTVTCMDNKAWSGRPASCVDMEPPRIKCPSVKERIAEPNKLTVRVSWETPEGRDTADGILTDVILKGLPPGSNFPEGDHKIQYTVYDRAENKGTCKFRVKVRVKRCGKLNAPENGYMKCSSDGDNYGATCEFSCIGGYELQGSPARVCQSNLAWSGTEPTCAAMNVNVGVRTAAALLDQFYEKRRLLIVSTPTARNLLYRLQLGMLQQAQCGLDLRHITVVELVGVFPTLIGRIGAKIMPPALALQLRLLLRIPLYSFSMVLVDKHGMDKERYVSLVMPVALFNLIDTFPLRKEEMVLQAEMSQTCNT

SEQ ID NO: 16132 - protein, 328 aa, Homo sapiens
MFDARTSESVLSVEHGQPVESVLLFPSGGLLVSAGGRYVKVWDMLKGGQLLVSLKNHHKTVTCLCLSSSGQRLLSGSLDRKVKVYSTTSYKVVHSFDYAASILSLALAHEDETIVVGMTNGILSVKHRKSEAKKESLPRRRRPAYRTFIKGKNYMKQRDDILINRPAKKHLELYDRDLKHFRISKALDRVLDPTCTIKTPEITVSIIKELNRRGVLANALAGRDEKEISHVLNFLIRNLSQPRFAPVLINAAEIIIDIYLPVIGQSPVVDKKFLLLQGLVEKEIDYQRELLETLGMMDMLFATMRRKEGTSVLEHTSDGFPENKKIES

SEQ ID NO: 16133 - protein, 263 aa, Homo sapiens
MAATASAGAGGIDGKPRTSPKSVKFLFGGLAGLSAGLLRQATYTTTRLGIYTVLFERLTGADGTPPGFLLKAVIGMTAGATGAFVGTPAEVALIRMTADGRLPADQRRGYKNVFNALIRITREEGVLTLWRGCIPTMARAVVVNAAQLASYSQSKQFLLDSGYFSDNILCHFCASMISGLVTTAASMPVDIAKTRIQNMRMIDGKPEYKNGLDVLFKVVRYEGFFSLWKGFTPYYARLGPHTVLTFIFLEQMNKAYKRLFLSG

SEQ ID NO: 16134 - protein, 144 aa, Homo sapiens
MRKDRLLHLCLVLLLILLSASDSNSTEPQYMVLVPSLLHTEAPKKGCVLLSHLNETVTVSASLESGRENRSLFTDLVAEKDLFHCVSFTLPRISASSEVAFLSIQIKGPTQDFRKRNTVLVLNTQSLVFVQTDKPMYKPGQTGK

SEQ ID NO: 16135 - protein, 349 aa, Homo sapiens
MKDCSNGCSAECTGEGGSKEVVGTFKAKDLIVTPATILKEKPDPNNLVFGTVFTDHMLTVEWSSEFGWEKPHIKPLQNLSLHPGSSALHYAVEVFDKEELLECIQQLVKLDQEWVPYSTSASLYIRPTFIGTEPSLGVKKPTKALLFVLLSPVGPYFSSGTFNPVSLWANPKYVRAWKGGTGDCKMGGNYGSSLFAQCEAVDNGCQQVLWLYGEDHQITEVGTMNLFLYWINEDGEEELATPPLDGIILPGVTRRCILDLAHQWGEFKVSERYLTMDDLTTALEGNRVREMFGSGTACVVCPVSDILYKGETIHIPTMENGPKLASRILSKLTDIQYGREESDWTIVLS

SEQ ID NO: 16136 - protein, 591 aa, Homo sapiens
MPRYTVHVRGEWLAVPCQDAQLTVGWLGREAVRRYIKNKPDNGGFTSVDDAHFLVRRCKGLGLLDNEDRLEVALENNEFVEVVIEGDAMSPDFIPSQPEGVYLYSKYREPEKYIELDGDRLTTEDLVNLGKGRYKIKLTPTAEKRVQKSREVIDSIIKEKTVVYGITTGFGKFARTVIPINKLQELQVNLVRSHSSGVGKPLSPERCRMLLALRINVLAKGYSGISLETLKQVIEMFNASCLPYVPEKGTVGASGDLAPLSHLALGLVGEGKMWSPKSGWADAKYVLEAHGLKPVILKPKEGLALINGTQMITSLGCEAVERASAIARQADIVAALTLEVLKGTTKAFDTDIHALRPHRGQIEVAFRFRSLLDSDHHPSEIAESHRFCDRVQDAYTLRCCPQVHGVVNDTIAFVKNIITTELNSATDNPMVFANRGETVSGGNFHGEYPAKALDYLAIGIHELAAISERRIERLCNPSLSELPAFLVAEGGLNSGFMIAHCTAAALVSENKALCHPSSVDSLSTSAATEDHVSMGGWAARKALRVIEHVEQVLAIELLAACQGIEFLRPLKTTTPLEKVYDLVRSVVRFGK

SEQ ID NO: 16137 - protein, 236 aa, Homo sapiens
MAEPSAATQSHSISSSSFGAEPSAPGGGGSPGACPALGTKSCSSSCAVHDLIFWRDVKKTGFVFGTTLIMLLSLAAFSVISVVSYLILALLSVTISFRIYKSVIQAVQKSEEGHPFKAYLDVDITLSSEAFHNYMNAAMVHINRALKLIIRLFLVEDLVDSLKLAVFMWLMTYVGAVFNGITLLILAELLIFSVPIVYEKYKTQIDHYVGIARDQTKSIVEKIQAKLPGIAKKKAE

SEQ ID NO: 16138 - protein, 406 aa, Homo sapiens
MLLRAAWRRAAVAVTAAPGPKPAAPTRGLRLRVGDRAPQSAVPADTAAAPEVGPVLRPLYMDVQATTPLDPRVLDAMLPYLINYYGNPHSRTHAYGWESEAAMERARQQVASLIGADPREIIFTSGATESNNIAIKELEAAIQPDTSLVSVMTVNNEIGVKQPIAEIGRICSSRKVYFHTDAAQAVGKIPLDVNDMKIDLMSISGHKIYGPKGVGAIYIRRRPRVRVEALQSGGGQERGMRSGTVPTPLVVGLGAACEVAQQEMEYDHKRISKLSERLIQNIMKSLPDVVMNGDPKHHYPGCINLSFAYVEGESLLMALKDVALSSGSACTSASLEPSYVLRAIGTDEDLAHSSIRFGIGRFTTEEEVDYTVEKCIQHVKRLREMSPLWEMVQDGIDLKSIKWTQH

SEQ ID NO: 16139 - protein, 165 aa, Homo sapiens
MPMGSLQPLATLYLLGMLVASCLGRLSWYDPDFQARLTRSNSKCQGQLEVYLKDGWHMVCSQSWGRSSKQWEDPSQASKVCQRLNCGVPLSLGPFLVTYTPQSSIICYGQLGSFSNCSHSRNDMCHSLGLTCLEPQKTTPPTTRPPPTTTPEPTAMRPRTRPRTW

SEQ ID NO: 16140 - protein, 634 aa, Homo sapiens
MLEYALKQERAKYHKLKFGTDLNQGEKKADVSEQVSNGPVESVTLENSPLVWKEGRQLLRQYLEEVGYTDTILDMRSKRVRSLLGRSLELNGAVEPSEGAPRAPPGPAGLSGGESLLVKQIEEQIKRNAAGKDGKERLGGSVLGQIPFLQNCEDEDSDEDDELDSVQHKKQRVKLPSKALVPEMEDEDEEDDSEDAINEFDFLGSGEDGEGAPDPRRCTVDGSPHELESRRVKLQGILADLRDVDGLPPKVTGPPPGTPQPRPHEDVFIMDTIGGGEVSLGDLADLTVTNDNDLSCDLSDSKDAFKKTWNPKFTLRSHYDGIRSLAFHHSQSALLTASEDGTLKLWNLQKAVTAKKNAALDVEPIHAFRAHRGPVLAVAMGSNSEYCYSGGADACIHSWKIPDLSMDPYDGYDPSVLSHVLEGHGDAVWGLAFSPTSQRLASCSADGTVRIWDPSSSSPACLCTFPTASEHGVPTSVAFTSTEPAHIVASFRSGDTVLYDMEVGSALLTLESRGSSGPTQINQVVSHPNQPLTITAHDDRGIRFLDNRTGKPVHSMVAHLDAVTCLAVDPNGAFLMSGSHDCSLRLWSLDNKTCVQEITAHRKKHEEAIHAVACHPSKALIASAGADALAKVFV

SEQ ID NO: 16141 - protein, 583 aa, Homo sapiens
MTFYLFGIRSFPKLWKSPYLGLGPGHSYVSLFLADRCGIRNQQRLFSLKTMSPQNTKATNLIAKARYLRKDEGSNKQVYSVPHFFLAGAAKERSQMNSQTEDHALAPVRNTIQLPTQPLNSEEWDKLKEDLKENTGKTSFESWIISQMAGCHSSIDVAKSLLAWVAAKNNGIVSYDLLVKYLYLCVFHMQTSEVIDVFEIMKARYKTLEPRGYSLLIRGLIHSDRWREALLLLEDIKKVITPSKKNYNDCIQGALLHQDVNTAWNLYQELLGHDIVPMLETLKAFFDFGKDIKDDNYSNKLLDILSYLRNNQLYPGESFAHSIKTWFESVPGKQWKGQFTTVRKSGQCSGCGKTIESIQLSPEEYECLKGKIMRDVIDGGDQYRKTTPQELKRFENFIKSRPPFDVVIDGLNVAKMFPKVRESQLLLNVVSQLAKRNLRLLVLGRKHMLRRSSQWSRDEMEEVQKQASCFFADDISEDDPFLLYATLHSGNHCRFITRDLMRDHKACLPDAKTQRLFFKWQQGHQLAIVNRFPGSKLTFQRILSYDTVVQTTGDSWHIPYDEDLVERCSCEVPTKWLCLHQKT

SEQ ID NO: 16142 - protein, 97 aa, Homo sapiens
MASASTQPAALSAEQAKVVLAEVIQAFSAPENAVRMDEARDNACNDMGVLKFARLVKSYEAQDPEIASLSGKLKALFLPPMTLPPHGPAAGGSVAAS

SEQ ID NO: 16143 - protein, 109 aa, Homo sapiens
MFPFYSCWRTGLLLLLLAVAVRESWQTEEKTCDLVGEKGKESEKELALVKRLKPLFNKSFESTVGQGSDTYIYIFRVCREAGNHTSGAGLVQINKSNGKETVVGRLNET

SEQ ID NO: 16144 - protein, 240 aa, Homo sapiens
MKNISRYLTDIKPLPPNIKDRLIKIMSMQGQITDSNISEILHPEVQTLDLRSCDISDAALLHLSNCRKLKKLNLNASKGNRVSVTSEGIKAVASSCSYLHEASLKRCCNLTDEGVVALALNCQLLKIIDLGGCLSITDVSLHALGKNCPFLQCVDFSATQVSDSGVIALVSGPCAKKLEEIHMGHCVNLTDGAVEAVLTYCPQIRILLFHGCPLITDHSREVLEQLVGPNKLKQVTWTVY

SEQ ID NO: 16145 - protein, 300 aa, Homo sapiens
MAAAALGQLFEGMKAFKGKDQQVRLFRPWLNMDRMLRSAMRLCLPSFDKLELLECIRRLIEVDKDWVPDAAGTSLYVRPVLIGNEPSLGVSQPTRALLFVILCPVGAYFPGGSVTPVSLLADPAFIRAWVGGVGNYKLGGNYGPTVLVQQEALKRGCEQVLWLYGPDHQLTEVGTMNIFVYWTHEDGVLELVTPPLNGVILPGVVRQSLLDMAQTWGEFRVVERTITMKQLLRALEEGRVREVFGSGTACQVCPVHRILYKDRNLHIPTMENGPELILRFQKELKEIQYGIRAHEWMFPV

SEQ ID NO: 16146 - protein, 453 aa, Homo sapiens
MSKEQVEEHVSRIREELDREREERNYFQLERDKIHTFWEITRRQLEEKKAELRNKDREMEEAEERHQVEIKVYKQKVKHLLYEHQNNLTEMKAEGTVVMKLAQKEHRIQESVLRKDMRALKVELKEQELASEVVVKNLRLKHTEEITRMRNDFERQVREIEAKYDKKMKMLRDELDLRRKTELHEVEERKNGQIHTLMQRHEEAFTDIKNYYNDITLNNLALINSLKEQMEDMRKKEDHLEREMAEVSGQNKRLADPLQKAREEMSEMQKQLANYERDKQILLCTKARLKVREKELKDLQWEHEVLEQRFTKVQQERDELYRKFTAAIQEVQQKTGFKNLVLERKLQALSAAVEKKEVQFNEVLAASNLDPAALTLVSRKLEDVLESKNSTIKDLQYELAQVCKAHNDLLRTYEAKLLAFGIPLDNVGFKPLETAVIGQTLGQGPAGLVGTPT

SEQ ID NO: 16147 - protein, 189 aa, Homo sapiens
MFESFNVPGLYIAVQAVLALAASWTSRQVGERTLTGIVIDSGDGVTHVIPVAEGYVIGSCIKHIPIAGRDITYFIQQLLREREVGIPPEQSLETAKAIKEKYCYICPDIVKEFAKYDVDPQKWIKQYTGINAINQKKFVIDVGYERFLGPEIFFHPEFANPDSMESISDVVDEVIQNCPIDVRRPLYKV

SEQ ID NO: 16148 - protein, 1093 aa, Homo sapiens
MGGKAWPRRAVGTAGGPCAEQISAPFQTLLMPHLPLASFRPPFWGLRHSRGLPRFHSVSTQSEPHGSPISRRNREAKQKRLREKQATLEAEIAGESKSPAESIKAWRPKELVLYEIPTKPGEKKDVSGPLPPAYSPRYVEAAWYPWWVREGFFKPEYQARLPQATGETFSMCIPPPNVTGSLHIGHALTVAIQDALVRWHRMRGDQVLWVPGSDHAGIATQAVVEKQLWKERGVRRHELSREAFLREVWQWKEAKGGEICEQLRALGASLDWDRECFTMDVGSSVAVTEAFVRLYKAGLLYRNHQLVNWSCALRSAISDIEVENRPLPGHTQLRLPGCPTPVSFGLLFSVAFPVDGEPDAEVVVGTTRPETLPGDVAVAVHPDDSRYTHLHGRQLRHPLMGQPLPLITDYAVQPHVGTGAVKVTPAHSPADAEMGARHGLSPLNVIAEDGTMTSLCGDWLQGLHRFVAREKIMSVLSEWGLFRGLQNHPMVLPICSRSGDVIEYLLKNQWFVRCQEMGARAAKAVESGALELSPSFHQKNWQHWFSHIGDWCVSRQLWWGHQIPAYLVVEDHAQGEEDCWVVGRSEAEAREVAAELTGRPGAELTLERDPDVLDTWFSSALFPFSALGWPQETPDLARFYPLSLLETGSDLLLFWVGRMVMLGTQLTGQLPFSKVLLHPMVRDRQGRKMSKSLGNVLDPRDIISGVEMQVLQEKLRSGNLDPAELAIVAAAQKKDFPHGIPECGTDALRFTLCSHGVQAGDLHLSVSEVQSCRHFCNKIWNALRFILNALGEKFVPQPAEELSPSSPMDAWILSRLALAAQECERGFLTRELSLVTHALHHFWLHNLCDVYLEAVKPVLWHSPRPLGPPQVLFSCADLGLRLLAPLMPFLAEELWQRLPPRPGCPPAPSISVAPYPSACSLEHWRQPELERRFSRVQEVVQVLRALRATYQLTKARPRVLLQSSEPGDQGLFEAFLEPLGTLGYCGAVGLLPPGAAAPSGWAQAPLSDTAQVYMELQGLVDPQIQLPLLAARRYKLQKQLDSLTARTPSEGEAGTQRQQKLSSLQLELSKLDKAASHLRQLMDEPPAPGSPEL

SEQ ID NO: 16149 - protein, 1065 aa, Homo sapiens
MDTPENVLQYIQWVEENFPENKEYLITLLEHLMKEFLDKKKYHNDPRFISYCLKFAEYNSDLHQFFEFLYNHGIGTLSSPLYIAWAGHLEAQGELQHASAVLQRGIQNQAEPREFLQQQYRLFQTRLTETHLPAQARTSEPLHNVQVLNQMITSKSNPGNNMACISKNQGSELSGVISSACDKESNMERRVITISKSEYSVHSSLASKVDVEQVVMYCKEKLIRGESEFSFEELRAQKYNQRRKHEQWVNEDRHYMKRKEANAFEEQLLKQKMDELHKKLHQVVETSHEDLPASQERSEVNPARMGPSVGSQQELRAPCLPVTYQQTPVNMEKNPREAPPVVPPLANAISAALVSPATSQSIAPPVPLKAQTVTDSMFAVASKDAGCVNKSTHEFKPQSGAEIKEGCETHKVANTSSFHTTPNTSLGMVQATPSKVQPSPTVHTKEALGFIMNMFQAPTLPDISDDKDEWQSLDQNEDAFEAQFQKNVRSSGAWGVNKIISSLSSAFHVFEDGNKENYGLPQPKNKPTGARTFGERSVSRLPSKPKEEVPHAEEFLDDSTVWGIRCNKTLAPSPKSPGDFTSAAQLASTPFHKLPVESVHILEDKENVVAKQCTQATLDSCEENMVVPSRDGKFSPIQEKSPKQALSSHMYSASLLRLSQPAAGGVLTCEAELGVEACRLTDTDAAIAEDPPDAIAGLQAEWMQMSSLGTVDAPNFIVGNPWDDKLIFKLLSGLSKPVSSYPNTFEWQCKLPAIKPKTEFQLGSKLVYVHHLLGEGAFAQVYEATQGDLNDAKNKQKFVLKVQKPANPWEFYIGTQLMERLKPSMQHMFMKFYSAHLFQNGSVLVGELYSYGTLLNAINLYKNTPEKVMPQGLVISFAMRMLYMIEQVHDCEIIHGDIKPDNFILGNGFLEQDDEDDLSAGLALIDLGQSIDMKLFPKGTIFTAKCETSGFQCVEMLSNKPWNYQIDYFGVAATVYCMLFGTYMKVKNEGGECKPEGLFRRLPHLDMWNEFFHVMLNIPDCHHLPSLDLLRQKLKKVFQQHYTNKIRALRNRLIVLLLECKRSRK

SEQ ID NO: 16150 - protein, 92 aa, Homo sapiens
MFPFYSCWRTGLLLLLLAVAVRESWQTEEKTCDLVGEKGKESEKELALVKRLKPLFNKSFESTVGQGSDTYIYIFRVCREAGNHTSGAGLVQ

SEQ ID NO: 16151 - protein, 883 aa, Homo sapiens
MDTSRLGVLLSLPVLLQLATGGSSPRSGVLLRGCPTHCHCEPDGRMLLRVDCSDLGLSELPSNLSVFTSYLDLSMNNISQLLPNPLPSLRFLEELRLAGNALTYIPKGAFTGLYSLKVLMLQNNQLRHVPTEALQNLRSLQSLRLDANHISYVPPSCFSGLHSLRHLWLDDNALTEIPVQAFRSLSALQAMTLALNKIHHIPDYAFGNLSSLVVLHLHNNRIHSLGKKCFDGLHSLETLDLNYNNLDEFPTAIRTLSNLKELHFYDNPIQFVGRSAFQHLPELRTLTLNGASQITEFPDLTGTANLESLTLTGAQISSLPQTVCNQLPNLQVLDLSYNLLEDLPSFSVCQKLQKIDLRHNEIYEIKVDTFQQLLSLRSLNLAWNKIAIIHPNAFSTLPSLIKLDLSSNLLSSFPITGLHGLTHLKLTGNHALQSLISSENFPELKVIEMPYAYQCCAFGVCENAYKISNQWNKGDNSSMDDLHKKDAGMFQAQDERDLEDFLLDFEEDLKALHSVQCSPSPGPFKPCEHLLDGWLIRIGVWTIAVLALTCNALVTSTVFRSPLYISPIKLLIGVIAAVNMLTGVSSAVLAGVDAFTFGSFARHGAWWENGVGCHVIGFLSIFASESSVFLLTLAALERGFSVKYSAKFETKAPFSSLKVIILLCALLALTMAAVPLLGGSKYGASPLCLPLPFGEPSTMGYMVALILLNSLCFLMMTIAYTKLYCNLDKGDLENIWDCSMVKHIALLLFTNCILNCPVAFLSFSSLINLTFISPEVIKFILLVVVPLPACLNPLLYILFNPHFKEDLVSLRKQTYVWTRSKHPSLMSINSDDVEKQSCDSTQALVTFTSSSITYDLPPSSVPSPAYPVTESCHLSSVAFVPCL

SEQ ID NO: 16152 - protein, 549 aa, Homo sapiens
MSARGVVQHALPTPRRGALTMSLNSSLSCRKELSNLTEEEGGEGGVIITQFIAIIVITIFVCLGNLVIVVTLYKKSYLLTLSNKFVFSLTLSNFLLSVLVLPFVVTSSIRREWIFGVVWCNFSALLYLLISSASMLTLGVIAIDRYYAVLYPMVYPMKITGNRAVMALVYIWLHSLIGCLPPLFGWSSVEFDEFKWMCVAAWHREPGYTAFWQIWCALFPFLVMLVCYGFIFRVARVKARKVHCGTVVIVEEDAQRTGRKNSSTSTSSSGSRRNAFQGVVYSANQCKALITILVVLGAFMVTWGPYMVVIASEALWGKSSVSPSLETWATWLSFASAVCHPLIYGLWNKTVRKELLGMCFGDRYYREPFVQRQRTSRLFSISNRITDLGLSPHLTALMAGGQPLGHSSSTGDTGFSCSQDSGTDMMLLEDYTSDDNPPSHCTCPPKRRSSVTFEDEVEQIKEAAKNSILHVKAEVHKSLDSYAASLAKAIEAEAKINLFGEEALPGVLVTARTVPGGGFGGRRGSRTLVSQRLQLQSIEEGDVLAAEQR

SEQ ID NO: 16153 - protein, 45 aa, Homo sapiens
MESDDARAARVKELLVDCYKPTEAFISGLLDKIRGMQKLSTPQKK

SEQ ID NO: 16154 - protein, 181 aa, Homo sapiens
MSNRRRHTGSRANPDPNTCLGVFGLSLYTTERDLREVFSRYGPLSGVNVVYDQRTGRSRGFAFVYFERIDDSKEAMERANGMELDGRRIRVDYSITKRAHTPTPGIYMGRPTHSGGGGGGGGGGGGGGGGRRRDSYYDRGYDRGYDRYEDYDYRYRRRSPSPYYSRYRSRSRSRSYSPRRY

SEQ ID NO: 16155 - protein, 2601 aa, Homo sapiens
MVPPVWTLLLLVGAALFRKEKPPDQKLVVRSSRDNYVLTQCDFEDDAKPLCDWSQVSADDEDWVRASGPSPTGSTGAPGGYPNGEGSYLHMESNSFHRGGVARLLSPDLWEQGPLCVHFAHHMFGLSWGAQLRLLLLSGEEGRRPDVLWKHWNTQRPSWMLTTVTVPAGFTLPTRLMFEGTRGSTAYLDIALDALSIRRGSCNRVCMMQTCSFDIPNDLCDWTWIPTASGAKWTQKKGSSGKPGVGPDGDFSSPGSGCYMLLDPKNARPGQKAVLLSPVSLSSGCLSFSFHYILRGQSPGAALHIYASVLGSIRKHTLFSGQPGPNWQAVSVNYTAVGRIQFAVVGVFGKTPEPAVAVDATSIAPCGEGFPQCDFEDNAHPFCDWVQTSGDGGHWALGHKNGPVHGMGPAGGFPNAGGHYIYLEADEFSQAGQSVRLVSRPFCAPGDICVEFAYHMYGLGEGTMLELLLGSPAGSPPIPLWKRVGSQRPYWQNTSVTVPSGHQQPMQLIFKGIQGSNTASVVAMGFILINPGTCPVKVLPELPPVSPVSSTGPSETTGLTENPTISTKKPTVSIEKPSVTTEKPTVPKEKPTIPTEKPTISTEKPTIPSEKPNMPSEKPTIPSEKPTILTEKPTIPSEKPTIPSEKPTISTEKPTVPTEEPTTPTEETTTSMEEPVIPTEKPSIPTEKPSIPTEKPTISMEETIISTEKPTISPEKPTIPTEKPTIPTEKSTISPEKPTTPTEKPTIPTEKPTISPEKPTTPTEKPTISPEKLTIPTEKPTIPTEKPTIPTEKPTISTEEPTTPTEETTISTEKPSIPMEKPTLPTEETTTSVEETTISTEKLTIPMEKPTISTEKPTIPTEKPTISPEKLTIPTEKLTIPTEKPTIPIEETTISTEKLTIPTEKPTISPEKPTISTEKPTIPTEKPTIPTEETTISTEKLTIPTEKPTISPEKLTIPTEKPTISTEKPTIPTEKLTIPTEKPTIPTEKPTIPTEKLTALRPPHPSPTATGLAALVMSPHAPSTPMTSVILGTTTTSRSSTERCPPNARYESCACPASCKSPRPSCGPLCREGCVCNPGFLFSDNHCIQASSCNCFYNNDYYEPGAEWFSPNCTEHCRCWPGSRVECQISQCGTHTVCQLKNGQYGCHPYAGTATCLVYGDPHYVTFDGRHFGFMGKCTYILAQPCGNSTDPFFRVTAKNEEQGQEGVSCLSKVYVTLPESTVTLLKGRRTLVGGQQVTLPAIPSKGVFLGASGRFVELQTEFGLRVRWDGDQQLYVTVSSTYSGKLCGLCGNYDGNSDNDHLKLDGSPAGDKEELGNSWQTDQDEDQECQKYQVVNSPSCDSSLQSSMSGPGFCGRLVDTHGPFETCLLHVKAASFFDSCMLDMCGFQGLQHLLCTHMSTMTTTCQDAGHAVKPWREPHFCPMACPPNSKYSLCAKPCPDTCHSGFSGMFCSDRCVEACECNPGFVLSGLECIPRSQCGCLHPAGSYFKVGERWYKPGCKELCVCESNNRIRCQPWRCRAQEFCGQQDGIYGCHAQGAATCTASGDPHYLTFDGALHHFMGTCTYVLTRPCWSRSQDSYFVVSATNENRGGILEVSYIKAVHVTVFDLSISLLRGCKVMLNGHRVALPVWLAQGRVTIRLSSNLVLLYTNFGLQVRYDGSHLVEVTVPSSYGGQLCGLCGNYNNNSLDDNLRPDRKLAGDSMQLGAAWKLPESSEPGCFLVGGKPSSCQENSMADAWNKNCAILINPQGPFSQCHQVVPPQSSFASCVHGQCGTKGDTTALCRSLQAYASLCAQAGQAPAWRNRTFCPMRCPPGSSYSPCSSPCPDTCSSINNPRDCPKALPCAESCECQKGHILSGTSCVPLGQCGCTDPAGSYHPVGERWYTENTCTRLCTCSVHNNITCFQSTCKPNQICWALDGLLHCRASGVGVCQLPGESHYVSFDGSNHSIPDACTLVLVKVCHPAMALPFFKISAKHEKEEGGTEAFRLHEVYIDIYDAQVTLQKGHRVLINSKQVTLPAISQIPGVSVKSSSIYSIVNIKIGVQVKFDGNHLLEIEIPTTYYGKVCGMCGNFNDEEEDELMMPSDEVANSDSEFVNSWKDKDIDPSCQSLLVDEQQIPAEQQENPSGNCRAADLRRAREKCEAALRAPVWAQCASRIDLTPFLVDCANTLCEFGGLYQALCQALQAFGATCQSQGLKPPLWRNSSFCPLECPAYSSYTNCLPSCSPSCWDLDGRCEGAKVPSACAEGCICQPGYVLSEDKCVPRSQCGCKDAHGGSIPLGKSWVSSGCTEKCVCTGGAIQCGDFRCPSGSHCQLTSDNSNSNCVSDKSEQCSVYGDPRYLTFDGFSYRLQGRMTYVLIKTVDVLPEGVEPLLVEGRNKMDPPRSSIFLQEVITTVYGYKVQLQAGLELVVNNQKMAVPYRPNEHLRVTLWGQRLYLVTDFELVVSFGGRKNAVISLPSMYEGLVSGLCGNYDKNRKNDMMLPSGALTQNLNTFGNSWEVKTEDALLRFPRAIPAEEEGQGAELGLRTGLQVSECSPEQLASNSTQACRVLADPQGPFAACHQTVAPEPFQEHCVLDLCSAQDPREQEELRCQVLSGWAAAF

SEQ ID NO: 16156 - protein, 325 aa, Homo sapiens
MDTCVIPLRHGGLSLVQTTDYIYPIVDDPYMMGRIACANVLSDLYAMGVTECDNMLMLLGVSNKMTDRERDKVMPLIIQGFKDAAEEAGTSVTGGQTVLNPWIVLGGVATTVCQPNEFIMPDNAVPGDVLVLTKPLGTQVAVAVHQWLDIPEKWNKIKLVVTQEDVELAYQEAMMNMARLNRTAAGLMHTFNAHAATDITGFGILGHAQNLAKQQRNEVSFVIHNLPVLAKMAAVSKACGNMFGLMHGTCPETSGGLLICLPREQAARFCAEIKSPKYGEGHQAWIIGIVEKGNRTARIIDKPRIIEVAPQVATQNVNPTPGATS

SEQ ID NO: 16157 - protein, 1018 aa, Homo sapiens
MLVGSQSFSPGGPNGIIRSQSFAGFSGLQERRSRCNSFIENSSALKKPQAKLKKMHNLGHKNNNPPKEPQPKRVEEVYRALKNGLDEYLEVHQTELDKLTAQLKDMKRNSRLGVLYDLDKQIKTIERYMRRLEFHISKVDELYEAYCIQRRLQDGASKMKQAFATSPASKAARESLTEINRSFKEYTENMCTIEVELENLLGEFSIKMKGLAGFARLCPGDQYEIFMKYGRQRWKLKGKIEVNGKQSWDGEETVFLPLIVGFISIKVTELKGLATHILVGSVTCETKELFAARPQVVAVDINDLGTIKLNLEITWYPFDVEDMTASSGAGNKAAALQRRMSMYSQGTPETPTFKDHSFFSNLPDDIFENGKAAEEKMPLSLSFSDLPNGDCALTSHSTGSPSNSTNPEITITPAEFNLSSLASQNEGMDDTSSASSRNSLGEGQEPKSHLKEEDPEEPRKPASAPSEACRRQSSGAGAEHLFLENDVAEALLQESEEASELKPVELDTSEGNITKQLVKRLTSAEVPMATDRLLSEGSVGGESEGCRSFLDGSLEDAFNGLLLALEPHKEQYKEFQDLNQEVMNLDDILKCKPAVSRSRSSSLSLTVESALESFDFLNTSDFDEEEDGDEVCNVGGGADSVFSDTETEKHSYRSVHPEARGHLSEALTEDTGVGTSVAGSPLPLTTGNESLDITIVRHLQYCTQLVQQIVFSSKTPFVARSLLEKLSRQIQVMEKLAAVSDENIGNISSVVEAIPEFHKKLSLLSFWTKCCSPVGVYHSPADRVMKQLEASFARTVNKEYPGLADPVFRTLVSQILDRAEPLLSSSLSSEVVTVFQYYSYFTSHGVSDLESYLSQLARQVSMVQTLQSLRDEKLLQTMSDLAPSNLLAQQEVLRTLALLLTREDNEVSEAVTLYLAAASKNQHFREKALLYYCEALTKTNLQLQKAACLALKILEATESIKMLVTLCQSDTEEIRNVASETLLSLGEDGRLAYEQLDKFPRDCVKVGGRHGTEVATAF

SEQ ID NO: 16158 - protein, 137 aa, Homo sapiens
MTMETQMSQNVCPRNLWLLQPLTVLLLLASADSQAAAPPKAVLKLEPPWINVLQEDSVTLTCQGARSPESDSIQWFHNGNLIPTHTQPSYRFKANNNDSGEYTCQTGQTSLSDPVHLTVLSGQWRKAPGWTWEGQDG

SEQ ID NO: 16159 - protein, 1640 aa, Homo sapiens
MAQILPVRFQEHFQLQNLGINPANIGFSTLTMESDKFICIREKVGEQAQVTIIDMSDPMAPIRRPISAESAIMNPASKVIALKAGKTLQIFNIEMKSKMKAHTMAEEVIFWKWVSVNTVALVTETAVYHWSMEGDSQPMKMFDRHTSLVGCQVIHYRTDEYQKWLLLVGISAQQNRVVGAMQLYSVDRKVSQPIEGHAAAFAEFKMEGNAKPATLFCFAVRNPTGGKLHIIEVGQPAAGNQPFVKKAVDVFFPPEAQNDFPVAMQIGAKHGVIYLITKYGYLHLYDLESGVCICMNRISADTIFVTAPHKPTSGIIGVNKKGQVLSVCVEEDNIVNYATNVLQNPDLGLRLAVRSNLAGAEKLFVRKFNTLFAQGSYAEAAKVAASAPKGILRTRETVQKFQSIPAQSGQASPLLQYFGILLDQGQLNKLESLELCHLVLQQGRKQLLEKWLKEDKLECSEELGDLVKTTDPMLALSVYLRANVPSKVIQCFAETGQFQKIVLYAKKVGYTPDWIFLLRGVMKISPEQGLQFSRMLVQDEEPLANISQIVDIFMENSLIQQCTSFLLDALKNNRPAEGLLQTWLLEMNLVHAPQVADAILGNKMFTHYDRAHIAQLCEKAGLLQQALEHYTDLYDIKRAVVHTHLLNPEWLVNFFGSLSVEDSVECLHAMLSANIRQNLQLCVQVASKYHEQLGTQALVELFESFKSYKGLFYFLGSIVNFSQDPDVHLKYIQAACKTGQIKEVERICRESSCYNPERVKNFLKEAKLTDQLPLIIVCDRFGFVHDLVLYLYRNNLQRYIEIYVQKVNPSRTPAVIGGLLDVDCSEEVIKHLIMAVRGQFSTDELVAEVEKRNRLKLLLPWLESQIQEGCEEPATHNALAKIYIDSNNSPECFLRENAYYDSSVVGRYCEKRDPHLACVAYERGQCDLELIKVCNENSLFKSEARYLVCRKDPELWAHVLEETNPSRRQLIDQVVQTALSETRDPEEISVTVKAFMTADLPNELIELLEKIVLDNSVFSEHRNLQNLLILTAIKADRTRVMEYISRLDNYDALDIASIAVSSALYEEAFTVFHKFDMNASAIQVLIEHIGNLDRAYEFAERCNEPAVWSQLAQAQLQKDLVKEAINSYIRGDDPSSYLEVVQSASRSNNWEDLVKFLQMARKKGRESYIETELIFALAKTSRVSELEDFINGPNNAHIQQVGDRCYEEGMYEAAKLLYSNVSNFARLASTLVHLGEYQAAVDNSRKASSTRTWKEVCFACMDGQEFRFAQLCGLHIVIHADELEELMCYYQDRGYFEELILLLEAALGLERAHMGMFTELAILYSKFKPQKMLEHLELFWSRVNIPKVLRAAEQAHLWAELVFLYDKYEEYDNAVLTMMSHPTEAWKEGQFKDIITKVANVELCYRALQFYLDYKPLLINDLLLVLSPRLDHTWTVSFFSKAGQLPLVKPYLRSVQSHNNKSVNEALNHLLTEEEDYQGLRASIDAYDNFDNISLAQQLEKHQLMEFRCIAAYLYKGNNWWAQSVELCKKDHLYKDAMQHAAESRDAELAQKLLQWFLEEGKRECFAACLFTCYDLLRPDMVLELAWRHNLVDLAMPYFIQVMREYLSKVDKLDALESLRKQEEHVTEPAPLVFDFDGHE

SEQ ID NO: 16160 - protein, 132 aa, Homo sapiens
MPPKFDPNEIKVVYLRCTGGEVGATSALAPKIGPLGLIEVVPSASALIIKALKEPPRDRKKQKNIKHSGNITFDEIVNIARQMRHRSLARELSGTIKEILGTAQSVGCNVDGRHPHDIIDDINSGAVECPAS

SEQ ID NO: 16161 - protein, 147 aa, Homo sapiens
MIISHFPKCVAVFALLALSVGALDTFIAAVYEHAVILPNRTETPVSKEEALLLMNKNIDVLEKAVKLAAKQGAHIIVTPEDGIYGWIFTRESIYPYLEDIPDPGVNWIPCRDPWRKSKKMNEPVSKELCYHCHSECNQYGQWKLYRT

SEQ ID NO: 16162 - protein, 1668 aa, Homo sapiens
MSARAAAAKSTAMEETAIWEQHTVTLHRAPGFGFGIAISGGRDNPHFQSGETSIVISDVLKGGPAEGQLQENDRVAMVNGVSMDNVEHAFAVQQLRKSGKNAKITIRRKKKVQIPVSRPDPEPVSDNEEDSYDEEIHDPRSGRSGVVNRRSEKIWPRDRSASRERSLSPRSDRRSVASSQPAKPTKVTLVKSRKNEEYGLRLASHIFVKEISQDSLAARDGNIQEGDVVLKINGTVTENMSLTDAKTLIERSKGKLKMVVQRDERATLLNVPDLSDSIHSANASERDDISEIQSLASDHSGRSHDRPPRRSRSRSPDQRSEPSDHSRHSPQQPSNGSLRSRDEERISKPGAVSTPVKHADDHTPKTVEEVTVERNEKQTPSLPEPKPVYAQVGQPDVDLPVSPSDGVLPNSTHEDGILRPSMKLVKFRKGDSVGLRLAGGNDVGIFVAGVLEDSPAAKEGLEEGDQILRVNNVDFTNIIREEAVLFLLDLPKGEEVTILAQKKKDVYRRIVESDVGDSFYIRTHFEYEKESPYGLSFNKGEVFRVVDTLYNGKLGSWLAIRIGKNHKEVERGIIPNKNRAEQLASVQYTLPKTAGGDRADFWRFRGLRSSKRNLRKSREDLSAQPVQTKFPAYERVVLREAGFLRPVTIFGPIADVAREKLAREEPDIYQIAKSEPRDAGTDQRSSGIIRLHTIKQIIDQDKHALLDVTPNAVDRLNYAQWYPIVVFLNPDSKQGVKTMRMRLCPESRKSARKLYERSHKLRKNNHHLFTTTINLNSMNDGWYGALKEAIQQQQNQLVWVSEGKADGATSDDLDLHDDRLSYLSAPGSEYSMYSTDSRHTSDYEDTDTEGGAYTDQELDETLNDEVGTPPESAITRSSEPVREDSSGMHHENQTYPPYSPQAQPQPIHRIDSPGFKPASQQVYRKDPYPEEMMRQNHVLKQPAVSHPGHRPDKEPNLTYEPQLPYVEKQASRDLEQPTYRYESSSYTDQFSRNYEHRLRYEDRVPMYEEQWSYYDDKQPYPSRPPFDNQHSQDLDSRQHPEESSERGYFPRFEEPAPLSYDSRPRYEQAPRASALRHEEQPAPGYDTHGRLRPEAQPHPSAGPKPAESKQYFEQYSRSYEQVPPQGFTSRAGHFEPLHGAAAVPPLIPSSQHKPEALPSNTKPLPPPPTQTEEEEDPAMKPQSVLTRVKMFENKRSASLETKKDVNDTGSFKPPEVASKPSGAPIIGPKPTSQNQFSEHDKTLYRIPEPQKPQLKPPEDIVRSNHYDPEEDEEYYRKQLSYFDRRSFENKPPAHIAASHLSEPAKPAHSQNQSNFSSYSSKGKPPEADGVDRSFGEKRYEPIQATPPPPPLPSQYAQPSQPVTSASLHIHSKGAHGEGNSVSLDFQNSLVSKPDPPPSQNKPATFRPPNREDTAQAAFYPQKSFPDKAPVNGTEQTQKTVTPAYNRFTPKPYTSSARPFERKFESPKFNHNLLPSETAHKPDLSSKTPTSPKTLVKSHSLAQPPEFDSGVETFSIHAEKPKYQINNISTVPKAIPVSPSAVEEDEDEDGHTVVATARGIFNSNGGVLSSIETGVSIIIPQGAIPEGVEQEIYFKVCRDNSILPPLDKEKGETLLSPLVMCGPHGLKFLKPVELRLPHCDPKTWQNKCLPGDPNYLVGANCVSVLIDHF

SEQ ID NO: 16163 - protein, 128 aa, Homo sapiens
MFDVTSRVTYKNVPNWHRDLVRVCENIPIVLCGNKVDIKDRKVKAKSIVFHRKKNLQYYDISAKSNYNFEKPFLWLARKLIGDPNLEFVAMPALAPPEVVMDPALAAQYEHDLEVAQTTALPDEDDDL

SEQ ID NO: 16164 - protein, 751 aa, Homo sapiens
MHLLGPWLLLLVLEYLAFSDSSKWVFEHPETLYAWEGACVWIPCTYRALDGDLESFILFHNPEYNKNTSKFDGTRLYESTKDGKVPSEQKRVQFLGDKNKNCTLSIHPVHLNDSGQLGLRMESKTEKWMERIHLNVSERPFPPHIQLPPEIQESQEVTLTCLLNFSCYGYPIQLQWLLEGVPMRQAAVTSTSLTIKSVFTRSELKFSPQWSHHGKIVTCQLQDADGKFLSNDTVQLNVKHTPKLEIKVTPSDAIVREGDSVTMTCEVSSSNPEYTTVSWLKDGTSLKKQNTFTLNLREVTKDQSGKYCCQVSNDVGPGRSEEVFLQVQYAPEPSTVQILHSPAVEGSQVEFLCMSLANPLPTNYTWYHNGKEMQGRTEEKVHIPKILPWHAGTYSCVAENILGTGQRGPGAELDVQYPPKKVTTVIQNPMPIREGDTVTLSCNYNSSNPSVTRYEWKPHGAWEEPSLGVLKIQNVGWDNTTIACAACNSWCSWASPVALNVQYAPRDVRVRKIKPLSEIHSGNSVSLQCDFSSSHPKEVQFFWEKNGRLLGKESQLNFDSISPEDAGSYSCWVNNSIGQTASKAWTLEVLYAPRRLRVSMSPGDQVMEGKSATLTCESDANPPVSHYTWFDWNNQSLPYHSQKLRLEPVKVQHSGAYWCQGTNSVGKGRSPLSTLTVYYSPETIGRRVAVGLGSCLAILILAICGLKLQRRWKRTQSQQGLQENSSGQSFFVRNKKRCRVLRDAETSPGLR

SEQ ID NO: 16165 - protein, 40 aa, Homo sapiens
MTRGGPGGRPGLPQPPPLLLLLLLLPLLLVTAEPPKPADT

SEQ ID NO: 16166 - protein, 743 aa, Homo sapiens
MNNPSETSKPSMESGDGNTGTQTNGLDFQKQPVPVGGAISTAQAQAFLGHLHQVQLAGTSLQAAAQSLNVQSKSNEESGDSQQPSQPSQQPSVQAAIPQTQLMLAGGQITGLTLTPAQQQLLLQQAQAQAQLLAAAVQQHSASQQHSAAGATISASAATPMTQIPLSQPIQIAQDLQQLQQLQQQNLNLQQFVLVHPTTNLQPAQFIISQTPQGQQGLLQAQNLLTQLPQQSQANLLQSQPSITLTSQPATPTRTIAATPIQTLPQSQSTPKRIDTPSLEEPSDLEELEQFAKTFKQRRIKLGFTQGDVGLAMGKLYGNDFSQTTISRFEALNLSFKNMCKLKPLLEKWLNDAENLSSDSSLSSPSALNSPGIEGLSRRRKKRTSIETNIRVALEKSFLENQKPTSEEITMIADQLNMEKEVIRVWFCNRRQKEKRINPPSSGGTSSSPIKAIFPSPTSLVATTPSLVTSSAATTLTVSPVLPLTSAAVTNLSVTGTSDTTSNNTATVISTAPPASSAVTSPSLSPSPSASASTSEASSASETSTTQTTSTPLSSPLGTSQVMVTASGLQTAAAAALQGAAQLPANASLAAMAAAAGLNPSLMAPSQFAAGGALLSLNPGTLSGALSPALMSNSTLATIQALASGGSLPITSLDATGNLVFANAGGAPNIVTAPLFLNPQNLSLLTSNPVSLVSAAAASAGNSAPVASLHATSTSAESIQNSLFTVASASGAASTTTTASKAQ

SEQ ID NO: 16167 - protein, 338 aa, Homo sapiens
MAGKDIPGQASLVFDVALLDLHNPKDSISIENKVVPENCERISQSGDFLRYHYNGTLLDGTLFDSSYSRNRTFDTYIGQGYVIPGMDEGLLGVCIGEKRRIVVPPHLGYGEEGRGNIPGSAVLVFDIHVIDFHNPSDSISITSHYKPPDCSVLSKKGDYLKYHYNASLLDGTLLDSTWNLGKTYNIVLGSGQVVLGMDMGLREMCVGEKRTVIIPPHLGYGEAGVDGEVPGSAVLVFDIELLELVAGLPEGYMFIWNGEVSPNLFEEIDKDGNGEVLLEEFSEYIHAQVASGKGKLAPGFDAELIVKNMFTNQDRNGDGKVTAEEFKLKDQEAKHDEL

SEQ ID NO: 16168 - protein, 241 aa, Homo sapiens
MAQQDRIQQEIAVQNPLVSERLELSVLYKEYAEDDNIYQQKIKDLHKKYSYIRKTRPDGNCFYRAFGFSHLEALLDDSKELQRFKAVSAKSKEDLVSQGFTEFTIEDFHNTFMDLIEQVEKQTSVADLLASFNDQSTSDYLVVYLRLLTSGYLQRESKFFEHFIEGGRTVKEFCQQEVEPMCKESDHIHIIALAQALSVSIQVEYMDRGEGGTTNPHIFPEGSEPKVYLLYRPGHYDILYK

SEQ ID NO: 16169 - protein, 382 aa, Homo sapiens
MRKLFEKYGKAGEVFIHKDKGFGFIRLETRTLAEIAKVELDNMPLRGKQLRVRFACHSASLTVRNLPQYVSNELLEEAFSVFGQVERAVVIVDDRGRPSGKGIVEFSGKPAARKALDRCSEGSFLLTTFPRPVTVEPMDQLDDEEGLPEKLVIKNQQFHKEREQPPRFAQPGSFEYEYAMRWKALIEMEKQQQDQVDRNIKEAREKLEMEMEAARHEHQVMLMRQDLMRRQEELRRMEELHNQEVQKRKQLELRQEEERRRREEEMRRQQEEMMRRQQEGFKGTFPDAREQEIRMGQMAMGGAMGINNRGAMPPAPVPAGTPAPPGPATMMPDGTLGLTPPTTERFGQAATMEGIGAIGGTPPAFNRAAPGAEFAPNKRRRY

SEQ ID NO: 16170 - protein, 173 aa, Homo sapiens
MLPPPPRQPPPQARAARGAVRLQRPFLRSPLGVLRLLQLLAGAAFWITIATSKYQGPVHFALFVSVLFWLLTLGLYFLTLLGKHELVPVLGSRWLMVNVAHDVLAAALYGAATGIMSDQMQRHSYCNLKDYPLPCAYHAFLAAAVCGGVCHGLYLLSALYGCGRRCQGKQEVA

SEQ ID NO: 16171 - protein, 473 aa, Homo sapiens
MVRHSSSPYVVYPSDKPFLNSDLRRSPSKPTLAYPESNSRAIFSALKNLQDKIRRLELERIQAEESVKTLSRETIEYKKVLDEQIQERENSKNEESKHNQELTSQLLAAENKCNLLEKQLEYMRNMIKHAEMERTSVLEKQVSLERERQHDQTHVQSQLEKLDLLEQEYNKLTTMQALAEKKMQELEAKLHEEEQERKRMQAKAAELQTGLETNRLIFEDKATPCVPNARRIKKKKSKPPEKKSSRNYFGAQPHYRLCLGDMPFVAGKSTSPSHAVVANVQLVLHLMKQHSKALCNDRVINSIPLAKQVSSRGGKSKKLSVTPPSSNGINEELSEVLQTLQDEFGQMSFDHQQLAKLIQESPTVELKDKLECELEALVGRMEAKANQITKVRKYQAQLEKQKLEKQKKELKATKKTLDEERNSSSRSGITGTTNKKDFMKLRPGEKRRKNLQLLKDMQSIQNSLQSSSLCWDY

SEQ ID NO: 16172 - protein, 181 aa, Homo sapiens
MMHLAFLVLLCLPVCSAYPLSGAAKEEDSNKDLAQQYLEKYYNLEKDVKQFRRKDSNLIVKKIQGMQKFLGLEVTGKLDTDTLEVMRKPRCGVPDVGHFSSFPGMPKWRKTHLTYRIVNYTPDLPRDAVDSAIEKALKVWEEVTPLTFSRLYEGEADIMISFAVKGHSLAHAYPPGPGLYG

SEQ ID NO: 16173 - protein, 213 aa, Homo sapiens
MRFCPFAERTRLVLKAKGIRHEVININLKNKPEWFFKKNPFGLVPVLENSQGQLIYESAITCEYLDEAYPGKKLLPDDPYEKACQKMILELFSKVPSLVGSFIRSQNKEDYAGLKEEFRKEFTKLEEVLTNKKTTFFGGNSISMIDYLIWPWFERLEAMKLNECVDHTPKLKLWMAAMKEDPTVSALLTSEKDWQGFLELYLQNSPEACDYGL

SEQ ID NO: 16174 - protein, 151 aa, Homo sapiens
MSLLGPKVLLFLAAFIITSDDVTQATPETFTEDPNLVNDPATDETVLAVLADIAPSTDDLECWDEKFTCTRLYSVHRPVKQCIHQLCFTSLRRMYIVNKEICSRLVCKEHEAMKDELCRQMAGLPPRRLRRSNYFRLPPCENVDLQRPNGL

SEQ ID NO: 16175 - protein, 677 aa, Homo sapiens
MLGSLVLRRKALAPRLLLRLLRSPTLRGHGGASGRNVTTGSLGEPQWLRVATGGRPGTSPALFSGRGAATGGRQGGRFDTKCLAAATWGRLPGPEETLPGQDSWNGVPSRAGLGMCALAAALVVHCYSKSPSNKDAALLEAARANNMQEVSRLLSEGADVNAKHRLGWTALMVAAINRNNSVVQVLLAAGADPNLGDDFSSVYKTAKEQGIHSLEVLITREDDFNNRLNNRASFKGCTALHYAVLADDYRTVKELLDGGANPLQRNEMGHTPLDYAREGEVMKLLRTSEAKYQEKQRKREAEERRRFPLEQRLKEHIIGQESAIATVGAAIRRKENGWYDEEHPLVFLFLGSSGIGKTELAKQTAKYMHKDAKKGFIRLDMSEFQERHEVAKFIGSPPGYVGHEEGGQLTKKLKQCPNAVVLFDEVDKAHPDVLTIMLQLFDEGRLTDGKGKTIDCKDAIFIMTSNVASDEIAQHALQLRQEALEMSRNRIAENLGDVQISDKITISKNFKENVIRPILKAHFRRDEFLGRINEIVYFLPFCHSELIQLVNKELNFWAKRAKQRHNITLLWDREVADVLVDGYNVHYGARSIKHEVERRVVNQLAAAYEQDLLPGGCTLRITVEDSDKQLLKSPELPSPQAEKRLPKLRLEIIDKDSKTRRLDIRAPLHPEKVCNTI

SEQ ID NO: 16176 - protein, 180 aa, Homo sapiens
MLPAATEGQKDMVWKWMPLLLLLVCVATMCSAQDRTDLLNVCMDAKHHKTKPGPEDKLHDQCSPWKKNACCTASTSQELHKDTSRLYNFNWDHCGKMEPACKRHFIQDTCLYECSPNLGPWIQQVNQSWRKERFLDVPLCKEDCQRWWEDCHTSHTCKSNWHRGWDWTSGVNKCPAGALC

SEQ ID NO: 16177 - protein, 600 aa, Homo sapiens
MKDIFFQFIIARVRKCYSLSCLHTLPVVPTLRKTERGSYSSYGRESNLQGCHQSLLGGDMDMGNPGTLSPTKPGSQYYQYSSNNPRRRPLHSSAMEVQTKKVRKVPPGLPSSVYAPSASTADYNRDSPGYPSSKPATSTFPSSFFMQDGHHSSDPWSSSSGMNQPGYAGMLGNSSHIPQSSSYCSLHPHERLSYPSHSSADINSSLPPMSTFHRSGTNHYSTSSCTPPANGTDSIMANRGSGAAGSSQTGDALGKALASIYSPDHTNNSFSSNPSTPVGSPPSLSAGTAVWSRNGGQASSSPNYEGPLHSLQSRIEDRLERLDDAIHVLRNHAVGPSTAMPGGHGDMHGIIGPSHNGAMGGLGSGYGTGLLSANRHSLMVGTHREDGVALRGSHSLLPNQVPVPQLPVQSATSPDLNPPQDPYRGMPPGLQGQSVSSGSSEIKSDDEGDENLQDTKSSEDKKLDDDKKDIKSITRSRSSNNDDEDLTPEQKAEREKERRMANNARERLRVRDINEAFKELGRMVQLHLKSDKPQTKLLILHQAVAVILSLEQQVRERNLNPKAACLKRREEEKVSSEPPPLSLAGPHPGMGDASNHMGQM

SEQ ID NO: 16178 - protein, 173 aa, Homo sapiens
MWAGLLLRAACVALLLPGAPARGYTGRKPPGHFAAERRRLGPHVCLSGFGSGCCPGWAPSMGGGHCTLRKCLSLCPKSSPPAVCVASPQSLVRGADGRPQFLVSHLHFSSQPSAPSAVGVASASLPMSAPARMESKGPPAQKPMDHVGSTAVTLPATMEAVRRWPECAPWASR

SEQ ID NO: 16179 - protein, 522 aa, Homo sapiens
MAAAMPLALLVLLLLGPGGWCLAEPPRDSLREELVITPLPSGDVAATFQFRTRWDSELQREGVSHYRLFPKALGQLISKYSLRELHLSFTQGFWRTRYWGPPFLQAPSDTDHYFLRYAVLPREVVCTENLTPWKKLLPCSSKAGLSVLLKADRLFHTSYHSQAVHIRPVCRNARCTSISWELRQTLSVVFDAFITGQGKKDWSLFRMFSRTLTEPCPLASESRVYVDITTYNQDNETLEVHPPPTTTYQDVILGTRKTYAIYDLLDTAMINNSRNLNIQLKWKRPPENEAPPVPFLHAQRYVSGYGLQKGELSTLLYNTHPYRAFPVLLLDTVPWYLRLYVHTLTITSKGKENKPSYIHYQPAQDRLQPHLLEMLIQLPANSVTKVSIQFERALLKWTEYTPDPNHGFYVSPSVLSALVPSMVAAKPVDWEESPLFNSLFPVSDGSNYFVRLYTEPLLVNLPTPDFSMPYNVICLTCTVVAVCYGSFYNLLTRTFHIEEPRTGGLAKRLANLIRRARGVPPL

SEQ ID NO: 16180 - protein, 1477 aa, Homo sapiens
MEPRMESCLAQVLQKDVGKRLQVGQELIDYFSDKQKSADLEHDQTMLDKLVDGLATSWVNSSNYKVVLLGMDILSALVTRLQDRFKAQIGTVLPSLIDRLGDAKDSVREQDQTLLLKIMDQAANPQYVWDRMLGGFKHKNFRTREGICLCLIATLNASGAQTLTLSKIVPHICNLLGDPNSQVRDAAINSLVEIYRHVGERVRADLSKKGLPQSRLNVIFTKFDEVQKSGNMIQSANDKNFDDEDSVDGNRPSSASSTSSKAPPSSRRNVGMGTTRRLGSSTLGSKSSAAKEGAGAVDEEDFIKAFDDVPVVQIYSSRDLEESINKIREILSDDKHDWEQRVNALKKIRSLLLAGAAEYDNFFQHLRLLDGAFKLSAKDLRSQVVREACITLGHLSSVLGNKFDHGAEAIMPTIFNLIPNSAKIMATSGVVAVRLIIRHTHIPRLIPVITSNCTSKSVAVRRRCFEFLDLLLQEWQTHSLERHISVLAETIKKGIHDADSEARIEARKCYWGFHSHFSREAEHLYHTLESSYQKALQSHLKNSDSIVSLPQSDRSSSSSQESLNRPLSAKRSPTGSTTSRASTVSTKSVSTTGSLQRSRSDIDVNAAASAKSKVSSSSGTTPFSSAAALPPGSYASLESRHMREDMEYIGLDSGRIRTRRQSSGSATNVASTPDNRGRSRAKVVSQSQPGSRSSSPGKLLGSGYGGLTGGSSRGPPVTPSSEKRSKIPRSQGCSRETSPNRIGLDRFGLGQPGRIPGSVNAMRVLSTSTDLEAAVADALLLGDSRSKKPVRRRYEPYGMYSDDDANSDASSVCSERSYGSRNGGIPHYLRQTEDVAEVLNHCASSNWSERKEGLLGLQNLLKSQRTLSRVELKRLCEIFTRMFADPHSKRVFSMFLETLVDFIIIHKDDLQDWLFVLLTQLLKKMGADLLGSVQAKVQKALDVTRDSFPFDQQFNILMRFIVDQTQTPNLKVKVAILKYIESLARQMDPTDFVNSSETRLAVSRIITWTTEPKSSDVRKAAQIVLISLFELNTPEFTMLLGALPKTFQDGATKLLHNHLKNSSNTSVGSPSNTIGRTPSRHTSSRTSPLTSPTNCSHGGLSPSMLDYDTENLNSEEIYSSLRGVTEAIEKFSFRSQEDLNEPIKRDGKKECDIVSRDGGAASPATEGRGGSEVEGGRTALDNKTSLLNTQPPRAFPGPRARDYNPYPYSDAINTYDKTALKEAVFDDDMEQLRDVPIDHSDLVADLLKELSNHNERVEERKGALLELLKITREDSLGVWEEHFKTILLLLLETLGDKDHSIRALALRVLREILRNQPARFKNYAELTIMKTLEAHKDSHKEVVRAAEEAASTLASSIHPEQCIKVLCPIIQTADYPINLAAIKMQTKVVERIAKESLLQLLVDIIPGLLQGYDNTESSVRKASVFCLVAIYSVIGEDLKPHLAQLTGSKMKLLNLYIKRAQTTNSNSSSSSDVSTHS

SEQ ID NO: 16181 - protein, 265 aa, Homo sapiens
MNFILFIFIPGVFSLKSSTLKPTIEALPNVLPLNEDVNKQEEKNEDHTPNYAPANEKNGNYYKDIKQYVFTTQNPNGTESEISVRATTDLNFALKNGSTPNVPAFWTMLAKAINGTAVVMDDKDQLFHPIPESDVNATQGENQPDLEDLKIKIMLGISLMTLLLFVVLLAFCSATLYKLRHLSYKSCESQYSVNPELATMSYFHPSEGVSDTSFSKSAESSTFLGTTSSDMRRSGTRTSESKIMTDIISIGSDNEMHENDESVTR

SEQ ID NO: 16182 - protein, 1152 aa, Homo sapiens
MALRVLLLTALTLCHGFNLDTENAMTFQENARGFGQSVVQLQGSRVVVGAPQEIVAANQRGSLYQCDYSTGSCEPIRLQVPVEAVNMSLGLSLAATTSPPQLLACGPTVHQTCSENTYVKGLCFLFGSNLRQQPQKFPEALRGCPQEDSDIAFLIDGSGSIIPHDFRRMKEFVSTVMEQLKKSKTLFSLMQYSEEFRIHFTFKEFQNNPNPRSLVKPITQLLGRTHTATGIRKVVRELFNITNGARKNAFKILVVITDGEKFGDPLGYEDVIPEADREGVIRYVIGVGDAFRSEKSRQELNTIASKPPRDHVFQVNNFEALKTIQNQLREKIFAIEGTQTGSSSSFEHEMSQEGFSAAITSNGPLLSTVGSYDWAGGVFLYTSKEKSTFINMTRVDSDMNDAYLGYAAAIILRNRVQSLVLGAPRYQHIGLVAMFRQNTGMWESNANVKGTQIGAYFGASLCSVDVDSNGSTDLVLIGAPHYYEQTRGGQVSVCPLPRGRARWQCDAVLYGEQGQPWGRFGAALTVLGDVNGDKLTDVAIGAPGEEDNRGAVYLFHGTSGSGISPSHSQRIAGSKLSPRLQYFGQSLSGGQDLTMDGLVDLTVGAQGHVLLLRSQPVLRVKAIMEFNPREVARNVFECNDQVVKGKEAGEVRVCLHVQKSTRDRLREGQIQSVVTYDLALDSGRPHSRAVFNETKNSTRRQTQVLGLTQTCETLKLQLPNCIEDPVSPIVLRLNFSLVGTPLSAFGNLRPVLAEDAQRLFTALFPFEKNCGNDNICQDDLSITFSFMSLDCLVVGGPREFNVTVTVRNDGEDSYRTQVTFFFPLDLSYRKVSTLQNQRSQRSWRLACESASSTEVSGALKSTSCSINHPIFPENSEVTFNITFDVDSKASLGNKLLLKANVTSENNMPRTNKTEFQLELPVKYAVYMVVTSHGVSTKYLNFTASENTSRVMQHQYQVSNLGQRSLPISLVFLVPVRLNQTVIWDRPQVTFSENLSSTCHTKERLPSHSDFLAELRKAPVVNCSIAVCQRIQCDIPFFGIQEEFNATLKGNLSFDWYIKTSHNHLLIVSTAEILFNDSVFTLLPGQGAFVRSQTETKVEPFEVPNPLPLIVGSSVGGLLLLALITAALYKLGFFKRQYKDMMSEGGPPGAEPQ

SEQ ID NO: 16183 - protein, 43 aa, Homo sapiens
GAIMGIFFCLSGVGSLLGSSLVALLSLPGGWLHCPKDFAEEEL

SEQ ID NO: 16184 - protein, 112 aa, Homo sapiens
MTSIRAVFIFLWLQLDLVNGENVEQHPSTLSVQEGDSAVIKCTYSDSASNYFPWYKQELGKGPQLIIDIRSNVGEKKDQRIAVTLNKTAKHFSLHITETQPEDSAVYFCAAS

SEQ ID NO: 16185 - protein, 238 aa, Homo sapiens
MVGPRSWETGRIGDERQEETGGGRGEGRGRRQRESEDPKGWRWGWKDWGPAGKRVCSLKQEFVGQSLWVRVCGAGIETRGIGVQMLTTSLFSEQCDFTEDQTAEFKEAFQLFDRTGDGKILYSQCGDVMRALGQNPTNAEVLKVLGNPKSDEMNVKVLDFEHFLPMLQTVAKNKDQGTYEDYVEGLRVFDKEGNGTVMGAEIRHVLVTLGEKMTEEEVEMLVAGHEDSNGCINYEGKR

SEQ ID NO: 16186 - protein, 349 aa, Homo sapiens
MAAALGVLMGCWLEVRRPPCRTSMANTELEVKIRDWYQRQAPGPARDYSQYYRTIEELQNKILTATVDNANILLQIDNARLAADDFRTKFETEQALRLSVEADINGLRRVLDELTLARADLEMQIENLKEELAYLKKNHEEEMNALRGQVGGEINVEMDAAPGVDLSRILNEMRDQYEKMAEKNRKDAEDWFFSKTEELNREVATNSELVQSGKSEISELRRTMQALEIELQSQLSMKASLEGNLAETENRYCVQLSQIQGLIGSVEEQLAQLRCEMEQQNQEYKILLDVKTRLEQEIATYRRLLEGEDAHLTQYKKEPVTTRQVRTIVEEVQDGKVISSREQVHQTTR

SEQ ID NO: 16187 - protein, 1072 aa, Homo sapiens
MLRMRTAGWARGWCLGCCLLLPLSLSLAAAKQLLRYRLAEEGPADVRIGNVASDLGIVTGSGEVTFSLESGSEYLKIDNLTGELSTSERRIDREKLPQCQMIFDENECFLDFEVSVIGPSQSWVDLFEGQVIVLDINDNTPTFPSPVLTLTVEENRPVGTLYLLPTATDRDFGRNGIERYELLQEPGGGGSGGESRRAGAADSAPYPGGGGNGASGGGSGGSKRRLDASEGGGGTNPGGRSSVFELQVADTPDGEKQPQLIVKGALDREQRDSYELTLRVRDGGDPPRSSQAILRVLITDVNDNSPRFEKSVYEADLAENSAPGTPILQLRAADLDVGVNGQIEYVFGAATESVRRLLRLDETSGWLSVLHRIDREEVNQLRFTVMARDRGQPPKTDKATVVLNIKDENDNVPSIEIRKIGRIPLKDGVANVAEDVLVDTPIALVQVSDRDQGENGVVTCTVVGDVPFQLKPASDTEGDQNKKKYFLHTSTPLDYEATREFNVVIVAVDSGSPSLSSNNSLIVKVGDTNDNPPMFGQSVVEVYFPENNIPGERVATVLATDADSGKNAEIAYSLDSSVMGIFAIDPDSGDILVNTVLDREQTDRYEFKVNAKDKGIPVLQGSTTVIVQVADKNDNDPKFMQDVFTFYVKENLQPNSPVGMVTVMDADKGRNAEMSLYIEENNNIFSIENDTGTIYSTMSFDREHQTTYTFRVKAVDGGDPPRSATATVSLFVMDENDNAPTVTLPKNISYTLLPPSSNVRTVVATVLATDSDDGINADLNYSIVGGNPFKLFEIDPTSGVVSLVGKLTQKHYGLHRLVVQVNDSGQPSQSTTTLVHVFVNESVSNATAIDSQIARSLHIPLTQDIAGDPSYEISKQRLSIVIGVVAGIMTVILIILIVVMARYCRSKNKNGYEAGKKDHEDFFTPQQHDKSKKPKKDKKNKKSKQPLYSSIVTVEASKPNGQRYDSVNEKLSDSPSMGRYRSVNGGPGSPDLARHYKSSSPLPTVQLHPQSPTAGKKHQAVQDLPPANTFVGAGDNISIGSDHCSEYSCQTNNKYSKQVRCIPNIFKYPREG

SEQ ID NO: 16188 - protein, 164 aa, Homo sapiens
MRILILGLDGAGKTTILYRLQVGEVVTTIPTIGFNVETVTYKNLKFQVWDLGGQTSIRPYWRCYYSNTDAVIYVVDSCDRDRIGISKSELVAMLEEEELRKAILVVFANKQDMEQAMTSSEMANSLGLPALKDRKWQIFKTSATKGTGLDEAMEWLVETLKSRQ

SEQ ID NO: 16189 - protein, 348 aa, Homo sapiens
MSDLGAVISLLLWGRQLFALYSGNDVTDISDDRFPKPPEIANGYVEHLFRYQCKNYYRLRTEGDGVYTLNDKKQWINKAVGDKLPECEAVCGKPKNPANPVQRILGGHLDAKGSFPWQAKMVSHHNLTTGATLINEQWLLTTAKNLFLNHSENATAKDIAPTLTLYVGKKQLVEIEKVVLHPNYHQVDIGLIKLKQKVLVNERVMPICLPSKNYAEVGRVGYVSGWGQSDNFKLTDHLKYVMLPVADQYDCITHYEGSTCPKWKAPKSPVGVQPILNEHTFCVGMSKYQEDTCYGDAGSAFAVHDLEEDTWYAAGILSFDKSCAVAEYGVYVKVTSIQHWVQKTIAEN

SEQ ID NO: 16190 - protein, 188 aa, Homo sapiens
MTGLDIEKDQIIEMACLITDSDLNILAEGPNLIIKQPDELLDSMSDWCKEHHGKSGLTKAVKESTITLQQAEYEFLSFVRQQTPPGLCPLAGNSVHEDKKFLDKYMPQFMKHLHYRIIDVSTVKELCRRWYPEEYEFAPKKAASHRALDDISESIKELQFYRNNIFKKKIDEKKRKIIENGENEKTVS

SEQ ID NO: 16191 - protein, 3037 aa, Homo sapiens
MHLHQVLTGAVNPGDNCYSVGSVGDVPFTAYGSGCDIVILANDFECVQIIPGAKHGNIQVSCVECSNQQGRIAASYGNAVCIFEPLGINSHKRNCQLKCQWLKTGQFFLSSVTYNLAWDPQDNRLLTATDSIQLWAPPGDDILEEEEEIDNTVPPVLNDWKCVWQCKTSVSVHLMEWSPDGEYFATAGKDDCLLKVWYPMTGWKSSIIPQDHHEVKRRQSSTQFSFVYLAHPRAVTGFSWRKTSKYMPRGSVCNVLLTSCHDGVCRLWAETLLPEDCLLGEQICETTTSSIASSLSHAGRHKDRIQHALETIHHLKNLRKGQRRSSVLVTHAELMPDQTAMHEVQRHISHHANALCHFHIAASINPATDIPNVLVGTAFNVDDGNGGFVVHWLNNKEFHFTSSTEVFMHQLRKLSDKQVDHENDDADREDEEHSQEDRERGLHMKLDHDLSLDRESEAGTGSSEHEDGEREGSPRTYSRLSVPMPLPTVLLDRKIETLLTEWNKNPDMLFTIHPVDGTFLVWHVKYLDEYNPGIFRQVQVSFSSRIPVAFPSGDASSLSKNIMMYACINATKDSHHTLLHQEGMSVGSPHGSQPHSRSHSTHMNILAPTVMMISKHIDGSLNQWAVTFADKSAFTTVLTVSHKFRYCGHRFHLNDLACHSVLPLLLTSSHHNALLTPELDCQWDSDNKLSRLMDPVKHIKGSSKQPLRNAATRTFHDPNAIYSELILWRVDPIGPLSYTGGVSELARINSLHTSAFSNVAWLPTLIPSYCLGTYCNSASACFVASDGKNLRLYQAVVDARKLLDELSDPESSKLIGEVFNIVSQQSTARPGCIIELDAITNQCGSNTQLLHVFQEDFIIGYKPHKEDMEKKETEIFFQPSQGYRPPPFSEKFFLVVIEKDSNNNSILHMWHLHLKSVQACLAKASEGASSESLLSVPGQKNVDSSPETSPSVSPMPHSSSIANLQTASKLILSSRLVYSQPLDLPESVEVIRATPSAGHLSSSSIYPVCLAPYLVVTTCSDNKVRFWKCCMEANPECNKSDEKEIYHWKRWPLMNDEGEDNSSTVSIVGRPVAVSCSYTGRLAVAYKQPIHHNGFVSKEFSMHVCIFECESTGGSEWVLEQTIHLDDLVKVGSVLDSRVSVDSNLFVYSKSDALLSKDRYLIPNIKHLVHLDWVSKEDGSHILTVGVGANIFMYGRLSGIVTEQTNSKDGVAVITLPLGGSIKQGVKSRWVLLRSIDLVSSVDGTPSLPVSLSWVRDGILVVGMDCEMHVYAQWKHAVKFGDTEADSSNAEEAAMQDHSTFKSNMLARKSVVEGTAISDDVFCSPTVIQDGGLFEAAHVLSPTLPQYHPTQLLELMDLGKVRRAKAILSHLVKCIAGEVAIVRDPDAGEGTKRHLSRTISVSGSTAKETVTVGKDGTRDYTEIDSIPPLPLYALLAADQDTSYRISEESTKIPQSYEDQTVSQPEDQYSELFQIQDIPTDDIDLEPEKRENKSKVINLSQYGPAYFGQEHARVLSSHLMHSSLPGLTRLEQMFLVALADTVATTSTELDESRDKSCSGRDTLDECGLRYLLAMRLHTCLLTSLPPLYRVQLLHQGVSTCHFAWAFHSEAEEELINMIPAIQRGDPQWSELRAMGIGWWVRNINTLRRCIEKVAKASFQRNNDALDAALFYLSMKKKAVVWGLFRSQHDEKMTTFFSHNFNEDRWRKAALKNAFSLLGKQRFEQSAAFFLLAGSLKDAIEVCLEKMEDIQLAMVIARLYESEFETSSTYISILNQKILGCQKDGSGFSCKRLHPDPFLRSLAYWVMKDYTRALDTLLEQTPKEDDEHQVIIKSCNPVAFSFYNYLRTHPLLIRRNLASPEGTLATLGLKTEKNFVDKINLIERKLFFTTANAHFKVGCPVLALEVLSKIPKVTKTSALSAKKDQPDFISHRMDDVPSHSKALSDGNGSSGIEWSNVTSSQYDWSQPIVKVDEEPLNLDWGEDHDSALDEEEDDAVGLVMKSTDAREKDKQSDQKASDPNMLLTPQEEDDPEGDTEVDVIAEQLKFRACLKILMTELRTLATGYEVDGGKLRFQLYNWLEKEIAALHEICNHESVIKEYSSKTYSKVESDLLDQEEMVDKPDIGSYERHQIERRRLQAKREHAERRKSWLQKNQDLLRVFLSYCSLHGAQGGGLASVRMELKFLLQESQQETTVKQLQSPLPLPTTLPLLSASIASTKTVIANPVLYLNNHIHDILYTIVQMKTPPHPSIEDVKVHTLHSLAASLSASIYQALCDSHSYSSQTEGNQFTGMAYQGLLLSDRRRLRTESIEEHATPNSSPAQWPGVSSLINLLSSAQDEDQPKLNILLCEAVVAVYLSLLIHALATNSSSELFRLAAHPLNNRMWAAVFGGGVKLVVKPRRQSENISAPPVLSEDIDKHRRRFNMRMLVPGRPVKDATPPPVPAERPSYKEKFIPPELSMWDYFVAKPFLPLSDSGVIYDSDESIHSDEEDDAFFSDTQIQEHQDPNSYSWALLHLTMVKLALHNVKNFFPIAGLEFSELPVTSPLGIAVIKNLENWEQILQEKMDQFEGPPPNYINTYPTDLSVGAGPAILRNKAMLEPENTPFKSRDSSAFPVKRLWHFLVKQEVLQETFIRYIFTKKRKQSEVEADLGYPGGKAKVIHKESDMIMAFSVNKANCNEIVLASTHDVQELDVTSLLACQSYIWIGEEYDRESKSSDDVDYRGSTTTLYQPSATSYSASQVHPPSSLPWLGTGQTSTGASVLMKRNLHNVKRMTSHPVHQYYLTGAQDGSVRMFEWTRPQQLVCFRQAGNARVTRLYFNSQGNKCGVADGEGFLSIWQVNQTASNPKPYMSWQCHSKATSDFAFITSSSLVATSGHSNDNRNVCLWDTLISPGNSLIHGFTCHDHGATVLQYAPKQQLLISGGRKGHVCIFDIRQRQLIHTFQAHDSAIKALALDPYEEYFTTGSAEGNIKVWRLTGHGLIHSFKSEHAKQSIFRNIGAGVMQIDIIQGNRLFSCGADGTLKTRVLPNAFNIPNRILDIL

SEQ ID NO: 16192 - protein, 270 aa, Homo sapiens [sequence omitted]

SEQ ID NO: 16193 - protein, 303 aa, Homo sapiens
MKFLLTTAFLILISLWVEEAYSKEKSSKKGKGKKKQYLCPSQQSAEDLARVPANSTSNILNRLLVSYDPRIRPNFKGIPVDVVVNIFINSFGSIQETTMDYRVNIFLRQKWNDPRLKLPSDFRGSDALTVDPTMYKCLWKPDLFFANEKSANFHDVTQENILLFIFRDGDVLVSMRLSITLSCPLDLTLFPMDTQRCKMQLESFGYTTDDLRFIWQSGDPVQLEKIALPQFDIKKEDIEYGNCTKYYKGTGYYTCVEVIFTLRRQVGFYMMGVYAPTLLIVVLSWLSFWINPDASAARVPLGW

SEQ ID NO: 16194 - protein, 299 aa, Homo sapiens
MAQNLKDLAGRLPAGPRGMGTALKLLLGAGAVAYGVRESVFTVEGGHRAIFFNRIGGVQQDTILAEGLHFRIPWFQYPIIYDIRARPRKISSPTGSKDLQMVNISLRVLSRPNAQELPSMYQRLGLDYEERVLPSIVNEVLKSVVAKFNASQLITQRAQVSLLIRRELTERAKDFSLILDDVAITELSFSREYTAAVEAKQVAQQEAQRAQFLVEKAKQEQRQKIVQAEGEAEAAKMLGEALSKNPGYIKLRKIRAAQNISKTIATSQNRIYLTADNLVLNLQDESFTRGSDSLIKGKK

SEQ ID NO: 16195 - protein, 440 aa, Homo sapiens
MWKTQSLRKCSGRGRANLAQPTQRLRMVWRRKRKPAGRQQPNPLPHLWRRTPQTRRKSLAYAHIFSPNLCFIQDQESKSSFDGASLASDKNDCKTESKNDPKTERKKSSSSSQYKANMHFHKLFLSVPTEEPLKQSFTCALQKEILYQGKLFVSENWICFHSKVFGKDTKISIPAFSVTLIKKTKTALLVPNALIIATVTDRYIFVSLLSRDSTYKLLKSVCGHLENTSVGNSPNPSSAENSFRADRPSSLPLDFNDEFSDLDGVVQQRRQDMEGYSSSGSQTPESENSRDFHATESQTVLNVSKGEAKPTRADAHVNRVPEGKAKSLPVQGLSETVGILHKVKSQKCPMLHHILIFYAIVVCALIISTFYMRYRINTLEEQLGLLTSIVDTHNTEQAAPSGLRSQVQFNVEVLCQELTANIVKLEKIQNNLQKLLENGD

SEQ ID NO: 16196 - protein, 209 aa, Homo sapiens
MQRRLVQQWSVAVFLLSYAVPSCGRSVEGLSRRLKRAVSEHQLLHDKGKSIQDLRRRFFLHHLIAEIHTAEIRATSEVSPNSKPSPNTKNHPVRFGSDDEGRYLTQETNKVETYKEQPLKTPGKKKKGKPGKRKEQEKKKRRTRSAWLDSGVTGSGLEGDHLSDTSTTSLELDSRTALLWGLKKKKENNRRTHHMQLMISLFKSPLLLL

SEQ ID NO: 16197 - protein, 287 aa, Homo sapiens
MPALCLVLCWFQGLLGEVWNAVDSGHCLQTYSLHTEAVRAARWAPCGRRILSGGFDFALHLTDLETGTQLFSGRSDFRITTLKFHPKDHNIFLCGGFSSEMKAWDIRTGKVMRSYKATIQQTLDILFLREGSEFLSSTDASTRDSADRTIIAWDFRTSAKISNQIFHERFTCPSLALHPREPVFLAQTNGNYLALFSTVWPYRMSRRRRYEGHKVEGYSVGCECSPGGDLLVTGSADGRVLMYSFRTASRACTLQGHTQACVGTTYHPVLPSVLATCSWGGDMKIWH

SEQ ID NO: 16198 - protein, 492 aa, Homo sapiens
MNRGGGSPSAAANYLLCTNCRKVLRKDKRIRVSQPLTRGPSAFIPEKEVVQANTVDERTNFLVEEYSTSGRLDNITQVMSLHTQYLESFLRSQFYMLRMDGPLPLPYRHYIAIMAAARHQCSYLINMHVDEFLKTGGIAEWLNGLEYVPQRLKNLNEINKLLAHRPWLITKEHIQKLVKTGENNWSLPELVHAVVLLAHYHALASFVFGSGINPERDPEISNGFRLISVNNFCVCDLANDNNIENASLSGSNFGIVDSLSELEALMERMKRLQEEREDEEASQEEMSTRFEKEKKESLFVVSGDTFHSFPHSDFEDDMIITSDVSRYIEDPGFGYEDFARRGEEHLPTFRAQDYTWENHGFSLVNRLYSDIGHLLDEKFRMVYNLTYNTMATHEDVDTTMLRRALFNYVHCMFGIRYDDYDYGEVNQLLERSLKVYIKTVTCYPERTTKRMYDSYWRQFKHSEKVHVNLLLMEARMQAELLYALRAITRHLT

SEQ ID NO: 16199 - protein, 5335 aa, Homo sapiens
MLVIWILTLALRLCASVTTVTPGSTVNTSIGGNTTSASTPSSSDPFTTFSDYGVSVTFITGSTATKHFLDSSTNSGHSEESTVSHSGPGATGTTLFPSHSATSVFVGEPKTSPITSASMETTALPGSTTTAGLSEKSTTFYSSPRSPDRTLSPARTTSSGVSEKSTTSHSRPGPTHTIAFPDSTTMPGVSQESTASHSIPGSTDTTLSPGTTTPSSLGPESTTFHSSPGYTKTTRLPDNTTTSGLLEASTPVHSSTGSPHTTLSPSSSTTHEGEPTTFQSWPSSKDTSPAPSGTTSAFVKLSTTYHSSPSSTPTTHFSASSTTLGHSEESTPVHSSPVATATTPPPARSATSGHVEESTAYHRSPGSTQTMHFPESSTTSGHSEESATFHGSTTHTKSSTPSTTAALAHTSYHSSLGSTETTHFRDSSTISGRSEESKASHSSPDAMATTVLPAGSTPSVLVGDSTPSPISSGSMETTALPGSTTKPGLSEKSTTFYSSPRSPDTTHLPASMTSSGVSEESTTSHSRPGSTHTTAFPGSTTMPGLSQESTASHSSPGPTDTTLSPGSTTASSLGPEYTTFHSRPGSTETTLLPDNTTASGLLEASMPVHSSTRSPHTTLSPAGSTTRQGESTTFHSWPSSKDTRPAPPTTTSAFVEPSTTSHGSPSSIPTTHISARSTTSGLVEESTTYHSSPGSTQTMHFPESDTTSGRGEESTTSHSSTTHTISSAPSTTSALVEEPTSYHSSPGSTATTHFPDSSTTSGRSEESTASHSSQDATGTIVLPARSTTSVLLGESTTSPISSGSMETTALPGSTTTPGLSERSTTFHSSPRSPATTLSPASTTSSGVSEESTTSRSRPGSTHTTAFPDSTTTPGLSRHSTTSHSSPGSTDTTLLPASTTTSGPSQESTTSHSSSGSTDTALSPGSTTALSFGQESTTFHSNPGSTHTTLFPDSTTSSGIVEASTRVHSSTGSPRTTLSPASSTSPGLQGESTAFQTHPASTHTTPSPPSTATAPVEESTTYHRSPGSTPTTHFPASSTTSGHSEKSTIFHSSPDASGTTPSSAHSTTSGRGESTTSRISPGSTEITTLPGSTTTPGLSEASTTFYSSPRSPTTTLSPASMTSLGVGEESTTSRSQPGSTHSTVSPASTTTPGLSEESTTVYSSSRGSTETTVFPHSTTTSVHGEEPTTFHSRPASTHTTLFTEDSTTSGLTEESTAFPGSPASTQTGLPATLTTADLGEESTTFPSSSGSTGTKLSPARSTTSGLVGESTPSRLSPSSTETTTLPGSPTTPSLSEKSTTFYTSPRSPDATLSPATTTSSGVSEESSTSHSQPGSTHTTAFPDSTTTSDLSQEPTTSHSSQGSTEATLSPGSTTASSLGQQSTTFHSSPGDTETTLLPDDTITSGLVEASTPTHSSTGSLHTTLTPASSTSAGLQEESTTFQSWPSSSDTTPSPPGTTAAPVEVSTTYHSRPSSTPTTHFSASSTTLGRSEESTTVHSSPGATGTALFPTRSATSVLVGEPTTSPISSGSTETTALPGSTTTAGLSEKSTTFYSSPRSPDTTLSPASTTSSGVSEESTTSHSRPGSTHTTAFPGSTTMPGVSQESTASHSSPGSTDTTLSPGSTTASSLGPESTTFHSSPGSTETTLLPDNTTASGLLEASTPVHSSTGSPHTTLSPAGSTTRQGESTTFQSWPSSKDTMPAPPTTTSAFVELSTTSHGSPSSTPTTHFSASSTTLGRSEESTTVHSSPVATATTPSPARSTTSGLVEESTAYHSSPGSTQTMHFPESSTASGRSEESRTSHSSTTHTISSPPSTTSALVEEPTSYHSSPGSTATTHFPDSSTTSGRSEESTASHSSQDATGTIVLPARSTTSVLLGESTTSPISSGSMETTALPGSTTTPGLSEKSTTFHSSPRSPATTLSPASTTSSGVSEESTTSHSRPGSTHTTAFPDSTTTPGLSRHSTTSHSSPGSTDTTLLPASTTTSGPSQESTTSHSSPGSTDTALSPGSTTALSFGQESTTFHSSPGSTHTTLFPDSTTSSGIVEASTRVHSSTGSPRTTLSPASSTSPGLQGESTAFQTHPASTHTTPSPPSTATAPVEESTTYHRSPGSTPTTHFPASSTTSGHSEKSTIFHSSPDASGTTPSSAHSTTSGRGESTTSRISPGSTEITTLPGSTTTPGLSEASTTFYSSPRSPTTTLSPASMTSLGVGEESTTSRSQPGSTHSTVSPASTTTPGLSEESTTVYSSSPGSTETTVFPRTPTTSVRGEEPTTFHSRPASTHTTLFTEDSTTSGLTEESTAFPGSPASTQTGLPATLTTADLGEESTTFPSSSGSTGTTLSPARSTTSGLVGESTPSRLSPSSTETTTLPGSPTTPSLSEKSTTFYTSPRSPDATLSPATTTSSGVSEESSTSHSQPGSTHTTAFPDSTTTPGLSRHSTTSHSSPGSTDTTLLPASTTTSGPSQESTTSHSSPGSTDTALSPGSTTALSFGQESTTFHSSPGSTHTTLFPDSTTSSGIVEASTRVHSSTGSPRTTLSPASSTSPGLQGESTTFQTHPASTHTTPSPPSTATAPVEESTTYHRSPGSTPTTHFPASSTTSGHSEKSTIFHSSPDASGTTPSSAHSTTSGRGESTTSRISPGSTEITTLPGSTTTPGLSEASTTFYSSPRSPTTTLSPASMTSLGVGEESTTSRSQPGSTHSTVSPASTTTPGLSEESTTVYSSSPGSTETTVFPRSTTTSVRGEEPTTFHSRPASTHTTLFTEDSTTSGLTEESTAFPGSPASTQTGLPATLTTADLGEESTTFPSSSGSTGTTLSPARSTTSGLVGESTPSRLSPSSTETTTLPGSPTTPSLSEKSTTFYTSPRSPDATLSPATTTSSGVSEESSTSHSQPGSTHTTAFPDSTTTSGLSQEPTASHSSQGSTEATLSPGSTTASSLGQQSTTFHSSPGDTETTLLPDDTITSGLVEASTPTHSSTGSLHTTLTPASSTSAGLQEESTTFQSWPSSSDTTPSPPGTTAAPVEVSTTYHSRPSSTPTTHFSASSTTLGRSEESTTVHSSPGATGTALFPTRSATSVLVGEPTTSPISSGSTETTALPGSTTTAGLSEKSTTFYSSPRSPDTTLSPASTTSSGVSEESTTSHSRPGSTHTTAFPGSTTMPGVSQESTASHSSPGSTDTTLSPGSTTASSLGPESTTFHSGPGSTETTLLPDNTTASGLLEASTPVHSSTGSPHTTLSPAGSTTRQGESTTFQSWPNSKDTTPAPPTTTSAFVELSTTSHGSPSSTPTTHFSASSTTLGRSEESTTVHSSPVATATTPSPARSTTSGLVEESTTYHSSPGSTQTMHFPESDTTSGRGEESTTSHSSTTHTISSAPSTTSALVEEPTSYHSSPGSTATTHFPDSSTTSGRSEESTASHSSQDATGTIVLPARSTTSVLLGESTTSPISSGSMETTALPGSTTTPGLSEKSTTFHSSPRSPATTLSPASTTSSGVSEESTTSHSRPGSTHTTAFPDSTTTPGLSRHSTTSHSSPGSTDTTLLPASTTTSGSSQESTTSHSSSGSTDTALSPGSTTALSFGQESTTFHSSPGSTHTTLFPDSTTSSGIVEASTRVHSSTGSPRTTLSPASSTSPGLQGESTAFQTHPASTHTTPSPPSTATAPVEESTTYHRSPGSTPTTHFPASSTTSGHSEKSTIFHSSPDASGTTPSSAHSTTSGRGESTTSRISPGSTEITTLPGSTTTPGLSEASTTFYSSPRSPTTTLSPASMTSLGVGEESTTSRSQPGSTHSTVSPASTTTPGLSEESTTVYSSSPGSTETTVFPRSTTTSVRREEPTTFHSRPASTHTTLFTEDSTTSGLTEESTAFPGSPASTQTGLPATLTTADLGEESTTFPSSSGSTGTKLSPARSTTSGLVGESTPSRLSPSSTETTTLPGSPTTPSLSEKSTTFYTSPRSPDATLSPATTTSSGVSEESSTSHSQPGSTHTTAFPDSTTTSGLSQEPTTSHSSQGSTEATLSPGSTTASSLGQQSTTFHSSPGDTETTLLPDDTITSGLVEASTPTHSSTGSLHTTLTPASSTSTGLQEESTTFQSWPSSSDTTPSPPSTTAVPVEVSTTYHSRPSSTPTTHFSASSTTLGRSEESTTVHSSPGATGTALFPTRSATSVLVGEPTTSPISSGSTETTALPGSTTTAGLSEKSTTFYSSPRSPDTTLSPASTTSSGVSEESTTSHSRPGSMHTTAFPSSTTMPGVSQESTASHSSPGSTDTTLSPGSTTASSLGPESTTFHSSPGSTETTLLPDNTTASGLLEASTPVHSSTGSPHTTLSPAGSTTRQGESTTFQSWPNSKDTTPAPPTTTSAFVELSTTSHGSPSSTPTTHFSASSTTLGRSEESTTVHSSPVATATTPSPARSTTSGLVEESTTYHSSPGSTQTMHFPESNTTSGRGEESTTSHSSTTHTISSAPSTTSALVEEPTSYHSSPGSTATTHFPDSSTTSGRSEESTASHSSQDATGTIVLPARSTTSVLLGESTTSPISSGSMETTALPGSTTTPGLSEKSTTFHSSPSSTPTTHFSASSTTLGRSEESTTVHSSPVATATTPSPARSTTSGLVEESTAYHSSPGSTQTMHFPESSTASGRSEESRTSHSSTTHTISSPPSTTSALVEEPTSYHSSPGSIATTHFPESSTTSGRSEESTASHSSPDTNGITPLPAHFTTSGRIAESTTFYISPGSMETTLASTATTPGLSAKSTILYSSSRSPDQTLSPASMTSSSISGEPTSLYSQAESTHTTAFPASTTTSGLSQESTTFHSKPGSTETTLSPGSITTSSFAQEFTTPHSQPGSALSTVSPASTTVPGLSEESTTFYSSPGSTETTAFSHSNTMSIHSQQSTPFPDSPGFTHTVLPATLTTTDIGQESTAFHSSSDATGTTPLPARSTASDLVGEPTTFYISPSPTYTTLFPASSSTSGLTEESTTFHTSPSFTSTIVSTESLETLAPGLCQEGQIWNGKQCVCPQGYVGYQCLSPLESFPVETPEKLNATLGMTVKVTYRNFTEKMNDASSQEYQNFSTLFKNRMDVVLKGDNLPQYRGVNIRRLLNGSIVVKNDVILEADYTLEYEELFENLAEIVKAKIMNETRTTLLDPDSCRKAILCYSEEDTFVDSSVTPGFDFQEQCTQKAAEGYTQFYYVDVLDGKLACVNKCTKGTKSQMNCNLGTCQLQRSGPRCLCPNTNTHWYWGETCEFNIAKSLVYGIVGAVMAVLLLALIILIILFSLSQRKRHREQYDVPQEWRKEGTPGIFQKTAIWEDQNLRESRFGLENAYNNFRPTLETVDSGTELHIQRPEMVASTV

SEQ ID NO: 16200 - protein, 409 aa, Homo sapiens
MSPHGDGRGQAQGRAVRVGLRRSGGIRGGVAVFAAVAAVFTFTLPPSVPGGDSGELITAAHELGVAHPPGYPLFTLVAKLAITLFPFGSIAYRVNLLCGLFGAVAASLLFFTVFRLSGSSAGGILAAGVFSFSRLTWQWSIAAEVFSLNNLFVGLLMALTVHFEEAATAKERSKVAKIGAFCCGLSLCNQHTIILYVLCIIPWILFQLLKKKELSLGSLLKLSLYFSAGLLPYVHLPISSYLNHARWTWGDQTTLQGFLTHFLREEYGTFSLAKSEIGSSMSEILLSQVTNMRTELSFNIQALAVCANICLATKDRQNPSLVWLFTGMFCIYSLFFAWRANLDISKPLFMGVVERFWMQSNAVVAVLAGIGLAAVVSETNRVLNSNGLQCLEWLSATLFVVYQIYSNYR

SEQ ID NO: 16201 - protein, 591 aa, Homo sapiens
MPKGRQKVPHLDAPLGLPTCLWLELAGLFLLVPWVMGLAGTGGPDGQGTGGPSWAVHLESLEGDGEEETLEQQADALAQAAGLVNAGRIGELQGHYLFVQPAGHRPALEVEAIRQQVEAVLAGHEAVRWHSEQRLLRRAKRSVHFNDPKYPQQWHLNNRRSPGRDINVTGVWERNVTGRGVTVVVVDDGVEHTIQDIAPNYSPEGSYDLNSNDPDPMPHPDVENGNHHGTRCAGEIAAVPNNSFCAVGVAYGSRIAGIRVLDGPLTDSMEAVAFNKHYQINDIYSCSWGPDDDGKTVDGPHQLGKAALQHGVIAGRQGFGSIFVVASGNGGQHNDNCNYDGYANSIYTVTIGAVDEEGRMPFYAEECASMLAVTFSGGDKMLRSIVTTDWDLQKGTGCTEGHTGTSAAAPLAAGMIALMLQVRPCLTWRDVQHIIVFTATRYEDRRAEWVTNEAGFSHSHQHGFGLLNAWRLVNAAKIWTSVPYLASYVSPVLKENKAIPQSPRSLEVLWNVSRMDLEMSGLKTLEHVAVTVSITHPRRGSLELKLFCPSGMMSLIGAPRSMDSWLCVECSRHQGQTKAVRECHEWKIPAR

SEQ ID NO: 16202 - protein, 2134 aa, Homo sapiens
MSGGAAEKQSSTPGSLFLSPPAPAPKNGSSSDSSVGEKLGAAAADAVTGRTEEYRRRRHTMDKDSRGAAATTTTTEHRFFRRSVICDSNATALELPGLPLSLPQPSIPAAVPQSAPPEPHREETVTATATSQVAQQPPAAAAPGEQAVAGPAPSTVPSSTSKDRPVSQPSLVGSKEEPPPARSGSGGGSAKEPQEERSQQQDDIEELETKAVGMSNDGRFLKFDIEIGRGSFKTVYKGLDTETTVEVAWCELQDRKLTKSERQRFKEEAEMLKGLQHPNIVRFYDSWESTVKGKKCIVLVTELMTSGTLKTYLKRFKVMKIKVLRSWCRQILKGLQFLHTRTPPIIHRDLKCDNIFITGPTGSVKIGDLGLATLKRASFAKSVIGTPEFMAPEMYEEKYDESVDVYAFGMCMLEMATSEYPYSECQNAAQIYRRVTSGVKPASFDKVAIPEVKEIIEGCIRQNKDERYSIKDLLNHAFFQEETGVRVELAEEDDGEKIAIKLWLRIEDIKKLKGKYKDNEAIEFSFDLERDVPEDVAQEMVESGYVCEGDHKTMAKAIKDRVSLIKRKREQRQLVREEQEKKKQEESSLKQQVEQSSASQTGIKQLPSASTGIPTASTTSASVSTQVEPEEPEADQHQQLQYQQPSISVLSDGTVDSGQGSSVFTESRVSSQQTVSYGSQHEQAHSTGTVPGHIPSTVQAQSQPHGVYPPSSVAQGQSQGQPSSSSLTGVSSSQPIQHPQQQGIQQTAPPQQTVQYSLSQTSTSSEATTAQPVSQPQAPQVLPQVSAGKQSTQGVSQVAPAEPVAVAQTQATQPTTLASSVDSAHSDVASGMSDGNENVPSSSGRHEGRTTKRHYRKSVRSRSRHEKTSRPKLRILNVSNKGDRVVECQLETHNRKMVTFKFDLDGDNPEEIATIMVNNDFILAIERESFVDQVREIIEKADEMLSEDVSVEPEGDQGLESLQGKDDYGFSGSQKLEGEFKQPIPASSMPQQIGIPTSSLTQVVHSAGRRFIVSPVPESRLRESKVFPSEITDTVAASTAQSPGMNLSHSASSLSLQQAFSELRRAQMTEGPNTAPPNFSHTGPTFPVVPPFLSSIAGVPTTAAATAPVPATSSPPNDISTSVIQSEVTVPTEEGIAGVATSTGVVTSGGLPIPPVSESPVLSSVVSSITIPAVVSISTTSPSLQVPTSTSEIVVSSTALYPSVTVSATSASAGGSTATPGPKPPAVVSQQAAGSTTVGATLTSVSTTTSFPSTASQLCIQLSSSTSTPTLAETVVVSAHSLDKTSHSSTTGLAFSLSAPSSSSSPGAGVSSYISQPGGLHPLVIPSVIASTPILPQAAGPTSTPLLPQVPSIPPLVQPVANVPAVQQTLIHSQPQPALLPNQPHTHCPEVDSDTQPKAPGIDDIKTLEEKLRSLFSEHSSSGAQHASVSLETSLVIESTVTPGIPTTAVAPSKLLTSTTSTCLPPTNLPLGTVALPVTPVVTPGQVSTPVSTTTSGVKPGTAPSKPPLTKAPVLPVGTELPAGTLPSEQLPPFPGPSLTQSQQPLEDLDAQLRRTLSPEMITVTSAVGPVSMAAPTAITEAGTQPQKVSQVKEGPVLATSSGAGVFKMGRFQVSVAADGAQKEGKNKSEDAKSVHFESSTSESSVLSSSSPESTLVKPEPNGITIPGISSDVPESAHKTTASEAKSDTGQPTKVGRFQVTTTANKVGRFSVSKTEDKITDTKKEGPVASPPFMDLEQAVLPAVIPKKEKPELSEPSHLNGPSSDPEAAFLSRDVDDGSGSPHSPHQLSSKSLPSQNLSQSLSNSFNSSYMSSDNESDIEDEDLKLELRRLRDKHLKEIQDLQSRQKHEIESLYTKLGKVPPAVIIPPAAPLSGRRRRPTKSKGSKSSRSSSLGNKSPQLSGNLSGQSAASVLHPQQTLHPPGNIPESGQNQLLQPLKPSPSSDNLYSAFTSDGAISVPSLSAPGQGTSSTNTVGATVNSQAAQAQPPAMTSSRKGTFTDDLHKLVDNWARDAMNLSGRRGSKGHMNYEGPGMARKFSAPGQLCISMTSNLGGSAPISAASATSLGHFTKSMCPPQQYGFPATPFGAQWSGTGGPAPQPLGQFQPVGTASLQNFNISNLQKSISNPPGSNLRTT

SEQ ID NO: 16203 - protein, 247 aa, Homo sapiens
MDGLKDGIILCEFINKLQPGSVKKINESTQNWHQLENIGNFIKAITKYGVKPHDIFEANDLFENTNHTQVQSTLLALASMAKTKGNKVNVGVKYAEKQERKFEPGKLREGRNIIGLQMGTNKFASQQGMTAYGTRRHLYDPKLGTDQPLDQATISLQMGTNKGASQAGMTAPGTKRQIFEPGLGMEHCDTLNVSLQMGSNKGASQRGMTVYGLPRQVYDPKYCLTPEYPELGEPAHNHHAHNYYNSA

SEQ ID NO: 16204 - protein, 813 aa, Homo sapiens
MPYIDESPTMSPQLSARSQGGGDGVSPTPPEGLAPGVEAGKGLEMRKLVLSGFLASEEIYINQLEALLLPMKPLKATATTSQPVLTIQQIETIFYKIQDIYEIHKEFYDNLCPKVQQWDSQVTMGHLFQKLASQLGVYKAFVDNYKVALETAEKCSQSNNQFQKISEELKVKGPKDSKDSHTSVTMEALLYKPIDRVTRSTLVLHDLLKHTPVDHPDYPLLQDALRISQNFLSSINEDIDPRRTAVTTPKGETRQLVKDGFLVEVSESSRKLRHVFLFTDVLLCAKLKKTSAGKHQQYDCKWYIPLADLVFPSPEESEASPQVHPFPDHELEDMKMKISALKSEIQKEKANKGQSRAIERLKKKMFENEFLLLLNSPTIPFRIHNRNGKSYLFLLSSDYERSEWREAIQKLQKKDLQAFVLSSVELQVLTGSCFKLRTVHNIPVTSNKDDDESPGLYGFLHVIVHSAKGFKQSANLYCTLEVDSFGYFVSKAKTRVFRDTAEPKWDEEFEIELEGSQSLRILCYEKCYDKTKVNKDNNEIVDKIMGKGQIQLDPQTVETKNWHTDVIEMNGIKVEFSMKFTSRDMSLKRTPSKKQTGVFGVKISVVTKRERSKVPYIVRQCVEEVEKRGIEEVGIYRISGVATDIQALKAVFDANNKDILLMLSDMDINAIAGTLKLYFRELPEPLLTDRLYPAFMEGIALSDPAAKENCMMHLLRSLPDPNLITFLFLLEHLKRVAEKEPINKMSLHNLATVFGPTLLRPSEVESKAHLTSAADIWSHDVMAQVQVLLYYLQHPPISFAELKRNTLYFSTDV

SEQ ID NO: 16205 - protein, 407 aa, Homo sapiens
MIRNGRGAAGGAEQPGPGGRRAVRVWCDGCYDMVHYGHSNQLRQARAMGDYLIVGVHTDEEIAKHKGPPVFTQEERYKMVQAIKWVDEVVPAAPYVTTLETLDKYNCDFCVHGNDITLTVDGRDTYEEVKQAGRYRECKRTQGVSTTDLVGRMLLVTKAHHSSQEMSSEYREYADSFGKPPHPIPAGDILSSEGCSQCPGGRNPWTGVSQFLQTSQKIIQFASGKEPQPGETVIYVAGAFDLFHIGHVDFLEKVHRLAERPYIIAGLHFDQEVNHYKGKNYPIMNLHERTLSVLACRYVSEVVIGAPYAVTAELLSHFKVDLVCHGKTEIIPDRDGSDPYQEPKRRGIFRQIDSGSNLTTDLIVQRIITNRLEYEARNQKKEAKELAFLEAARQQAAQPLGERDGDF

SEQ ID NO: 16206 - protein, 382 aa, Homo sapiens
MVSQALRLLCLLLGLQGCLAADGDQCASSPCQNGGSCKDQLQSYICFCLPAFEGRNCETHKDDQLICVNENGGCEQYCSDHTGTKRSCRCHEGYSLLADGVSCTPTVEYPCGKIPILEKRNASKPQGRIVGGKVCPKGECPWQVLLLVNGAQLCGGTLINTIWVVSAAHCFDKIKNWRNLIAVLGEHDLSEHDGDEQSRRVAQVIIPSTYVPGTTNHDIALLRLHQPVVLTDHVVPLCLPERTFSERTLAFVRFSLVSGWGQLLDRGATALELMVLNVPRLMTQDCLQQSRKVGDSPNITEYMFCAGYSDGSKDSCKGDSGGPHATHYRGTWYLTGIVSWGQGCATVGHFGVYTRVSQYIEWLQKLMRSEPRPGVLLRAPFP

SEQ ID NO: 16207 - protein, 298 aa, Homo sapiens
MGLSTVPDLLLPLVLLELLVGIYPSGVIGLVPHLGDREKRDSVCPQGKYIHPQNNSICCTKCHKGTYLYNDCPGPGQDTDCRECESGSFTASENHLRHCLSCSKCRKEMGQVEISSCTVDRDTVCGCRKNQYRHYWSENLFQCFNCSLCLNGTVHLSCQEKQNTVCTCHAGFFLRENECVSCSNCKKSLECTKLCLPQIENVKGTEDSGTTVLLPLVIFFGLCLLSLLFIGLMYRYQRWKSKLYSIGEWGLWEGEGAGGGEGGHGWVRWTCVEGGEECPLSSYRWGLWAEGGPGWLGR

SEQ ID NO: 16208 - protein, 268 aa, Homo sapiens
MGSAKSVPVTPARPPPHNKHLARVADPRSPSAGILRTPIQVESSPQPGLPAGEQLEGLKHAQDSDPRSPTLGIARTPMKTSSGDPPSPLVKQLSEVFETEDSKSNLPPEPVLPPEAPLSSELDLPLGTQLSVEEQMPPWNQTEFPSKQVFSKEEARQPTETPVASQSSDKPSRDPETPRSSGSMRNRWKPNSSKVLGRSPLTILQDDNSPGTLTLRQGKRPSPLSENVSELKEGAILGTGRLLKTGGRAWEQGQDHDKENQHFPLVES

SEQ ID NO: 16209 - protein, 865 aa, Homo sapiens
MTTESGSDSESKPDQEAEPQEAAGAQGRAGAPVPEPPKEEQQQALEQFAAAAAHSTPVRREVTDKEQEFAARAAKQLEYQQLEDDKLSQKSSSSKLSRSPLKIVKKPKSMQCKVILLDGSEYTCDVEKRSRGQVLFDKVCEHLNLLEKDYFGLTYRDAENQKNWLDPAKEIKKQVRSGAWHFSFNVKFYPPDPAQLSEDITRYYLCLQLRDDIVSGRLPCSFVTLALLGSYTVQSELGDYDPDECGSDYISEFRFAPNHTKELEDKVIELHKSHRGMTPAEAEMHFLENAKKLSMYGVDLHHAKDSEGVEIMLGVCASGLLIYRDRLRINRFAWPKVLKISYKRNNFYIKIRPGEFEQFESTIGFKLPNHRAAKRLWKVCVEHHTFFRLLLPEAPPKKFLTLGSKFRYSGRTQAQTRRASALIDRPAPYFERSSSKRYTMSRSLDGASVNENHEIYMKDSMSAAEVGTGQYATTKGISQTNLITTVTPEKKAEEERDEEEDKRRKGEEVTPISAIRHEGKTDSERTDTAADGETTATEELEKTQDDLMKHQTNISELKRTFLETSTDTAVTNEWEKRLSTSPVRLAARQEDAPMIEPLVPEEKMETKTESSGIETEPTVHHLPLSTEKVVQETVLVEERRVVHASGDASYSAGDSGDAAAQPAFTGIKGKEGSALTEGAKEEGGEEVAKAVLEQEETAAASRERQEEQSAAIHISETLEQKPHFESSTVKTETISFGSVSPGGVKLEISTKEVPVVHTETKTITYESSQVDPGTDLEPGVLMSAQTITSETTSTTTTTHITKTVKGGISETRIEKRIVITGDADIDHDQALAQAIKEAKEQHPDMSVTKVVVHKETEITPEDGED

SEQ ID NO: 16210 - protein, 296 aa, Homo sapiens
MQKGLKDNFADVQVSVVDCPDLTKEPFTFPVKGICGKTRIAEVGGVPYLLPLVNQKKVYDLNKIAKEIKLPGAFILGAGAGPFQTLGFNSEFMPVIQTESEHKPPVNGSYFAHVNPADGGCLLEKYSEKCHDFQCALLANLFASEGQPGKVIEVKAKRRTGPLNFVTCMRETLEKHYGNKPIGMGGTFIIQKGKVKSHIMPAEFSSCPLNSDEEVNKWLHFYEMKAPLVCLPVFVSRDPGFDLRLEHTHFFSRHGEGGHYHYDTTPDIVEYLGYFLPAEFLYRIDQPKETHSIGRD

SEQ ID NO: 16211 - protein, 133 aa, Homo sapiens
MFPFYSCWRTGLLLLLLAVAVRESWQTEEKTCDLVGEKGKESEKELALVKRLKPLFNKSFESTVGQGSDTYIYIFRVCREAGNHTSGAGLVQINKSNGKETVVGRLNETHIFNGSLHHWLLFMLLGGSYTSDW

SEQ ID NO: 16212 - protein, 224 aa, Homo sapiens
MDLRQFLMCLSLCTAFALSKPTEKKDRVHHEPQLSDKVHNDAQSFDYDHDAFLGAEEAKTFDQLTPEESKERLGKIVSKIDGDKDGFVTVDELKDWIKFAQKRWIYEDVERQWKGHDLNEDGLVSWEEYKNATYGYVLDDPDPDDGFNYKQMMVRDERRFKMADKDGDLIATKEEFTAFLHPEEYDYMKDIVVQETMEDIDKNADGFIDLEEYIGWQAYQGGDR

SEQ ID NO: 16213 - protein, 330 aa, Homo sapiens
MLLILLSVALLALSSAQNLNEDVSQEESPSLIAGNPQGPSPQGGNKPQGPPPPPGKPQGPPPQGGNKPQGPPPPGKPQGPPPQGDKSRSPRSPPGKPQGPPPQGGNQPQGPPPPPGKPQGPPPQGGNRPQGPPPPGKPQGPPPQGDKSRSPSPPGKPQGPPPQGGNQPQGPPPPPGKPQGPPPQGGKKPQGPPPPGKPQGPPPQGDKSRSSQSPPGKPQGPPPQGGNQPQGPPPPPGKPQGPPPQGGNKPQGPPPPGKPQGPPAQGGSKSQSARSPPGKPQGPPQQEGNNPQGPPPPAGGNPQQPQAPPAGQPQGPPRPPQGGRPSRPPQ

SEQ ID NO: 16214 - protein, 1203 aa, Homo sapiens
MDLRDFYLLAALIACLRLDSAIAQELIYTIREELPENVPIGNIPKDLNISHINAATGTSASLVYRLVSKAGDAPLVKVSSSTGEIFTTSNRIDREKLCAGASYAEENECFFELEVVILPNDFFRLIKIKIIVKDTNDNAPMFPSPVINISIPENTLINSRFPIPSATDPDTGFNGVQHYELLNGQSVFGLDIVETPEGEKWPQLIVQQNLDREQKDTYVMKIKVEDGGTPQKSSTAILQVTVSDVNDNRPVFKEGQVEVHIPENAPVGTSVIQLHATDADIGSNAEIRYIFGAQVAPATKRLFALNNTTGLITVQRSLDREETAIHKVTVLASDGSSTPARATVTINVTDVNDNPPNIDLRYIISPINGTVYLSEKDPVNTKIALITVSDKDTDVNGKVICFIEREVPFHLKAVYDNQYLLETSSLLDYEGTKEFSFKIVASDSGKPSLNQTALVRVKLEDENDNPPIFNQPVIELSVSENNRRGLYLTTISATDEDSGKNADIVYQLGPNASFFDLDRKTGVLTASRVFDREEQERFIFTVTARDNGTPPLQSQAAVIVTVLDENDNSPKFTHNHFQFFVSENLPKYSTVGVITVTDADAGENKAVTLSILNDNDNFVLDPYSGVIKSNVSFDREQQSSYTFDVKATDGGQPPRSSTAKVTINVMDVNDNSPVVISPPSNTSFKLVPLSAIPGSVVAEVFAVDVDTGMNAELKYTIVSGNNKGLFRIDPVTGNITLEEKPAPTDVGLHRLVVNISDLGYPKSLHTLVLVFLYVNDTAGNASYIYDLIRRTMETPLDRNIGDSSQPYQNEDYLTIMIAIIAGAMVVIVVIFVTVLVRCRHASRFKAAQRSKQGAEWMSPNQENKQNKKKKRKKRKSPKSSLLNFVTIEESKPDDAVHEPINGTISLPAELEEQSIGRFDWGPAPPTTFKPNSPDLAKHYKSASPQPAFHLKPDTPVSVKKHHVIQELPLDNTFVGGCDTLSKRSSTSSDHFSASECSSQGGFKTKGPLHTRQSQRRVTFHLPDGSQESCSDSGLGDHEPVGSGTLISHPLPLVQPQDEFYDQASPDKRTEADGNSDPNSDGPLGPRGLAEATEMCTQECLVLGHSDNCWMPPGLGPYQHPKSPLSTFAPQKEWVKKDKLVNGHTLTRAWKEDSNRNQFNDRKQYGSNEGHFNNGSHMTDIPLANLKSYKQAGGATESPKEHQL

SEQ ID NO: 16215 - protein, 52 aa, Homo sapiens
MQPRTPLVLCVLLSQVLLLTSAEDLDCTPGFQQKVFHINQPAEFIEDQSILN

SEQ ID NO: 16216 - protein, 934 aa, Homo sapiens
MVLVLHHILIAVVQFLRRGQQVFLKPDEPPPPPQPCADSLQDALLSLGSVIDISGLQRAVKEALSAVLPRVETVYTYLLDGESQLVCEDPPHELPQEGKVREAIISQKRLGCNGLGFSDLPGKPLARLVAPLAPDTQVLVMPLADKEAGAVAAVILVHCGQLSDNEEWSLQAVEKHTLVALRRVQVLQQRGPREAPRAVQNPPEGTAEDQKGGAAYTDRDRKILQLCGELYDLDASSLQLKVLQYLQQETRASRCCLLLVSEDNLQLSCKVIGDKVLGEEVSFPLTGCLGQVVEDKKSIQLKDLTSEDVQQLQSMLGCELQAMLCVPVISRATDQVVALACAFNKLEGDLFTDEDEHVIQHCFHYTSTVLTSTLAFQKEQKLKCECQALLQVAKNLFTHLDDVSVLLQEIITEARNLSNAEICSVFLLDQNELVAKVFDGGVVDDESYEIRIPADQGIAGHVATTGQILNIPDAYAHPLFYRGVDDSTGFRTRNILCFPIKNENQEVIGVAELVNKINGPWFSKFDEDLATAFSIYCGISIAHSLLYKKVNEAQYRSHLANEMMMYHMKVSDDEYTKLLHDGIQPVAAIDSNFASFTYTPRSLPEDDTSMAILSMLQDMNFINNYKIDCPTLARFCLMVKKGYRDPPYHNWMHAFSVSHFCYLLYKNLELTNYLEDIEIFALFISCMCHDLDHRGTNNSFQVASKSVLAALYSSEGSVMERHHFAQAIAILNTHGCNIFDHFSRKDYQRMLDLMRDIILATDLAHHLRIFKDLQKMAEVGYDRNNKQHHRLLLCLLMTSCDLSDQTKGWKTTRKIAELIYKEFFSQGDLEKAMGNRPMEMMDREKAYIPELQISFMEHIAMPIYKLLQDLFPKAAELYERVASNREHWTKVSHKFTIRGLPSNNSLDFLDEEYEVPDLDGTRAPINGCCSLDAE

SEQ ID NO: 16217 - protein, 759 aa, Homo sapiens
MHLLGPWLLLLVLEYLAFSDSSKWVFEHPETLYAWEGACVWIPCTYRALDGDLESFILFHNPEYNKNTSKFDGTRLYESTKDGKVPSEQKRVQFLGDKNKNCTLSIHPVHLNDSGQLGLRMESKTEKWMERIHLNVSERPFPPHIQLPPEIQESQEVTLTCLLNFSCYGYPIQLQWLLEGVPMRQAAVTSTSLTIKSVFTRSELKFSPQWSHHGKIVTCQLQDADGKFLSNDTVQLNVKHTPKLEIKVTPSDAIVREGDSVTMTCEVSSSNPEYTTVSWLKDGTSLKKQNTFTLNLREVTKDQSGKYCCQVSNDVGPGRSEEVFLQVQYPPKKVTTVIQNPMPIREGDTVTLSCNYNSSNPSVTRYEWKPHGAWEEPSLGVLKIQNVGWDNTTIACAACNSWCSWASPVALNVQYAPRDVRVRKIKPLSEIHSGNSVSLQCDFSSSHPKEVQFFWEKNGRLLGKESQLNFDSISPEDAGSYSCWVNNSIGQTASKAWTLEVLYAPRRLRVSMSPGDQVMEGKSATLTCESDANPPVSHYTWFDWNNQSLPYHSQKLRLEPVKVQHSGAYWCQGTNSVGKGRSPLSTLTVYYSPETIGRRVAVGLGSCLAILILAICGLKLQRRWKRTQSQQGLQENSSGQSFFVRNKKVRRAPLSEGPHSLGCYNPMMEDGISYTTLRFPEMNIPRTGDAESSEMQRPPPDCDDTVTYSALHKRQVGDYENVIPDFPEDEGIHYSELIQFGVGERPQAQENVDYVILKH

SEQ ID NO: 16218 - protein, 354 aa, Homo sapiens
MAPARRPAGARLLLVYAGLLAAAAAGLGSPEPGAPSRSRARREPPPGNELPRGPGESRAGPAARPPEPTAERAHSVDPRDAWMLFVRQSDKGVNGKKRSRGKAKKLKFGLPGPPGPPGPQGPPGPIIPPEALLKEFQLLLKGAVRQRERAEPEPCTCGPAGPVAASLAPVSATAGEDDDDVVGDVLALLAAPLAPGPRAPRVEAAFLCRLRRDALVERRALHELGVYYLPDAEGAFRRGPGLNLTSGQYRAPVAGFYALAATLHVALGEPPRRGPPRPRDHLRLLICIQSRCQRNASLEAIMGLESSSELFTISVNGVLYLQMGQWTSVFLDNASGCSLTVRSGSHFSAVLLGV

SEQ ID NO: 16219 - protein, 1230 aa, Homo sapiens
MASASYHISNLLEKMTSSDKDFRFMATNDLMTELQKDSIKLDDDSERKVVKMILKLLEDKNGEVQNLAVKCLGPLVSKVKEYQVETIVDTLCTNMLSDKEQLRDISSIGLKTVIGELPPASSGSALAANVCKKITGRLTSAIAKQEDVSVQLEALDIMADMLSRQGGLLVNFHPSILTCLLPQLTSPRLAVRKRTIIALGHLVMSCGNIVFVDLIEHLLSELSKNDSMSTTRTYIQCIAAISRQAGHRIGEYLEKIIPLVVKFCNVDDDELREYCIQAFESFVRRCPKEVYPHVSTIINICLKYLTYDPNYNYDDEDEDENAMDADGGDDDDQGSDDEYSDDDDMSWKVRRAAAKCLDAVVSTRHEMLPEFYKTVSPALISRFKEREENVKADVFHAYLSLLKQTRPVQSWLCDPDAMEQGETPLTMLQSQVPNIVKALHKQMKEKSVKTRQCCFNMLTELVNVLPGALTQHIPVLVPGIIFSLNDKSSSSNLKIDALSCLYVILCNHSPQVFHPHVQALVPPVVACVGDPFYKITSEALLVTQQLVKVIRPLDQPSSFDATPYIKDLFTCTIKRLKAADIDQEVKERAISCMGQIICNLGDNLGSDLPNTLQIFLERLKNEITRLTTVKALTLIAGSPLKIDLRPVLGEGVPILASFLRKNQRALKLGTLSALDILIKNYSDSLTAAMIDAVLDELPPLISESDMHVSQMAISFLTTLAKVYPSSLSKISGSILNELIGLVRSPLLQGGALSAMLDFFQALVVTGTNNLGYMDLLRMLTGPVYSQSTALTHKQSYYSIAKCVAALTRACPKEGPAVVGQFIQDVKNSRSTDSIRLLALLSLGEVGHHIDLSGQLELKSVILEAFSSPSEEVKSAASYALGSISVGNLPEYLPFVLQEITSQPKRQYLLLHSLKEIISSASVVGLKPYVENIWALLLKHCECAEEGTRNVVAECLGKLTLIDPETLLPRLKGYLISGSSYARSSVVTAVKFTISDHPQPIDPLLKNCIGDFLKTLEDPDLNVRRVALVTFNSAAHNKPSLIRDLLDTVLPHLYNETKVRKELIREVEMGPFKHTVDDGLDIRKAAFECMYTLLDSCLDRLDIFEFLNHVEDGLKDHYDIKMLTFLMLVRLSTLCPSAVLQRLDRLVEPLRATCTTKVKANSVKQEFEKQDELKRSAMRAVAALLTIPEAEKSPLMSEFQSQISSNPELAAIFESIQKDSSSTNLESMDTS

SEQ ID NO: 16220 - protein, 385 aa, Homo sapiens
MLQEFTEQQKEFQATARKFAREEIIPVAAEYDKTGEYPVPLIRRAWELGLMNTHIPENCGGLGLGTFDACLISEELAYGCTGVQTAIEGNSLGQMPIIIAGNDQQKKKYLGRMTEEPLMCAYCVTEPGAGSDVAGIKTKAEKKGDEYIINGQKMWITNGGKANWYFLLARSDPDPKAPANKAFTGFIVEADTPGIQIGRKELNMGQRCSDTRGIVFEDVKVPKENVLIGDGAGFKVAMGAFDKTRPVVAAGAVGLAQRALDEATKYALERKTFGKLLVEHQAISFMLAEMAMKVELARMSYQRAAWEVDSGRRNTYYASIAKAFAGDIANQLATDAVQILGGNGFNTEYPVEKLMRDAKIYQIYEGTSQIQRLIVAREHIDKYKN

SEQ ID NO: 16221 - protein, 351 aa, Homo sapiens
MVLSQDGSVQSGFLAEGHLDGQPFLRYDRQKRRAKPQGQWAENVLGAKTWDTETEDLTENGQDLRRTLTHIKDQKGGLHSLQEIRVCEIHEDSSTRGSRHFYYDGELFLSQNLETQESTVPQSSRAQTLAMNVTNFWKEDAMKTKTHYRAMQADCLQKLQRYLKSGVAIRRTVPPMVNVTCSEVSEGNITVTCRASSFYPRNITLTWRQDGVSLSHNTQQWGDVLPDGNGTYQTWVATRIRQGEEQRFTCYMEHSGNHGTHPVPSGKALVLQSQRTDFPYVSAAMPCFVIIIILCVPCCKKKTSAAEGPELVSLQVLDQHPVGTGDHRDAAQLGFQPLMSATGSTGSTEGT

SEQ ID NO: 16222 - protein, 253 aa, Homo sapiens
MPSLLLLFTAALLSSWAQLLTDANSWWSLALNPVQRPEMFIIGAQPVCSQLPGLSPGQRKLCQLYQEHMAYIGEGAKTGIKECQHQFRQRRWNCSTADNASVFGRVMQIGSRETAFTHAVSAAGVVNAISRACREGELSTCGCSRTARPKDLPRDWLWGGCGDNVEYGYRFAKEFVDAREREKNFAKGSEEQGRVLMNLQNNEAGRRAVYKMADVACKCHGVSGSCSLKTCWLQLAEFRKVGDRLKEKYDSAA

SEQ ID NO: 16223 - protein, 307 aa, Homo sapiens
MRLLVLLWGCLLLPGYEALEGPEEISGFEGDTVSLQCTYREELRDHRKYWCRKGGILFSRCSGTIYAEEEGQETMKGRVSIRDSRQELSLIVTLWNLTLQDAGEYWCGVEKRGPDESLLISLFVFPGPCCPPSPSPTFQPLATTRLQPKAKAQQTQPPGLTSPGLYPAATTAKQGKTGAEAPPLPGTSQYGHERTSQYTGTSPHPATSPPAGSSRPPMQLDSTSAEDTSPALSSGSSKPRVSIPMVRILAPVLVLLSLLSAAGLIAFCSHLLLWRKEAQQATETQRNEKFCLSRLNSLMFSLSLPWL

SEQ ID NO: 16224 - protein, 72 aa, Homo sapiens
MGLSTVPDLLLPLVLLELLVGIYPSGVIGLVPHLGDREKRDSVCPQGKYIHPQNNSICCTKCHKEPVPALLE

SEQ ID NO: 16225 - protein, 590 aa, Homo sapiens
MRKVPCKKDAASGSFFARDNTANFLHWCRDIGVDETYLFESEGLVLHKDPRQVYLCLLEIGRIVSRYGVEPPVLVKLEKEIELEETLLNTSGPEDSISIPKSCCRHEELHEAVKHIAEDPPCSCSHRFSIEYLSEGRYRLGDKILFIRMLHGKHVMVRVGGGWDTLQGFLLKYDPCRILQFATLEQKILAFQKGVSNESVPDSPARTPQPPEMNPLSAVNMFQKQNSKPSVPVSIPKSKEKQGRPPGALVPASSLKGGNLGSMSVRSKLPNSPAASSHPKLKSSKGITKKPQAPSNNASSSLASLNPVGKNTSSPALPRTAPCISESPRKCISSPNTPKAKVIPAQNSADLPESTLLPNKCSGKTQPKYLKHNHISSRDNAVSHLAAHSNSSSKCPKLPKANIPVRPKPSFQSSAKMTKTSSKTIATGLGTQSQPSDGAPQAKPVPAQKLKSALNLNQPVSVSSVSPVKATQKSKDKNIVSATKKQPQNKSAFQKTGPSSLKSPGRTPLSIVSLPQSSTKTQTAPKSAQTVAKSQHSTKGPPRSGKTPASIRKPPSSVKDADSGDKKPTAKKKEDDDHYFVMTGSKKPRK

SEQ ID NO: 16226 - protein, 448 aa, Homo sapiens
MSSCRGQKVAGGLRVVSPFPLCQPAGEPSQGKMRSSCVLLTALVALAAYYVYIPLPGSVSDPWKLMLLDATFRGAQQVSNLIHYLGLSHHLLALNFIIVSFGKKSAWSSAQVKVTDTDFDGVEVRVFEGPPKPEEPLKRSVVYIHGGGWALASASASWSPSDEIRYYDELCTAMAEELNAVIVSIEYRLVPKVYFPEQIHDVVRATKYFLKPEVLQKYMVDPGRICISGDSAGGNLAAALGQQFTQDASLKNKLKLQALIYPVLQALDFNTPSYQQNVNTPILPRYVMVKYWVDYFKGNYDFVQAMIVNNHTSLDVEEAAAVRARLNWTSLLPASFTKNYKPVVQTTGNARIVQELPQLLDARSAPLIADQAVLQLLPKTYILTCEHDVLRDDGIMYAKRLESAGVEVTLDHFEDGFHGCMIFTSWPTNFSVGIRTRNSYIKWLDQNL

SEQ ID NO: 16227 - protein, 1568 aa, Homo sapiens
MGAVLRSLLACSFCVLLRAAPLLLYANRRDLRLVDATNGKENATIVVGGLEDAAAVDFVFSHGLIYWSDVSEEAIKRTEFNKTESVQNVVVSGLLSPDGLACDWLGEKLYWTDSETNRIEVSNLDGSLRKVLFWQELDQPRAIALDPSSGFMYWTDWGEVPKIERAGMDGSSRFIIINSEIYWPNGLTLDYEEQKLYWADAKLNFIHKSNLDGTNRQAVVKGSLPHPFALTLFEDILYWTDWSTHSILACNKYTGEGLREIHSDIFSPMDIHAFSQQRQPNATNPCGIDNGGCSHLCLMSPVKPFYQCACPTGVKLLENGKTCKDGATELLLLARRTDLRRISLDTPDFTDIVLQLEDIRHAIAIDYDPVEGYIYWTDDEVRAIRRSFIDGSGSQFVVTAQIAHPDGIAVDWVARNLYWTDTGTDRIEVTRLNGTMRKILISEDLEEPRAIVLDPMVGYMYWTDWGEIPKIERAALDGSDRVVLVNTSLGWPNGLALDYDEGKIYWGDAKTDKIEVMNTDGTGRRVLVEDKIPHIFGFTLLGDYVYWTDWQRRSIERVHKRSAEREVIIDQLPDLMGLKATNVHRVIGSNPCAEENGGCSHLCLYRPQGLRCACPIGFELISDMKTCIVPEAFLLFSRRADIRRISLETNNNNVAIPLTGVKEASALDFDVTDNRIYWTDISLKTISRAFMNGSALEHVVEFGLDYPEGMAVDWLGKNLYWADTGTNRIEVSKLDGQHRQVLVWKDLDSPRALALDPAEGFMYWTEWGGKPKIDRAAMDGSERTTLVPNVGRANGLTIDYAKRRLYWTDLDTNLIESSNMLGLNREVIADDLPHPFGLTQYQDYIYWTDWSRRSIERANKTSGQNRTIIQGHLDYVMDILVFHSSRQSGWNECASSNGHCSHLCLAVPVGGFVCGCPAHYSLNADNRTCSAPTTFLLFSQKSAINRMVIDEQQSPDIILPIHSLRNVRAIDYDPLDKQLYWIDSRQNMIRKAQEDGSQGFTVVVSSVPSQNLEIQPYDLSIDIYSRYIYWTCEATNVINVTRLDGRSVGVVLKGEQDRPRAVVVNPEKGYMYFTNLQERSPKIERAALDGTEREVLFFSGLSKPIALALDSRLGKLFWADSDLRRIESSDLSGANRIVLEDSNILQPVGLTVFENWLYWIDKQQQMIEKIDMTGREGRTKVQARIAQLSDIHAVKELNLQEYRQHPCAQDNGGCSHICLVKGDGTTRCSCPMHLVLLQDELSCGESQFQCASGQCIDGALRCNGDANCQDKSDEKNCEVLCLIDQFRCANGQCIGKHKKCDHNVDCSDKSDELDCYPTEEPAPQATNTVGSVIGVIVTIFVSGTVYFICQRMLCPRMKGDGETMTNDYVVHGPASVPLGYVPHPSSLSGSLPGMSRGKSMISSLSIMGGSSGPPYDRAHVTGASSSSSSSTKGTYFPAILNPPPSPATERSHYTMEFGYSSNSPSTHRSYSYRPYSYRHFAPPTTPCSTDVCDSDYAPSRRMTSVATAKGYTSDLNYDSEPVPPPPTPRSQYLSAEENYESCPPSPYTERSYSHHLYPPPPSPCTDSS

SEQ ID NO: 16228 - protein, 398 aa, Homo sapiens
MLGRSGYRALPLGDFDRFQQSSFGFLGSQKGCLSPERGGVGTGADVPQSWPSCLCHGLISFLGFLLLLVTFPISGWFALKIVPTYERMIVFRLGRIRTPQGPGMVLLLPFIDSFQRVDLRTRAFNVPPCKLASKDGAVLSVGADVQFRIWDPVLSVMTVKDLNTATRMTAQNAMTKALLKRPLREIQMEKLKISDQLLLEINDVTRAWGLEVDRVELAVEAVLQPPQDSPAGPNLDSTLQQLALHFLGGSMNSMAGGAPSPGPADTVEMVSEVEPPAPQVGARSSPKQPLAEGLLTALQPFLSEALVSQVGACYQFNVVLPSGTQSAYFLDLTTGRGRVGHGVPDGIPDVVVEMAEADLRALLCRELRPLGAYMSGRLKVKGDLAMAMKLEAVLRALK

SEQ ID NO: 16229 - protein, 125 aa, Homo sapiens
MRFLAATFLLLALSTAAQAEPVQFKDCGSVDGVIKEVNVSPCPTQPCQLSKGQSYSVNVTFTSNIQSKSSKAVVHGILMGVPVPFPIPEPDGCKSGINCPIQKDKTYSYLNKLPVKSEYPSVSHL

SEQ ID NO: 16230 - protein, 431 aa, Homo sapiens
MAHSPVQSGLPGMQNLKADPEELFTKLEKIGKGSFGEVFKGIDNRTQKVVAIKIIDLEEAEDEIEDIQQEITVLSQCDSPYVTKYYGSYLKDTKLWIIMEYLGGGSALDLLEPGPLDETQIATILREILKGLDYLHSEKKIHRDIKAANVLLSEHGEVKLADFGVAGQLTDTQIKRNTFVGTPFWMAPEVIKQSAYDSKADIWSLGITAIELARGEPPHSELHPMKVLFLIPKNNPPTLEGNYSKPLKEFVEACLNKEPSFRPTAKELLKHKFILRNAKKTSYLTELIDRYKRWKAEQSHDDSSSEDSDAETDGQASGGSDSGDWIFTIREKDPKNLENGALQPSDLDRNKMKDIPKRPFSQCLSTIISPLFAELKEKSQACGGNLGSIEELRGAIYLAEEACPGISDTMVAQLVQRLQRYSLSGGGTSSH

SEQ ID NO: 16231 - protein, 510 aa, Homo sapiens
MGRPTQWPSLLLLLLLPGPPPVAGLEDAAFPHLGESLQPLPRACPLRCSCPRVDTVDCDGLDLRVFPDNITRAAQHLSLQNNQLQELPYNELSRLSGLRTLNLHNNLISSEGLPDEAFESLTQLQHLCVAHNKLSVAPQFLPRSLRVADLAANQVMEIFPLTFGEKPALRSVYLHNNQLSNAGLPPDAFRGSEAIATLSLSNNQLSYLPPSLPPSLERLHLQNNLISKVPRGALSRQTQLRELYLQHNQLTDSGLDATTFSKLHSLEYLDLSHNQLTTVPAGLPRTLAILHLGRNRIRQVEAARLHGARGLRYLLLQHNQLGSSGLPAGALRPLRGLHTLHLYGNGLDRVPPALPRRLRALVLPHNHVAALGARDLVATPGLTELNLAYNRLASARVHHRAFRRLRALRSLDLAGNQLTRLPMGLPTGLRTLQLQRNQLRMLEPEPLAGLDQLRELSLAHNRLRVGDIGPGTWHELQALQVRHRLVSHTVPRAPPSPCLPCHVPNILVSW

SEQ ID NO: 16232 - protein, 527 aa, Homo sapiens
MEEEQDLPEQPVKKAKMQESGEQTISQVSNPDVSDQKPETSSLASNLPMSEEIMTCTDYIPRSSNDYTSQMYSAKPYAHILSVPVSETAYPGQTQYQTLQQTQPYAVYPQATQTYGLPPFASSTNASLISTSSTIANIPAAAVASISNQDYPTYTILGQNQYQACYPSSSFGVTGQTNSDAESTTLAATTYQSEKPSVMAPAPAAQRLSSGDPSTSPSLSQTTPSKDTDDQSRKNMTSKNRGKRKADATSSQDSELERVFLWDLDETIIIFHSLLTGSYAQKYGKDPTVVIGSGLTMEEMIFEVADTHLFFNDLEECDQVHVEDVASDDNGQDLSNYSFSTDGFSGSGGSGSHGSSVGVQGGVDWMRKLAFRYRKVREIYDKHKSNVGGLLSPQRKEALQRLRAEIEVLTDSWLGTALKSLLLIQSRKNCVNVLITTTQLVPALAKVLLYGLGEIFPIENIYSATKIGKESCFERIVSRFGKKVTYVVIGDGRDEEIAAKQHNMPFWRITNHGDLVSLHQALELDFL

SEQ ID NO: 16233 - protein, 485 aa, Homo sapiens
MRSRVAVRACHKVCRCLLSGFGGRVDAGQPELLTERSSPKGGHVKSHAELEGNGEHPEAPGSGEGSEALLEICQRRHFLSGSKQQLSRDSLLSGCHPGFGPLGVELRKNLAAEWWTSVVVFREQVFPVDALHHKPGPLLPGDSAFRLVSAETLREILQDKELSKEQLVAFLENVLKTSGKLRENLLHGALEHYVNCLDLVNKRLPYGLAQIGVCFHPVFDTKQIRNGVKSIGEKTEASLVWFTPPRTSNQWLDFWLRHRLQWWRKFAMSPSNFSSSDCQDEEGRKGNKLYYNFPWGKELIETLWNLGDHELLHMYPGNVSKLHGRDGRKNVVPCVLSVNGDLDRGMLAYLYDSFQLTENSFTRKKNLHRKVLKLHPCLAPIKVALDVGRGPTLELRQVCQGLFNELLENGISVWPGYLETMQSSLEQLYSKYDEMSILFTVLVTETTLENGLIHLRSRDTTMKEMMHISKLKDFLIKYISSAKNV

SEQ ID NO: 16234 - protein, 310 aa, Homo sapiens
MSLRSGGRRRADPGADGEASRDDGATSSVSALKRLERSQWTDKMDLRFGFERLKEPGEKTGWLINMHPTEILDEDKRLGSAVDYYFIQDDGSRFKVALPYKPYFYIATRKGCEREVSSFLSKKFQGKIAKVETVPKEDLDLPNHLVGLKRNYIRLSFHTVEDLVKVRKEISPAVKKNREQDHASDAYTALLSSVLQRGGVITDEEETSKKIADQLDNIVDMREYDVPYHIRLSIDLKIHVAHWYNVRYRGNAFPVEITRRDDLVERPDPVVLAFDIETTKLPLKFPDAETDQIMMISYMIDGQGDCFRRY

SEQ ID NO: 16235 - protein, 128 aa, Homo sapiens
MGFLQLLVVAVLASEHRVAGAAEVFGNSSEDPVPGGCNLEFDLDIDPNIYLEYNFFETTIKFAPANLGYARGVDPPPCDAGTDQDSRWRLQYDVYQYFLPENDLTEEMLLKHLQRMVSVPQVKASALK

SEQ ID NO: 16236 - protein, 351 aa, Homo sapiens
MLLILLSVALLALSSAQSLNEDVSQEESPSVISGKPEGRRPQGGNQPQRTPPPPGKPEGRPPQGGNQSQGPPPRPGKPEGPPPQGGNQSQGPPPRPGKPEGQPPQGGNQSQGPPPRPGKPEGPPPQGGNQSQGPPPRPGKPEGPPPQGGNQSQGPPPRPGKPEGPPPQGGNQSQGPPPHPGKPEGPPPQGGNQSQGPPPRPGKPEGPPPQGGNQSQGPPPRPGKPEGPPPQGGNKPQGPPPRPGKPEGPPPQGGNQSQGPPPRPGKPEGPPSQGGNKPQGPPPHPGKPQGPPPQEGNKPQRPPPPGRPQGPPPPGGNPQQPLPPPAGKPQGPPPPPQGGRPHRPPQGQPPQ

SEQ ID NO: 16237 - protein, 541 aa, Homo sapiens
MVSYWDTGVLLCALLSCLLLTGSSSGSKLKDPELSLKGTQHIMQAGQTLHLQCRGEAAHKWSLPEMVSKESERLSITKSACGRNGKQFCSTLTLNTAQANHTGFYSCKYLAVPTSKKKETESAIYIFISDTGRPFVEMYSEIPEIIHMTEGRELVIPCRVTSPNITVTLKKFPLDTLIPDGKRIIWDSRKGFIISNATYKEIGLLTCEATVNGHLYKTNYLTHRQTNTIIDVQISTPRPVKLLRGHTLVLNCTATTPLNTRVQMTWSYPDEKNKRASVRRRIDQSNSHANIFYSVLTIDKMQNKDKGLYTCRVRSGPSFKSVNTSVHIYDKAFITVKHRKQQVLETVAGKRSYRLSMKVKAFPSPEVVWLKDGLPATEKSARYLTRGYSLIIKDVTEEDAGNYTILLSIKQSNVFKNLTATLIVNVKPQIYEKAVSSFPDPALYPLGSRQILTCTAYGIPQPTIKWFWHPCNHNHSEARCDFCSNNEESFILDADSNMGNRIESITQRMAIIEGKNKLPPANSSFMLPPTSFSSNYFHFLP

SEQ ID NO: 16238 - protein, 546 aa, Homo sapiens
MAESAGASSFFPLVVLLLAGSGGSGPRGVQALLCACTSCLQANYTCETDGACMVSIFNLDGMEHHVRTCIPKVELVPAGKPFYCLSSEDLRNTHCCYTDYCNRIDLRVPSGHLKEPEHPSMWGPVELVGIIAGPVFLLFLIIIIVFLVINYHQRVYHNRQRLDMEDPSCEMCLSKDKTLQDLVYDLSTSGSGSGLPLFVQRTVARTIVLQEIIGKGRFGEVWRGRWRGGDVAVKIFSSREERSWFREAEIYQTVMLRHENILGFIAADNKADCSFLTLPWEVVMVSAAPKLRSLRLQYKGGRGRARFLFPLNNGTWTQLWLVSDYHEHGSLFDYLNRYTVTIEGMIKLALSAASGLAHLHMEIVGTQGKPGIAHRDLKSKNILVKKNGMCAIADLGLAVRHDAVTDTIDIAPNQRVGTKRYMAPEVLDETINMKHFDSFKCADIYALGLVYWEIARRCNSGGVHEEYQLPYYDLVPSDPSIEEMRKVVCDQKLRPNIPNWWQSYEALRVMGKMMRECWYANGAARLTALRIKKTLSQLSVQEDVKI

SEQ ID NO: 16239 - protein, 452 aa, Homo sapiens
MTLVSGWLLYGWIIAVQTKTKKTLAKPNIRNVVVVDGVRTPFLLSGTSYKDLMPHDLARAALTGLLHRTSVPKEVVDYIIFGTVIQEVKTSNVAREAALGAGFSDKTPAHTVTMACISANQAMTTGVGLIASGQCDVIVAGGVELMSDVPIRHSRKMRKLMLDLNKAKSMGQRLSLISKFRFNFLAPELPAVSEFSTSETMGHSADRLAAAFAVSRLEQDEYALRSHSLAKKAQDEGLLSDVVPFKVPGKDTVTKDNGIRPSSLEQMAKLKPAFIKPYGTVTAANSSFLTDGASAMLIMAEEKALAMGYKPKAYLRDFMYVSQDPKDQLLLGPTYATPKVLEKAGLTMNDIDAFEFHEAFSGQILANFKAMDSDWFAENYMGRKTKVGLPPLEKFNNWGGSLSLGHPFGATGCRLVMAAANRLRKEGGQYGLVAACAAGGQGHAMIVEAYPK

SEQ ID NO: 16240 - protein, 557 aa, Homo sapiens
MEVTAVGEEANQGDLLGFGQRCCSLGSSNPWLYRTAGIFPEHCTEEKKIGTYFRVAPQASKSQRSRCHGMAASEARPGEATAASYGRPFPTHPRRQEFRARVVRGPTMLVTAYLAFVGLLASCLGLELSRCRAKPPGRACSNPSFLRFQLDFYQVYFLALAADWLQAPYLYKLYQHYYFLEGQIAILYVCGLASTVLFGLVASSLVDWLGRKNSCVLFSLTYSLCCLTKLSQDYFVLLVGRALGGLSTALLFSAFEAWYIHEHVERHDFPAEWIPATFARAAFWNHVLAVVAGVAAEAVASWIGLGPVAPFVAAIPLLALAGALALRNWGENYDRQRAFSRTCAGGLRCLLSDRRVLLLGTIQALFESVIFIFVFLWTPVLDPHGAPLGIIFSSFMAASLLGSSLYRIATSKRYHLQPMHLLSLAVLIVVFSLFMLTFSTSPGQESPVESFIAFLLIELACGLYFPSMSFLRRKVIPETEQAGVLNWFRVPLHSLACLGLLVLHDSDRKTGTRNMFSICSAVMVMALLAVVGLFTVVRHDAELRVPSPTEEPYAPEL

SEQ ID NO: 16241 - protein, 495 aa, Homo sapiens
MDICESILERKRHDSERSTCSILEQTDMEAVEALVCMSSWGQRSQKGDLLRIRPLTPVSDSGDVTTTVHMDAATPELPKDFHSLSTLCITPPQSPDLVEPSTRTPVSPQVTDSKACTATDVLQSSAVVARALSGGAERGLLGLEPVPSSPCRAKGTSVIRHTGESPAACFPTIQTPDCRLSDSREGEEQLLGHFETLQDTHLTDSLLSTNLVSCQPCLHKSGGLLLTDKGQQAGWPGAVQTCSPKNYENDLPRKTTPLISVSVPAPPVLCQMIPVTGQSSMLPAFLKPPPQLSVGTVRPILAQAAPAPQPVFVGPAVPQGAVMLVLPQGALPPPAPCAANVMAAGNTKLLPLAPAPVFITSSQNCVPQVDFSRRRNYVCSFPGCRKTYFKSSHLKAHLRTHTGEKPFNCSWDGCDKKFARSDELSRHRRTHTGEKKFVCPVCDRRFMRSDHLTKHARRHMTTKKIPGWQAEVGKLNRIASAESPGSPLVSMPASA

SEQ ID NO: 16242 - protein, 38 aa, Homo sapiens
MADKVRRQRPRRRVCWALVAVLLADLLALSGNLGGKHR

SEQ ID NO: 16243 - protein, 37 aa, Homo sapiens
MRPTLLWSLLLLLGVFAAAAAAPPAPTVNGSRPTSCP

SEQ ID NO: 16244 - protein, 568 aa, Homo sapiens
MNKLRQSLRRRKPAYVPEASRPHQWQADEDAVRKGTCSFPVRYLGHVEVEESRGMHVCEDAVKKLKAMGRKSVKSVLWVSADGLRVVDDKTKDLLVDQTIEKVSFCAPDRNLDKAFSYICRDGTTRRWICHCFLALKDSGERLSHAVGCAFAACLERKQRREKECGVTAAFDASRTSFAREGSFRLSGGGRPAEREAPDKKKAEAAAAPTVAPGPAQPGHVSPTPATTSPGEKGEAGTPVAAGTTAAAIPRRHAPLEQLVRQGSFRGFPALSQKNSPFKRQLSLRLNELPSTLQRRTDFQVKGTVPEMEPPGAGDSDSINALCTQISSSFASAGAPAPGPPPATTGTSAWGEPSVPPAAAFQPGHKRTPSEAERWLEEVSQVAKAQQQQQQQQQQQQQQQQQQQQAASVAPVPTMPPALQPFPAPVGPFDAAPAQVAVFLPPPHMQPPFVPAYPGLGYPPMPRVPVVGITPSQMVANAFCSAAQLQPQPATLLGKAGAFPPPAIPSAPGSQARPRPNGAPWPPEPAPAPAPELDPFEAQWAALEGKATVEKPSNPFSGDLQKTFEIEL

SEQ ID NO: 16245 - protein, 140 aa, Homo sapiens [sequence omitted]

SEQ ID NO: 16246 - protein, 169 aa, Homo sapiens
RFLAGVPTPKSHLQLLGAVCMFLASKLKETSPLTAEKLCIYTDNSIKPQELLEWELVVLGKLKWNLAAVTPHDFIEHILRKLPQQREKLSLIRKHAQTFIALCATAQQVGQGKGKGCNQEMPQERLRGVSKSQRPAPDSISASFRVARRLLLLRHVCHVQHSSQTHSLD

SEQ ID NO: 16247 - protein, 293 aa, Homo sapiens
MASNVTNKTDPRSMNSRVFIGNLNTLVVKKSDVEAIFSKYGKIVGCSVHKGFAFVQYVNERNARAAVAGEDGRMIAGQVLDINLAAEPKVNRGKAGVKRSAAEMYGSSFDLDYDFQRDYYDRMYSYPARVPPPPPIARAVVPSKRQRVSGNTSRRGKSGFNSKSGQRGSSKSGKLKGDDLQAIKKELTQIKQKVDSLLENLEKIEKEQSKQAVEMKNDKSEEEQSSSSVKKDETNVKMESEGGADDSAEEGDLLDDDDNEDRGDDQLELIKDDEKEAEEGEDDRDSANGEDDS

SEQ ID NO: 16248 - protein, 214 aa, Homo sapiens
MAQHHLWILLLCLQTCRLGKPKITQSLMASVNSTCNVTLTCSVEKEEKNVTYNWSPLGEEGNVLQIFQTPEDQELTYTCTAQNPVSNNSDSISARQLCADIAMGFRTHHTGLLSVLAMFFLLVLILSSVFLFRLFKRRQDAASKKTIYTYIMASRNTQPAESRIYDEILQSKVLPSKEEPVNTVYSEVQFADKMGKASTQDSKPPGTSSYEIVI

SEQ ID NO: 16249 - protein, 189 aa, Homo sapiens
MAAGGSAPEPRVLVCLGALLAGWVAVGLEAVVIGEVHENVTLHCGNISGLRGQVTWYRNNSEPVFLLSSNSSLRPAEPRFSLVDATSLHIESLSLGDEGIYTCQEILNVTQWFQVWLQVANPPPSAPQCWAQMASGSFMLQLTCRWDGGYPDPDFLWIEEPGGVIVGKSKLGVEMLSESQLSDGKKFKC

SEQ ID NO: 16250 - protein, 41 aa, Homo sapiens
PPATMRIWLLGGLLPFLLLLSGLQRPTEGSELPARNASLIL

SEQ ID NO: 16251 - protein, 453 aa, Homo sapiens
MVSIFNLDGMEHHVRTCIPKVELVPAGKPFYCLSSEDLRNTHCCYTDYCNRIDLRVPSGHLKEPEHPSMWGPVELVGIIAGPVFLLFLIIIIVFLVINYHQRVYHNRQRLDMEDPSCEMCLSKDKTLQDLVYDLSTSGSGSGLPLFVQRTVARTIVLQEIIGKGRFGEVWRGRWRGGDVAVKIFSSREERSWFREAEIYQTVMLRHENILGFIAADNKDNGTWTQLWLVSDYHEHGSLFDYLNRYTVTIEGMIKLALSAASGLAHLHMEIVGTQGKPGIAHRDLKSKNILVKKNGMCAIADLGLAVRHDAVTDTIDIAPNQRVGTKRYMAPEVLDETINMKHFDSFKCADIYALGLVYWEIARRCNSGGVHEEYQLPYYDLVPSDPSIEEMRKVVCDQKLRPNIPNWWQSYEALRVMGKMMRECWYANGAARLTALRIKKTLSQLSVQEDVKI

SEQ ID NO: 16252 - protein, 118 aa, Homo sapiens
MGLSTVPDLLLPLVLLELLVGIYPSGVIGLVPHLGDREKRDSVCPQGKYIHPQNNSICCTKCHKGPGQDTDCRECESGSFTASENHLRHCLSCSKCRKEMGQVEISSCTVDRDTVCGC

SEQ ID NO: 16253 - protein, 470 aa, Homo sapiens
MHSFLHQYTGSFKKPPLRRPHSVIGGSLGSFMAMPRNGSRLDIVHENLKMGSDGESDQASGTSSDEVQSPTGVCLRNRIHRRISMEDLNKRLSLPADIRIPDGYLEKLQINSPPFDQPMSRRSRRASLSEIGFGKMETYIKLEKLGEGTYATVYKGRSKLTENLVALKEIRLEHEEGAPCTAIREVSLLKDLKHANIVTLHDIVHTDKSLTLVFEYLDKDLKQYMDDCGNIMSMHNVKLFLYQILRGLAYCHRRKVLHRDLKPQNLLINEKGELKLADFGLARAKSVPTKTYSNEVVTLWYRPPDVLLGSSEYSTQIDMWGVGCIFFEMASGRPLFPGSTVEDELHLIFRLLGTPSQETWPGISSNEEFKNYNFPKYKPQPLINHAPRLDSEGIELITKFLQYESKKRVSAEEAMKHVYFRSLGPRIHALPESVSIFSLKEIQLQKDPGFRNSSYPETGVFVINHFTCRS

SEQ ID NO: 16254 - protein, 156 aa, Homo sapiens
MWLLYLLVPALFCRAGGSIPIPQKLFGEVTSPLFPKPYPNNFETTTVITVPTGYRVKLVFQQFDLEPSEGCFYDYVKISADKKSLGRFCGQLGSPLGNPPGKKEFMSQGNKMLLTFHTDFSNEENGTIMFYKGFLAYYQAVGEEDPQPQCQHLCHN

SEQ ID NO: 16255 - protein, 186 aa, Homo sapiens
MAAHLSYGRVNLNVLREAVRRELREFLDKCAGSKAIVWDEYLTGPFGLIAQYSLLKEHEVEKMFTLKGNRLPAADVKNIIFFVRPRLELMDIIAENVLSEDRRGPTRDFHILFVPRRSLLCEQRLKDLGVLGSFIHREEYSLDLIPFDGDLLSMESEGAFKSCSVAPAGVQWHNLSSLQPPPPEFK

SEQ ID NO: 16256 - protein, 379 aa, Homo sapiens
MEFDCEGLRRLLGKYKFRDLTVEELRNVNVFFPHFKYSMDTYVFKDSSQKDLLNFTGTIPVMYQGNTYNIPIRFWILDSHPFAPPICFLKPTANMGILVGKHVDAQGRIYLPYLQNWSHPKSVIVGLIKEMIAKFQEELPMYSLSSSDEARQVDLLAYIAKITEGVSDTNSKSWANHENKTVNKITVVGGGELGIACTLAISAKGIADRLVLLDLSEGTKGATMDLEIFNLPNVEISKDLSASAHSKVVIFTVNSLGSSQSYLDVVQSNVDMFRALVPALGHYSQHSVLLVASQPVEIMTYVTWKLSTFPANRVIGIGCNLDSQRLQYIITNVLKAQTSGKEVWVIGEQGEDKVLTWSGQEEVVSHTSQVQLSNRDIMI

SEQ ID NO: 16257 - protein, 635 aa, Homo sapiens
MESKPSRIPRRISVQPSSSLSARMMSGSRGSSLNDTYHSRDSSFRLDSEYQSTSASASASPFQSAWYSESEITQGARSRSQNQQRDHDSKRPKLSCTNCTTSAGRNVGNGLNTLSDVQDRVPSYSQGARPKENSMSTLQLNTSSTNHQLPSEHQTILSSRDSRNSLRSNFSSRESESSRSNTQPGFSYSSSRDEAPIISNSERVVSSQRPFQESSDNEGRRTTRRLLSRIASSMSSTFFSRRSSQDSLNTRSLNSENSYVSPRILTASQSRSNVPSASEVPDNRASEASQGFRFLRRRWGLSSLSHNHSSESDSENFNQESEGRNTGPWLSSSLRNRCTPLFSRRRREGRDESSRIPTSDTSSRSHIFRRESNEVVHLEAQNDPLGAAANRPQASAASSSATTGGSTSDSAQGGRNTGISGILPGSLFRFAVPPALGSNLTDNVMITVDIIPSGWNSADGKSDKTKSAPSRDPERLQKIKESLLLEDSEEEEGDLCRICQMAAASSSNLLIEPCKCTGSLQYVHQDCMKKWLQAKINSGSSLEAVTTCELCKEKLELNLEDFDIHELHRAHANEQAEYEFISSGLYLVVLLHLCEQSFSDMMGNTNEPSTRVRLQRMIPKKTETITGHLILPNFI

SEQ ID NO: 16258 - protein, 276 aa, Homo sapiens
MHAPFRISCQVVWLFKIYLLMCQINSALTSFHTALELAVDQREIQHVCLYEIGWCSMIELNFKDAFDSFERLKNESRWSQCYYAYLTAVCQGATGDVDGAQIVFKEVQKLFKRKNNQIEQFSVKKAERFRKQTPTKALCVLASIEVLYLWKALPNCSFPNLQRMSQACHEVDDSSVVGLKYLLLGAIHKCLGNSEDAVQYFQRAVKDELCRQNNLYVQPYACYELGCLLLDKPETVGRGRALLLQAKEDFSGYDFENRLHVRIHAALASLRELVPQ

SEQ ID NO: 16259 - protein, 177 aa, Homo sapiens
MTPSPAKHRAKMDDIVVVAQGSQASRNVSNDPDVIKLQEIPTFQPLLKGLLSGQTSPTNAKLEKLDSQQVLQLCLRYQDHLHQCAEAVAFDQNALVKRIKEMDLSVETLFSFMQERQKRYAKYAEQIQKVNEMSAILRRIQMGIDQTVPLLDRLNSMLPEGERLEPFSMKPDRELRL

SEQ ID NO: 16260 - protein, 835 aa, Homo sapiens
MDTSRLGVLLSLPVLLQLATGGSSPRSGVLLRGCPTHCHCEPDGRMLLRVDCSDLGLSELPSNLSVFTSYLDLSMNNISQLLPNPLPSLRFLEELRLAGNALTYIPKGAFTGLYSLKVLMLQNNQLRHVPTEALQNLRSLQSLHLHNNRIHSLGKKCFDGLHSLETLDLNYNNLDEFPTAIRTLSNLKELGFHSNNIRSIPEKAFVGNPSLITIHFYDNPIQFVGRSAFQHLPELRTLTLNGASQITEFPDLTGTANLESLTLTGAQISSLPQTVCNQLPNLQVLDLSYNLLEDLPSFSVCQKLQKIDLRHNEIYEIKVDTFQQLLSLRSLNLAWNKIAIIHPNAFSTLPSLIKLDLSSNLLSSFPITGLHGLTHLKLTGNHALQSLISSENFPELKVIEMPYAYQCCAFGVCENAYKISNQWNKGDNSSMDDLHKKDAGMFQAQDERDLEDFLLDFEEDLKALHSVQCSPSPGPFKPCEHLLDGWLIRIGVWTIAVLALTCNALVTSTVFRSPLYISPIKLLIGVIAAVNMLTGVSSAVLAGVDAFTFGSFARHGAWWENGVGCHVIGFLSIFASESSVFLLTLAALERGFSVKYSAKFETKAPFSSLKVIILLCALLALTMAAVPLLGGSKYGASPLCLPLPFGEPSTMGYMVALILLNSLCFLMMTIAYTKLYCNLDKGDLENIWDCSMVKHIALLLFTNCILNCPVAFLSFSSLINLTFISPEVIKFILLVVVPLPACLNPLLYILFNPHFKEDLVSLRKQTYVWTRSKHPSLMSINSDDVEKQSCDSTQALVTFTSSSITYDLPPSSVPSPAYPVTESCHLSSVAFVPCL

SEQ ID NO: 16261 - protein, 304 aa, Homo sapiens
MRVIRVGTRKSQLARIQTDSVVATLKASYPGLQFEIIAMSTTGDKILDTALSKIGEKSLFTKELEHALEKNEVDLVVHSLKDLPTVLPPGFTIGAICKRENPHDAVVFHPKFVGKTLETLPEKSVVGTSSLRRAAQLQRKFPHLEFRSIRGNLNTRLRKLDEQQEFSAIILATAGLQRMGWHNRVGQILHPEECMYAVGQEGGCSVPVAVHTAMKDGQLYLTGGVWSLDGSDSIQETMQATIHVPAQHEDGPEDDPQLVGITARNIPRGPQLAAQNLGISLANLLLSKGAKNILDVARQLNDAH

SEQ ID NO: 16262 - protein, 113 aa, Homo sapiens
MLLLLIPVLGMIFALRDARAQSVSQHNHHVILSEAASLELGCNYSYGGTVNLFWYVQYPGQHLQLLLKYFSGDPLVKGIKGFEAEFIKSKFSFNLRKPSVQWSDTAEYFCAVN

SEQ ID NO: 16263 - protein, 509 aa, Homo sapiens
MPENVAPRSGATAGAAGGRGKGAYQDRDKPAQIRFSNISAAKAVADAIRTSLGPKGMDKMLVELSKAQDIEAGDGTTSVVIIAGSLLDSCTKLLQKGIHPTIISESFQKALEKGIEILTDMSRPVELSDRETLLNSATTSLNSKVVSQYSSLLSPMSVNAVMKVIDPATATSVDLRDIKIVKKLGGTIDDCELVEGLVLTQKVSNSGITRVEKAKIGLIQFCLSAPKTDMDNQIVVSDYAQMDRVLREERAYILNLVKQIKKTGCNVLLIQKSILRDALSDLALHFLNKMKIMVIKDIEREDIEFICKTIGTKPVAHIDQFTADMLGSAELAEEVNLNGSGKLLKITGCASPGKTVTIVVRGSNKLVIEEAERSIHDALCVIRCLVKKRALIAGGGAPEIELALRLTEYSRTLSGMESYCVRAFADAMEVIPSTLAENAGLNPISTVTELRNRHAQGEKTAGINVRKGGISNILEELVVQPLLVSVSALTLATETVRSILKIDDVVNTR

SEQ ID NO: 16264 - protein, 764 aa, Homo sapiens
MAGWIQAQQLQGDALRQMQVLYGQHFPIEVRHYLAQWIESQPWDAIDLDNPQDRAQATQLLEGLVQELQKKAEHQVGEDGFLLKIKLGHYATQLQCSSPAGILVDAMSQKHLQINQTFEELRLVTQDTENELKKLQQTQEYFIIQYQESLRIQAQFAQLAQLSPQERLSRETALQQKQVSLEAWLQREAQTLQQYRVELAEKHQKTLQLLRKQQTIILDDELIQWKRRQQLAGNGGPPEGSLDVLQSWCEKLAEIIWQNRQQIRRAEHLCQQLPIPGPVEEMLAEVNATITDIISALVTSTFIIEKQPPQVLKTQTKFAATVRLLVGGKLNVHMNPPQVKATIISEQQAKSLLKNENTRNECSGEILNNCCVMEYHQATGTLSAHFRNMSLKRIKRADRRGAESVTEEKFTVLFESQFSVGSNELVFQVKTLSLPVVVIVHGSQDHNATATVLWDNAFAEPGRVPFAVPDKVLWPQLCEALNMKFKAEVQSNRGLTKENLVFLAQKLFNNSSSHLEDYSGLSVSWSQFNRENLPGWNYTFWQWFDGVMEVLKKHHKPHWNDGAILGFVNKQQAHDLLINKPDGTFLLRFSDSEIGGITIAWKFDSPERNLWNLKPFTTRDFSIRSLADRLGDLSYLIYVFPDRPKDEVFSKYYTPVLAKAVDGYVKPQIKQVVPEFVNASADAGGSSATYMDQAPSPAVCPQAPYNMYPQNPDHVLDQDGEFDLDETMDVARHVEELLRRPMDSLDSRLSPPAGLFTSARGSLS

SEQ ID NO: 16265 - protein, 183 aa, Homo sapiens
MAATLQFLVCLVVAICLLSGVTTTQPHAGQPMDSTSVGGGLQEPEAPEVMFELLWAGLELDVMGQLHIQDEELASTHPGRRLRLLLQHHVPSDLEGTEQWLQQLQDLRKGPPLSTWDFEHLLLTGLSCVYRLHAASEAEERGRWAQVFALLAQETLWDLCKGFCPQDRPPSLGSWASILDPFP

SEQ ID NO: 16266 - protein, 319 aa, Homo sapiens
MRKPAAGFLPSLLKVLLLPLAPAAAQDSTQASTPGSPLSPTEYERFFALLTPTWKAETTCRLRATHGCRNPTLVQLDQYENHGLVPDGAVCSNLPYASWFESFCQFTHYRCSNHVYYAKRVLCSQPVSILSPNTLKEIEASAEVSPTTMTSPISPHFTVTERQTFQPWPERLSNNVEELLQSSLSLGGQEQAPEHKQEQGVEHRQEPTQEHKQEEGQKQEEQEEEQEEEGKQEEGQGTKEGREAVSQLQTDSEPKFHSESLSSNPSSFAPRVREVESTPMIMENIQELIRSAQEIDEMNEIYDENSYWRNQNPGRYRKF

SEQ ID NO: 16267 - protein, 1105 aa, Homo sapiens
MDSLEEPQKKVFKARKTMRVSDRQQLEAVYKVKEELLKTDVKLLNGNHENGDLDPTSPLENMDYIKDKEEVNGIEEICFDPEGSKAEWKETPCILSVNVKNKQDDDLNCEPLSPHNITPEPVSKLPAEPVSGDPAPGDLDAGDPASGVLASGDSTSGDPTSSEPSSSDAASGDATSGDAPSGDVSPGDATSGDATADDLSSGDPTSSDPIPGEPVPVEPISGDCAADDIASSEITSVDLASGAPASTDPASDDLASGDLSSSELASDDLATGELASDELTSESTFDRTFEPKSVPVCEPVPEIDNIEPSSNKDDDFLEKNGADEKLEQIQSKDSLDEKNKADNNIDANEETLETDDTTICSDRPPENEKKVEEDIITELALGEDAISSSMEIDQGEKNEDETSADLVETINENVIEDNKSENILENTDSMETDEIIPILEKLAPSEDELTCFSKTSLLPIDETNPDLEEKMESSFGSPSKQESSESLPKEAFLVLSDEEDISGEKDESEVISQNETCSPEVESNEKDNKPEEEEQVIHEDDERPSEKNEFSRRKRSKSEDMDNVQSKRRRYMEEEYEAEFQVKITAKGDINQKLQKVIQWLLEEKLCALQCAVFDKTLAELKTRVEKIECNKRHKTVLTELQAKIARLTKRFEAAKEDLKKRHEHPPNPPVSPGKTVNDVNSNNNMSYRNAGTVRQMLESKRNVSESAPPSFQTPVNTVSSTNLVTPPAVVSSQPKLQTPVTSGSLTATSVLPAPNTATVVATTQVPSGNPQPTISLQPLPVILHVPVAVSSQPQLLQSHPGTLVTNQPSGNVEFISVQSPPTVSGLTKNPVSLPSLPNPTKPNNVPSVPSPSIQRNPTASAAPLGTTLAVQAVPTAHSIVQATRTSLPTVGPSGLYSPSTNRGPIQMKIPISAFSTSSAAEQNSNTTPRIENQTNKTIDASVSKKAADSTSQCGKATGSDSSGVIDLTMDDEESGASQDPKKLNHTPVSTMSSSQPVSRPLQPIQPAPPLQPSGVPTSGPSQTTIHLLPTAPTTVNVTHRPVTQVTTRLPVPRAPANHQVVYTTLPAPPAQAPLRGTVMQAPAVRQVNPQNSKRFFLYMAPRYM

SEQ ID NO: 16268 - protein, 567 aa, Homo sapiens
MNLHVYISEHEHFTDFNATSALFWEQHDLVYGDWTSGENSDGCYEHFAELDIPQSVQQNGSIYIHVYFTKSGFHPDPRQKALYRRLATVHMSRMINKYKRRRFQKTKNLLTGETEADPEMIKRAEDYGPVEVISHWHPNITINIVDDHTPWVKGSVPPPLDQYVKFDAVSGDYYPIIYFNDYWNLQKDYYPINESLASLPLRVSFCPLSLWRWQLYAAQSTKSPWNFLGDELYEQSDEEQDSVKVALLETNPYLLALTIIVSIVHSVFEFLAFKNDIQFWNSRQSLEGLSVRSVFFGVFQSFVVLLYILDNETNFVVQVSVFIGVLIDLWKITKVMDVRLDREHRVAGIFPRLSFKDKSTYIESSTKVYDDMAFRYLSWILFPLLGCYAVYSLLYLEHKGWYSWVLSMLYGFLLTFGFITMTPQLFINYKLKSVAHLPWRMLTYKALNTFIDDLFAFVIKMPVMYRIGCLRDDVVFFIYLYQRWIYRVDPTRVNEFGMSGEDPTAAAPVAEVPTAAGALTPTPAPTTTTATREEASTSLPTKPTQGASSASEPQEAPPKPAEDKKKD

SEQ ID NO: 16269 - protein, 352 aa, Homo sapiens
MLLLLLHKEAALEPQGPAVGYNSLPVSDDHHVSGIQARKKQQSVFWIKTEDQPTFNLLRKGIMDIEAYLERIGYKKSRNKLDLETLTDILQHQIRAVPFENLNIHCGDAMDLGLEAIFDQVVRRNRGGWCLQVNHLLYWALTTIGFETTMLGGYVYSTPAKKYSTGMIHLLLQVTIDGRNYIVDAGFGRSYQMWQPLELISGKDQPQVPCVFRLTEENGFWYLDQIRREQYIPNEEFLHSDLLEDSKYRKIYSFTLKPRTIEDFESMNTYLQTSPSSVFTSKSFCSLQTPDGVHCLVGFTLTHRRFNYKDNTDLIEFKTLSEEEIEKVLKNIFNISLQRKLVPKHGDRFFTI

SEQ ID NO: 16270 - protein, 479 aa, Homo sapiens
MDSPSLRELQQPLLEGTECETPAQKPGRHELGSPLREIAFAESLRGLQFLSPPLPSVSAGLGEPRPPDVEHPPRQQQQFSSLDDKPQFPGASAEFIDKLEFIQPNVISGIPIYRVMDRQGQIINPSEDPHLPKEKVLKLYKSMTLLNTMDRILYESQRQGRISFYMTNYGEEGTHVGSAAALDNTDLVFGQYREAGVLMYRDYPLELFMAQCYGNISDLGKGRQMPVHYGCKERHFVTISSPLATQIPQAVGAAYAAKRANANRVVICYFGEGAASEGDAHAGFNFAATLECPIIFFCRNNGYAISTPTSEQYRGDGIAARGPGYGIMSIRVDGNDVFAVYNATKEARRRAVAENQPFLIEAMTYRIGHHSTSDDSSAYRSVDEVNYWDKQDHPISRLRHYLLSQGWWDEEQEKAWRKQSRRKVMEAFEQAERKPKPNPNLLFSDVYQEMPAQLRKQQESLARHLQTYGEHYPLDHFDK

SEQ ID NO: 16271 - protein, 182 aa, Homo sapiens
MAVLSAPGLRGFRILGLRSSVGPAVQARGVHQSVATDGPSSTQPALPKARAVAPKPSSRGEYVVAKLDDLVNWARRSSLWPMTFGLACCAVEMMHMAAPRYDMDRFGVVFRASPRQSDVMIVAGTLTNKMAPALRKVYDQMPEPRYVVSMGSCANGGGYYHYSYSVVRGCDRIVPVDIYIPD

SEQ ID NO: 16272 - protein, 61 aa, Homo sapiens
MKLGLLCALLSLLAGICGSALESTTSGNGRVRSSCSGLRTSSPTLASTRTSAPMTTMMTSC

SEQ ID NO: 16273 - protein, 112 aa, Homo sapiens
MEKMRRPVLIIFCLCLGWANGENQVEHSPHFLGPQQGDVASMSCTYSVSRFNNLQWYRQNTGMGPKHLLSMYSAGYEKQKGRLNATLLKNGSSLYITAVQPEDSATYFCAVD

SEQ ID NO: 16274 - protein, 842 aa, Homo sapiens
MDFKVGADGTVFATRELQVPSEQVAFTVTAWDSQTAEKWDAVVRLLVAQTSSPHSGHKPQKGKKVVALDPSPPPKDTLLPWPQHQNANGLRRRKRDWVIPPINVPENSRGPFPQQLVRIRSDKDNDIPIRYSITGVGADQPPMEVFSIDSMSGRMYVTRPMDREEHASYHLRAHAVDMNGNKVENPIDLYIYVIDMNDNRPEFINQVYNGSVDEGSKPGTYVMTVTANDADDSTTANGMVRYRIVTQTPQSPSQNMFTINSETGDIVTVAAGLDREKVQQYTVIVQATDMEGNLNYGLSNTATAIITVTDVNDNPPEFTASTFAGEVPENRVETVVANLTVMDRDQPHSPNWNAVYRIISGDPSGHFSVRTDPVTNEGMVTVVKAVDYELNRAFMLTVMVSNQAPLASGIQMSFQSTAGVTISIMDINEAPYFPSNHKLIRLEEGVPPGTVLTTFSAVDPDRFMQQAVRYSKLSDPASWLHINATNGQITTAAVLDRESLYTKNNVYEATFLAADNGIPPASGTGTLQIYLIDINDNAPELLPKEAQICEKPNLNAINITAADADVDPNIGPYVFELPFVPAAVRKNWTITRLNGDYAQLSLRILYLEAGMYDVPIIVTDSGNPPLSNTSIIKVKVCPCDDNGDCTTIGAVAAAGLGTGAIVAILICILILLTMVLLFVMWMKRREKERHTKQLLIDPEDDVRDNILKYDEEGGGEEDQDYDLSQLQQPEAMGHVPSKAPGVRRVDERPVGAEPQYPIRPMVPHPGDIGDFINEGLRAADNDPTAPPYDSLLVFDYEGSGSTAGSVSSLNSSSSGDQDYDYLNDWGPRFKKLADMYGGGEED

SEQ ID NO: 16275 - protein, 519 aa, Homo sapiens
MGPRLSVWLLLLPAALLLHEEHSRAAAKGGCAGSGCGKCDCHGVKGQKGERGLPGLQGVIGFPGMQGPEGPQGPPGQKGDTGEPGLPGTKGTRGPPGASGYPGNPGLPGIPGQDGPPGPPGIPGCNGTKGERGPLGPPGLPGFAGNPGPPGLPGMKGDPGEILGHVPGMLLKGERGFPGIPGTPGPPGLPGLQGPVGPPGFTGPPGPPGPPGPPGEKGQMGLSFQGPKGDKGDQGVSGPPGVPGQAQVQEKGDFATKGEKGQKGEPGFQGMPGVGEKGEPGKPGPRGKPGKDGDKGEKGSPGFPGEPGYPGLIGRQGPQGEKGEAGPPGPPGIVIGTGPLGEKGERGYPGTPGPRGEPGPKGFPGLPGQPGPPGLPVPGQAGAPGFPGERGEKGDRGFPGTSLPGPSGRDGLPGPPGSPGPPGQPGYTNGIVECQPGPPGDQGPPGIPGQPGFIGEIGEKGQKGESCLICDIDGYRGPPGPQGPPGEIGFPGQPGAKGDRGLPGRDGVAGVPLLFQIHK

SEQ ID NO: 16276 - protein, 334 aa, Homo sapiens
MPLQQQAKRRLELGESGHQYLSDGLKTPKGKGRAALRSPDSPKKKTRYDTSLGLLTKKFIQLLSQSPDGVLDLNKAAEVLKVQKRRIYDITNVLEGIHLIKKKSKNNVQWMGCSLSEDGGMLAQCQGLSKEVTELSQEEKKLDELIQSCTLDLKLLTEDSENQRLAYVTYQDIRKISGLKDQTVIVVKAPPETRLEVPDSIESLQIHLASTQGPIEVYLCPEETETHSPMKTNNQDHNGNIPKPASKDLASTNSGHSDCSVSMGNLSPLASPANLLQQTEDQIPSNLEGPFVNLLPPLLQEDYLLSLGEEEGISDLFDAYDLEKLPLVEDFMCS

SEQ ID NO: 16277 - protein, 980 aa, Homo sapiens
MMSDASDMLAAALEQMDGIIAGSKALEYSNGIFDCQSPTSPFMGSLRALHLVEDLRGLLEMMETDEKEGLRCQIPDSTAETLVEWLQSQMTNGHLPGNGDVYQERLARLENDKESLVLQVSVLTDQVEAQGEKIRDLEFCLEEHREKVNATEEMLQQELLSRTSLETQKLDLMAEISNLKLKLTAVEKDRLDYEDKFRDTEGLIQEINDLRLKVSEMDSERLQYEKKLKSTKDELASLKEQLEEKESEVKRLQEKLVCKMKGEGVEIVDRDIEVQKMKKAVESLMAANEEKDRKIEDLRQCLNRYKKMQDTVVLAQGKDGEYEELLNSSSISSLLDAQGFSDLEKSPSPTPVMGSPSCDPFNTSVPEEFHTTILQVSIPSLLPATVSMETSEKSKLTPKPETSFEENDGNIILGATVDTQLCDKLLTSSLQKSSSLGNLKKETSDGEKETIQKTSEDRAPAESRPFGTLPPRPPGQDTSMDDNPFGTRKVRSSFGRGFFKIKSNKRTASAPNLAETEKETAEHLDLAGASSRPKDSQRNSPFQIPPPSPDSKKKSRGIMKLFGKLRRSQSTTFNPDDMSEPEFKRGGTRATAGPRLGWSRDLGQSNSDLDMPFAKWTKEQVCNWLMEQGLGSYLNSGKHWIASGQTLLQASQQDLEKELGIKHSLHRKKLQLALQALGSEEETNHGKLDFNWVTRWLDDIGLPQYKTQFDEGRVDGRMLHYMTVDDLLSLKVVSVLHHLSIKRAIQVLRINNFEPNCLRRRPSDENTIAPSEVQKWTNHRVMEWLRSVDLAEYAPNLRGSGVHGGLMVLEPRFNVETMAQLLNIPPNKTLLRRHLATHFNLLIGAEAQHQKRDAMELPDYVLLTATAKVKPKKLAFSNFGNLRKKKQEDGEEYVCPMELGQASGSASKKGFKPGLDMRLYEEDDLDRLEQMEDSEGTVRQIGAFSEGINNLTHMLKEDDMFKDFAARSPSASITDEDSNV

SEQ ID NO: 16278 - protein, 557 aa, Homo sapiens
MVGQMYCYPGSHLARALTRALALALVLALLVGPFLSGLAGAIPAPGGRWARDGQVPPASRSRSVLLDVSAGQLLMVDGRHPDAVAWANLTNAIRETGWAFLELGTSGQYNDSLQAYAAGVVEAAVSEELIYMHWMNTVVNYCGPFEYEVGYCERLKSFLEANLEWMQEEMESNPDSPYWHQVRLTLLQLKGLEDSYEGRVSFPAGKFTIKPLGFLLLQLSGDLEDLELALNKTKIKPSLGSGSCSALIKLLPGQSDLLVAHNTWNNYQHMLRVIKKYWLQFREGPWGDYPLVPGNKLVFSSYPGTIFSCDDFYILGSGLVTLETTIGNKNPALWKYVRPRGCVLEWVRNIVANRLASDGATWADIFKRFNSGTGMVVVADKTSELYQKTYWASYNIPSFETVFNASGLQALVAQYGDWFSYDGSPRAQIFRRNQSLVQDMDSMVRLMRYNDFLHDPLSLCKACNPQPNGENAISARSDLNPANGSYPFQALRQRSHGGIDVKVTSMSLARILSLLAASGPTWDQVPPFQWSTSPFSGLLHMGQPDLWKFAPVKVSWD

SEQ ID NO: 16279 - protein, 92 aa, Homo sapiens
MGAMTQLLAGVFLAFLALATEGGVLKKVIRHKRQSGVNATLPEENQPVVFNHVYNIKLPVGSQCSVDLESASGEKDLAPPSEPSESFQEHTV

SEQ ID NO: 16280 - protein, 1564 aa, Homo sapiens
MGAMTQLLAGVFLAFLALATEGGVLKKVIRHKRQSGVNATLPEENQPVVFNHVYNIKLPVGSQCSVDLESASGEKDLAPPSEPSESFQEHTVDGENQIVFTHRINIPRRACGCAAAPDVKELLSRLEELENLVSSLREQCTAGAGCCLQPATGRLDTRPFCSGRGNFSTEGCGCVCEPGWKGPNCSEPECPGNCHLRGRCIDGQCICDDGFTGEDCSQLACPSDCNDQGKCVNGVCICFEGYAGADCSREICPVPCSEEHGTCVDGLCVCHDGFAGDDCNKPLCLNNCYNRGRCVENECVCDEGFTGEDCSELICPNDCFDRGRCINGTCYCEEGFTGEDCGKPTCPHACHTQGRCEEGQCVCDEGFAGVDCSEKRCPADCHNRGRCVDGRCECDDGFTGADCGELKCPNGCSGHGRCVNGQCVCDEGYTGEDCSQLRCPNDCHSRGRCVEGKCVCEQGFKGYDCSDMSCPNDCHQHGRCVNGMCVCDDGYTGEDCRDRQCPRDCSNRGLCVDGQCVCEDGFTGPDCAELSCPNDCHGQGRCVNGQCVCHEGFMGKDCKEQRCPSDCHGQGRCVDGQCICHEGFTGLDCGQHSCPSDCNNLGQCVSGRCICNEGYSGEDCSEVSPPKDLVVTEVTEETVNLAWDNEMRVTEYLVVYTPTHEGGLEMQFRVPGDQTSTIIQELEPGVEYFIRVFAILENKKSIPVSARVATYLPAPEGLKFKSIKETSVEVEWDPLDIAFETWEIIFRNMNKEDEGEITKSLRRPETSYRQTGLAPGQEYEISLHIVKNNTRGPGLKRVTTTRLDAPSQIEVKDVTDTTALITWFKPLAEIDGIELTYGIKDVPGDRTTIDLTEDENQYSIGNLKPDTEYEVSLISRRGDMSSNPAKETFTTGLDAPRNLRRVSQTDNSITLEWRNGKAAIDSYRIKYAPISGGDHAEVDVPKSQQATTKTTLTGLRPGTEYGIGVSAVKEDKESNPATINAATELDTPKDLQVSETAETSLTLLWKTPLAKFDRYRLNYSLPTGQWVGVQLPRNTTSYVLRGLEPGQEYNVLLTAEKGRHKSKPARVKASTAMGSPKEVIFSDITENSATVSWRAPTAQVESFRITYVPITGGTPSMVTVDGTKTQTRLVKLIPGVEYLVSIIAMKGFEESEPVSGSFTTALDGPSGLVTANITDSEALARWQPAIATVDSYVISYTGEKVPEITRTVSGNTVEYALTDLEPATEYTLRIFAEKGPQKSSTITAKFTTDLDSPRDLTATEVQSETALLTWRPPRASVTGYLLVYESVDGTVKEVIVGPDTTSYSLADLSPSTHYTAKIQALNGPLRSNMIQTIFTTIGLLYPFPKDCSQAMLNGDTTSGLYTIYLNGDKAEALEVFCDMTSDGGGWIVFLRRKNGRENFYQNWKAYAAGFGDRREEFWLGLDNLNKITAQGQYELRVDLRDHGETAFAVYDKFSVGDAKTRYKLKVEGYSGTAGDSMAYHNGRSFSTFDKDTDSAITNCALSYKGAFWYRNCHRVNLMGRYGDNNHSQGVNWFHWKGHEHSIQFAEMKLRPSNFRNLEGRRKRA

SEQ ID NO: 16281 - protein, 88 aa, Homo sapiens
MLRILCLALCSLLTGTRADPGALLRLGMDIMNREVQSAMDESHILEKMAAEAGKKQPGMKPIKGITNEQGHFEEEMRLESQISTLHAT

SEQ ID NO: 16282 - protein, 240 aa, Homo sapiens
MLHALVRIGREEGLKALYSGIAPAMLRQASYGTIKIGTYQSLKRLFIERPEDETLPINVICGILSGVISSTIANPTDVLKIRMQAQSNTIQGGMIGNFMNIYQQEGTRGLWKGVSLTAQRAAIVVGVELPVYDITKKHLILSGLMGDTVYTHFLSSFTCGLAGALASNPVDVVRTRMMNQRVLRDGRCSGYTGTLDCLLQTWKNEGFFALYKGFWPNWLRLGPWNIIFFVTYEQLKKLDL

SEQ ID NO: 16283 - protein, 158 aa, Homo sapiens
MAVFKTTLWRLISGTLGIICLSLMSTLGILLKNYSDCCSCQEKWVGYRCNCYFISSEQKTWNESRHLCASQKSSLLQLQNTDELDFMSSSQQFYWIGLSYSEEHTAWLWENGSALSQYLFPSFETFNTKNCIAYNPNGNALDESCEDKNRYICKQQLI

SEQ ID NO: 16284 - protein, 177 aa, Homo sapiens
MVKEKTAEEIKQIWQQYFAAKDTVYAVIPAEKFDLIWNRAQSCPTFLCALPRREGYEFFVGQWTGTELHFTALINIQTRGEAAASQLILYHYPELKEEKGIVLMTAEMDSTFLNVAEAQCIANQVQLFYATDRKETYGLVETFNLRPNEFKYMSVIAELEQSGLGAELKCAQNQNKT

SEQ ID NO: 16285 - protein, 489 aa, Homo sapiens
MTNYSFHCNVCHHSGNTYFLRKQANLKEMCLSALANLTWQSRTQDEHPKTMFSKDKDIIPFIDKYWECMTTRQRPGKMTWPNNIVKTMSKERDVFLVKEHPDPGSKDPEEDYPKFGLLDQDLSNIGPAYDNQKQSSAVSTSGNLNGGIAAGSSGKGRGAKRKQQDGGTTGTTKKARSDPLFSAQRLPPHGYPLEHPFNKDGYRYILAEPDPHAPDPEKLELDCWAGKPIPGDLYRACLYERVLLALHDRAPQLKISDDRLTVVGEKGYSMVRASHGVRKGAWYFEITVDEMPPDTAARLGWSQPLGNLQAPLGYDKFSYSWRSKKGTKFHQSIGKHYSSGYGQGDVLGFYINLPEDTETAKSLPDTYKDKALIKFKSYLYFEEKDFVDKAEKSLKQTPHSEIIFYKNGVNQGVAYKDIFEGVYFPAISLYKSCTVSINFGPCFKYPPKDLTYRPMSDMGWGAVVEHTLADVLYHVETEVDGRRSPPWEP

SEQ ID NO: 16286 - protein, 834 aa, Homo sapiens
MALVLGSLLLLGLCGNSFSGGQPSSTDAPKAWNYELPATNYETQDSHKAGPIGILFELVHIFLYVVQPRDFPEDTLRKFLQKAYESKIDYDKPETVILGLKIVYYEAGIILCCVLGLLFIILMPLVGYFFCMCRCCNKCGGEMHQRQKENGPFLRKCFAISLLVICIIISIGIFYGFVANHQVRTRIKRSRKLADSNFKDLRTLLNETPEQIKYILAQYNTTKDKAFTDLNSINSVLGGGILDRLRPNIIPVLDEIKSMATAIKETKEALENMNSTLKSLHQQSTQLSSSLTSVKTSLRSSLNDPLCLVHPSSETCNSIRLSLSQLNSNPELRQLPPVDAELDNVNNVLRTDLDGLVQQGYQSLNDIPDRVQRQTTTVVAGIKRVLNSIGSDIDNVTQRLPIQDILSAFSVYVNNTESYIHRNLPTLEEYDSYWWLGGLVICSLLTLIVIFYYLGLLCGVCGYDRHATPTTRGCVSNTGGVFLMVGVGLSFLFCWILMIIVVLTFVFGANVEKLICEPYTSKELFRVLDTPYLLNEDWEYYLSGKLFNKSKMKLTFEQVYSDCKKNRGTYGTLHLQNSFNISEHLNINEHTGSISSELESLKVNLNIFLLGAAGRKNLQDFAACGIDRMNYDSYLAQTGKSPAGVNLLSFAYDLEAKANSLPPGNLRNSLKRDAQTIKTIHQQRVLPIEQSLSTLYQSVKILQRTGNGLLERVTRILASLDFAQNFITNNTSSVIIEETKKYGRTIIGYFEHYLQWIEFSISEKVASCKPVATALDTAVDVFLCSYIIDPLNLFWFGIGKATVFLLPALIFAVKLAKYYRRMDSEDVYDDPSQH

SEQ ID NO: 16287 - protein, 121 aa, Homo sapiens
MSGTLEKVLCLRNNTIFKQAFSLLRFRTSGEKPIYSVGGILLSISRPYKTKPTHGIGKYKHLIKAEEISGLSATFAEIFLEIIQSSLPEGVRLSVKEHTEEDFKGRFKARPELEELLAKLK

SEQ ID NO: 16288 - protein, 1678 aa, Homo sapiens
MHPGLWLLLVTLCLTEELAAAGEKSYGKPCGGQDCSGSCQCFPEKGARGRPGPIGIQGPTGPQGFTGSTGLSGLKGERGFPGLLGPYGPKGDKGPMGVPGFLGINGIPGHPGQPGPRGPPGLDGCNGTQGAVGFPGPDGYPGLLGPPGLPGQKGSKGDPVLAPGSFKGMKGDPGLPGLDGITGPQGAPGFPGAVGPAGPPGLQGPPGPPGPLGPDGNMGLGFQGEKGVKGDVGLPGPAGPPPSTGELEFMGFPKGKKGSKGEPGPKGFPGISGPPGFPGLGTTGEKGEKGEKGIPGLPGPRGPMGSEGVQGPPGQQGKKGTLGFPGLNGFQGIEGQKGDIGLPGPDVFIDIDGAVISGNPGDPGVPGLPGLKGDEGIQGLRGPSGVPGLPALSGVPGALGPQGFPGLKGDQGNPGRTTIGAAGLPGRDGLPGPPGPPGPPSPEFETETLHNKESGFPGLRGEQGPKGNLGLKGIKGDSGFCACDGGVPNTGPPGEPGPPGPWGLIGLPGLKGARGDRGSGGAQGPAGAPGLVGPLGPSGPKGKKGEPILSTIQGMPGDRGDSGSQGFRGVIGEPGKDGVPGLPGLPGLPGDGGQGFPGEKGLPGLPGEKGHPGPPGLPGNGLPGLPGPRGLPGDKGKDGLPGQQGLPGSKGITLPCIIPGSYGPSGFPGTPGFPGPKGSRGLPGTPGQPGSSGSKGEPGSPGLVHLPELPGFPGPRGEKGLPGFPGLPGKDGLPGMIGSPGLPGSKGATGDIFGAENGAPGEQGLQGLTGHKGFLGDSGLPGLKGVHGKPGLLGPKGERGSPGTPGQVGQPGTPGSSGPYGIKGKSGLPGAPGFPGISGHPGKKGTRGKKGPPGSIVKKGLPGLKGLPGNPGLVGLKGSPGSPGVAGLPALSGPKGEKGSVGFVGFPGIPGLPGIPGTRGLKGIPGSTGKMGPSGRAGTPGEKGDRGNPGPVGIPSPRRPMSNLWLKGDKGSQGSAGSNGFPGPRGDKGEAGRPGPPGLPGAPGLPGIIKGVSGKPGPPGFMGIRGLPGLKGSSGITGFPGMPGESGSQGIRGSPGLPGASGLPGLKGDNGQTVEISGSPGPKGQPGESGFKGTKGRDGLIGNIGFPGNKGEDGKVGVSGDVGLPGAPGFPGVAGMRGEPGLPGSSGHQGAIGPLGSPGLIGPKGFPGFPGLHGLNGLPGTKGTHGTPGPSITGVPGPAGLPGPKGEKGYPGIGIGAPGKPGLRGQKGDRGFPGLQGPAGLPGAPGISLPSLIAGQPGDPGRPGLDGERGRPGPAGPPGPPGPSSNQGDTGDPGFPGIPGFSGLPGELGLKGMRGEPGFMGTPGKVGPPGDPGFPGMKGKAGPRGSSGLQGDPGQTPTAEAVQVPPGPLGLPGIDGIPGLTGDPGAQGPVGLQGSKGLPGIPGKDGPSGLPGPPGALGDPGLPGLQGPPGFEGAPGQQGPFGMPGMPGQSMRVGYTLVKHSQSEQVPPCPIGMSQLWVGYSLLFVEGQEKAHNQDLGFAGSCLPRFSTMPFIYCNINEVCHYARRNDKSYWLSTTAPIPMMPVSQTQIPQYISRCSVCEAPSQAIAVHSQDITIPQCPLGWRSLWIGYSFLMHTAAGAEGGGQSLVSPGSCLEDFRATPFIECSGARGTCHYFANKYSFWLTTVEERQQFGELPVSETLKAGQLHTRVSRCQVCMKSL

SEQ ID NO: 16289 - protein, 969 aa, Homo sapiens
MASKRKSTTPCMIPVKTVVLQDASMEAQPAETLPEGPQQDLPPEASAASSEAAQNPSSTDGSTLANGHRSTLDGYLYSCKYCDFRSHDMTQFVGHMNSEHTDFNKDPTFVCSGCSFLAKTPEGLSLHNATCHSGEASFVWNVAKPDNHVVVEQSIPESTSTPDLAGEPSAEGADGQAEIIITKTPIMKIMKGKAEAKKIHTLKENVPSQPVGEALPKLSTGEMEVREGDHSFINGAVPVSQASASSAKNPHAANGPLIGTVPVLPAGIAQFLSLQQQPPVHAQHHVHQPLPTAKALPKVMIPLSSIPTYNAAMDSNSFLKNSFHKFPYPTKAELCYLTVVTKYPEEQLKIWFTAQRLKQGISWSPEEIEDARKKMFNTVIQSVPQPTITVLNTPLVASAGNVQHLIQAALPGHVVGQPEGTGGGLLVTQPLMANGLQATSSPLPLTVTSVPKQPGVAPINTVCSNTTSAVKVVNAAQSLLTACPSITSQAFLDASIYKNKKSHEQLSALKGSFCRNQFPGQSEVEHLTKVTGLSTREVRKWFSDRRYHCRNLKGSRAMIPGDHSSIIIDSVPEVSFSPSSKVPEVTCIPTTATLATHPSAKRQSWHQTPDFTPTKYKERAPEQLRALESSFAQNPLPLDEELDRLRSETKMTRREIDSWFSERRKKVNAEETKKAEENASQEEEEAAEDEGGEEDLASELRVSGENGSLEMPSSHILAERKVSPIKINLKNLRVTEANGRNEIPGLGACDPEDDESNKLAEQLPGKVSCKKTAQQRHLLRQLFVQTQWPSNQDYDSIMAQTGLPRPEVVRWFGDSRYALKNGQLKWYEDYKRGNFPPGLLVIAPGNRELLQDYYMTHKMLYEEDLQNLCDKTQMSSQQKQTEFDLINVKDWPVWETACHVEEPNPTLCCHMPFPCPAAGHLGELPESSQTAQSLPLPSACPPPSKQQARWGSHQFFLPQCRTFPLPSNG

SEQ ID NO: 16290 - protein, 363 aa, Homo sapiens
MTGRKRKWGETGTGSGAAPAAALRWSNMSDALANAVCQRCQARFSPAERIVNSNGELYHEHCFVCAQCFRPFPEGLFYEFEGRKYCEHDFQMLFAPCCGSCGEFIIGRVIKAMNNNWHPGCFRCELCDVELADLGFVKNAGRHLCRPCHNREKAKGLGKYICQRCHLVIDEQPLMFRSDAYHPDHFNCTHCGKELTAEARELKGELYCLPCHDKMGVPICGACRRPIEGRVVNALGKQWHVEHFVCAKCEKPFLGHRHYEKKGLAYCETHYNQLFGDVCYNCSHVIEGDVVSALNKAWCVSCFSCSTCNSKLTLKNKFVEFDMKPVCKRCYEKFPLELKKRLKKLSELTSRKAQPKATDLNSA

SEQ ID NO: 16291 - protein, 74 aa, Homo sapiens
MSRYTSPVNPAVFPHLTVVLLAIGMFFTAWFFVYEVTSTKYTRDIYKELLISLVASLFMGFGVLFLLLWVGIYV

SEQ ID NO: 16292 - protein, 128 aa, Homo sapiens
MSLLGPKVLLFLAAFIITSDWIPLGVNSQRGDDVTQATPETFTEDPNLVNDPATDETVLAVLADIAPSTDDLECWDEKFTCTRLYSVHRPVKQCIHQLCFTSLRRMYIVNKEICSRLVCKEHEAMKDP

SEQ ID NO: 16293 - protein, 870 aa, Homo sapiens
MSVPNVLAKALYDNVAESPDELSFRKGDIMTVLEQDTQGLDGWWLCSLHGRQGIVPGNRLKILVGMYDKKPAGPGPGPPATPAQPQPGLHAPAPPASQYTPMLPNTYQPQPDSVYLVPTPSKAQQGLYQVPGPSPQFQSPPAKQTSTFSKQTPHHPFPSPATDLYQVPPGPGGPAQDIYQVPPSAGMGHDIYQVPPSMDTRSWEGTKPPAKVVVPTRVGQGYVYEAAQPEQDEYDIPRHLLAPGPQDIYDVPPVRGLLPSQYGQEVYDTPPMAVKGPNGRDPLLEVYDVPPSVEKGLPPSNHHAVYDVPPSVSKDVPDGPLLREETYDVPPAFAKAKPFDPARTPLVLAAPPPDSPPAEDVYDVPPPAPDLYDVPPGLRRPGPGTLYDVPRERVLPPEVADGGVVDSGVYAVPPPAEREAPAEGKRLSASSTGSTRSSQSASSLEVAGPGREPLELEVAVEALARLQQGVSATVAHLLDLAGSAGATGSWRSPSEPQEPLVQDLQAAVAAVQSAVHELLEFARSAVGNAAHTSDRALHAKLSRQLQKMEDVHQTLVAHGQALDAGRGGSGATLEDLDRLVACSRAVPEDAKQLASFLHGNASLLFRRTKATAPGPEGGGTLHPNPTDKTSSIQSRPLPSPPKFTSQDSPDGQYENSEGGWMEDYDYVHLQGKEEFEKTQKELLEKGSITRQGKSQLELQQLKQFERLEQEVSRPIDHDLANWTPAQPLAPGRTGGLGPSDRQLLLFYLEQCEANLTTLTNAVDAFFTAVATNQPPKIFVAHSKFVILSAHKLVFIGDTLSRQAKAADVRSQVTHYSNLLCDLLRGIVATTKAAALQYPSPSAAQDMVERVKELGHSTQQFRRVLGQLAAA

SEQ ID NO: 16294 - protein, 179 aa, Homo sapiens
MREYKLVVLGSGGVGKSALTVQFVQGIFVEKYDPTIEDSYRKQVEVDAQQCMLEILDTAGTEQFTAMRDLYMKNGQGFALVYSITAQSTFNDLQDLREQILRVKDTDDVPMILVGNKCDLEDERVVGKEQGQNLARQWNNCAFLESSAKSKINVNEVWSNILKMGLHLKYNIEDEWKMS

SEQ ID NO: 16295 - protein, 193 aa, Homo sapiens
MDEDGLPLMGSGIDLTKVPAIQQKRTVAFLNQFVVHTVQFLNRFSTVCEEKLADLSLRIQQIETTLNILDAKLSSIPGLDDVTVEVSPLNVTSVTNGAHPEATSEQPQNSTQDSGLQESEVSAENILTVAKDPRYARYLKMVQVGVPVMAIRNKMISEGLDPDLLERPDAPVPDGESEKTVEESSDSESSFSD

SEQ ID NO: 16296 - protein, 589 aa, Homo sapiens
MADALLADLESTTSHISKRPVFLSEETPYSYPTGNHTYQEIAVPPPVPPPPSSEALNGTILDPLDQWQPSSSRFIHQQPQSSSPVYGSSAKTSSVSNPQDSVGSPCSRVGEEEHVYSFPNKQKSAEPSPTVMSTSLGSNLSELDRLLLELNAVQHNPPGFPADEANSSPPLPGALSPLYGVPETNSPLGGKAGPLTKEKPKRNGGRGLEDVRPSVESLLDELESSVPSPVPAITVNQGEMSSPQRVTSTQQQTRISASSATRELDELMASLSDFKIQGLEQRADGERCWAAGWPRDGGRSSPGGQDEGGFMAQGKTGSSSPPGGPPKPGSQLDSMLGSLQSDLNKLGVATVAKGVCGACKKPIAGQVVTAMGKTWHPEHFVCTHCQEEIGSRNFFERDGQPYCEKDYHNLFSPRCYYCNGPILDKVVTALDRTWHPEHFFCAQCGAFFGPEGFHEKDGKAYCRKDYFDMFAPKCGGCARAILENYISALNTLWHPECFVCRECFTPFVNGSFFEHDGQPYCEVHYHERRGSLCSGCQKPITGRCITAMAKKFHPEHFVCAFCLKQLNKGTFKEQNDKPYCQNCFLKLFC

SEQ ID NO: 16297 - protein, 110 aa, Homo sapiens
MESRMWPALLLSHLLPLWPLLLLPLPPPAQGSSSSPRTPPAPARPPCARGGPSAPRHVCVWERAPPPSRSPRVPRSRRQVLPGTAPPATPSGFEEGPPSSQYPWAIVWGP

SEQ ID NO: 16298 - protein, 130 aa, Homo sapiens
MAASSRAQVLSLYRAMLRESKRFSAYNYRTYAVRRIRDAFRENKNVKDPVEIQTLVNKAKRDLGVIRRQMDSHSVAQAGVHWNDLSSLQPLPPWFKQFSCLSLPSSWDYRRTPPRLANFCILSRDVISLY

SEQ ID NO: 16299 - protein, 129 aa, Homo sapiens
MIISHFPKCVAVFALLALSVGALDTFIAAVYEHAVILPNRTETPVSKEEALLLMNKNIDVLEKAVKLAAKQGAHIIVTPEDGIYGWIFTRESIYPYLEDIPDPGVNWIPCRDPWREWNLRPRSSQGVPL

SEQ ID NO: 16300 - protein, 276 aa, Homo sapiens
MESRMWPALLLSHLLPLWPLLLLPLPPPAQGSSSSPRTPPAPARPPCARGGPSAPRHVCVWERAPPPSRSPRVPRSRRQVLPGTAPPATPSGFEEGPPSSQYPWAIVWGPTVSREDGGDPNSANPGFLDYGFAAPHGLATPHPNSDSMRGDGDGLILGEAPATLRPFLFGGRGEGVDPQLYVTITISIIIVLVATGIIFKFCWDRSQKRRRPSGQQGALRQEESQQPLTDLSPAGVTVLGAFGDSPTPTPDHEEPRGGPRPGMPHPKGAPAFQLNR

SEQ ID NO: 16301 - protein, 521 aa, Homo sapiens
MTSAFKLDFLPDMMVEGRLLVPDRINGTANKMNGALDHSDQPDPDAIKMFVGQIPRSWSEKELKELFEPYGAVYQINVLRDRSQNPPQSKGCCFVTFYTRKAALEAQNALHNIKTLPGMHHPIQMKPADSEKSNAVEDRKLFIGMVSKKCNENDIRVMFSPFGQIEECRILRGPDGLSRGCAFVTFSTRAMAQNAIKAMHQSQTMEGCSSPIVVKFADTQKDKEQRRLQQQLAQQMQQLNTATWGNLTGLGGLTPQYLALLQQATSSSNLGAFSGIQQMAGMNALQLQNLATLAAAAAAAQTSATSTNANPLSTTSSALGALTSPVAASTPNSTAGAAMNSLTSLGTLQGLAGATVGLNNINALAVAQMLSGMAALNGGLGATGLTNGTAGTMDALTQAYSGIQQYAAAALPTLYSQSLLQQQSAAGSQKEGPEGANLFIYHLPQEFGDQDILQMFMPFGNVISAKVFIDKQTNLSKCFGFVSYDNPVSAQAAIQAMNGFQIGMKRLKVQLKRSKNDSKPY

SEQ ID NO: 16302 - protein, 78 aa, Homo sapiens
MLLVLLSVVLLALSSAQSTDNDVNYEDFTFTIPATTTPTRTPSTLSTPISFCQPAGSIIILPEGQTSKTSPGATTLVI

SEQ ID NO: 16303 - protein, 454 aa, Homo sapiens
MDPSNWSSFIFQGHAQNPLQVGAELQSRFFASQGCAQSPFQAAPAPPPTPQAPAAEPLQVDLLPVLAAAQESAAAAAAAAAAAAAVAAAPPAPAAASTVDTAALKQPPAPPPPPPPVSAPAAEAAPPASAATIAAAAATAVVAPTSTVAVAPVASALEKKTKSKGPYICALCAKEFKNGYNLRRHEAIHTGAKAGRVPSGAMKMPTMVPLSLLSVPQLSGAGGGGGEAGAGGGAAAVAAGGVVTTTASGKRIRKNHACEMCGKAFRDVYHLNRHKLSHSDEKPYQCPVCQQRFKRKDRMSYHVRSHDGAVHKPYNCSHCGKSFSRPDHLNSHVRQVHSTERPFKCEKCEAAFATKDRLRAHTVRHEEKVPCHVCGKMLSSAYISDHMKVHSQGPHHVCELCNKGTGEVCPMAAAAAAAAAAAAAAVAAPPTAVGSLSGAEGVPVSSQPLPSQPW

SEQ ID NO: 16304 - protein, 134 aa, Homo sapiens
MTLLLLPLLLASLLASCSCNKANKHKPWIEAEYQGIVMENDNTVLLNPPLFALDKDAPLRYAGEICGFRLHGSGVPFEAVILDKATGEGLIRAKEPVDCEAQKEHTFTIQAYDCGEGPDGANTKKSHKATVHVR

SEQ ID NO: 16305 - protein, 384 aa, Homo sapiens
MAAAMPLALLVLLLLGPGGWCLAEPPRDSLREELVITPLPSGDVAATFQFRTRWDSELQREGDWSLFRMFSRTLTEPCPLASESRVYVDITTYNQDNETLEVHPPPTTTYQDVILGTRKTYAIYDLLDTAMINNSRNLNIQLKWKRPPENEAPPVPFLHAQRYVSGYGLQKGELSTLLYNTHPYRAFPVLLLDTVPWYLRLYVHTLTITSKGKENKPSYIHYQPAQDRLQPHLLEMLIQLPANSVTKVSIQFERALLKWTEYTPDPNHGFYVSPSVLSALVPSMVAAKPVDWEESPLFNSLFPVSDGSNYFVRLYTEPLLVNLPTPDFSMPYNVICLTCTVVAVCYGSFYNLLTRTFHIEEPRTGGLAKRLANLIRRARGVPPL

SEQ ID NO: 16306 - protein, 362 aa, Homo sapiens
MAAAEEEPKPKKLKVEAPQALRENILFGMGNPLLDISAVVDKDFLDKYSLKPNDQILAEDKHKELFDELVKKFKVEYHAGGSTQNSIKVAQWMIQQPHKAATFFGCIGIDKFGEILKRKAAEAHVDAHYYEQNEQPTGTCAACITGDNRSLIANLAAANCYKKEKHLDLEKNWMLVEKARVCYIAGFFLTVSPESVLKVAHHASENNRIFTLNLSAPFISQFYKESLMKVMPYVDILFGNETEAATFAREQGFETKDIKEIAKKTQALPKMNSKRQRIVIFTQGRDDTIMATESEVTAFAVLDQDQKEIIDTNGAGDAFVGGFLSQLVSDKPLTECIRAGHYAASIIIRRTGCTFPEKPDFH

SEQ ID NO: 16307 - protein, 160 aa, Homo sapiens
MNGDPKHHYPGCINLSFAYVEGESLLMALKDVALSSGSACTSASLEPSYVLRAIGTDEDLAHSSIRFGIGRFTTEEEVDYTVEKCIQHVKRLREMSLKVGFNWLPTGLTWPLLLVKEIHLLFYQVCVVSAQHGCGHPFARSPNCGGDHGHSPLLLWIDHS

SEQ ID NO: 16308 - protein, 85 aa, Homo sapiens
MKTLFLGVTLGLAAALSFTLEEEDEGGSVHPEENPDAEDGGAWQIQRLWGQEAHIPAGAARDGRLRLLLQRPAPWGPALHGKACG

SEQ ID NO: 16309 - protein, 328 aa, Homo sapiens
MSAAGLLAPAPAQAGAPPAPEYYPEEDEELESAEDDERSCRGRESDEDTEDASETDLAKHDEEDYVEMKEQMYQDKLASLKRQLQQLQEGTLQEYQKRMKKLDQQYKERIRNAELFLQLETEQVERNYIKEKKAAVKEFEDKKVELKENLIAELEEKKKMIENEKLTMELTGDSMEVKPIMTRKLRRRPNDPVPIPDKRRKPAPAQLNYLLTDEQIMEDLRTLNKLKSPKRPASPSSPEHLPATPAESPAQRFEARIEDGKLYYDKRWYHKSQAIYLESKDNQKLSCVISSVGANEIWVRKTSDSTKMRIYLGQLQRGLFVIRRRSAA

SEQ ID NO: 16310 - protein, 374 aa, Homo sapiens
MAAPSQQRLVVVSVSPQSRASLAARFQLNPTDTARKLTSFFKKIGVHFVFDTAFSRHFSLLESQREFVRRFRGQADCRQALPLLASACPGWICYAEKTHGSFILPHISTARSPQQVMGSLVKDFFAQQQHLTPDKIYHVTVMPCYDKKLEASRPDFFNQEHQTRDVDCVLTTGEVFRLLEEEGVSLPDLEPAPLDSLCSGASAEEPTSHRGGGSGGYLEHVFRHAARELFGIHVAEVTYKPLRNKDFQEVTLEKEGQVLLHFAMAYGFRNIQNLVQRLKRGRCPYHYVEVMACPSGCLNGGGQLQAPDRPSRELLQHVERLYGMVRAEAPEDAPGVQELYTHWLQGTDSECAGRLLHTQYHAVEKASTGLGIRW

SEQ ID NO: 16311 - protein, 281 aa, Homo sapiens
MPGPRRLRSPGGSGCSSRGSGPRLSTRRWRPCCYCGGSGVWLLRTPPSPSAWPARRCPRHRFEFCEPAFVVGNCLQIASDSHQYDRIYCGAGVQKDHENYMKILLKVGGILVMPIEDQLTQIMRTGQNTWESKNILAVSFAPLVQPSKNDNGKPDSVGLPPCAVRNLQDLARIYIRRTLRNFINDEMQAKGIPQRAPPKRKRKRVKQRINTYVFVGNQLIPQPLDSEEDEKMEEDNKEEEEKDHNEAMKPEEPPQNLLREKIMKLPLPESLKAYLTYFRDK

SEQ ID NO: 16312 - protein, 468 aa, Homo sapiens
MRWILCWSLTLCLMAQTALGALHTKRPQVVTKYGTLQGKQMHVGKTPIQVFLGVPFSRPPLGILRFAPPEPPEPWKGIRDATTYPPGCLQESWGQLASMYVSTRERYKWLRFSEDCLYLNVYAPARAPGDPQLPVMVWFPGGAFIVGAASSYEGSDLAAREKVVLVFLQHRLGIFGFLSTDDSHARGNWGLLDQMAALRWVQENIAAFGGDPGNVTLFGQSAGAMSISGLMMSPLASGLFHRAISQSGTALFRLFITSNPLKVAKKVAHLAGCNHNSTQILVNCLRALSGTKVMRVSNKMRFLQLNFQRDPEEIIWSMSPVVDGVVIPDDPLVLLTQGKVSSVPYLLGVNNLEFNWLLPYIMKFPLNRQAMRKETITKMLWSTRTLLNITKEQVPLVVEEYLDNVNEHDWKMLRNRMMDIVQDATFVYATLQTAHYHRETPMMGICPAGHATTRMKSTCSWILPQEWA

SEQ ID NO: 16313 - protein, 1109 aa, Homo sapiens
MSLDFRRHFVNLSPFTITVVLLLSACFVTSSLGGTDKELRLVDGENKCSGRVEVKVQEEWGTVCNNGWSMEAVSVICNQLGCPTAIKAPGWANSSAGSGRIWMDHVSCRGNESALWDCKHDGWGKHSNCTHQQDAGVTCSDGSNLEMRLTRGGNMCSGRIEIKFQGRWGTVCDDNFNIDHASVICRQLECGSAVSFSGSSNFGEGSGPIWFDDLICNGNESALWNCKHQGWGKHNCDHAEDAGVICSKGADLSLRLVDGVTECSGRLEVRFQGEWGTICDDGWDSYDAAVACKQLGCPTAVTAIGRVNASKGFGHIWLDSVSCQGHEPAIWQCKHHEWGKHYCNHNEDAGVTCSDGSDLELRLRGGGSRCAGTVEVEIQRLLGKVCDRGWGLKEADVVCRQLGCGSALKTSYQVYSKIQATNTWLFLSSCNGNETSLWDCKNWQWGGLTCDHYEEAKITCSAHREPRLVGGDIPCSGRVEVKHGDTWGSICDSDFSLEAASVLCRELQCGTVVSILGGAHFGEGNGQIWAEEFQCEGHESHLSLCPVAPRPEGTCSHSRDVGVVCSRYTEIRLVNGKTPCEGRVELKTLGAWGSLCNSHWDIEDAHVLCQQLKCGVALSTPGGARFGKGNGQIWRHMFHCTGTEQHMGDCPVTALGASLCPSEQVASVICSGNQSQTLSSCNSSSLGPTRPTIPEESAVACIESGQLRLVNGGGRCAGRVEIYHEGSWGTICDDSWDLSDAHVVCRQLGCGEAINATGSAHFGEGTGPIWLDEMKCNGKESRIWQCHSHGWGQQNCRHKEDAGVICSEFMSLRLTSEASREACAGRLEVFYNGAWGTVGKSSMSETTVGVVCRQLGCADKGKINPASLDKAMSIPMWVDNVQCPKGPDTLWQCPSSPWEKRLASPSEETWITCDNKIRLQEGPTSCSGRVEIWHGGSWGTVCDDSWDLDDAQVVCQQLGCGPALKAFKEAEFGQGTGPIWLNEVKCKGNESSLWDCPARRWGHSECGHKEDAAVNCTDISVQKTPQKATTGRSSRQSSFIAVGILGVVLLAIFVALFFLTKKRRQRQRLAVSSRGENLVHQIQYREMNSCLNADDLDLMNSSGGHSEPH

SEQ ID NO: 16314 - protein, 216 aa, Homo sapiens
MVGHLHLQGMEDSLKEQGREGLLDSPDSGLPPSPSPSPPFYSLAPGILDARAGGAGASSEPPGPSEARAPPSQLPNPPASEMRPRMLPVFFGESIKVNPEPTHEIRCNSEVKYASEKHFQDKVFYAPVPTVTAYSETIVAAPNCTWRNYRSQLTLEPRPRALRFRSTTIIFPKHARSTFRTTLHCSLGRPSRWFTASVQLQLCQDPAPSLLGPATL

SEQ ID NO: 16315 - protein, 149 aa, Homo sapiens
MAGIFYFALFSCLFGICDAVTGSRVYPANEVTLLDSRSVQGELGWIASPLEGGWEEVSIMDEKNTPIRTYQVCNVMEPSQNNWLRTDWITREGAQRVYIEIKFTLRDCNSLPGVMGTCKETFNLYYYESDNDKERFIRENQFVKIDTIA

SEQ ID NO: 16316 - protein, 61 aa, Homo sapiens
MAKNKLRGPKSRNVFHIASQKNFKAKNKAKPVTTNLKKIPQQRHESKPVNVDEATRLMALL

SEQ ID NO: 16317 - protein, 322 aa, Homo sapiens
MYRRIHEAIIQSPPIDYFDVFKESKEQNFYGSQESIIALCTHLQQLIRTIEDLDENQLKDEFFKLLQISLWGNKCDLSLSGGESSSQNTNVLNSLEDLKPFILLNDMEHLWSLLSNCKKTREKASATRVYIVLDNSGFELVTDLILADFLLSSELATEVHFYGKTIPWFVSDTTIHDFNWLIEQVKHSNHKWMSKCGADWEEYIKMGKWVYHNHIFWTLPHEYCAMPQVAPDLYAELQKAHLILFKGDLNYRKLTGDRKWEFSVPFHQALNGFHPAPLCTIRTLKAEIQVGLQPGQGEQLLASEPSWWTTGKYGIFQYDGPL

SEQ ID NO: 16318 - protein, 1173 aa, Homo sapiens
MRAKEAAETGLRPLLPACTERLASGVYRETGVRCAGGHMDPGSRWRNLPSGPSLKHLTDPSYGIPREQQKAALQELTRAHVESFNYAVHEGLGLAVQAIPPFEFAFKDERISFTILDAVISPPTVPKGTICKEANVYPAECRGRRSTYRGKLTADINWAVNGISKGIIKQFLGYVPIMVKSKLCNLRNLPPQALIEHHEEAEEMGGYFIINGIEKVIRMLIMPRRNFPIAMIRPKWKTRGPGYTQYGVSMHCVREEHSAVNMNLHYLENGTVMLNFIYRKELFFLPLGFALKALVSFSDYQIFQELIKGKEDDSFLRNSVSQMLRIVMEEGCSTQKQVLNYLGECFRVKLNVPDWYPNEQAAEFLFNQCICIHLKSNTEKFYMLCLMTRKLFALAKGECMEDNPDSLVNQEVLTPGQLFLMFLKEKLEGWLVSIKIAFDKKAQKTSVSMNTDNLMRIFTMGIDLTKPFEYLFATGNLRSKTGLGLLQDSGLCVVADKLNFIRYLSHFRCVHRGADFAKMRTTTVRRLLPESWGFLCPVHTPDGEPCGLMNHLTAVCEVVTQFVYTASIPALLCNLGVTPIDGAPHRSYSECYPVLLDGVMVGWVDKDLAPGIADSLRHFKVLREKRIPPWMEVVLIPMTGKPSLYPGLFLFTTPCRLVRPVQNLALGKEELIGTMEQIFMNVAIFEDEVFAGVTTHQELFPHSLLSVIANFIPFSDHNQSPRNMYQCQMGKQTMGFPLLTYQDRSDNKLYRLQTPQSPLVRPSMYDYYDMDNYPIGTNAIVAVISYTGYDMEDAMIVNKASWERGFAHGSVYKSEFIDLSEKIKQGDSSLVFGIKPGDPRVLQKLDDDGLPFIGAKLQYGDPYYSYLNLNTGESFVMYYKSKENCVVDNIKVCSNDTGSGKFKCVCITMRVPRNPTIGDKFASRHGQKGILSRLWPAEDMPFTESGMVPDILFNPHGFPSRMTIGMLIESMAGKSAALHGLCHDATPFIFSEENSALEYFGEMLKAAGYNFYGTERLYSGISGLELEADIFIGVVYYQRLRHMVSDKFQVRTTGARDRVTNQPIGGRNVQGGIRFGEMERDALLAHGTSFLLHDRLFNCSDRSVAHVCVKCGSLLSPLLEKPPPSWSAMRNRKYNCTLCSRSDTIDTVSVPYVFRYFVAELAAMNIKVKLDVV

SEQ ID NO: 16319 - protein, 483 aa, Homo sapiens
MSFSDSSATFLLNEGSADSYTSRPSLDSDVSLEEDRESARREVESQAQQQLERAKHKPVAFAVRTNVSYCGVLDEECPVQGSGVNFEAKDFLHIKEKYSNDWWIGRLVKEGGDIAFIPSPQRLESIRLKQEQKARRSGNPSSLSDIGNRRSPPPSLAKQKQKQAEHVPPYDVVPSMRPVVLVGPSLKGYEVTDMMQKALFDFLKHRFDGRISITRVTADLSLAKRSVLNNPGKRTIIERSSARSSIAEVQSEIERIFELAKSLQLVVLDADTINHPAQLAKTSLAPIIVFVKVSSPKVLQRLIRSRGKSQMKHLTVQMMAYDKLVQCPPESFDVILDENQLEDACEHLAEYLEVYWRATHHPAPGPGLLGPPSAIPGLQNQQLLGERGEEHSPLERDSLMPSDEASESSRQAWTGSSQRSSRHLEEDYADAYQDLYQPHRQHTSGLPSANGHDPQDRLLAQDSEHNHSDRNWQRNRPWPKDSY

SEQ ID NO: 16320 - protein, 597 aa, Homo sapiens
MGHLPTGIHGARRLLPLLWLFVLFKNATAFHVTVQDDNNIVVSLEASDVISPASVYVVKITGESKNYFFEFEEFNSTLPPPVIFKASYHGLYYIITLVVVNGNVVTKPSRSITVLTKPLPVTSVSIYDYKPSPETGVLFEIHYPEKYNVFTRVNISYWEGKDFRTMLYKDFFKGKTVFNHWLPGMCYSNITFQLVSEATFNKSTLVEYSGVSHEPKQHRTAPYPPQNISVRIVNLNKNNWEEQSGNFPEESFMRSQDTIGKEKLFHFTEETPEIPSGNISSGWPDFNSSDYETTSQPYWWDSASAAPESEDEFVSVLPMEYENNSTLSETEKSTSGSFSFFPVQMILTWLPPKPPTAFDGFHIHIEREENFTEYLMVDEEAHEFVAELKEPGKYKLSVTTFSSSGSCETRKSQSAKSLSFYISPSGEWIEELTEKPQHVSVHVLSSTTALMSWTSSQENYNSTIVSVVSLTCQKQKESQRLEKQYCTQVNSSKPIIENLVPGAQYQVVIYLRKGPLIGPPSDPVTFAIVPTGIKDLMLYPLGPTAVVLSWTRPYLGVFRKYVVEMFYFNPATMTSEWTTYYEIAATVSLTASVVIFP

SEQ ID NO: 16321 - protein, 482 aa, Homo sapiens
MALRRLGAALLLLPLLAAVEETLMDSTTATAELGWMVHPPSGWEEVSGYDENMNTIRTYQVCNVFESSQNNWLRTKFIRRRGAHRIHVEMKFSVRDCSSIPSVPGSCKETFNLYYYEADFDSATKTFPNWMENPWVKVDTIAADESFSQVDLGGRVMKINTEVRSFGPVSRSGFYLAFQDYGGCMSLIAVRVFYRKCPRIIQNGAIFQETLSGAESTSLVAARGSCIANAEEVDVPIKLYCNGDGEWLVPIGRCMCKAGFEAVENGTVCRGCPSGTFKANQGDEACTHCPINSRTTSEGATNCVCRNGYYRADLDPLDMPCTTIPSAPQAVISSVNETSLMLEWTPPRDSGGREDLVYNIICKSCGSGRGACTRCGDNVQYAPRQLGLTEPRIYISDLLAHTQYTFEIQAVNGVTDQSPFSPQFASVNITTNQAAPSAVSIMHQVSRTVDSITLSWSQPDQPNGVILDYELQYYEKMKTQRS

SEQ ID NO: 16322 - protein, 116 aa, Homo sapiens
MSAPAQPPAEGTEGTAPGGGPPGPPPNMTSNRRLQQTQAQVEEVVDIIRVNVDKVLERDQKLSELDDRADALQAGASQFESSAAKLKRKYWWKNCKMMIMLGAICAIIVVVIVRRG

SEQ ID NO: 16323 - protein, 178 aa, Homo sapiens
MLLILLSVALLALSSAQNLNEDVSQEESPSLIAGNPQGPSPQGGNKPQGPPPPPGKPQGPPPQGGNKPQGPPPPGKPQGPPPQGDKSRSPRSPPGKPQGPPPQGGKPQGPPAQGGSKSQSARSPPGKPQGPPQQEGNNPQGPPPPAGGNPQQPQAPPAGQPQGPPRPPQGGRPSRPPQ

SEQ ID NO: 16324 - protein, 719 aa, Homo sapiens
MSVRFRVGREENAQWWLLYLLVPALFCRAGGSIPIPQKLFGEVTSPLFPKPYPNNFETTTVITVPTGYRVKLVFQQFDLEPSEGCFYDYVKISADKKSLGRFCGQLGSPLGNPPGKKEFMSQGNKMLLTFHTDFSNEENGTIMFYKGFLAYYQAVDLDECASRSKSGEEDPQPQCQHLCHNYVGGYFCSCRPGYELQEDRHSCQAECSSELYTEASGYISSLEYPRSYPPDLRCNYSIRVERGLTLHLKFLEPFDIDDHQQVHCPYDQLQIYANGKNIGEFCGKQRPPDLDTSSNAVDLLFFTDESGDSRGWKLRYTTEIIKCPQPKTLDEFTIIQNLQPQYQFRDYFIATCKQGYQLIEGNQVLHSFTAVCQDDGTWHRAMPRCKIKDCGQPRNLPNGDFRYTTTMGVNTYKARIQYYCHEPYYKMQTRAGSRESEQGVYTCTAQGIWKNEQKGEKIPRCLPVCGKPVNPVEQRQRIIGGQKAKMGNFPWQVFTNIHGRGGGALLGDRWILTAAHTLYPKEHEAQSNASLDVFLGHTNVEELMKLGNHPIRRVSVHPDYRQDESYNFEGDIALLELENSVTLGPNLLPICLPDNDTFYDLGLMGYVSGFGVMEEKIAHDLRFVRLPVANPQACENWLRGKNRMDVFSQNMFCAGHPSLKQDACQGDSGGVFAVRDPNTDRWVATGIVSWGIGCSRGYGFYTKVLNYVDWIKKEMEEED

SEQ ID NO: 16325 - protein, 935 aa, Homo sapiens
MFSLISGIFTSGTWEEKSDEISFADFKFSVTHHYLVQESTDKEGKDELLEDVVPQSMQDLLGMNNDFPPRAHCLVRWYGLREFVVIAPAAHSDAVLSESKCNLLLSSVSIALGNTGCQVPLFVQIHHKWRRMYVGECQGPGVRTDFEMVHLRKVPNQYTHLSGLLDIFKSKIGCPLTPLPPVSIAIRFTYVLQDWQQYFWPQQPPDIDALVGGEVGGLEFGKLPFGACEDPISELHLATTWPHLTEGIIVDNDVYSDLDPIQAPHWSVRVRKAENPQCLLGDFVTEFFKICRRKESTDEILGRSAFEEEGKETADITHALSKLTEPASVPIHKLSVSNMVHTAKKKIRKHRGVEESPLNNDVLNTILLFLFPDAVSEKPLDGTTSTDNNNPPSESEDYNLYNQFKSAPSDSLTYKLALCLCMINFYHGGLKGVAHLWQEFVLEMRFRWENNFLIPGLASGPPDLRCCLLHQKLQMLNCCIERKKARDEGKKTSASDVTNIYPGDAGKAGDQLVPDNLKETDKEKGEVGKSWDSWSDSEEEFFECLSDTEELKGNGQESGKKGGPKEMANLRPEGRLYQHGKLTLLHNGEPLYIPVTQEPAPMTEDLLEEQSEVLAKLGTSAEGAHLRARMQSACLLSDMESFKAANPGCSLEDFVRWYSPRDYIEEEVIDEKGNVVLKGELSARMKIPSNMWVEAWETAKPIPARRQRRLFDDTREAEKVLHYLAIQKPADLARHLLPCVIHAAVLKVKEEESLENISSVKKIIKQIISHSSKVLHFPNPEDKKLEEIIHQITNVEALIARARSLKAKFGTEKCEQEEEKEDLERFVSCLLEQPEVLVTGAGRGHAGRIIHKLFVNAQRAAAMTPPEEELKRMGSPEERRQNSVSDFPPPAGREFILRTTVPRPAPYSKALPQRMYSVLTKEDFRLAVKIIDGDV

SEQ ID NO: 16326 - protein, 343 aa, Homo sapiens
MPRPRLLAALCGALLCAPSLLVALECVEPLGLENGNIANSQIAASSVRVTFLGLQHWVPELARLNRAGMVNAWTPSSNDDNPWIQVNLLRRMWVTGVVTQGASRLASHEYLKAFKVAYSLNGHEFDFIHDVNKKHKEFVGNWNKNAVHVNLFETPVEAQYVRLYPTSCHTACTLRFELLGCELNGCANPLGLKNNSIPDKQITASSSYKTWGLHLFSWNPSYARLDKQGNFNAWVAGSYGNDQWLQVDLGSSKEVTGIITQGARNFGSVQFVASYKVAYSNDSANWTEYQDPRTGSSKIFPGNWDNHSHKKNLFETPILARYVRILPVAWHNRIALRLELLGC

SEQ ID NO: 16327 - protein, 837 aa, Homo sapiens
MADSSEGPRAGPGEVAELPGDESGTPGDGRPNLRMKFQGAFRKGVPNPIDLLESTLYESSVVPGPKKAPMDSLFDYGTYRHHSSDNKRWRKKIIEKQPQSPKAPAPQPPPILKVFNRPILFDIVSRGSTADLDGLLPFLLTHKKRLTDEEFREPSTGKTCLPKALLNLSNGRNDTIPVLLDIAERTGNMREFINSPFRDIYYRGQTALHIAIERRCKHYVELLVAQGADVHAQARGRFFQPKDEGGYFYFGELPLSLAACTNQPHIVNYLTENPHKKADMRRQDSRGNTVLHALVAIADNTRENTKFVTKMYDLLLLKCARLFPDSNLEAVLNNDGLSPLMMAAKTGKIGIFQHIIRREVTDEDTRHLSRKFKDWAYGPVYSSLYDLSSLDTCGEEASVLEILVYNSKIENRHEMLAVEPINELLRDKWRKFGAVSFYINVVSYLCAMVIFTLTAYYQPLEGTPPYPYRTTVDYLRLAGEVITLFTGVLFFFTNIKDLFMKKCPGVNSLFIDGSFQLLYFIYSVLVIVSAALYLAGIEAYLAVMVFALVLGWMNALYFTRGLKLTGTYSIMIQKILFKDLFRFLLVYLLFMIGYASALVSLLNPCANMKVCNEDQTNCTVPTYPSCRDSETFSTFLLDLFKLTIGMGDLEMLSSTKYPVVFIILLVTYIILTFVLLLNMLIALMGETVGQVSKESKHIWKLQWATTILDIERSFPVFLRKAFRSGEMVTVGKSSDGTPDRRWCFRVDEVNWSHWNQNLGIINEDPGKNETYQYYGFSHTVGRLRRDRWSSVVPRVVELNKNSNPDEVVVPLDSMGNPRCDGHQQGYPRKWRTDDAPL

SEQ ID NO: 16328 - protein, 956 aa, Homo sapiens [sequence omitted]

SEQ ID NO: 16329 - protein, 147 aa, Homo sapiens
MRCCHICKLPGRVMGIRVLRLSLVVILVLLLVAGALTALLPSVKEDKMLMLRREIKSQGKSTMDSFTLIMQTYNRTDLLLKLLNHYQAVPNLHKVIVVWNNIGEKAPDELWNSLGPHPIPVIFKQQTANRMRNRLQVFPELETNAIS

SEQ ID NO: 16330 - protein, 541 aa, Homo sapiens
MVADPPRDSKGLAAAEPTANGGLALASIEDQGAAAGGYCGSRDQVRRCLRANLLVLLTVVAVVAGVALGLGVSGAGGALALGPERLSAFVFPGELLLRLLRMIILPLVVCSLIGGAASLDPGALGRLGAWALLFFLVTTLLASALGVGLALALQPGAASAAINASVGAAGSAENAPSKEVLDSFLDLARNIFPSNLVSAAFRSYSTTYEERNITGTRVKVPVGQEVEGMNILGLVVFAIVFGVALRKLGPEGELLIRFFNSFNEATMVLVSWIMWYAPVGIMFLVAGKIVEMEDVGLLFARLGKYILCCLLGHAIHGLLVLPLIYFLFTRKNPYRFLWGIVTPLATAFGTSSSSATLPLMMKCVEENNGVAKHISRFILPIGATVNMDGAALFQCVAAVFIAQLSQQSLDFVKIITILVTATASSVGAAGIPAGGVLTLAIILEAVNLPVDHISLILAVDWLVDRSCTVLNVEGDALGAGLLQNYVDRTESRSTEPELIQVKSELPLDPLPVPTEEGNPLLKHYRGPAGDATVASEKESVM

SEQ ID NO: 16331 - protein, 906 aa, Homo sapiens
MEKLLRLCCWYSWLLLFYYNFQVRGVYSRSQDHPGFQVLASASHYWPLENVDGIHELQDTTGASRTHKLTVLPSRNATFVYSNDSAYSNLSATVDIVEGKVNKGIYLKEEKGVTLLYYGRYNSSCISKPEQCGPEGVTFSFFWKTQGEQSRPIPSAYGGQVISNGFKVCSSGGRGSVELYTRDNSMTWEASFSPPGPYWTHVLFTWKSKEGLKVYVNGTLSTSDPSGKVSRDYGESNVNLVIGSEQDQAKCYENGAFDEFIIWERALTPDEIAMYFTAAIGKHALLSSTLPSLFMTSTASPVMPTDAYHPIITNLTEERKTFQSPGVILSYLQNVSLSLPSKSLSEQTALNLTKTFLKAVGEILLLPGWIALSEDSAVVLSLIDTIDTVMGHVSSNLHGSTPQVTVEGSSAMAEFSVAKILPKTVNSSHYRFPAHGQSFIQIPHEAFHRHAWSTVVGLLYHSMHYYLNNIWPAHTKIAEAMHHQDCLLFATSHLISLEVSPPPTLSQNLSGSPLITVHLKHRLTRKQHSEATNSSNRVFVYCAFLDFSSGEGVWSNHGCALTRGNLTYSVCRCTHLTNFAILMQVVPLELARGHQVALSSISYVGCSLSVLCLVATLVTFAVLSSVSTIRNQRYHIHANLSFAVLVAQVLLLISFRLEPGTTPCQVMAVLLHYFFLSAFAWMLVEGLHLYSMVIKVFGSEDSKHRYYYGMGWGFPLLICIISLSFAMDSYGTSNNCWLSLASGAIWAFVAPALFVIVVNIGILIAVTRVISQISADNYKIHGDPSAFKLTAKAVAVLLPILGTSWVFGVLAVNGCAVVFQYMFATLNSLQGLFIFLFHCLLNSEVRAAFKHKTKVWSLTSSSARTSNAKPFHSDLMNGTRPGMASTKLSPWDKSSHSAHRVDLSAV

SEQ ID NO: 16332 - protein, 2689 aa, Homo sapiens
MVPPVWTLLLLVGAALFRKEKPPDQKLVVRSSRDNYVLTQCDFEDDAKPLCDWSQVSADDEDWVRASGPSPTGSTGAPGGYPNGEGSYLHMESNSFHRGGVARLLSPDLWEQGPLCVHFAHHMFGLSWGAQLRLLLLSGEEGRRPDVLWKHWNTQRPSWMLTTVTVPAGFTLPTRLMFEGTRGSTAYLDIALDALSIRRGSCNRVCMMQTCSFDIPNDLCDWTWIPTASGAKWTQKKGSSGKPGVGPDGDFSSPGSGCYMLLDPKNARPGQKAVLLSPVSLSSGCLSFSFHYILRGQSPGAALHIYASVLGSIRKHTLFSGQPGPNWQAVSVNYTAVGRIQFAVVGVFGKTPEPAVAVDATSIAPCGEGFPQCDFEDNAHPFCDWVQTSGDGGHWALGHKNGPVHGMGPAGGFPNAGGHYIYLEADEFSQAGQSVRLVSRPFCAPGDICVEFAYHMYGLGEGTMLELLLGSPAGSPPIPLWKRVGSQRPYWQNTSVTVPSGHQQPMQLIFKGIQGSNTASVVAMGFILINPGTCPVKVLPELPPVSPVSSTGPSETTGLTENPTISTKKPTVSIEKPSVTTEKPTVPKEKPTIPTEKPTISTEKPTIPSEKPNMPSEKPTIPSEKPTILTEKPTIPSEKPTIPSEKPTISTEKPTVPTEEPTTPTEETTTSMEEPVIPTEKPSIPTEKPSIPTEKPTISMEETIISTEKPTISPEKPTIPTEKPTIPTEKSTISPEKPTTPTEKPTIPTEKPTISPEKPTTPTEKPTISPEKLTIPTEKPTIPTEKPTIPTEKPTISTEEPTTPTEETTISTEKPSIPMEKPTLPTEETTTSVEETTISTEKLTIPMEKPTISTEKPTIPTEKPTISPEKLTIPTEKLTIPTEKPTIPIEETTISTEKLTIPTEKPTISPEKPTISTEKPTIPTEKPTIPTEETTISTEKLTIPTEKPTISPEKLTIPTEKPTISTEKPTIPTEKLTIPTEKPTIPTEKPTIPTEKLTALRPPHPSPTATGLAALVMSPHAPSTPMTSVILGTTTTSRSSTERCPPNARYESCACPASCKSPRPSCGPLCREGCVCNPGFLFSDNHCIQASSCNCFYNNDYYEPGAEWFSPNCTEHCRCWPGSRVECQISQCGTHTVCQLKNGQYGCHPYAGTATCLVYGDPHYVTFDGRHFGFMGKCTYILAQPCGNSTDPFFRVTAKNEEQGQEGVSCLSKVYVTLPESTVTLLKGRRTLVGGQQVTLPAIPSKGVFLGASGRFVELQTEFGLRVRWDGDQQLYVTVSSTYSGKLCGLCGNYDGNSDNDHLKLDGSPAGDKEELGNSWQTDQDEDQECQKYQVVNSPSCDSSLQSSMSGPGFCGRLVDTHGPFETCLLHVKAASFFDSCMLDMCGFQGLQHLLCTHMSTMTTTCQDAGHAVKPWREPHFCPMACPPNSKYSLCAKPCPDTCHSGFSGMFCSDRCVEACECNPGFVLSGLECIPRSQCGCLHPAGSYFKVGERWYKPGCKELCVCESNNRIRCQPWRCRAQEFCGQQDGIYGCHAQGAATCTASGDPHYLTFDGALHHFMGTCTYVLTRPCWSRSQDSYFVVSATNENRGGILEVSYIKAVHVTVFDLSISLLRGCKVMLNGHRVALPVWLAQGRVTIRLSSNLVLLYTNFGLQVRYDGSHLVEVTVPSSYGGQLCGLCGNYNNNSLDDNLRPDRKLAGDSMQLGAAWKLPESSEPGCFLVGGKPSSCQENSMADAWNKNCAILINPQGPFSQCHQVVPPQSSFASCVHGQCGTKGDTTALCRSLQAYASLCAQAGQAPAWRNRTFCPMRCPPGSSYSPCSSPCPDTCSSINNPRDCPKALPCAESCECQKGHILSGTSCVPLGQCGCTDPAGSYHPVGERWYTENTCTRLCTCSVHNNITCFQSTCKPNQICWALDGLLHCRASGVGVCQLPGESHYVSFDGSNHSIPDACTLVLVKVCHPAMALPFFKISAKHEKEEGGTEAFRLHEVYIDIYDAQVTLQKGHRVLINSKQVTLPAISQIPGVSVKSSSIYSIVNIKIGVQVKFDGNHLLEIEIPTTYYGKVCGMCGNFNDEEEDELMMPSDEVANSDSEFVNSWKDKDIDPSCQSLLVDEQQIPAEQQENPSGNCRAADLRRAREKCEAALRAPVWAQCASRIDLTPFLVDCANTLCEFGGLYQALCQALQAFGATCQSQGLKPPLWRNSSFCPLECPAYSSYTNCLPSCSPSCWDLDGRCEGAKVPSACAEGCICQPGYVLSEDKCVPRSQCGCKDAHGGSIPLGKSWVSSGCTEKCVCTGGAIQCGDFRCPSGSHCQLTSDNSNSNCVSDKSEQCSVYGDPRYLTFDGFSYRLQGRMTYVLIKTVDVLPEGVEPLLVEGRNKMDPPRSSIFLQEVITTVYGYKVQLQAGLELVVNNQKMAVPYRPNEHLRVTLWGQRLYLVTDFELVVSFGGRKNAVISLPSMYEGLVSGLCGNYDKNRKNDMMLPSGALTQNLNTFGNSWEVKTEDALLRFPRAIPAEEEGQGAELGLRTGLQVSECSPEQLASNSTQACRVLADPQGPFAACHQTVAPEPFQEHCVLDLCSAQDPREQEELRCQVLSGYAILCQEAGAALAGWRDRTLCAMECPAGTIYQSCMTPCPASCANLADPGDCEGPCVEGCASIPGYAYSGTQSLPWLTVAAPAMASTTSWAAAF

SEQ ID NO: 16333 - protein, 491 aa, Homo sapiens
MCNTNMSVPTDGAVTTSQIPASEQETLVRPKPLLLKLLKSVGAQKDTYTMKEVLFYLGQYIMTKRLYDEKQQHIVYCSNDLLGDLFGVPSFSVKEHRKIYTMIYRNLVVVNQQESSDSGTSVSENRCHLEGGSDQKDLVQELQEEKPSSSHLVSRPSTSSRRRAISETEENSDELSGERQRKRHKSDSISLSFDESLALCVIREICCERSSSSESTGTPSNPDLDAGVSEHSGDWLDQDSVSDQFSVEFEVESLDSEDYSLSEEGQELSDEDDEVYQVTVYQAGESDTDSFEEDPEISLADYWKCTSCNEMNPPLPSHCNRCWALRENWLPEDKGKDKGEISEKAKLENSTQAEEGFDVPDCKKTIVNDSRESCVEENDDKITQASQSQESEDYSQPSTSSSIIYSSQEDVKEFEREETQDKEESVESSLPLNAIEPCVICQGRPKNGCIVHGKTGHLMACFTCAKKLKKRNKPCPVCRQPIQMIVLTYFP

SEQ ID NO: 16334 - protein, 194 aa, Homo sapiens
MLCSAAGEKSVFLWSMRSYTLIRKLEGHQSSVVSCDFSPDSALLVTASYDTNVIMWDPYTGERLRSLHHTQVDPAMDDSDVHISSLRSVCFSPEGLYLATVADDRLLRIWALELKTPIAFAPMTNGLCCTFFPHGGVIATGTRDGHVQFWTAPRVLSSLKHLCRKALRSFLTTYQVLALPIPKKMKEFLTYRTF

SEQ ID NO: 16335 - protein, 963 aa, Homo sapiens
MKPDRDTLDEYFEYDAEEFLVSLALLITEGRTPECSVKGRTESFHCPPAQSCYPVTTKHECSDKLAQCRQARRTRSEVTLLWKNNLPIMVEMMLLPDCCYSDDGPTTEGIDLNDPAIKQDALLLERWILEPVPRQNGDRFIEEKTLLLAVRSFVFFSQLSAWLSVSHGAIPRNILYRISAADVDLQWNFSQTPIEHVFPVPNVSHNVALKVSVQSLPRQSNYPVLTCSIHTNIGLYEKRIQQHKLKTHQHHNPNEAEQCGTNSSQRLCSKQTWTMAPESVLHAKSGPSPEYTAAVKNIKLYPGTGSKSDHGTSQANILGFSGIGDIKSQETSVRTLKSFSMVDSSISNRQSFWQSAGETNPLIGSLIQERQEIIARIAQHLIHCDPSTSHVSGRPFNTQESSSLHSKLFRVSQENENVGKGKEAFSMTFGSPEFSSPEDTNEGKIRLKPETPRSETCISNDFYSHMPVGETNPLIGSLLQERQDVIARIAQHLEHIDPTASHIPRQSFNMHDSSSVASKVFRSSYEDKNLLKKNKDESSVSISHTKCSLLGDISDGKNLVPNKCFTSFKNNSKEKCSLKHQTRNQCQNNPSEIIQSTYQETQNKSSSLSTSSILSQHKENNLDLTSRFKEQEMSNGIDKQYSNCTTIDKQICTNKYKEKIINENYNPKFFGNLQSDDSKKNDSKIKVTVLEMSEYLNKYESMSSNKDSKRPKTCEQNTQLNSIENYLNKDNEGFKCKKSDQLKNEQDKQEDPTNEKSQNYSQRRSIKDCLSTCEQPKNTEVLRTTLKHSNVWRKHNFHSLDGTSTRAFHPQTGLPLLSSPVPQRKTQSGCFDLDSSLLHLKSFSSRSPRPCLNIEDDPDIHEKPFLSSSAPPITSLSLLGNFEESVLNYRFDPLGIVDGFTAEVGASGAFCPTHLTLPVEVSFYSVSDDNAPSPYMGVITLESLGKRGYRVPPSGTIQVVCVL

SEQ ID NO: 16336 - protein, 613 aa, Homo sapiens
MLLASAPRRRRFLQRAKCCDCSASLSHQYYEKDGQLFCKKDYWARYGESCHGCSEQITKGLVMVAGELKYHPECFICLTCGTFIGDGDTYTLVEHSKLYCGHCYYQTVVTPVIEQILPDSPGSHLPHTVTLVSIPASSHGKRGLSVSIDPPHGPPGCGTEHSHTVRVQGVDPGCMSPDVKNSIHVGDRILEINGTPIRNVPLDEIDLLIQETSRLLQLTLEHDPHDTLGHGLGPETSPLSSPAYTPSGEAGSSARQKPVLRSCSIDRSPGAGSLGSPASQRKDLGRSESLRVVCRPHRIFRPSDLIHGEVLGKGCFGQAIKVTHRETGEVMVMKELIRFDEETQRTFLKEVKVMRCLEHPNVLKFIGVLYKDKRLNFITEYIKGGTLRGIIKSMDSQYPWSQRVSFAKDIASGMAYLHSMNIIHRDLNSHNCLVRENKNVVVADFGLARLMVDEKTQPEGLRSLKKPDRKKRYTVVGNPYWMAPEMINGRSYDEKVDVFSFGIVLCEIIGRVNADPDYLPRTMDFGLNVRGFLDRYCPPNCPPSFFPITVRCCDLDPEKRPSFVKLEHWLETLRMHLAGHLPLGPQLEQLDRGFWETYRRGESGLPAHPEVPD

SEQ ID NO: 16337 - protein, 523 aa, Homo sapiens
MKKFKRRLSLTLRGSQTIDESLSELAEQMTIEENSSKDNEPIVKNGRPPTSHSMHSFLHQYTGSFKKPPLRRPHSVIGGSLGSFMAMPRNGSRLDIVHENLKMGSDGESDQASGTSSDEVQSPTGVCLRNRIHRRISMEDLNKRLSLPADIRIPDGYLEKLQINSPPFDQPMSRRSRRASLSEIGFGKMETYIKLEKLGEGTYATVYKGRSKLTENLVALKEIRLEHEEGAPCTAIREVSLLKDLKHANIVTLHDIVHTDKSLTLVFEYLDKDLKQYMDDCGNIMSMHNVKLFLYQILRGLAYCHRRKVLHRDLKPQNLLINEKGELKLADFGLARAKSVPTKTYSNEVVTLWYRPPDVLLGSSEYSTQIDMWGVGCIFFEMASGRPLFPGSTVEDELHLIFRLLGTPSQETWPGISSNEEFKNYNFPKYKPQPLINHAPRLDSEGIELITKFLQYESKKRVSAEEAMKHVYFRSLGPRIHALPESVSIFSLKEIQLQKDPGFRNSSYPETGVFVINHFTCRS

SEQ ID NO: 16338 - protein, 2642 aa, Homo sapiens
MSGGAAEKQSSTPGSLFLSPPAPAPKNGSSSDSSVGEKLGAAAADAVTGRTEEYRRRRHTMDKDSRGAAATTTTTEHRFFRRSVICDSNATALELPGLPLSLPQPSIPAAVPQSAPPEPHREETVTATATSQVAQQPPAAAAPGEQAVAGPAPSTVPSSTSKDRPVSQPSLVGSKEEPPPARSGSGGGSAKEPQEERSQQQDDIEELETKAVGMSNDGRFLKFDIEIGRGSFKTVYKGLDTETTVEVAWCELQDRKLTKSERQRFKEEAEMLKGLQHPNIVRFYDSWESTVKGKKCIVLVTELMTSGTLKTYLKRFKVMKIKVLRSWCRQILKGLQFLHTRTPPIIHRDLKCDNIFITGPTGSVKIGDLGLATLKRASFAKSVIGTPEFMAPEMYEEKYDESVDVYAFGMCMLEMATSEYPYSECQNAAQIYRRVTSGVKPASFDKVAIPEVKEIIEGCIRQNKDERYSIKDLLNHAFFQEETGVRVELAEEDDGEKIAIKLWLRIEDIKKLKGKYKDNEAIEFSFDLERDVPEDVAQEMVESGYVCEGDHKTMAKAIKDRVSLIKRKREQRQLVREEQEKKKQEESSLKQQVEQSSASQTGIKQLPSASTGIPTASTTSASVSTQVEPEEPEADQHQQLQYQQPSISVLSDGTVDSGQGSSVFTESRVSSQQTVSYGSQHEQAHSTGTVPGHIPSTVQAQSQPHGVYPPSSVPQSMAHPCGGTPTYPESQIFFPTIHERPVSFSPPPTCPPKVAISQRRKSTSFLEAQTHHFQPLLRTVGQSLLPPGGSPTNWTPEAVVMLGTTASRVTGESCEIQVHPMFEPSQVYSDYRPGLVLPEEAHYFIPQEAVYVAGVHYQARVAEQYEGIPYNSSVLSSPMKQIPEQKPVQGGPTSSSVFEFPSGQAFLVGHLQNLRLDSGLGPGSPLSSISAPISTDATRLKFHPVFVPHSAPAVLTHNNESRSNCVFEFHVHTPSSSSGEGGGILPQRVYRNRQVAVDLNQEELPPQSVGLHGYLQPVTEEKHNYHAPELTVSVVEPIGQNWPIGSPEYSSDSSQITSSDPSDFQSPPPTGGAAAPFGSDVSMPFIHLPQTVLQESPLFFCFPQGTTSQQVLTASFSSGGSALHPQAQGQSQGQPSSSSLTGVSSSQPIQHPQQQQGIQQTAPPQQTVQYSLSQTSTSSEATTAQPVSQPQAPQVLPQVSAGKQGFPPRLPPQYPGDSNIAPSSNVASVCIHSTVLSPPMPTEVLATPGYFPTVVQPYVESNLLVPMGGVGGQVQVSQPGGSLAQAPTTSSQQAVLESTQGVSQVAPAEPVAVAQTQATQPTTLASSVDSAHSDVASGMSDGNENVPSSSGRHEGRTTKRHYRKSVRSRSRHEKTSRPKLRILNVSNKGDRVVECQLETHNRKMVTFKFDLDGDNPEEIATIMVNNDFILAIERESFVDQVREIIEKADEMLSEDVSVEPEGDQGLESLQGKDDYGFSGSQKLEGEFKQPIPASSMPQQIGIPTSSLTQVVHSAGRRFIVSPVPESRLRESKVFPSEITDTVAASTAQSPGMNLSHSASSLSLQQAFSELRRAQMTEGPNTAPPNFSHTGPTFPVVPPFLSSIAGVPTTAAATAPVPATSSPPNDISTSVIQSEVTVPTEEGIAGVATSTGVVTSGGLPIPPVSESPVLSSVVSSITIPAVVSISTTSPSLQVPTSTSEIVVSSTALYPSVTVSATSASAGGSTATPGPKPPAVVSQQAAGSTTVGATLTSVSTTTSFPSTASQLCIQLSSSTSTPTLAETVVVSAHSLDKTSHSSTTGLAFSLSAPSSSSSPGAGVSSYISQPGGLHPLVIPSVIASTPILPQAAGPTSTPLLPQVPSIPPLVQPVANVPAVQQTLIHSQPQPALLPNQPHTHCPEVDSDTQPKAPGIDDIKTLEEKLRSLFSEHSSSGAQHASVSLETSLVIESTVTPGIPTTAVAPSKLLTSTTSTCLPPTNLPLGTVALPVTPVVTPGQVSTPVSTTTSGVKPGTAPSKPPLTKAPVLPVGTELPAGTLPSEQLPPFPGPSLTQSQQPLEDLDAQLRRTLSPEMITVTSAVGPVSMAAPTAITEAGTQPQKGVSQVKEGPVLATSSGAGVFKMGRFQVSVAADGAQKEGKNKSEDAKSVHFESSTSESSVLSSSSPESTLVKPEPNGITIPGISSDVPESAHKTTASEAKSDTGQPTKVGRFQVTTTANKVGRFSVSKTEDKITDTKKEGPVASPPFMDLEQAVLPAVIPKKEKPELSEPSHLNGPSSDPEAAFLSRDVDDGSGSPHSPHQLSSKSLPSQNLSQSLSNSFNSSYMSSDNESDIEDEDLKLELRRLRDKHLKEIQDLQSRQKHEIESLYTKLGKVPPAVIIPPAAPLSGRRRRPTKSKGSKSSRSSSLGNKSPQLSGNLSGQSAASVLHPQQTLHPPGNIPESGQNQLLQPLKPSPSSDNLYSAFTSDGAISVPSLSAPGQGTSSTNTVGATVNSQAAQAQPPAMTSSRKGTFTDDLHKLVDNWARDAMNLSGRRGSKGHMNYEGPGMARKFSAPGQLCISMTSNLGGSAPISAASATSLGHFTKSMCPPQQYGFPATPFGAQWSGTGGPAPQPLGQFQPVGTASLQNFNISNLQKSISNPPGSNLRTT

SEQ ID NO: 16339 - protein, 207 aa, Homo sapiens
MIISHFPKCVAVFALLALSVGALDTFIAAVYEHAVILPNRTETPVSKEEALLLMNKNIDVLEKAVKLAAKQGAHIIVTPEDGIYGWIFTRESIYPYLEDIPDPGVNWIPCRDPWRFGNTPVQQRLSCLAKDNSIYVVANIGDKKPCNASDSQCPPDGRYQYNTDVVFDSQGKLLARYHKGVESTPQKQSRCTTMTWKQRVVSCCYQN

SEQ ID NO: 16340 - protein, 133 aa, Homo sapiens
MIISHFPKCVAVFALLALSVGALDTFIAAVYEHAVILPNRTETPVSKEEALLLMNKNIDVLEKAVKLAAKQGAHIIVTPEDGIYGWIFTRESIYPYLEDIPDPGVNWIPCRDPWSTIFLHLKFSLISPRIQNL

SEQ ID NO: 16341 - protein, 172 aa, Homo sapiens
MQRRLVQQWSVAVFLLSYAVPSCGRSVEGLSRRLKRAVSEHQLLHDKGKSIQDLRRRFFLHHLIAEIHTAEIRATSEVSPNSKPSPNTKNHPVRFGSDDEGRYLTQETNKVETYKEQPLKTPGKKKKGKPGKRKEQEKKKRRTRSAWLDSGVTGSGLEGDHLSDTSTTSLEL

SEQ ID NO: 16342 - protein, 321 aa, Homo sapiens
MISRHLQNNLMSVDPASSQAMELSDVTLIEGVGNEVMVVAGVVVLILALVLAWLSTYVADSGSNQLLGAIVSAGDTSVLHLGHVDHLVAGQGNPEPTELPHPSEGNDEKAEEAGEGRGDSTGEAGAGGGVEPSLEHLLDIQGLPKRQAGAGSSSPEAPLRSEDSTCLPPSPGLITVRLKFLNDTEELAVARPEDTVGALKSKYFPGQESQMKLIYQGRLLQDPARTLRSLNITDNCVIHCHRSPPGSAVPGPSASLAPSATEPPSLGVNVGSLMVPVFVVLLGVVWYFRINYRQFFTAPATVSLVGVTVFFSFLVFGMYGR

SEQ ID NO: 16343 - protein, 171 aa, Homo sapiens
MESRMWPALLLSHLLPLWPLLLLPLPPPAQGSSSSPRTPPAPARPPCARGGPSAPRHVCVWERAPPPSRSPRVPRSRRQVLPGTAPPATPSGFEEGPPSSQYPWAIVWGPTVSREDGGDPNSANPGFLDYGFAAPHGLATPHPNSDSMRGDGDGLILGEAPATLRPFLFGG

SEQ ID NO: 16344 - protein, 386 aa, Homo sapiens
MEEEGKKGKKYLGQLTSIPGYLNPSSRTEILHFIDNAKRAHQLPGHLTQEHDAVLSLSAYNVKLAWRDGEDIILRVPIHDIAAVSYVRDDAAHLVVLKTAQDPGISPSQSLCAESSRGLSAGSLSESAVGPVEACCLVILAAESKVAAEELCCLLGQVFQVVYTESTIDFLDRAIFDGASTPTHHLSLHSDDSSTKVDIKETYEVEASTFCFPESVDVGGASPHSKTISESELSASATELLQDYMLTLRTKLSSQEIQQFAALLHEYRNGASIHEFCINLRQLYGDSRKFLLLGLRPFIPEKDSQHFENFLETIGVKDGRGIITDSFGRHRRALSTTSSSTTNGNRATGSSDDRSAPSEGDEWDRMISDISSDIEALGCSMDQDSA

SEQ ID NO: 16345 - protein, 455 aa, Homo sapiens
MLHPETSPGRGHLLAVLLALLGTAWAEVWPPQLQEQAPMAGALNRKESFLLLSLHNRLRSWVQPPAADMRRLDWSDSLAQLAQARAALCGIPTPSLASGLWRTLQVGWNMQLLPAGLASFVEVVSLWFAEGQRYSHAAGECARNATCTHYTQLVWATSSQLGCGRHLCSAGQAAIEAFVCAYSPRGNWEVNGKTIVPYKKGAWCSLCTASVSGCFKAWDHAGGLCEVPRNPCRMSCQNHGRLNISTCHCHCPPGYTGRYCQVRCSLQCVHGRFREEECSCVCDIGYGGAQCATKVHFPFHTCDLRIDGDCFMVSSEADTYYRARMKCQRKGGVLAQIKSQKVQDILAFYLGRLETTNEVIDSDFETRNFWIGLTYKTAKDSFRWATGEHQAFTSFAFGQPDNHGLVWLSAAMGFGNCVELQASAAFNWNNQRCKTRNRYICQFAQEHISRWGPGS

SEQ ID NO: 16346 - protein, 233 aa, Homo sapiens
MKQLIEDTEKNKVYVAMVTDYGAFIKIPGCRKQGLVHRTHMSSCRVDKPSEIVDVGDKVWVKLIGREMKNDRIKVSLSMKVVNQGTGKDLDPNNVIIEQEERRRRSFQDYTGQKITLEAVLNTTCKKCGCKGHFAKDCFMQPGGTKYSLIPDEEEEKEEAKSAEFEKPDPTRNPSRKRKKEKKKKKHRDRKSSDSDSSDSESDTGKRARHTSKDSKAAKKKKKKKKHKKKHKE

SEQ ID NO: 16347 - protein, 700 aa, Homo sapiens
MELEVPDEAESAEAGAVPSEAAWAAESGAAAGLAQKKAAPTEVLSMTAQPGPGHGKKLGHRGVDASGETTYKKTTSSTLKGAIQLGIGYTVGHLSSKPERDVLMQDFYVVESIFFPSEGSNLTPAHHFQDFRFKTYAPVAFRYFRELFGIRPDDYLYSLCNEPLIELSNPGASGSLFYVTSDDEFIIKTVMHKEAEFLQKLLPGYYMNLNQNPRTLLPKFYGLYCVQSGGKNIRVVVMNNILPRVVKMHLKFDLKGSTYKRRASKKEKEKSFPTYKDLDFMQDMPEGLLLDADTFSALVKTLQRDCLVLESFKIMDYSLLLGVHNIDQHERERQAQGAQSTSDEKRPVGQKALYSTAMESIQGGAARGEAIESDDTMGGIPAVNGRGERLLLHIGIIDILQSYRFIKKLEHTWKALVHDGDTVSVHRPSFYAERFFKFMSNTVFRKNSSLKSSPSKKGRGGALLAVKPLGPTAAFSASQIPSEREEAQYDLRGARSYPTLEDEGRPDLLPCTPPSFEEATTASIATTLSSTSLSIPERSPSETSEQPRYRRRTQSSGQDGRPQEEPPAEEDLQQITVQVEPACSVEIVVPKEEDAGVEASPAGASAAVEVETASQASDEEGAPASQASDEEDAPATDIYFWRLWGPHAPTWPWRREGRAACLCPYPPHVVTPFPGTGLCASWSPDGTGGLGAMSCCVSVS

SEQ ID NO: 16348 - protein, 406 aa, Homo sapiens
MSGCPFLGNNFGYTFKKLPVEGSEEDKSQTGVNRASKGGLIYGNYLHLEKVLNAQELQSETKGNKIHDEHLFIITHQAYELWFKQILWELDSVREIFQNGHVRDERNMLKVVSRMHRVSVILKLLVQQFSILETMTALDFNDFREYLSPASGFQSLQFRLLENKIGVLQNMRVPYNRRHYRDNFKGEENELLLKSEQEKTLLELVEAWLERTPGLEPHGFNFWGKLEKNITRGLEEEFIRIQAKEESEEKEEQVAEFQKQKEVLLSLFDEKRHEHLLSKGERRLSYRALQGALMIYFYREEPRFQVPFQLLTSLMDIDSLMTKWRYNHVCMVHRMLGSKAGTGGSSGYHYLRSTVSDRYKVFVDLFNLSTYLIPRHWIPKMNPTIHKFLYTAEYCDSSYFSSDESD

SEQ ID NO: 16349 - protein, 947 aa, Homo sapiens
METQELRGALALLLLCFFTSASQDLQVIDLLTVGESRQMVAVAEKIRTALLTAGDIYLLSTFRLPPKQGGVLFGLYSRQDNTRWLEASVVGKINKVLVRYQREDGKVHAVNLQQAGLADGRTHTVLLRLRGPSRPSPALHLYVDCKLGDQHAGLPALAPIPPAEVDGLEIRTGQKAYLRMQGFVESMKIILGGSMARVGALSECPFQGDESIHSAGEQTKALVTQLTLFNQILVELRDDIRDQVKEMSLIRNTIMECQVCGFHEQRSHCSPNPCFRGVDCMEVYEYPGYRCGPCPPGLQGNGTHCSDINECAHADPCFPGSSCINTMPGFHCEACPRGYKGTQVSGVGIDYARASKQVCNDIDECNDGNNGGCDPNSICTNTVGSFKCGPCRLGFLGNQSQGCLPARTCHSPAHSPCHIHAHCLFERNGAVSCQCNVGWAGNGNVCGTDTDIDGYPDQALPCMDNNKHCKQDNCLLTPNSGQEDADNDGVGDQCDDDADGDGIKNVEDNCRLFPNKDQQNSDTDSFGDACDNCPNVPNNDQKDTDGNGEGDACDNDVDGDGIPNGLDNCPKVPNPLQTDRDEDGVGDACDSCPEMSNPTQTDADSDLVGDVCDTNEDSDGDGHQDTKDNCPQLPNSSQLDSDNDGLGDECDGDDDNDGIPDYVPPGPDNCRLVPNPNQKDSDGNGVGDVCEDDFDNDAVVDPLDVCPESAEVTLTDFRAYQTVVLDPEGDAQIDPNWVVLNQGMEIVQTMNSDPGLAVGYTAFNGVDFEGTFHVNTVTDDDYAGFLFSYQDSGRFYVVMWKQTEQTYWQATPFRAVAQPGLQLKAVTSVSGPGEHLRNALWHTGHTPDQVRLLWTDPRNVGWRDKTSYRWQLLHRPQVGYIRVKLYEGPQLVADSGVIIDTSMRGGRLGVFCFSQENIIWSNLQYRCNDTVPEDFEPFRRQLLQGRV

SEQ ID NO: 16350 - protein, 171 aa, Homo sapiens
MVWKWMPLLLLLVCVATMCSAQDRTDLLNVCMDAKHHKTKPGPEDKLHDQCSPWKKNACCTASTSQELHKDTSRLYNFNWDHCGKMEPACKRHFIQDTCLYECSPNLGPWIQQVNQSWRKERFLDVPLCKEDCQRWWEDCHTSHTCKSNWHRGWDWTSGVNKCPAGALCRT

SEQ ID NO: 16351 - protein, 89 aa, Homo sapiens
MKTGLFFLCLLGTAAAIPTNARLLSDHSKPTAETVAPDNTAIPSLRAEAEENEKETAVSTEDDSHHKAEKSSVLKSKEESHEQSAEQGK

SEQ ID NO: 16352 - protein, 194 aa, Homo sapiens
MSPSGRLCLLTIVGLILPTRGQTLKDTTSSSSADSTIMDIQVPTRAPDAVYTELQPTSPTPTWPADETPQPQTQTQQLEGTDGPLVTDPETHKSTKAAHPTDDTTTLSERPSPSTDVQTDPQTLKPSGFHEDDPFFYDEHTLRKRGLLVAAVLFITGIIILTSENWGWVGRTPRPGGGLMTEGWVLKGPWAILF

SEQ ID NO: 16353 - protein, 962 aa, Homo sapiens
MNFLRGVMGGQSAGPQHTEAETIQKLCDRVASSTLLDDRRNAVRALKSLSKKYRLEVGIQAMEHLIHVLQTDRSDSEIIGYALDTLYNIISNEEEEEVEENSTRQSEDLGSQFTEIFIKQQENVTLLLSLLEEFDFHVRWPGVKLLTSLLKQLGPQVQQIILVSPMGVSRLMDLLADSREVIRNDGVLLLQALTRSNGAIQKIVAFENAFERLLDIISEEGNSDGGIVVEDCLILLQNLLKNNNSNQNFFKEGSYIQRMKPWFEVGDENSGWSAQKVTNLHLMLQLVRVLVSPTNPPGATSSCQKAMFQCGLLQQLCTILMATGVPADILTETINTVSEVIRGCQVNQDYFASVNAPSNPPRPAIVVLLMSMVNERQPFVLRCAVLYCFQCFLYKNQKGQGEIVSTLLPSTIDATGNSVSAGQLLCGGLFSTDSLSNWCAAVALAHALQENATQKEQLLRVQLATSIGNPPVSLLQQCTNILSQGSKIQTRVGLLMLLCTWLSNCPIAVTHFLHNSANVPFLTGQIAENLGEEEQLVQGLCALLLGISIYFNDNSLESYMKEKLKQLIEKRIGKENFIEKLGFISKHELYSRASQKPQPNFPSPEYMIFDHEFTKLVKELEGVITKAIYKSSEEDKKEEEVKKTLEQHDNIVTHYKNMIREQDLQLEELRQQVSTLKCQNEQLQTAVTQQVSQIQQHKDQYNLLKIQLGKDNQHQGSYSEGAQMNGIQPEEIGRLREEIEELKRNQELLQSQLTEKDSMIENMKSSQTSGTNEQSSAIVSARDSEQVAELKQELATLKSQLNSQSVEITKLQTEKQELLQKTEAFAKSVEVQGETETIIATKTTDVEGRLSALLQETKELKNEIKALSEERTAIKEQLDSSNSTIAILQTEKDKLELEITDSKKEQDDLLVLLADQDQKILSLKNKLKDLGHPVEEEDELESGDQEDEDDESEDPGKDLDHI

SEQ ID NO: 16354 - protein, 403 aa, Homo sapiens
MDSTMDDAVAGDFALINKLDIQCDLKTLSDDIKESLESEGKNSKKEEPQELLQSQDFVGEKLGSGEPSHSVKVHTVPKPGKGADLSKPPCRKAKEIRKERKRLKLMQQNPAGELEGFQAQGHPPSLFPPKAKSNQPKSLEDLIFESLPENASHKLEVRVVRSSPPSSQFKATLLESYQVYKRYQMVIHKNPPDTPTESQFTRFLCSSPLEAETPPNGPDCGYGSFHQQYWLDGKIIAVGVIDILPNCVSSVYLYYDPDYSFLSLGVYSALREIAFTRQLHEKTSQLSYYYMGFYIHSCPKMKYKGQYRPSDLLCPETYVWVPIEQCLPSLENSKYCRFNQDPEAVDEDRSTEPDRLQVFHKRAIMPYGVYKKQQKDPSEEAAVLQYASLVGQKCSERMLLFRN

SEQ ID NO: 16355 - protein, 301 aa, Homo sapiens
MARGDAPRDSYHLVGISFFILGLGTLLPWNFFITAIPYFQARLAGAGNSTARILSTNHTGPEDAFNFNNWVTLLSQLPLLLFTLLNSFLYQCVPETVRILGSLLAILLLFALTAALVKVDMSPGPFFSITMASVCFINSFSAVLQGSLFGQLGTMPSTYSTLFLSGQGLAGIFAALAMLLSMASGVDAETSALGYFITPCVGILMSIVCYLSLPHLKFARYYLANKSSQAQAQELETKAELLQSDENGIPSSPQKVALTLDLDLEKEPESEPDEPQKPGKPSVFTVFQKSPCPSSPPSQPW

SEQ ID NO: 16356 - protein, 186 aa, Homo sapiens
MKRMLSLRDQRLKEKDRLKPKKKEKKDPSALKEREVPQHPSCLFFQYNTQLGPPYHILVDTNFINFSIKAKLDLVQSMMDCLYAKCIPCITDCVMAEIEKLGQKYRVALRIAKDPRFERLPCTHKGTYADDCLVQRVTQHKCYIVATVDRDLKRRIRKIPGVPIMYISNHRYNIERMPDDYGAPRF

SEQ ID NO: 16357 - protein, 114 aa, Homo sapiens
MASAPISMLAMLFTLSGLRAQSVAQPEDQVNVAEGNPLTVKCTYSVSGNPYLFWYVQYPNRGLQFLLKYITGDNLVKGSYGFEAEFNKSQTSFHLKKPSALVSDSALYFCAVRD

SEQ ID NO: 16358 - protein, 607 aa, Homo sapiens
MPQLNGGGGDDLGANDELISFKDEGEQEEKSSENSSAERDLADVKSSLVNESETNQNSSSDSEAERRPPPRSESFRDKSRESLEEAAKRQDGGLFKGPPYPGYPFIMIPDLTSPYLPNGSLSPTARTLHFQSGSTHYSAYKTIEHQIAVQYLQMKWPLLDVQAGSLQSRQALKDARSPSPAHIVSNKVPVVQHPHHVHPLTPLITYSNEHFTPGNPPPHLPADVDPKTGIPRPPHPPDISPYYPLSPGTVGQIPHPLGWLVPQQGQPVYPITTGGFRHPYPTALTVNASMSSFLSSRFPPHMVPPHHTLHTTGIPHPAIVTPTVKQESSQSDVGSLHSSKHQDSKKEEEKKKPHIKKPLNAFMLYMKEMRAKVVAECTLKESAAINQILGRRWHALSREEQAKYYELARKERQLHMQLYPGWSARDNYGKKKKRKRDKQPGETNDANTPKKCRALFGLDRQTLWCKPCRRKKKCVRYIQGEGSCLSPPSSDGSLLDSPPPSPNLLGSPPRDAKSQTEQTQPLSLSLKPDPLAHLSMMPPPPALLLAEATHKASALCPNGALDLPPAALQPAAPSSSIAQPSTSSLHSHSSLAGTQPQPLSLVTKSLE

SEQ ID NO: 16359 - protein, 367 aa, Homo sapiens
MKGVDDLDFFIGDEAIEKPTYATKWPIRHGIVEDWDLMERFMEQVIFKYLRAEPEDHYFLLTEPPLNTPENREYTAEIMFESFNVPGLYIAVQAVLALAASWTSRQVGERTLTGTVIDSGDGVTHVIPVAEGYVIGSCIKHIPIAGRDITYFIQQLLRDREVGIPPEQSLETAKAVKERYSYVCPDLVKEFNKYDTDGSKWIKQYTGINAISKKEFSIDVGYERFLGPEIFFHPEFANPDFTQPISEVVDEVIQNCPIDVRRPLYKNIVLSGGSTMFRDFGRRLQRDLKRTVDARLKLSEELSGGRLKPKPIDVQVITHHMQRYAVWFGGSMLASTPEFYQVCHTKKDYEEIGPSICRHNPVFGVMS

SEQ ID NO: 16360 - protein, 920 aa, Homo sapiens
MHEATSAETKRSKRKRCEVWGENPNPNDWRRVDGWPVGLKNVGNTCWFSAVIQSLFQLPEFRRLVLSYSLPQNVLENCRSHTEKRNIMFMQELQYLFALMMGSNRKFVDPSAALDLLKGAFRSSEEQQQDVSEFTHKLLDWLEDAFQLAVNVNSPRNKSENPMVQLFYGTFLTEGVREGKPFCNNETFGQYPLQVNGYRNLDECLEGAMVEGDVELLPSDHSVKYGQERWFTKLPPVLTFELSRFEFNQSLGQPEKIHNKLEFPQIIYMDRYMYRSKELIRNKRECIRKLKEEIKILQQKLERYVKYGSGPARFPLPDMLKYVIEFASTKPASESCPPESDTHMTLPLSSVHCSVSDQTSKESTSTESSSQDVESTFSSPEDSLPKSKPLTSSRSSMEMPSQPAPRTVTDEEINFVKTCLQRWRSEIEQDIQDLKTCIASTTQTIEQMYCDPLLRQVPYRLHAVLVHEGQANAGHYWAYIYNQPRQSWLKYNDISVTESSWEEVERDSYGGLRNVSAYCLMYINDKLPYFNAEAAPTESDQMSEVEALSVELKHYIQEDNWRFEQEVEEWEEEQSCKIPQMESSTNSSSQDYSTSQEPSVASSHGVRCLSSEHAVIVKEQTAQAIANTARAYEKSGVEAALSEAFHEEYSRLYQLAKETPTSHSDPRLQHVLVYFFQNEAPKRVVERTLLEQFADKNLSYDERSISIMKVAQAKLKEIGPDDMNMEEYKKWHEDYSLFRKVSVYLLTGLELYQKGKYQEALSYLVYAYQSNAALLMKGPRRGVKESVIALYRRKCLLELNAKAASLFETNDDHSVTEGINVMNELIIPCIHLIINNDISKDDLDAIEVMRNHWCSYLGQDIAENLQLCLGEFLPRLLDPSAEIIVLKEPPTIRPNSPYDLCSRFAAVMESIQGVSTVTVK

SEQ ID NO: 16361 - protein, 111 aa, Homo sapiens
MRAWIFFLLCLAGRALAAPQQEALPDETEVVEETVAEVTEVSVGANPVQVEVGEFDDGAEETEEEVVAENPCQNHHCKHGKVCELDENNTPMCVCQDPTSCPAPIGEFEKV

SEQ ID NO: 16362 - protein, 357 aa, Homo sapiens
MMLKGITRLISRIHKAKHGDQHEGQHYNISPQDLETVFPHGLPPRFVMQVKTFSEACLMVRKPALELLHYLKNTSFAYPAIRYLLYGEKGTGKTLSLCHVIHFCAKQDWLILHIPDAHLWVKNCRDLLQSSYNKQRFDQPLEASTWLKNFKTTNERFLNQIKVQEKYVWNKRESTEKGSPLGEVVEQGITRVRNATDAVGIVLKELKRQSSLGMFHLLVAVDGINALWGRTTLKREDKSPIAPEELALVHNLRKMMKNDWHGGAIVSALSQTGSLFKPRKAYLPQELLGKEGFDALDPFIPILVSNYNPKEFESCIQYYLENNWLQHEKAPTEEGKKELLFLSNANPSLLERHCAYL

SEQ ID NO: 16363 - protein, 347 aa, Homo sapiens
MRACISLVLAVLCGLAWADLYSAPTSCQGRCYEAFDKHHQCHCNARCQEFGNCCKDFESLCSDHEVSHSSDAITKEEIQSISEKIYRADTNKAQKEDIVLNSQNCISPSETRNQVDRCPKPLFTYVNEKLFSKPTYAAFINLLNNYQRATGHGEHFSAQELAEQDAFLREIMKTAVMKELYSFLHHQNRYGSEQEFVDDLKNMWFGLYSRGNEEGDSSGFEHVFSGEVKKGKVTGFHNWIRFYLEEKEGLVDYYSHIYDGPWDSYPDVLAMQFNWDGYYKEVGSAFIGSSPEFEFALYSLCFIARPGKVCQLSLGGYPLAVRTYTWDKSTYGNGKKYIATAYIVSST

SEQ ID NO: 16364 - protein, 1442 aa, Homo sapiens
MREAAAALVPPPAFAVTPAAAMEEPPPPPPPPPPPPEPETESEPECCLAARQEGTLGDSACKSPESDLEDFSDETNTENLYGTSPPSTPRQMKRMSTKHQRNNVGRPASRSNLKEKMNAPNQPPHKDTGKTVENVEEYSYKQEKKIRAALRTTERDRKKNVQCSFMLDSVGGSLPKKSIPDVDLNKPYLSLGCSNAKLPVSVPMPIARPARQTSRTDCPADRLKFFETLRLLLKLTSVSKKKDREQRGQENTSGFWLNRSNELIWLELQAWHAGRTINDQDFFLYTARQAIPDIINEILTFKVDYGSFAFVRDRAGFNGTSVEGQCKATPGTKIVGYSTHHEHLQRQRVSFEQVKRIMELLEYIEALYPSLQALQKDYEKYAAKDFQDRVQALCLWLNITKDLNQKLRIMGTVLGIKNLSDIGWPVFEIPSPRPSKGNEPEYEGDDTEGELKELESSTDESEEEQISDPRVPEIRQPIDNSFDIQSRDCISKKLERLESEDDSLGWGAPDWSTEAGFSRHCLTSIYRPFVDKALKQMGLRKLILRLHKLMDGSLQRARIALVKNDRPVEFSEFPDPMWGSDYVQLSRTPPSSEEKCSAVSWEELKAMDLPSFEPAFLVLCRVLLNVIHECLKLRLEQRPAGEPSLLSIKQLVRECKEVLKGGLLMKQYYQFMLQEVLEDLEKPDCNIDAFEEDLHKMLMVYFDYMRSWIQMLQQLPQASHSLKNLLEEEWNFTKEITHYIRGGEAQAGKLFCDIAGMLLKSTGSFLEFGLQESCAEFWTSADDSSASDEIRRSVIEISRALKELFHEARERASKALGFAKMLRKDLEIAAEFRLSAPVRDLLDVLKSKQYVKVQIPGLENLQMFVPDTLAEEKSIILQLLNAAAGKDCSKDSDDVLIDAYLLLTKHGDRARDSEDSWGTWEAQPVKVVPQVETVDTLRSMQVDNLLLVVMQSAHLTIQRKAFQQSIEGLMTLCQEQTSSQPVIAKALQQLKNDALELCNRISNAIDRVDHMFTSEFDAEVDESESVTLQQYYREAMIQGYNFGFEYHKEVVRLMSGEFRQKIGDKYISFARKWMNYVLTKCESGRGTRPRWATQGFDFLQAIEPAFISALPEDDFLSLQALMNECIGHVIGKPHSPVTGLYLAIHRNSPRPMKVPRCHSDPPNPHLIIPTPEGFSTRSMPSDARSHGSPAAAAAAAAAAVAASRPSPSGGDSVLPKSISSAHDTRGSSVPENDRLASIAAELQFRSLSRHSSPTEERDEPAYPRGDSSGSTRRSWELRTLISQSKDTASKLGPIEAIQKSVRLFEEKRYREMRRKNIIGQVCDTPKSYDNVMHVGLRKVTFKWQRGNKIGEGQYGKVYTCISVDTGELMAMKEIRFQPNDHKTIKETADELKIFEGIKHPNLVRYFGVELHRSTVTLPNSQEISMSYIISAFSLKLEEFLLK

SEQ ID NO: 16365 - protein, 577 aa, Homo sapiens
MRQDAPKPTPAACRCSGLARRVLTIAFALLILGLMTWAYAAGVPLASDRYGLLAFGLYGAFLSAHLVAQSLFAYLEHRRVAAAARGPLDAATARSVALTISAYQEDPAYLRQCLASARALLYPRARLRVLMVVDGNRAEDLYMVDMFREVFADEDPATYVWDGNYHQPWEPAAAGAVGAGAYREVEAEDPGRLAVEALVRTRRCVCVAQRWGGKREVMYTAFKALGDSVDYVQVCDSDTRLDPMALLELVRVLDEDPRVGAVGGDVRILNPLDSWVSFLSSLRYWVAFNVERACQSYFHCVSCISGPLGLYRNNLLQQFLEAWYNQKFLGTHCTFGDDRHLTNRMLSMGYATKYTSRSRCYSETPSSFLRWLSQQTRWSKSYFREWLYNALWWHRHHAWMTYEAVVSGLFPFFVAATVLRLFYAGRPWALLWVLLCVQGVALAKAAFAAWLRGCLRMVLLSLYAPLYMCGLLPAKFLALVTMNQSGWGTSGRRKLAANYVPLLPLALWALLLLGGLVRSVAHEARADWSGPSRAAEAYHLAAGAGAYVGYWVAMLTLYWVGVRRLCRRRTGGYRVQV

SEQ ID NO: 16366 - protein, 379 aa, Homo sapiens
MGSPAHRPALLLLLPPLLLLLLLRVPPSRSFPGSGDSPLEDDEVGYSHPRYKDTPWCSPIKVKYGDVYCRAPQGGYYKTALGTRCDIRCQKGYELHGSSLLICQSNKRWSDKVICKQKRCPTLAMPANGGFKCVDGAYFNSRCEYYCSPGYTLKGERTVTCMDNKAWSGRPASCVDMEPPRIKCPSVKERIAEPNKLTVRVSWETPEGRDTADGILTDVILKGLPPGSNFPEGDHKIQYTVYDRAENKGTCKFRVKVRVKRCGKLNAPENGYMKCSSDGDNYGATCEFSCIGGYELQGSPARVCQSNLAWSGTEPTCAAMNVNVGVRTAAALLDQFYEKRRLLIVSTPTARNLLYRLQLGMLQAVAANPTLLLQYGASG

SEQ ID NO: 16367 - protein, 1617 aa, Homo sapiens
MSTPDPPLGGTPRPGPSPGPGPSPGAMLGPSPGPSPGSAHSMMGPSPGPPSAGHPIPTQGPGGYPQDNMHQMHKPMESMHEKGMSDDPRYNQMKGMGMRSGGHAGMGPPPSPMDQHSQGYPSPLGGSEHASSPVPASGPSSGPQMSSGPGGAPLDGADPQALGQQNRGPTPFNQNQLHQLRAQIMAYKMLARGQPLPDHLQMAVQGKRPMPGMQQQMPTLPPPSVSATGPGPGPGPGPGPGPGPAPPNYSRPHGMGGPNMPPPGPSGVPPGMPGQPPGGPPKPWPEGPMANAAAPTSTPQKLIPPQPTGRPSPAPPAVPPAASPVMPPQTQSPGQPAQPAPMVPLHQKQSRITPIQKPRGLDPVEILQEREYRLQARIAHRIQELENLPGSLAGDLRTKATIELKALRLLNFQRQLRQEVVVCMRRDTALETALNAKAYKRSKRQSLREARITEKLEKQQKIEQERKRRQKHQEYLNSILQHAKDFKEYHRSVTGKIQKLTKAVATYHANTEREQKKENERIEKERMRRLMAEDEEGYRKLIDQKKDKRLAYLLQQTDEYVANLTELVRQHKAAQVAKEKKKKKKKKKAENAEGQTPAIGPDGEPLDETSQMSDLPVKVIHVESGKILTGTDAPKAGQLEAWLEMNPGYEVAPRSDSEESGSEEEEEEEEEEQPQAAQPPTLPVEEKKKIPDPDSDDVSEVDARHIIENAKQDVDDEYGVSQALARGLQSYYAVAHAVTERVDKQSALMVNGVLKQYQIKGLEWLVSLYNNNLNGILADEMGLGKTIQTIALITYLMEHKRINGPFLIIVPLSTLSNWAYEFDKWAPSVVKVSYKGSPAARRAFVPQLRSGKFNVLLTTYEYIIKDKHILAKIRWKYMIVDEGHRMKNHHCKLTQVLNTHYVAPRRLLLTGTPLQNKLPELWALLNFLLPTIFKSCSTFEQWFNAPFAMTGEKVDLNEEETILIIRRLHKVLRPFLLRRLKKEVEAQLPEKVEYVIKCDMSALQRVLYRHMQAKGVLLTDGSEKDKKGKGGTKTLMNTIMQLRKICNHPYMFQHIEESFSEHLGFTGGIVQGLDLYRASGKFELLDRILPKLRATNHKVLLFCQMTSLMTIMEDYFAYRGFKYLRLDGTTKAEDRGMLLKTFNEPGSEYFIFLLSTRAGGLGLNLQSADTVIIFDSDWNPHQDLQAQDRAHRIGQQNEVRVLRLCTVNSVEEKILAAAKYKLNVDQKVIQAGMFDQKSSSHERRAFLQAILEHEEQDEEEDEVPDDETVNQMIARHEEEFDLFMRMDLDRRREEARNPKRKPRLMEEDELPSWIIKDDAEVERLTCEEEEEKMFGRGSRHRKEVDYSDSLTEKQWLKTLKAIEEGTLEEIEEEVRQKKSSRKRKRDSDAGSSTPTTSTRSRDKDDESKKQKKRGRPPAEKLSPNPPNLTKKMKKIVDAVIKYKDSSSGRQLSEVFIQLPSRKELPEYYELIRKPVDFKKIKERIRNHKYRSLNDLEKDVMLLCQNAQTFNLEGSLIYEDSIVLQSVFTSVRQKIEKEDDSEGEESEEEEEGEEEGSESESRSVKVKIKLGRKEKAQDRLKGGRRRPSRGSRAKPVVSDDDSEEEQEEDRSGSGSEED

SEQ ID NO: 16368 - protein, 44 aa, Homo sapiens
MSPRRTLPRPLSLCLSLCLCLCLAAALGSAQSALAPVLCFSFCW

SEQ ID NO: 16369 - protein, 550 aa, Homo sapiens [sequence omitted]

SEQ ID NO: 16370 - protein, 168 aa, Homo sapiens
MPDSWDKDVYPEPPRRTPVQPNPIVYMMKAFDLIVDRPVTLVREFIERQHAKNRYYYYHRQYRRVPDITECKEEDIMCMYEAEMQWKRDYKVDQEIINIMQDRLKACQQREGQNYQQNCIKEVEQFTQVAKAYQDRCACPTHPQPPTILLRPGGQNHCKSSLPSLVLT

SEQ ID NO: 16371 - protein, 2624 aa, Homo sapiens
MVPPVWTLLLLVGAALFRKEKPPDQKLVVRSSRDNYVLTQCDFEDDAKPLCDWSQVSADDEDWVRASGPSPTGSTGAPGGYPNGEGSYLHMESNSFHRGGVARLLSPDLWEQGPLCVHFAHHMFGLSWGAQLRLLLLSGEEGRRPDVLWKHWNTQRPSWMLTTVTVPAGFTLPTRLMFEGTRGSTAYLDIALDALSIRRGSCNRVCMMQTCSFDIPNDLCDWTWIPTASGAKWTQKKGSSGKPGVGPDGDFSSPGSGCYMLLDPKNARPGQKAVLLSPVSLSSGCLSFSFHYILRGQSPGAALHIYASVLGSIRKHTLFSGQPGPNWQAVSVNYTAVGRIQFAVVGVFGKTPEPAVAVDATSIAPCGEGFPQCDFEDNAHPFCDWVQTSGDGGHWALGHKNGPVHGMGPAGGFPNAGGHYIYLEADEFSQAGQSVRLVSRPFCAPGDICVEFAYHMYGLGEGTMLELLLGSPAGSPPIPLWKRVGSQRPYWQNTSVTVPSGHQQPMQLIFKGIQGSNTASVVAMGFILINPGTCPVKVLPELPPVSPVSSTGPSETTGLTENPTISTKKPTVSIEKPSVTTEKPTVPKEKPTIPTEKPTISTEKPTIPSEKPNMPSEKPTIPSEKPTILTEKPTIPSEKPTIPSEKPTISTEKPTVPTEEPTTPTEETTTSMEEPVIPTEKPSIPTEKPSIPTEKPTISMEETIISTEKPTISPEKPTIPTEKPTIPTEKSTISPEKPTTPTEKPTIPTEKPTISPEKPTTPTEKPTISPEKLTIPTEKPTIPTEKPTIPTEKPTISTEEPTTPTEETTISTEKPSIPMEKPTLPTEETTTSVEETTISTEKLTIPMEKPTISTEKPTIPTEKPTISPEKLTIPTEKLTIPTEKPTIPIEETTISTEKLTIPTEKPTISPEKPTISTEKPTIPTEKPTIPTEETTISTEKLTIPTEKPTISPEKLTIPTEKPTISTEKPTIPTEKLTIPTEKPTIPTEKPTIPTEKLTALRPPHPSPTATGLAALVMSPHAPSTPMTSVILGTTTTSRSSTERCPPNARYESCACPASCKSPRPSCGPLCREGCVCNPGFLFSDNHCIQASSCNCFYNNDYYEPGAEWFSPNCTEHCRCWPGSRVECQISQCGTHTVCQLKNGQYGCHPYAGTATCLVYGDPHYVTFDGRHFGFMGKCTYILAQPCGNSTDPFFRVTAKNEEQGQEGVSCLSKVYVTLPESTVTLLKGRRTLVGGQQVTLPAIPSKGVFLGASGRFVELQTEFGLRVRWDGDQQLYVTVSSTYSGKLCGLCGNYDGNSDNDHLKLDGSPAGDKEELGNSWQTDQDEDQECQKYQVVNSPSCDSSLQSSMSGPGFCGRLVDTHGPFETCLLHVKAASFFDSCMLDMCGFQGLQHLLCTHMSTMTTTCQDAGHAVKPWREPHFCPMACPPNSKYSLCAKPCPDTCHSGFSGMFCSDRCVEACECNPGFVLSGLECIPRSQCGCLHPAGSYFKVGERWYKPGCKELCVCESNNRIRCQPWRCRAQEFCGQQDGIYGCHAQGAATCTASGDPHYLTFDGALHHFMGTCTYVLTRPCWSRSQDSYFVVSATNENRGGILEVSYIKAVHVTVFDLSISLLRGCKVMLNGHRVALPVWLAQGRVTIRLSSNLVLLYTNFGLQVRYDGSHLVEVTVPSSYGGQLCGLCGNYNNNSLDDNLRPDRKLAGDSMQLGAAWKLPESSEPGCFLVGGKPSSCQENSMADAWNKNCAILINPQGPFSQCHQVVPPQSSFASCVHGQCGTKGDTTALCRSLQAYASLCAQAGQAPAWRNRTFCPMRCPPGSSYSPCSSPCPDTCSSINNPRDCPKALPCAESCECQKGHILSGTSCVPLGQCGCTDPAGSYHPVGERWYTENTCTRLCTCSVHNNITCFQSTCKPNQICWALDGLLHCRASGVGVCQLPGESHYVSFDGSNHSIPDACTLVLVKVCHPAMALPFFKISAKHEKEEGGTEAFRLHEVYIDIYDAQVTLQKGHRVLINSKQVTLPAISQIPGVSVKSSSIYSIVNIKIGVQVKFDGNHLLEIEIPTTYYGKVCGMCGNFNDEEEDELMMPSDEVANSDSEFVNSWKDKDIDPSCQSLLVDEQQIPAEQQENPSGNCRAADLRRAREKCEAALRAPVWAQCASRIDLTPFLVDCANTLCEFGGLYQALCQALQAFGATCQSQGLKPPLWRNSSFCPLECPAYSSYTNCLPSCSPSCWDLDGRCEGAKVPSACAEGCICQPGYVLSEDKCVPRSQCGCKDAHGGSIPLGKSWVSSGCTEKCVCTGGAIQCGDFRCPSGSHCQLTSDNSNSNCVSDKSEQCSVYGDPRYLTFDGFSYRLQGRMTYVLIKTVDVLPEGVEPLLVEGRNKMDPPRSSIFLQEVITTVYGYKVQLQAGLELVVNNQKMAVPYRPNEHLRVTLWGQRLYLVTDFELVVSFGGRKNAVISLPSMYEGLVSGLCGNYDKNRKNDMMLPSGALTQNLNTFGNSWEVKTEDALLRFPRAIPAEEEGQGAELGLRTGLQVSECSPEQLASNSTQACRVLADPQGPFAACHQTVAPEPFQEHCVLDLCSAQDPREQEELRCQVLSGYAILCQEAGAALAGWRDRTLCAGQQLSD

SEQ ID NO: 16372 - protein, 308 aa, Homo sapiens
MVSDEDELNLLVIVVDANPIWWGKQALKESQFTLSKCIDAVMVLGNSHLFMNRSNKLAVIASHIQESRFLYPGKNGRLGDFFGDPGNPPEFNPSGSKDGKYELLTSANEVIVEEIKDLMTKSDIKGQHTETLLAGSLAKALCYIHRMNKEVKDNQEMKSRILVIKAAEDSALQYMNFMNVIFAAQKQNILIDACVLDSDSGLLQQACDITGGLYLKVPQMPSLLQYLLWVFLPDQDQRSQLILPPPVHVDYRAACFCHRNLIEIGYVCSVCLSIFCNFSPICTTCETAFKISLPPVLKAKKKKLKVSA

SEQ ID NO: 16373 - protein, 361 aa, Homo sapiens
MGEPSGGYTYTQTSIFLFHAKIPFGSKSNMATLKDQLIYNLLKEEQTPQNKITVVGVGAVGMACAISILMKDLADELALVDVIEDKLKGEMMDLQHGSLFLRTPKIVSGKDYNVTANSKLVIITAGARQQEGESRLNLVQRNVNIFKFIIPNVVKYSPNCKLLIVSNPVDILTYVAWKISGFPKNRVIGSGCNLDSARFRYLMGERLGVHPLSCHGWVLGEHGDSSVPVWSGMNVAGVSLKTLHPDLGTDKDKEQWKEVHKQVVESAYEVIKLKGYTSWAIGLSVADLAESIMKNLRRVHPVSTMIKGLYGIKDDVFLSVPCILGQNGISDLVKVTLTSEEEARLKKSADTLWGIQKELQF

SEQ ID NO: 16374 - protein, 310 aa, Homo sapiens
MTDVLPQPDCSPKAGREPLALEESGSKRPPNTGARLWGRVRNKLLRNKLDPQTVETKNWHTDVIEMNGIKVEFSMKFTSRDMSLKRTPSKKQTGVFGVKISVVTKRERSKVPYIVRQCVEEVEKRGIEEVGIYRISGVATDIQALKAVFDANNKDILLMLSDMDINAIAGTLKLYFRELPEPLLTDRLYPAFMEGIALSDPAAKENCMMHLLRSLPDPNLITFLFLLEHLKRVAEKEPINKMSLHNLATVFGPTLLRPSEVESKAHLTSAADIWSHDVMAQVQVLLYYLQHPPISFAELKRNTLYFSTDV

SEQ ID NO: 16375 - protein, 290 aa, Homo sapiens
MSGLNWKPFVYGGLASIVAEFGTFPVDLTKTRLQVQGQSIDARFKEIKYRGMFHALFRICKEEGVLALYSGIAPALLRQASYGTIKIGIYQSLKRLFVERLEDETLLINMICGVVSGVISSTIANPTDVLKIRMQAQGSLFQGSMIGSFIDIYQQEGTRGLWRGVVPTAQRAAIVVGVELPVYDITKKHLILSGMMGDTILTHFVSSFTCGLAGALASNPVDVVRTRMMNQRAIVGHVDLYKGTVDGILKMWKHEGFFALYKGFWPNWLRLGPWNIIFFITYEQLKRLQI

SEQ ID NO: 16376 - protein, 1633 aa, Homo sapiens
MHPGLWLLLVTLCLTEELAAAGEKSYGKPCGGQDCSGSCQCFPEKGARGRPGPIGIQGPTGPQGFTGSTGLSGLKGERGFPGLLGPYGPKGDKGPMGVPGFLGINGIPGHPGQPGPRGPPGLDGCNGTQGAVGFPGPDGYPGLLGPPGLPGQKGSKGDPVLAPGSFKGMKGDPGLPGLDGITGPQGAPGFPGAVGPAGPPGLQGPPGPPGPLGPDGNMGLGFQGEKGVKGDVGLPGPAGPPPSTGELEFMGFPKGKKGSKGEPGPKGFPGISGPPGFPGLGTTGEKGEKGEKGIPGLPGPRGPMGSEGVQGPPGQQGKKGTLGFPGLNGFQGIEGQKGDIGLPGPDVFIDIDGAVISGNPGDPGVPGLPGLKGDEGIQGLRGPSGVPGLPALSGVPGALGPQGFPGLKGDQGNPGRTTIGAAGLPGRDGLPGPPGPPGPPSPEFETETLHNKESGFPGLRGEQGPKGNLGLKGIKGDSGFCACDGGVPNTGPPGEPGPPGPWGLIGLPGLKGARGDRGSGGAQGPAGAPGLVGPLGPSGPKGKKGEPILSTIQGMPGDRGDSGSQGFRGVIGEPGKDGVPGLPGLPGLPGDGGQGFPGEKGLPGLPGEKGHPGPPGLPGNGLPGLPGPRGLPGDKGKDGLPGQQGLPGSKGITLPCIIPGSYGPSGFPGTPGFPGPKGSRGLPGTPGQPGSSGSKGEPGSPGLVHLPELPGFPGPRGEKGLPGFPGLPGKDGLPGMIGSPGLPGSKGATGDIFGAENGAPGEQGLQGLTGHKGFLGDSGLPGLKGVHGKPGLLGPKGERGSPGTPGQVGQPGTPGSSGPYGIKGKSGLPGAPGFPGISGHPGKKGTRGKKGPPGSIVKKGLPGLKGLPGNPGLVGLKGSPGSPGVAGLPALSGPKGEKGSVGFVGFPGIPGLPGIPGTRGLKGIPGSTGKMGPSGRAGTPGEKGDRGNPGPVGIPSPRRPMSNLWLKGDKGSQGSAGSNGFPGPRGDKGEAGRPGPPGLPGAPGLPGIIKGVSGKPGPPGFMGIRGLPGLKGSSGITGFPGMPGESGSQGIRGSPGLPGASGLPGLKGDNGQTVEISGSPGPKGQPGESGFKGTKGRDGLIGNIGFPGNKGEDGKVGVSGDVGLPGAPGFPGVAGMRGEPGLPGSSGHQGAIGPLGSPGLIGPKGPSITGVPGPAGLPGPKGEKGYPGIGIGAPGKPGLRGQKGDRGFPGLQGPAGLPGAPGISLPSLIAGQPGDPGRPGLDGERGRPGPAGPPGPPGPSSNQGDTGDPGFPGIPGPKGPKGDQGIPGFSGLPGELGLKGSSGLQGDPGQTPTAEAVQVPPGPLGLPGIDGIPGLTGDPGAQGPVGLQGSKGLPGIPGKDGPSGLPGPPGALGDPGLPGLQGPPGFEGAPGQQGPFGMPGMPGQSMRVGYTLVKHSQSEQVPPCPIGMSQLWVGYSLLFVEGQEKAHNQDLGFAGSCLPRFSTMPFIYCNINEVCHYARRNDKSYWLSTTAPIPMMPVSQTQIPQYISRCSVCEAPSQAIAVHSQDITIPQCPLGWRSLWIGYSFLMHTAAGAEGGGQSLVSPGSCLEDFRATPFIECSGARGTCHYFANKYSFWLTTVEERQQFGELPVSETLKAGQLHTRVSRCQVCMKSL

SEQ ID NO: 16377 - protein, 100 aa, Homo sapiens
MRKPAAGFLPSLLKVLLLPLAPAAAQDSTQASTPGSPLSPTEYERFFALLTPTWKAETTCRLRATHGCRNPTLVQLDQYENHGLVPDESPVFPASLYSLT

SEQ ID NO: 16378 - protein, 478 aa, Homo sapiens
MGCSWRKTLSFFLVFVPIYLHGASSQEAAPVGPRKPFFERLRRLEEQFRRFQEVTWTHLQNIASNYNVSYNVDVRFRSLAEESQAVAQAVNRSQASVQGELAQLKAWVRKLQRRGRKVDTRLRALDLTLGERSQQRARERKAHKAQRDALQDSLARLEGLVHSQGARLAALEGRLPVAHPGTAALGPALVPTPTQPEELGPTSLKLQRDRQELRAASEHRGPPQDSSAPLQGRREPPASGSHRVLSGTAPKDPRQQAWSPQVPGEICGVGPTLVFPNASTRNVVFLSPGFVTALRALSFCSWVRTASGRLGTLLSYATEDNDNKLVLHGRDSLLPGSIHFVIGDPAFRELPLQLLLDGQWHHICVIWTSTQGRYWLHVDRRLVATGSRFREGYEIPPGGSLVLGQEQDSVGGGFDSSEAFVGSMSGLAIWDRALVPGEVANLAIGKEFPTGAILTLANAALAGGFVQGANCTCLERCP

SEQ ID NO: 16379 - protein, 306 aa, Homo sapiens
MGPGVLLLLLVATAWHGQGIPVIEPSVPELVVKPGATVTLRCVGNGSVEWDGPPSPHWTLYSDGSSSILSTNNATFQNTGTYRCTEPGDPLGGSAAIHLYVKDPARPWNVLAQEVVVFEDQDALLPCLLTDPVLEAGVSLVRVRGRPLMRHTNYSFSPWHGFTIHRAKFIQSQDYQCSALMGGRKVMSISIRLKVQKVIPGPPALTLVPAELVRIRGEAAQIVCSASSVDVNFDVFLQHNNTKLAIPQQSDFHNNRYQKVLTLNLDQVDFQHAGNYSCVASNVQGKHSTSMFFRVVGTPSPSLCPA

SEQ ID NO: 16380 - protein, 156 aa, Homo sapiens
MWLLYLLVPALFCRAGGSIPIPQKLFGEVTSPLFPKPYPNNFETTTVITVPTGYRVKLVFQQFDLEPSEGCFYDYVKKEFMSQGNKMLLTFHTDFSNEENGTIMFYKGFLAYYQAVDLDECASRSKSGEEDPQPQCQHLCHNYVGGYFCSCRPGYE

SEQ ID NO: 16381 - protein, 1023 aa, Homo sapiens
MAFKVGRDKYEPAAVSEQGDKKGKKGKKDRDMDELKKEVSMDDHKLSLDELHRKYGTDLSRGLTSARAAEILARDGPNALTPPPTTPEWIKFCRQLFGGFSMLLWIGAILCFLAYSIQAATEEEPQNDNLYLGVVLSAVVIITGCFSYYQEAKSSKIMESFKNMVPQQALVIRNGEKMSINAEEVVVGDLVEVKGGDRIPADLRIISANGCKVDNSSLTGESEPQTRSPDFTNENPLETRNIAFFSTNCVEGTARGIVVYTGDRTVMGRIATLASGLEGGQTPIAAEIEHFIHIITGVAVFLGVSFFILSLILEYTWLEAVIFLIGIIVANVPEGLLATVTVCLTLTAKRMARKNCLVKNLEAVETLGSTSTICSDKTGTLTQNRMTVAHMWFDNQIHEADTTENQSGVSFDKTSATWLALSRIAGLCNRAVFQANQENLPILKRAVAGDASESALLKCIELCCGSVKEMRERYAKIVEIPFNSTNKYQLSIHKNPNTSEPQHLLVMKGAPERILDRCSSILLHGKEQPLDEELKDAFQNAYLELGGLGERVLGFCHLFLPDEQFPEGFQFDTDDVNFPIDNLCFVGLISMIDPPRAAVPDAVGKCRSAGIKVIMVTGDHPITAKAIAKGVGIISEGNETVEDIAARLNIPVSQVNPRDAKACVVHGSDLKDMTSEQLDDILKYHTEIVFARTSPQQKLIIVEGCQRQGAIVAVTGDGVNDSPALKKADIGVAMGIAGSDVSKQAADMILLDDNFASIVTGVEEGRLIFDNLKKSIAYTLTSNIPEITPFLIFIIANIPLPLGTVTILCIDLGTDMVPAISLAYEQAESDIMKRQPRNPKTDKLVNERLISMAYGQIGMIQALGGFFTYFVILAENGFLPIHLLGLRVDWDDRWINDVEDSYGQQWTYEQRKIVEFTCHTAFFVSIVVVQWADLVICKTRRNSVFQQGMKNKILIFGLFEETALAAFLSYCPGMGVALRMYPLKPTWWFCAFPYSLLIFVYDEVRKLIIRRRPGGWVEKETYY

SEQ ID NO: 16382 - protein, 282 aa, Homo sapiens
MSFRKVVRQSKFRHVFGQPVKNDQCYEDIRVSRVTWDSTFCAVNPKFLAVIVEASGGGAFLVLPLSKTGRIDKAYPTVCGHTGPVLDIDWCPHNDEVIASGSEDCTVMVWQIPENGLTSPLTEPVVVLEGHTKRVGIIAWHPTARNVLLSAGCDNVVLIWNVGTAEELYRLDSLHPDLIYNVSWNHNGSLFCSACKDKSVRIIDPRRGTLVAEREKAHEGARPMRAIFLADGKVFTTGFSRMSERQLALWDPGSPLLQKASSSSKPPGPSPLCFCIVTSRAP

SEQ ID NO: 16383 - protein, 185 aa, Homo sapiens
MGTQEGWCLLLCLALSGAAETMDLVQIPQAEALLHADCSGKEVTCEISRYFLQMTETTVKTAAWFMANMQVSGGGPSISLVMKTPRVTKNEALWHPTLNLPLSPQGTVRTAVEFQVMTQTQSLSFLLGSSASLDCGFSMAPGLDLISVEWRLQHKGRGRGDLHLPDHHLSVPSSADHPAQHPSFP

SEQ ID NO: 16384 - protein, 235 aa, Homo sapiens
MFVANPQARWQLRVAGRGSRVAGRRSRRSLGAEVADIKKVNNFIREQDLYALKSVKIPVRNHGILMETHKELKPLLSPSSETTVTVELPEADRAGAGTGAQAGQLMGFFKGIDQDIERAVQSEIFLHESYCMDTSHQPLLPAPPKTPMDGADCGIQWWNAVFIMLLIGIVLPVFYLVYFKIQASGETPNSLNTTVIPNGSMAMGTVPGQAPRLAVAVPAVTSADSQFSQTTQAGS

SEQ ID NO: 16385 - protein, 393 aa, Homo sapiens
MPSTPGFVGYNPYSHLAYNNYRLGGNPGTNSRVTASSGITIPKPPKPPDKPLMPYMRYSRKVWDQVKASNPDLKLWEIGKIIGGMWRDLTDEEKQEYLNEYEAEKIEYNESMKAYHNSPAYLAYINAKSRAEAALEEESRQRQSRMEKGEPYMSIQPAEDPDDYDDGFSMKHTATARFQRNHRLISEILSESVVPDVRSVVTTARMQVLKRQVQSLMVHQRKLEAELLQIEERHQEKKRKFLESTDSFNNELKRLCGLKVEVDMEKIAAEIAQAEEQARKRQEEREKEAAEQAERSQSSIVPEEEQAANKGEEKKDDENIPMETEETHLEETTESQQNGEEGTSTPEDKESGQEGVDSMAEEGTSDSNTGSESNSATVEEPPTDPIPEDEKKE

SEQ ID NO: 16386 - protein, 128 aa, Homo sapiens
MAAGTAVGAWVLVLSLWGAVVGAQNITARIGEPLVLKCKGAPKKPPQRLEWKLNTGRTEAWKVLSPQGGGPWDSVARVLPNGSLFLPAVGIQDEGIFRCQAMNRNGKETKSNYRVRVYQFENLHNYSL

SEQ ID NO: 16387 - protein, 157 aa, Homo sapiens
MPSLLLLFTAALLSSWAQLLTDANSWWSLALNPVQRPEMFIIGAQPVCSQLPGLSPGQRKLCQLYQEHMAYIGEGAKTGIKECQHQFRQRRWNCSTADNASVFGRVMQIGSRETAFTHAVSAAGVVNAISRACREGELSTCGCSRTARPKDLPRDWL

SEQ ID NO: 16388 - protein, 112 aa, Homo sapiens
MISLRVLLVILWLQLSWVWSQRKEVEQDPGPFNVPEGATVAFNCTYSNSASQSFFWYRQDCRKEPKLLMSVYSSGNEDGRFTAQLNRASQYISLLIRDSKLSDSATYLCVVN

SEQ ID NO: 16389 - protein, 862 aa, Homo sapiens
MAQPGPASQPDVSLQQRVAELEKINAEFLRAQQQLEQEFNQKRAKFKELYLAKEEDLKRQNAVLQAAQDDLGHLRTQLWEAQAEMENIKAIATVSENTKQEAIDEVKRQWREEVASLQAVMKETVRDYEHQFHLRLEQERTQWAQYRESAEREIADLRRRLSEGQEEENLENEMKKAQEDAEKLRSVVMPMEKEIAALKDKLTEAEDKIKELEASKVKELNHYLEAEKSCRTDLEMYVAVLNTQKSVLQEDAEKLRKELHEVCHLLEQERQQHNQLKHTWQKANDQFLESQRLLMRDMQRMEIVLTSEQLRQVEELKKKDQEDDEQQRLNKRKDHKKADVEEEIKIPVVCALTQEESSAQLSNEEEHLDSTRGSVHSLDAGLLLPSGDPFSKSDNDMFKDGLRRAQSTDSLGTSGSLQSKALGYNYKAKSAGNLDESDFGPLVGADSVSENFDTASLGSLQMPSGFMLTKDQERAIKAMTPEQEETASLLSSVTQGMESAYVSPSGYRLVSETEWNLLQKEVHNAGNKLGRRCDMCSNYEKQLQGIQIQEAETRDQVKKLQLMLRQANDQLEKTMKDKQELEDFIKQSSEDSSHQISALVLRAQASEILLEELQQGLSQAKRDVQEQMAVLMQSREQVSEELVRLQKDNDSLQGKHSLHVSLQQAEDFILPDTTEALRELVLKYREDIINVRTAADHVEEKLKAEILFLKEQIQAEQCLKENLEETLQLEIENCKEEIASISSLKAELERIKVEKGQLESTLREKSQQLESLQEIKISLEEQLKKETAAKATVEQLMFEEKNKAQRLQTELDVSEQVQRDFVKLSQTLQVQLERIRQADSLERIRAILNDTKLTDINQLPET

SEQ ID NO: 16390 - protein, 808 aa, Homo sapiens
MSSVSPIQIPSRLPLLLTHEGVLLPGSTMRTSVDSARNLQLVRSRLLKGTSLQSTILGVIPNTPDPASDAQDLPPLHRIGTAALAVQVVGSNWPKPHYTLLITGLCRFQIVQVLKEKPYPIAEVEQLDRLEEFPNTCKMREELGELSEQFYKYAVQILDAVSLEERFKMTIPLLVRQIEGLKLLQKTRKPKQDDDKRVIAIRPIRRITHISGTLEDEDEDEDNDDIVMLEKKIRTSSMPEQAHKVCVKEIKRLKKMPQSMPEYALTRNYLELMVELPWNKSTTDRLDIRAARILLDNDHYAMEKLKKRVLEYLAVRQLKNNLKGPILCFVGPPGVGKTSVGRSVAKTLGREFHRIALGGVCDQSDIRGHRRTYVGSMPGRIINGLKTVGVNNPVFLLDEVDKLGKSLQGDPAAALLEVLDPEQNHNFTDHYLNVAFDLSQVLFIATANTTATIPAALLDRMEIIQVPGYTQEEKIEIAHRHLIPKQLEQHGLTPQQIQIPQVTTLDIITRYTREAGVRSLDRKLGAICRAVAVKVAEGQHKEAKLDRSDVTEREGCREHILEDEKPESISDTTDLALPPEMPILIDFHALKDILGPPMYEMEVSQRLSQPGVAIGLAWTPLGGEIMFVEASRMDGEGQLTLTGQLGDVMKESAHLAISWLRSNAKKYQLTNAFGSFDLLDNTDIHLHFPAGAVTKDGPSAGVTIVTCLASLFSGRLVRSDVAMTGEITLRGLVLPVGGIKDKVLAAHRAGLKQVIIPRRNEKDLEGIPGNVRQDLSFVTASCLDEVLNAAFDGGFTVKTRPGLLNSKL

SEQ ID NO: 16391 - protein, 251 aa, Homo sapiens
MAIAGIMLLLRSIRLTSKFTSSSDIPVEFIRRNVKLRGRLRRITENGLEIEHIPITLPIIASLRKEPRGALLVKLAGVELAETGKAWLQKELKPSQLLWFQLLGKENSALFCYLLVSKGGYFSVNLNEEILRRGLGKTVLVKGLKYDSKIYWTVHRNLLKAELTALKKGEGIWKEDSEKESYLEKFKDSWREIWKKDSFLKTTGSDFSLKKESYYEKLKRTYEIWKDNMNNCSLILKFRELISRINFRRKG

SEQ ID NO: 16392 - protein, 354 aa, Homo sapiens
MGVCGYLFLPWKCLVVVSLRLLFLVPTGVPVRSGDATFPKAMDNVTVRQGESATLRCTIDDRVTRVAWLNRSTILYAGNDKWSIDPRVIILVNTPTQYSIMIQNVDVYDEGPYTCSVQTDNHPKTSRVHLIVQVPPQIMNISSDITVNEGSSVTLLCLAIGRPEPTVTWRHLSVKEGQGFVSEDEYLEISDIKRDQSGEYECSALNDVAAPDVRKVKITVNYPPYISKAKNTGVSVGQKGILSCEASAVPMAEFQWFKEETRLATGLDGMRIENKGRMSTLTFFNVSEKDYGNYTCVATNKLGNTNASITLYEISPSSAVAGPGAVIDGVNSASRALACLWLSGTLLAHFFIKF

SEQ ID NO: 16393 - protein, 760 aa, Homo sapiens
MGDPGSEIIESVPPAGPEASESTTDENEDDIQFVSILFPKMPKRQGDFLHFLNVKKVKTDTENNEVSKNHCRLSKAKEPHFEYIEQPIIEEKPSLSSKKEIDNLVLPDCWNEKQAFMFTEQYKWLEIKEGKLGCKDCSAVRHLGSKAEKHVHVSKEWIAYLVTPNGSNKTTRQASLRKKIREHDVSKAHGKIQDLLKESTNDSICNLVHKQNNKNIDATVKVFNTVYSLVKHNRPLSDIEGARELQEKNGEVNCLNTRYSATRIAEHIAKEMKMKIFKNIIEENAKICIIIDEASTVSKKTTLVIYLQCTIQSAPAPVMLFVALKELVSTIAECIVNTLLTTLNDCGFTNEYLKANLIAFCSDGANTILGRKSGVATKLLENFPEIIIWNCLNHRLQLSLDDSISEIKQINHLKIFIDKIYSIYHQPNKNQTKLLGTVAKELETEIIKIGRVMGPRWAACSLQAATAVWHAYPILYMHFSHSYSGLAKRLANINFLQDLALMIDILEEFSVLSTALQSRSTNIKKAQKLIKRTIRALENLKIGTGKYESQIEDLIKSDKFKDIPFNKNNKFNALPRSILLDNIIQHMNLRLLSDRNHEDIFNYFDLLEPSTWPYEEITSPWIAGEKTLFHLCKILKYEVDLNDFREFVNNNIKSNNVSIPTTIYKAKKIVSTIAINSAEAERGFNLMNIICTRVRNSLTIDHVSDLMTINLLGKELADWDATPFVKSWSNCNHRLATDTRVRQKSTKVFHENQLAIWNLK

SEQ ID NO: 16394 - protein, 713 aa, Homo sapiens
MSRSPDAKEDPVECPLCMEPLEIDDINFFPCTCGYQICRFCWHRIRTDENGLCPACRKPYPEDPAVYKPLSQEELQRIKNEKKQKQNERKQKISENRKHLASVRVVQKNLVFVVGLSQRLADPEVLKRPEYFGKFGKIHKVVINNSTSYAGSQGPSASAYVTYIRSEDALRAIQCVNNVVVDGRTLKASLGTTKYCSYFLKNMQCPKPDCMYLHELGDEAASFTKEEMQAGKHQEYEQKLLQELYKLNPNFLQLSTGSVDKNKNKVTPLQRYDTPIDKPSDSLSIGNGDNSQQISNSDTPSPPPGLSKSNPVIPISSSNHSARSPFEGAVTESQSLFSDNFRHPNPIPSGLPPFPSSPQTSSDWPTAPEPQSLFTSETIPVSSSTDWQAAFGFGSSKQPEDDLGFDPFDVTRKALADLIEKELSVQDQPSLSPTSLQNSSSHTTTAKGPGSGFLHPAAATNANSLNSTFSVLPQRFPQFQQHRAVYNSFSFPGQAARYPWMAFPRNSIMHLNHTANPTSNSNFLDLNLPPQHNTGLGGIPVADNSSSVESLNMKEWQDGLRALLPNININFGGLPNSSSPSNANHSAPTSNTATTDSLSWDSPGSWTDPAIITGIPASSGNSLDSLQDDNPPHWLKSLQALTEMDGPSAAPSQTHHSAPFSTQIPLHRASWNPYPPPSNPSSFHSPPPGFQTAFRPPSKTPTDLLQSSTLDRH

SEQ ID NO: 16395 - protein, 1392 aa, Homo sapiens
MSMLKPSGLKAPTKILKPGSTALKTPTAVVAPVEKTISSEKASSTPSSETQEEFVDDFRVGERVWVNGNKPGFIQFLGETQFAPGQWAGIVLDEPIGKNDGSVAGVRYFQCEPLKGIFTRPSKLTRKVQAEDEANGLQTTPASRATSPLCTSTASMVSSSPSTPSNIPQKPSQPAAKEPSATPPISNLTKTASESISNLSEAGSIKKGERELKIGDRVLVGGTKAGVVRFLGETDFAKGEWCGVELDEPLGKNDGAVAGTRYFQCQPKYGLFAPVHKVTKIGFPSTTPAKAKANAVRRVMATTSASLKRSPSASSLSSMSSVASSVSSRPSRTGLLTETSSRYARKISGTTALQEALKEKQQHIEQLLAERDLERAEVAKATSHVGEIEQELALARDGHDQHVLELEAKMDQLRTMVEAADREKVELLNQLEEEKRKVEDLQFRVEEESITKGDLEVATVSEKSRIMELEKDLALRVQEVAELRRRLESNKPAGDVDMSLSLLQEISSLQEKLEVTRTDHQREITSLKEHFGAREETHQKEIKALYTATEKLSKENESLKSKLEHANKENSDVIALWKSKLETAIASHQQAMEELKVSFSKGLGTETAEFAELKTQIEKMRLDYQHEIENLQNQQDSERAAHAKEMEALRAKLMKVIKEKENSLEAIRSKLDKAEDQHLVEMEDTLNKLQEAEIKVKELEVLQAKCNEQTKVIDNFTSQLKATEEKLLDLDALRKASSEGKSEMKKLRQQLEAAEKQIKHLEIEKNAESSKASSITRELQGRELKLTNLQENLSEVSQVKETLEKELQILKEKFAEASEEAVSVQRSMQETVNKLHQKEEQFNMLSSDLEKLRENLADMEAKFREKDEREEQLIKAKEKLENDIAEIMKMSGDNSSQLTKMNDELRLKERDVEELQLKLTKANENASFLQKSIEDMTVKAEQSQQEAAKKHEEEKKELERKLSDLEKKMETSHNQCQELKARYERATSETKTKHEEILQNLQKTLLDTEDKLKGAREENSGLLQELEELRKQADKAKAAQTAEDAMQIMEQMTKEKTETLASLEDTKQTNAKLQNELDTLKENNLKNVEELNKSKELLTVENQKMEEFRKEIETLKQAAAQKSQQLSALQEENVKLAEELGRSRDEVTSHQKLEEERSVLNNQLLEMKKRESKFIKDADEEKASLQKSISITSALLTEKDAELEKLRNEVTVLRGENASAKSLHSVVQTLESDKVKLELKVKNLELQLKENKRQLSSSSGNTDTQADEDERAQESQIDFLNSVIVDLQRKNQDLKMKVEMMSEAALNGNGDDLNNYDSDDQEKQSKKKPRLFCDICDCFDLHDTEDCPTQAQMSEDPPHSTHHGSRGEERPYCEICEMFGHWATNCNDDETF

SEQ ID NO: 16396 - protein, 1073 aa, Homo sapiens
MRMVHILTSVVGSKCEVQVKNGGIYEGVFKTYSPKCDLVLDAAHEKSTESSSGPKREEIMESILFKCSDFVVVQFKDMDSSYAKRDAFTDSAISAKVNGEHKEKDLEPWDAGELTANEELEALENDVSNGWDPNDMFRYNEENYGVVSTYDSSLSSYTVPLERDNSEEFLKREARANQLAEEIESSAQYKARVALENDDRSEEEKYTAVQRNSSEREGHSINTRENKYIPPGQRNREVISWGSGRQNSPRMGQPGSGSMPSRSTSHTSDFNPNSGSDQRVVNGGVPWPSPCPSPSSRPPSRYQSGPNSLPPRAATPTRPPSRPPSRPSRPPSHPSAHGSPAPVSTMPKRMSSEGPPRMSPKAQRHPRNHRVSAGRGSISSGLEFVSHNPPSEAATPPVARTSPSGGTWSSVVSGVPRLSPKTHRPRSPRQNSIGNTPSGPVLASPQAGIIPTEAVAMPIPAASPTPASPASNRAVTPSSEAKDSRLQDQRQNSPAGNKENIKPNETSPSFSKAENKGISPVVSEHRKQIDDLKKFKNDFRLQPSSTSESMDQLLNKNREGEKSRDLIKDKIEPSAKDSFIENSSSNCTSGSSKPNSPSISPSILSNTEHKRGPEVTSQGVQTSSPACKQEKDDKEEKKDAAEQVRKSTLNPNAKEFNPRSFSQPKPSTTPTSPRPQAQPSPSMVGHQQPTPVYTQPVCFAPNMMYPVPVSPGVQPLYPIPMTPMPVNQAKTYRAVPNMPQQRQDQHHQSAMMHPASAAGPPIAATPPAYSTQYVAYSPQQFPNQPLVQHVPHYQSQHPHVYSPVIQGNARMMAPPTHAQPGLVSSSATQYGAHEQTHAMYACPKLPYNKETSPSFYFAISTGSLAQQYAHPNATLHPHTPHPQPSATPTGQQQSQHGGSHPAPSPVQHHQHQAAQALHLASPQQQSAIYHAGLAPTPPSMTPASNTQSPQNSFPAAQQTVFTIHPSHVQPAYTNPPHMAHVPQCASEALARCGLEMRLSWIYLSEGYLAHVQSGMVPSHPTAHAPMMLMTTQPPGGPQAALAQSALQPIPVSTTAHFPYMTHPSVQAHHQQQL

SEQ ID NO: 16397 - protein, 1508 aa, Homo sapiens
MAEGFRKNDEMKAMDVLPILKEKVAYLSGGRDKRGGPILTFPARSNHDRIRQEDLRRLISYLACIPSEEVCKRGFTVIVDMRGSKWDSIKPLLKILQESFPCCIHVALIIKPDNFWQKQRTNFGSSKFEFETNMVSLEGLTKVVDPSQLTPEFDGCLEYNHEEWIEIRVAFEDYISNATHMLSRLEELQDILAKKELPQDLEGARNMIEEHSQLKKKVIKAPIEDLDLEGQKLLQRIQSSESFPKKNSGSGNADLQNLLPKVSTMLDRLHSTRQHLHQMWHVRKLKLDQCFQLRLFEQDAEKMFDWITHNKGLFLNSYTEIGTSHPHAMELQTQHNHFAMNCMNVYVNINRIMSVANRLVESGHYASQQIRQIASQLEQEWKAFAAALDERSTLLDMSSIFHQKAEKYMSNVDSWCKACGEVDLPSELQDLEDAIHHHQGIYEHITLAYSEVSQDGKSLLDKLQRPLTPGSSDSLTASANYSKAVHHVLDVIHEVLHHQRQLENIWQHRKVRLHQRLQLCVFQQDVQQVLDWIENHGEAFLSKHTGVGKSLHRARALQKRHEDFEEVAQNTYTNADKLLEAAEQLAQTGECDPEEIYQAAHQLEDRIQDFVRRVEQRKILLDMSVSFHTHVKELWTWLEELQKELLDDVYAESVEAVQDLIKRFGQQQQTTLQVTVNVIKEGEDLIQQLRDSAISSNKTPHNSSINHIETVLQQLDEAQSQMEELFQERKIKLELFLQLRIFERDAIDIISDLESWNDELSQQMNDFDTEDLTIAEQRLQHHADKALTMNNLTFDVIHQGQDLLQYVNEVQASGVELLCDRDVDMATRVQDLLEFLHEKQQELDLAAEQHRKHLEQCVQLRHLQAEVKQVLGWIRNGESMLNAGLITASSLQEAEQLQREHEQFQHAIEKTHQSALQVQQKAEAMLQANHYDMDMIRDCAEKVASHWQQLMLKMEDRLKLVNASVAFYKTSEQVCSVLESLEQEYKREEDWCGGADKLGPNSETDHVTPMISKHLEQKEAFLKACTLARRNADVFLKYLHRNSVNMPGMVTHIKAPEQQVKNILNELFQRENRVLHYWTMRKRRLDQCQQYVVFERSAKQALEWIHDNGEFYLSTHTSTGSSIQHTQELLKEHEEFQITAKQTKERVKLLIQLADGFCEKGHAHAAEIKKCVTAVDKRYRDFSLRMEKYRTSLEKALGISSDSNKSSKSLQLDIIPASIPGSEVKLRDAAHELNEEKRKSARRKEFIMAELIQTEKAYVRDLRECMDTYLWEMTSGVEEIPPGIVNKELIIFGNMQEIYEFHNNIFLKELEKYEQLPEDVGHCFVTWADKFQMYVTYCKNKPDSTQLILEHAGSYFDEIQQRHGLANSISSYLIKPVQRITKYQLLLKELLTCCEEGKGEIKDGLEVMLSVPKRANDAMHLSMLEGFDENIESQGELILQESFQVWDPKTLIRKGRERHLFLFEMSLVFSKEVKDSSGRSKYLYKSKLFVSIGVQNCKSKGNTIAVFL

SEQ ID NO: 16398 - protein, 154 aa, Homo sapiens
MAAAGAFRLRRAASALLLRSPRLPARELSAPARLYHKKVVDHYENPRNVGSLDKTSKNVGTGLVGAPACGDVMKLQIQVDEKGKIVDARFKTFGCGSAIASSSLATEWVKGKTVEEALTIKNTDIAKELCLPPVKLHCSKSVLFPAEEKTQLSP

SEQ ID NO: 16399 - protein, 126 aa, Homo sapiens; identical to SEQ ID NO: 5395

SEQ ID NO: 16400 - protein, 103 aa, Homo sapiens
MKFQYKEDHPFEYRKKEGEKIRKKYPDRVPVSVEERRGWEGKGPRGRGRVVEMASLGRPGGSGEGRFRELLNPERPSVPEPMDVQTVELLKPRMPGPRTPLQG

SEQ ID NO: 16401 - protein, 79 aa, Homo sapiens
MGILKLQVFLIVLSVALNHLKATPIERQEWIIPVLSRNILLELRGAKPEHEAGKKSKVIRWKSGNATLPHVQRSAWQIF

SEQ ID NO: 16402 - protein, 90 aa, Homo sapiens
MGKNKLLHPSLVLLLLVLLPTDASVSGKPQYMVLVPSLLHTETTEKGCVLLSYLNETVTVSASLESVRGNRSLFTDLEAENDVLHCVAFA

SEQ ID NO: 16403 - protein, 1075 aa, Homo sapiens
MKANEKVTSDADPMWYLKYLNIYVGLPDVEESFNVTRPVSPHECRLRDMTYSAPITVDIEYTRGSQRIIRNALPIGRMPIMLRSSNCVLTGKTPAEFAKLNECPLDPGGYFIVKGVEKVILIQEQLSKNRIIVEADRKGAVGASVTSSTHEKKSRTNMAVKQGRFYLRHNTLSEDIPIVIIFKAMGVESDQEIVQMIGTEEHVMAAFGPSLEECQKAQIFTQMQALKYIGNKVRRQRMWGGGPKKTKIEEARELLASTILTHVPVKEFNFRAKCIYTAVMVRRVILAQGDNKVDDRDYYGNKRLELAGQLLSLLFEDLFKKFNSEMKKIADQVIPKQRAAQFDVVKHMRQDQITNGMVNAISTGNWSLKRFKMDRQGVTQVLSRLSYISALGMMTRISSQFEKTRKVSGPRSLQPSQWGMLCPSDTPEGEACGLVKNLALMTHITTDMEDGPIVKLASNLGVEDVNLLCGEELSYPNVFLVFLNGNILGVIRDHKKLVNTFRLMRRAGYINEFVSISTNLTDRCVYISSDGGRLCRPYIIVKKQKPAVTNKHMEELAQGYRNFEDFLHESLVEYLDVNEENDCNIALYEHTINKDTTHLEIEPFTLLGVCAGLIPYPHHNQSPRNTYQCAMGKQAMGTIGYNQRNRIDTLMYLLAYPQKPMVKTKTIELIEFEKLPAGQNATVAVMSYSGYDIEDALVLNKASLDRGFGRCLVYKNAKCTLKRYTNQTFDKVMGPMLDAATRKPIWRHEILDADGICSPGEKVENKQVLVNKSMPTVTQIPLEGSNVPQQPQYKDVPITYKGATDSYIEKVMISSNAEDAFLIKMLLRQTRRPEIGDKFSSRHGQKGVCGLIVPQEDMPFCDSGICPDIIMNPHGFPSRMTVGKLIELLAGKAGVLDGRFHYGTAFGGSKVKDVCEDLVRHGYNYLGKDYVTSGITGEPLEAYIYFGPVYYQKLKHMVLDKMHARARGPRAVLTRQPTEGRSRDGGLRLGEMERDCLIGYGASMLLLERLMISSDAFEVDVCGQCGLLGYSGWCHYCKSSCHVSSLRIPYACKLLFQELQSMNIIPRLKLSKYNE

SEQ ID NO: 16404 - protein, 455 aa, Homo sapiens
MVEQGDAAPLLRWAEGPAVSLPQAPQPQAGGWGRGGGGGARPAAEPPRRREPEEPAAPEVLLQPGRLELGDVEEDQVVAVFVVTFDPRSGNMVEWCLPQDIDLEGVEFKSMASGSHKIQSDFIYFRKGPFFGLACFANMPVESELERGARMKSVGILSPSYTLLYRYMHFLENQVRHQLEMPGHYSHLAAFYEDKKGVLHAGPGRGSSLPPVYWLPSIHRYMYPEMKITHPAGCMSQFIKFFGEQILILWKFALLRKRILIFSPPPVGVVCYRVYCCCCLANVSLPGIGGTIPESKPFFYVNVADIESLEVEVSYVACTTEKIFEEKRELYDVYVDNQNVKTHHDHLQPLLKINSADREKYRRLNEQRQMLLYSQEVEEDYNPCEEDLFVLFFLEQNNRIFQTLLEVSASQDKTLTAEHARGMGLDPQGDRSFLLDLLEAYGIDVMLVIDNPCCP

SEQ ID NO: 16405 - protein, 91 aa, Homo sapiens
MSLLGPKVLLFLAAFIITSDWIPLGVNSQRGDDVTQATPETFTEDPNLVNDPATDETVLAVLADIAPSTDDLASLSEKNTTAECWDEKFTC

SEQ ID NO: 16406 - protein, 342 aa, Homo sapiens
MLQGHSSVFQALLGTFFTWGMTAAGAALVFVFSSGQRRILDGSLGFAAGVMLAASYWSLLAPAVEMATSSGGFGAFAFFPVAVGFTLGAAFVYLADLLMPHLGAAEDPQTTLALNFGSTLMKKKSDPEGPALLFPESELSIRIGRAGLLSDKSENGEAYQRKKAAATGLPEGPAVPVPSRGNLAQPGGSSWRRIALLILAITIHNVPEGLAVGVGFGAIEKTASATFESARNLAIGIGIQNFPEGLAVSLPLRGAGFSTWRAFWYGQLSGMVEPLAGVFGAFAVVLAEPILPYALAFAAGAMVYVVMDDIIPEAQISGNGKLASWASILGFVVMMSLDVGLG

SEQ ID NO: 16407 - protein, 231 aa, Homo sapiens
MSGRSVRAETRSRAKDDIKRVMAAIEKVRKWEKKWVTVGDTSLRIYKWVPVTEPKVDDKNKNKKKGKDEKCGSEVTTPENSSSPGMMDMHDDNSNQSSIADASPIKQENSSNSSPAPEPNSAVPSDGTEAKVDEAQADGKEHPGAEDASDEQNSQSSMEHSMNSSEKVDRQPSGDSGLAAETSAISQVPRSRSQRGSQIGREPIGLSGDLEGVPPSKKMKLEASQQNSEEM

SEQ ID NO: 16408 - protein, 805 aa, Homo sapiens
MASPTLSPDSSSQEALSAPTCSPTSDSENLSPDELELLAKLEEQNRLLEADSKSMRSMNGSRRNSGSSLVSSSSASSNLSHLEEDTWILWGRIANEWEEWRRRKEKLLKELIRKGIPHHFRAIVWQLLCSATDMPVKNQYSELLKMSSPCEKLIRRDIARTYPEHEFFKGQDSLGQEVLFNVMKAYSLVDREVGYCQGSAFIVGLLLMQMPEEEAFCVFVRLMQEYRLRELFKPSMAELGLCIYQFEYMLQEQLPDLNTHFRSQSFHTSMYASSWFLTLFLTTFPLPVATRVFDIFMYEGLEIVFRVGLALLQVNQAELMQLDMEGMSQYFQRVIPHQFDSCPDKLVLKAYQVKYNPKKMKRLEKEYAAMKSKEMEEQIEIKRLRTENRLLKQRIETLEKESAALADRLIQGQVTRAQEAEENYVIKRELAVVRQQCSSAAEDLQKAQSTIRQLQEQQENPRLTEDFVSHLETELEQSRLRETETLGALREMQDKVLDMEKRNSSLPDENNVAQLQEELKALKVREGQAVASTRELKLQLQELSDTWQAHLARGGRWKESPRKLVVGELQDELMSVRLREAQALAEGRELRQRVVELETQDHIHRNLLNRVEAERAALQEKLQYLAAQNKGLQTQLSESRRKQAEAECKSKEEVMAVRLREADSMAAVAEMRQRIAELEIQREEGRIQGQLNHSDSSQYIRELKDQIEELKAEVRLLKGPPPFEDPLAFDGLSLARHLDEDSLPSSDEELLGVGVGAALQDALYPLSPRDARFFRRLERPAKDSEGSSDSDADELAAPYSQGLDN

SEQ ID NO: 16409 - protein, 103 aa, Homo sapiens
MKSLILLAILAALAVVTLCYESHESMESYELNPFINRRNANTFISPQQRWRAKVQERIRERSKPVHELNREACDDYRLCERYAMVYGYNAAYNRYFRKRRGTK

SEQ ID NO: 16410 - protein, 250 aa, Homo sapiens
MAVCGLGSRLGLGSRLGLRGCFGAARLLYPRFQSRGPQGVEDGDRPQPSSKTPRIPKIYTKTGDKGFSSTFTGERRPKDDQVFEAVGTTDELSSAIGFALELVTEKGHTFAEELQKIQCTLQDVGSALATPCSSAREAHLKYTTFKAGPILELEQWIDKYTSQLPPLTAFILPSGGKISSALHFCRAVCRRAERRVVPLVQMGETDANVAKFLNRLSDYLFTLARYAAMKEGNQEKIYMKNDPSAESEGL

SEQ ID NO: 16411 - protein, 271 aa, Homo sapiens
MIIVAFALIIFFAVKTRRKMDRYDKSNILWDKEHIYDEQPPNVEEWVKNVSAGTQDVPSPPSDYVERVDSPMAYSSNGKVNDKRFYPESSYKSTPVPEVVQELPLTSPVDDFRQPRYSSGGNFETPSKRAPAKGRAGRSKRTEQDHYETDYTTGGESCDELEEDWIREYPPITSDQQRQLYKRNFDTGLQEYKSLQSELDEINKELSRLDKELDDYREESEEYMAAADEYNRLKQVKGSADYKSKKNHCKQLKSKLSHIKKMVGDYDRQKT

SEQ ID NO: 16412 - protein, 113 aa, Homo sapiens
MLLLLVPVLEVIFTLGGTRAQSVTQLGSHVSVSEGALVLLRCNYSSSVPPYLFWYVQYPNQGLQLLLKYTSAATLVKGINGFEAEFKKSETSFHLTKPSAHMSDAAEYFCAVS

SEQ ID NO: 16413 - protein, 2721 aa, Homo sapiens
MVPPVWTLLLLVGAALFRKEKPPDQKLVVRSSRDNYVLTQCDFEDDAKPLCDWSQVSADDEDWVRASGPSPTGSTGAPGGYPNGEGSYLHMESNSFHRGGVARLLSPDLWEQGPLCVHFAHHMFGLSWGAQLRLLLLSGEEGRRPDVLWKHWNTQRPSWMLTTVTVPAGFTLPTRLMFEGTRGSTAYLDIALDALSIRRGSCNRVCMMQTCSFDIPNDLCDWTWIPTASGAKWTQKKGSSGKPGVGPDGDFSSPGSGCYMLLDPKNARPGQKAVLLSPVSLSSGCLSFSFHYILRGQSPGAALHIYASVLGSIRKHTLFSGQPGPNWQAVSVNYTAVGRIQFAVVGVFGKTPEPAVAVDATSIAPCGEGFPQCDFEDNAHPFCDWVQTSGDGGHWALGHKNGPVHGMGPAGGFPNAGGHYIYLEADEFSQAGQSVRLVSRPFCAPGDICVEFAYHMYGLGEGTMLELLLGSPAGSPPIPLWKRVGSQRPYWQNTSVTVPSGHQQPMQLIFKGIQGSNTASVVAMGFILINPGTCPVKVLPELPPVSPVSSTGPSETTGLTENPTISTKKPTVSIEKPSVTTEKPTVPKEKPTIPTEKPTISTEKPTIPSEKPNMPSEKPTIPSEKPTILTEKPTIPSEKPTIPSEKPTISTEKPTVPTEEPTTPTEETTTSMEEPVIPTEKPSIPTEKPSIPTEKPTISMEETIISTEKPTISPEKPTIPTEKPTIPTEKSTISPEKPTTPTEKPTIPTEKPTISPEKPTTPTEKPTISPEKLTIPTEKPTIPTEKPTIPTEKPTISTEEPTTPTEETTISTEKPSIPMEKPTLPTEETTTSVEETTISTEKLTIPMEKPTISTEKPTIPTEKPTISPEKLTIPTEKLTIPTEKPTIPIEETTISTEKLTIPTEKPTISPEKPTISTEKPTIPTEKPTIPTEETTISTEKLTIPTEKPTISPEKLTIPTEKPTISTEKPTIPTEKLTIPTEKPTIPTEKPTIPTEKLTALRPPHPSPTATGLAALVMSPHAPSTPMTSVILGTTTTSRSSTERCPPNARYESCACPASCKSPRPSCGPLCREGCVCNPGFLFSDNHCIQASSCNCFYNNDYYEPGAEWFSPNCTEHCRCWPGSRVECQISQCGTHTVCQLKNGQYGCHPYAGTATCLVYGDPHYVTFDGRHFGFMGKCTYILAQPCGNSTDPFFRVTAKNEEQGQEGVSCLSKVYVTLPESTVTLLKGRRTLVGGQQVTLPAIPSKGVFLGASGRFVELQTEFGLRVRWDGDQQLYVTVSSTYSGKLCGLCGNYDGNSDNDHLKLDGSPAGDKEELGNSWQTDQDEDQECQKYQVVNSPSCDSSLQSSMSGPGFCGRLVDTHGPFETCLLHVKAASFFDSCMLDMCGFQGLQHLLCTHMSTMTTTCQDAGHAVKPWREPHFCPMACPPNSKYSLCAKPCPDTCHSGFSGMFCSDRCVEACECNPGFVLSGLECIPRSQCGCLHPAGSYFKVGERWYKPGCKELCVCESNNRIRCQPWRCRAQEFCGQQDGIYGCHAQGAATCTASGDPHYLTFDGALHHFMGTCTYVLTRPCWSRSQDSYFVVSATNENRGGILEVSYIKAVHVTVFDLSISLLRGCKVMLNGHRVALPVWLAQGRVTIRLSSNLVLLYTNFGLQVRYDGSHLVEVTVPSSYGGQLCGLCGNYNNNSLDDNLRPDRKLAGDSMQLGAAWKLPESSEPGCFLVGGKPSSCQENSMADAWNKNCAILINPQGPFSQCHQVVPPQSSFASCVHGQCGTKGDTTALCRSLQAYASLCAQAGQAPAWRNRTFCPMRCPPGSSYSPCSSPCPDTCSSINNPRDCPKALPCAESCECQKGHILSGTSCVPLGQCGCTDPAGSYHPVGERWYTENTCTRLCTCSVHNNITCFQSTCKPNQICWALDGLLHCRASGVGVCQLPGESHYVSFDGSNHSIPDACTLVLVKVCHPAMALPFFKISAKHEKEEGGTEAFRLHEVYIDIYDAQVTLQKGHRVLINSKQVTLPAISQIPGVSVKSSSIYSIVNIKIGVQVKFDGNHLLEIEIPTTYYGKVCGMCGNFNDEEEDELMMPSDEVANSDSEFVNSWKDKDIDPSCQSLLVDEQQIPAEQQENPSGNCRAADLRRAREKCEAALRAPVWAQCASRIDLTPFLVDCANTLCEFGGLYQALCQALQAFGATCQSQGLKPPLWRNSSFCPLECPAYSSYTNCLPSCSPSCWDLDGRCEGAKVPSACAEGCICQPGYVLSEDKCVPRSQCGCKDAHGGSIPLGKSWVSSGCTEKCVCTGGAIQCGDFRCPSGSHCQLTSDNSNSNCVSDKSEQCSVYGDPRYLTFDGFSYRLQGRMTYVLIKTVDVLPEGVEPLLVEGRNKMDPPRSSIFLQEVITTVYGYKVQLQAGLELVVNNQKMAVPYRPNEHLRVTLWGQRLYLVTDFELVVSFGGRKNAVISLPSMYEGLVSGLCGNYDKNRKNDMMLPSGALTQNLNTFGNSWEVKTEDALLRFPRAIPAEEEGQGAELGLRTGLQVSECSPEQLASNSTQACRVLADPQGPFAACHQTVAPEPFQEHCVLDLCSAQDPREQEELRCQVLSGYAILCQEAGAALAGWRDRTLCESPCLQNPCQNDGQCREQGATFTCECEVGYGGGLCMEPRDAPPPRKPASNLVGVLLGLLVPVVVVLLAVTRECIYRTRRKREKTQEGDRLARLVDTDTVLDCAC

SEQ ID NO: 16414 - protein, 498 aa, Homo sapiens
MSSCVSSQPSSNRAAPQDELGGRGSSSSESQKPCEALRGLSSLSIHLGMESFIVVTECEPGCAVDLGLARDRPLEADGQEVPLDTSGSQARPHLSGRKLSLQERSQGGLAAGGSLDMNGRCICPSLPYSPVSSPQSSPRLPRRPTVESHHVSITGMQDCVQLNQYTLKDEIGKGSYGVVKLAYNENDNTYYAMKVLSKKKLIRQAGFPRRPPPRGTRPAPGGCIQPRGPIEQVYQEIAILKKLDHPNVVKLVEVLDDPNEDHLYMVFELVNQGPVMEVPTLKPLSEDQARFYFQDLIKGIEYLHYQKIIHRDIKPSNLLVGEDGHIKIADFGVSNEFKGSDALLSNTVGTPAFMAPESLSETRKIFSGKALDVWAMGVTLYCFVFGQCPFMDERIMCLHSKIKSQALEFPDQPDIAEDLKDLITRMLDKNPESRIVVPEIKILVKTMIRKRSFGNPFEGSRREERSLSAPGNLLTKQGSEDNLQGTDPPPVGEEEVLL

SEQ ID NO: 16415 - protein, 1269 aa, Homo sapiens
MDSLEEPQKKVFKARKTMRVSDRQQLEAVYKVKEELLKTDVKLLNGNHENGDLDPTSPLENMDYIKDKEEVNGIEEICFDPEGSKAEWKETPCILSVNVKNKQDDDLNCEPLSPHNITPEPVSKLPAEPVSGDPAPGDLDAGDPASGVLASGDSTSGDPTSSEPSSSDAASGDATSGDAPSGDVSPGDATSGDATADDLSSGDPTSSDPIPGEPVPVEPISGDCAADDIASSEITSVDLASGAPASTDPASDDLASGDLSSSELASDDLATGELASDELTSESTFDRTFEPKSVPVCEPVPEIDNIEPSSNKDDDFLEKNGADEKLEQIQSKDSLDEKNKADNNIDANEETLETDDTTICSDRPPENEKKVEEDIITELALGEDAISSSMEIDQGEKNEDETSADLVETINENVIEDNKSENILENTDSMETDEIIPILEKLAPSEDELTCFSKTSLLPIDETNPDLEEKMESSFGSPSKQESSESLPKEAFLVLSDEEDISGEKDESEVISQNETCSPEVESNEKDNKPEEEEQVIHEDDERPSEKNEFSRRKRSKSEDMDNVQSKRRRYMEEEYEAEFQVKITAKGDINQKLQKVIQWLLEEKLCALQCAVFDKTLAELKTRVEKIECNKRHKTVLTELQAKIARLTKRFEAAKEDLKKRHEHPPNPPVSPGKTVNDVNSNNNMSYRNAGTVRQMLESKRNVSESAPPSFQTPVNTVSSTNLVTPPAVVSSQPKLQTPVTSGSLTATSVLPAPNTATVVATTQVPSGNPQPTISLQPLPVILHVPVAVSSQPQLLQSHPGTLVTNQPSGNVEFISVQSPPTVSGLTKNPVSLPSLPNPTKPNNVPSVPSPSIQRNPTASAAPLGTTLAVQAVPTAHSIVQATRTSLPTVGPSGLYSPSTNRGPIQMKIPISAFSTSSAAEQNSNTTPRIENQTNKTIDASVSKKAADSTSQCGKATGSDSSGVIDLTMDDEESGASQDPKKLNHTPVSTMSSSQPVSRPLQPIQPAPPLQPSGVPTSGPSQTTIHLLPTAPTTVNVTHRPVTQVTTRLPVPRAPANHQVVYTTLPAPPAQAPLRGTVMQAPAVRQVNPQNSVTVRVPQTTTYVVNNGLTLGSTGPQLTVHHRPPQVHTEPPRPVHPAPLPEAPQPQRLPPEAASTSLPQKPHLKLARVQSQNGIVLSWSVLEVDRSCATVDSYHLYAYHEEPSATVPSQWKKIGEVKALPLPMACTLTQFVSGSKYYFAVRAKDIYGRFGPFCDPQSTDVISSTQSS

SEQ ID NO: 16416 - protein, 79 aa, Homo sapiens
MGILKLQVFLIVLSVALNHLKATPIESHQVEKRKCNTATCATQRLANFLVHSSNNFGAILSSTNVGSNTYGKRNAVEVL

SEQ ID NO: 16417 - protein, 126 aa, Homo sapiens; identical to SEQ ID NO: 11431

SEQ ID NO: 16418 - protein, 128 aa, Homo sapiens
MGQNDLMGTAEDFADQFLRVTKQYLPHVARLCLISTFLEDGIRMWFQWSEQRDYIDTTWNCGYLLASSFVFLNLLGQLTGCVLVLSRNFVQYACFGLFGIIALQTIAYSILWDLKFLMRLSRTSWAQL

SEQ ID NO: 16419 - protein, 155 aa, Homo sapiens
MGSTVPRSASVLLLLLLLRRAEQPCGAELTFELPDNAKQCFHEEVEQGVKFSLDYQVITGGHYDVDCYVEDPQGNTIYRETKKQYDSFTYRAEVKGVYQFCFSNEFSTFSHKTVYFDFQVGDEPPILPDMGNRVTALTQGPSASPTPTPPLRVPV

SEQ ID NO: 16420 - protein, 773 aa, Homo sapiens
MDVTSSSGGGGDPRQIEETKPLLGGDVSAPEGTKMGAVPCRRALLLCNGMRYKLLQEGDIQVCVIRHPRTFLSKILTSKFLRRWEPHHLTLADNSLASATPTGYMENSVSYSAIEDVQLLSWENAPKYCLQLTIPGGTVLLQAANSYLRDQWFHSLQWKKKIYKYKKVLSNPSRWEVVLKEIRTLVDMALTSPLQDDSINQAPLEIVSKLLSENTNLTTQEHENIIVAIAPLLENNHPPPDLCEFFCKHCRERPRSMVVIEVFTPVVQRILKHNMDFGKCPRLRLFTQEYILALNELNAGMEVVKKFIQSMHGPTGHCPHPRVLPNLVAVCLAAIYSCYEEFINSRDNSPSLKEIRNGCQQPCDRKPTLPLRLLHPSPDLVSQEATLSEARLKSVVVASSEIHVEVERTSTAKPALTASAGNDSEPNLIDCLMVSPACSTMSIELGPQADRTLGCYVEILKLLSDYDDWRPSLASLLQPIPFPKEALAHEKFTKELKYVIQRFAEDPRQEVHSCLLSVRAGKDGWFQLYSPGGVACDDDGELFASMVHILMGSCYKTKKFLLSLAENKLGPCMLLALRGNQTMVEILCLMLEYNIIDNNDTQLQIISTLESTDVGKRMYEQLCDRQRELKELQRKGGPTRLTLPSKSTDADLARLLSSGSFGNLENLSLAFTNVTSACAEHLIKLPSLKQLNLWSTQFGDAGLRLLSEHLTMLQVLNLCETPVTDAGLLALSSMKSLCSLNMNSTKLSADTYEDLKAKLPNLKEVDVRYTEAW

SEQ ID NO: 16421 - protein, 218 aa, Homo sapiens
MAWKSSVIMQMGRFLLLVILFLPREMTSSVLTVNGKTENYILDTTPGSQASLICAVQNHTREEELLWYREEGRVDLKSGNKINSSSVCVSSISENDNGISFTCRLGRDQSVSVSVVLNVTFPPLLSGNDFQTVEEGSNVKLVCNVKANPQAQMMWYKNSSLLDLEKSRHQIQQTSESFQLSITKVEKPDNGTYSCIAKSSLKTESLDFHLIVKALHEG

SEQ ID NO: 16422 - protein, 2363 aa, Homo sapiens
MPVLGVASKLRQPAVGSKPVHTALPIPNLGTTGSQHCSSRPLELTETESSMLSCQLALKSTCEFGEKKPLQGKAKEKEDSKIYTDWANHYLAKSGHKRLIKDLQQDIADGVLLAEIIQIIANEKVEDINGCPRSQSQMIENVDVCLSFLAARGVNVQGLSAEEIRNGNLKAILGLFFSLSRYKQQQHHQQQYYQSLVELQQRVTHASPPSEASQAKTQQDMQSSLAARYATQSNHSGIATSQKKPTRLPGPSRVPAAGSSSKVQGASNLNRRSQSFNSIDKNKPPNYANGNEKDSSKGPQSSSGVNGNVQPPSTAGQPPASAIPSPSASKPWRSKSMNVKHSATSTMLTVKQSSTATSPTPSSDRLKPPVSEGVKTAPSGQKSMLEKFKLVNARTALRPPQPPSSGPSDGGKDDDAFSESGEMEGFNSGLNSGGSTNSSPKVSPKLAPPKAGSKNLSNKKSLLQPKEKEEKNRDKNKVCTEKPVKEEKDQVTEMAPKKTSKIASLIPKGSKTTAAKKESLIPSSSGIPKPGSKVPTVKQTISPGSTASKESEKFRTTKGSPSQSLSKPITMEKASASSCPAPLEGREAGQASPSGSCTMTVAQSSGQSTGNGAVQLPQQQQHSHPNTATVAPFIYRAHSENEGTALPSADSCTSPTKMDLSYSKTAKQCLEEISGEDPETRRMRTVKNIADLRQNLEETMSSLRGTQISHSTLETTFDSTVTTEVNGRTIPNLTSRPTPMTWRLGQACPRLQAGDAPSLGAGYPRSGTSRFIHTDPSRFMYTTPLRRAAVSRLGNMSQIDMSEKASSDLDMSSEVDVGGYMSDGDILGKSLRTDDINSGYMTDGGLNLYTRSLNRIPDTATSRDIIQRGVHDVTVDADSWDDSSSVSSGLSDTLDNISTDDLNTTSSVSSYSNITVPSRKNTQLRTDSEKRSTTDETWDSPEELKKPEEDFDSHGDAGGKWKTVSSGLPEDPEKAGQKASLSVSQTGSWRRGMSAQGGAPSRQKAGTSALKTPGKTDDAKASEKGKAPLKGSSLQRSPSDAGKSSGDEGKKPPSGIGRSTATSSFGFKKPSGVGSSAMITSSGATITSGSATLGKIPKSAAIGGKSNAGRKTSLDGSQNQDDVVLHVSSKTTLQYRSLPRPSKSSTSGIPGRGGHRSSTSSIDSNVSSKSAGATTSKLREPTKIGSGRSSPVTVNQTDKEKEKVAVSDSESVSLSGSPKSSPTSASACGAQGLRQPGSKYPDIASPTFRRLFGAKAGGKSASAPNTEGVKSSSVMPSPSTTLARQGSLESPSSGTGSMGSAGGLSGSSSPLFNKPSDLTTDVISLSHSLASSPASVHSFTSGGLVWAANMSSSSAGSKDTPSYQSMTSLHTSSESIDLPLSHHGSLSGLTTGTHEVQSLLMRTGSVRSTLSESMQLDRNTLPKKGLRYTPSSRQANQEEGKEWLRSHSTGGLQDTGNQSPLVSPSAMSSSAAGKYHFSNLVSPTNLSQFNLPGPSMMRSNSIPAQDSSFDLYDDSQLCGSATSLEERPRAISHSGSFRDSMEEVHGSSLSLVSSTSSLYSTAEEKAHSEQIHKLRRELVASQEKVATLTSQLSANAHLVAAFEKSLGNMTGRLQSLTMTAEQKESELIELRETIEMLKAQNSAAQAAIQGALNGPDHPPKDLRIRRQHSSESVSSINSATSHSSIGSGNDADSKKKKKKNWVNSRGSELRSSFKQAFGKKKSTKPPSSHSDIEELTDSSLPASPKLPHNAGDCGSASMKPSQSASAICECTEAEAEIILQLKSELREKELKLTDIRLEALSSAHHLDQIREAMNRMQNEIEILKAENDRLKAETGNTAKPTRPPSESSSSTSSSSSRQSLGLSLNNLNITEAVSSDILLDDAGDATGHKDGRSVKIIVSISKGYGRAKDQKSQAYLIGSIGVSGKTKWDVLDGVIRRLFKEYVFRIDTSTSLGLSSDCIASYCIGDLIRSHNLEVPELLPCGYLVGDNNIITVNLKGVEENSLDSFVFDTLIPKPITQRYFNLLMEHHRIILSGPSGTGKTYLANKLAEYVITKSGRKKTEDAIATFNVDHKSSKELQQYLANLAEQCSADNNGVELPVVIILDNLHHVGSLSDIFNGFLNCKYNKCPYIIGTMNQGVSSSPNLELHHNFRWVLCANHTEPVKGFLGRYLRRKLIEIEIERNIRNNDLVKIIDWIPKTWHHLNSFLETHSSSDVTIGPRLFLPCPMDVEGSRVWFMDLWNYSLVPYILEAVREGLQMYGKRTPWEDPSKWVLDTYPWSSATLPQESPALLQLRPEDVGYESCTSTKEATTSKHIPQTDTEGDPLMNMLMKLQEAANYSSTQSCDSESTSHHEDILDSSLESTL

SEQ ID NO: 16423 - protein, 589 aa, Homo sapiens
MAAEKQVPGGGGGGGSGGGGGSGGGGSGGGRGAGGEENKENERPSAGSKANKEFGDSLSLEILQIIKESQQQHGLRHGDFQRYRYLLLVLMDAERAWSYAMQLKQEANTEPRKRFHLLSRLRKAVKHAEELERLCESNRVDAKTKLEAQAYTAYLSGMLRFEHQEWKAAIEAFNKCKTIYEKLASAFTEEQAVLYNQRVEEISPNIRYCAYNIGDQSAINELMQMRLRSGGTEGLLAEKLEALITQTRAKQAATMSEVEWRGRTVPVKIDKVRIFLLGLADNEAAIVQAESEETKERLFESMLSECRDAIQVVREELKPDQKQRDYILEGEPGKVSNLQYLHSYLTYIKLSTAIKRNENMAKGLQRALLQQQPEDDSKRSPRPQDLIRLYDIILQNLVELLQLPGLEEDKAFQKEIGLKTLVFKAYRCFFIAQSYVLVKKWSEALVLYDRVLKYANEVNSDAGAFKNSLKDLPDVQELITQVRSEKCSLQAAAILDANDAHQTETSSSQVKDNKPLVERFETFCLDPSLVTKQANLVHFPPGFQPIPCKPLFFDLALNHVAFPPLEDKLEQKTKSGLTGYIKGIFGFRS

SEQ ID NO: 16424 - protein, 400 aa, Homo sapiens
MDGDEMTRIIWQFIKEKLILPHVDIQLKYFDLGLPNRDQTDDQVTIDSALATQKYSVAVKCATITPDEARVEEFKLKKMWKSPNGTIRNILGGTVFREPIICKNIPRLVPGWTKPITIGRHAHGDQYKATDFVADRAGTFKMVFTPKDGSGVKEWEVYNFPAGGVGMGMYNTDESISGFAHSCFQYAIQKKWPLYMSTKNTILKAYDGRFKDIFQEIFDKHYKTDFDKNKIWYEHRLIDDMVAQVLKSSGGFVWACKNYDGDVQSDILAQGFGSLGLMTSVLVCPDGKTIEAEAAHGTVTRHYREHQKGRPTSTNPIASIFAWTRGLEHRGKLDGNQDLIRFAQMLEKVCVETVESGAMTKDLAGCIHGLSNVKLNEHFLNTTDFLDTIKSNLDRALGRQ

SEQ ID NO: 16425 - protein, 521 aa, Homo sapiens
MLETCGLLVALGDSTKPETVEPIPSHLALPEEVSLQEQLAQGVPRYSYLGQAMDQDGPSEMQEYFLRPGTDPQSEKLHGKMSLEHEGLATADGICSMMIQNQVSPEDALYGFDSYGPVTDSLIHEGENSYKFEEMFNENCFLVQHEQILPRVKPYDCPECGKAFGKSKHLLQHHIIHTGEKPYKCLECGKDFNRRSHLTRHQRTHNGDKPFVCSECGRTFNRGSHLTRHQRVHSGEKPFVCNECGKAFTYRSNFVLHNKSHNEKKPFACSECGKGFYESTALIQHFIIHTGERPFKCLECGKAFNCRSHLKQHERIHTGEKPFVCSQCGKAFTHYSTYVLHERAHTGEKPFECKECGKAFSIRKDLIRHFNIHTGEKPYECLQCGKAFTRMSGLTRHQWIHTGEKPYVCIQCGKAFCRTTNLIRHFSIHTGEKPYECVECGKAFNRRSPLTRHQRIHTAEKSHEPIQSGNVSCESTDLIQHSIIHTESSPVSAVNMETPSIAAHSSSLDINGFIVEETLPL

SEQ ID NO: 16426 - protein, 546 aa, Homo sapiens
MRLFVSDGVPGCLPVLAAAGRARGRAEVLISTVGPEDCVVPFLTRPKVPVLQLDSGNYLFSTSAICRYFFLLSGWEQDDLTNQWLEWEATELQPALSAALYYLVVQGKKGEDVLGSVRRALTHIDHSLSRQNCPFLAGETESLADIVLWGALYPLLQDPAYLPEELSALHSWFQTLSTQEPCQRAAETVLKQQGVLALRPYLQKQPQPSPAEGRAVTNEPEEEELATLSEEEIAMAVTAWEKGLESLPPLRPQQNPVLPVAGERNVLITSALPYVNNVPHLGNIIGCVLSADVFARYSRLRQWNTLYLCGTDEYGTATETKALEEGLTPQEICDKYHIIHADIYRWFNISFDIFGRTTTPQQTKITQDIFQQLLKRGFVLQDTVEQLRCEHCARFLADRFVEGVCPFCGYEEARGDQCDKCGKLINAVELKKPQCKVCRSCPVVQSSQHLFLDLPKLEKRLEEWLGRTLPGSDWTPNAQFITRSWLRDGLKPRCITRDLKWGTPVPLEGFEDKVFYVWFDATIGYLSITANYTDQWERWWKNPEQP

SEQ ID NO: 16427 - protein, 482 aa, Homo sapiens
MPQLNGGGGDDLGANDELISFKDEGEQEEKSSENSSAERDLADVKSSLVNESETNQNSSSDSEAERRPPPRSESFRDKSRESLEEAAKRQDGGLFKGPPYPGYPFIMIPDLTSPYLPNGSLSPTARTLHFQSGSTHYSAYKTIEHQIAVQYLQMKWPLLDVQAGSLQSRQALKDARSPSPAHIVSNKVPVVQHPHHVHPLTPLITYSNEHFTPGNPPPHLPADVDPKTGIPRPPHPPDISPYYPLSPGTVGQIPHPLGWLVPQQGQPVYPITTGGFRHPYPTALTVNASMSRFPPHMVPPHHTLHTTGIPHPAIVTPTVKQESSQSDVGSLHSSKHQDSKKEEEKKKPHIKKPLNAFMLYMKEMRAKVVAECTLKESAAINQILGRRWHALSREEQAKYYELARKERQLHMQLYPGWSARDNYGKKKKRKRDKQPGETNEHSECFLNPCLSLPPITGEKKSAFATYKVKAAASAHPLQMEAY

SEQ ID NO: 16428 - protein, 579 aa, Homo sapiens
MPQLNGGGGDDLGANDELISFKDEGEQEEKSSENSSAERDLADVKSSLVNESETNQNSSSDSEAERRPPPRSESFRDKSRESLEEAAKRQDGGLFKGPPYPGYPFIMIPDLTSPYLPNGSLSPTARTYLQMKWPLLDVQAGSLQSRQALKDARSPSPAHIVSNKVPVVQHPHHVHPLTPLITYSNEHFTPGNPPPHLPADVDPKTGIPRPPHPPDISPYYPLSPGTVGQIPHPLGWLVPQQGQPVYPITTGGFRHPYPTALTVNASMSRFPPHMVPPHHTLHTTGIPHPAIVTPTVKQESSQSDVGSLHSSKHQDSKKEEEKKKPHIKKPLNAFMLYMKEMRAKVVAECTLKESAAINQILGRRWHALSREEQAKYYELARKERQLHMQLYPGWSARDNYGKKKKRKRDKQPGETNDLSAPKKCRARFGLDQQNNWCGPCRRKKKCVRYIQGEGSCLSPPSSDGSLLDSPPPSPNLLGSPPRDAKSQTEQTQPLSLSLKPDPLAHLSMMPPPPALLLAEATHKASALCPNGALDLPPAALQPAAPSSSIAQPSTSSLHSHSSLAGTQPQPLSLVTKSLE

SEQ ID NO: 16429 - protein, 53 aa, Homo sapiens
MRALWVLGLCCVLLTFGSVRADDEVDVDGTVEEDLGKSREGSRTDDEVVQRSR

SEQ ID NO: 16430 - protein, 463 aa, Homo sapiens
MSGGTPYIGSKISLISKAEIRYEGILYTIDTENSTVALAKVRSFGTEDRPTDRPIPPRDEVFEYIIFRGSDIKDLTVCEPPKPQCSLPQDPAIVQSSLGSSTSSFQSMGSYGPFGRMPTYSQFSPSSLVGQQFGAVGVAGSSLTSFGTETSNSGTLPQSSAVGSAFTQDTRSLKTQLSQGRSSPQLDPLRKSPTMEQAVQTASAHLPAPAAVGRRSPVSTRPLPSASQKAGENQEHRRAEVHKVSRPENEQLRNDNKRQVAPGAPSAPRRGRGGHRGGRGRFGIRRDGPMKFEKDFDFESANAQFNKEEIDREFHNKLKLKEDKLEKQEKPVNGEDKGDSGVDTQNSEGNADEEDPLGPNCYYDKTKSFFDNISCDDNRERRPTWAEERRLNAETFGIPLRPNRGRGGYRGRGGLGFRGGRGRGGGRGGTFTAPRGFRGGFRGGRGGREFADFEYRKDNKVAA

SEQ ID NO: 16431 - protein, 74 aa, Homo sapiens
MAWQMMQLLLLALVTAAGSAQPRSARARTDLLNVCMNAKHHKTQPSPEDELYGQCSPWKKNACCTASTSQELHK

SEQ ID NO: 16432 - protein, 1860 aa, Homo sapiens
MGWGSRCCCPGRLDLLCVLALLGGCLLPVCRTRVYTNHWAVKIAGGFPEANRIASKYGFINIGQIGALKDYYHFYHSRTIKRSVISSRGTHSFISMEPKVEWIQQQVVKKRTKRDYDFSRAQSTYFNDPKWPSMWYMHCSDNTHPCQSDMNIEGAWKRGYTGKNIVVTILDDGIERTHPDLMQNYDALASCDVNGNDLDPMPRYDASNENKHGTRCAGEVAAAANNSHCTVGIAFNAKIGGVRMLDGDVTDMVEAKSVSFNPQHVHIYSASWGPDDDGKTVDGPAPLTRQAFENGVRMGRRGLGSVFVWASGNGGRSKDHCSCDGYTNSIYTISISSTAESGKKPWYLEECSSTLATTYSSGESYDKKIITTDLRQRCTDNHTGTSASAPMAAGIIALALEANPFLTWRDVQHVIVRTSRAGHLNANDWKTNAAGFKVSHLYGFGLMDAEAMVMEAEKWTTVPRQHVCVESTDRQIKTIRPNSAVRSIYKASGCSDNPNRHVNYLEHVVVRITITHPRRGDLAIYLTSPSGTRSQLLANRLFDHSMEGFKNWEFMTIHCWGERAAGDWVLEVYDTPSQLRNFKTPGKLKEWSLVLYGTSVQPYSPTNEFPKVERFRYSRVEDPTDDYGTEDYAGPCDPECSEVGCDGPGPDHCNDCLHYYYKLKNNTRICVSSCPPGHYHADKKRCRKCAPNCESCFGSHGDQCMSCKYGYFLNEETNSCVTHCPDGSYQDTKKNLCRKCSENCKTCTEFHNCTECRDGLSLQGSRCSVSCEDGRYFNGQDCQPCHRFCATCAGAGADGCINCTEGYFMEDGRCVQSCSISYYFDHSSENGYKSCKKCDISCLTCNGPGFKNCTSCPSGYLLDLGMCQMGAICKDGEYVDEHGHCQTCEASCAKCQGPTQEDCTTCPMTRIFDDGRCVSNCPSWKFEFENQCHPCHHTCQRCQGSGPTHCTSCGADNYGREHFLYQGECGDSCPEGHYATEGNTCLPCPDNCELCHSVHVCTRCMKGYFIAPTNHTCQKLECGQGEVQDPDYEECVPCEEGCLGCSLDDPGTCTSCAMGYYRFDHHCYKTCPEKTYSEEVECKACDSNCGSCDQNGCYWCEEGFFLLGGSCVRKCGPGFYGDQEMGECESCHRACETCTGPGHDECSSCQEGLQLLRGMCVHATKTQEEGKFWNDILRKLQPCHSSCKTCNGSATLCTSCPKGAYLLAQACVSSCPQGTWPSVRSGSCENCTEACAICSGADLCKKCQMQPGHPLFLHEGRCYSKCPEGSYAEDGICERCSSPCRTCEGNATNCHSCEGGHVLHHGVCQENCPERHVAVKGVCKHCPEMCQDCIHEKTCKECTPEFFLHDDMCHQSCPRGFYADSRHCVPCHKDCLECSGPKADDCELCLESSWVLYDGLCLEECPAGTYYEKETKECRDCHKSCLTCSSSGTCTTCQKGLIMNPRGSCMANEKCSPSEYWDEDAPGCKPCHVKCFHCMGPAEDQCQTCPMNSLLLNTTCVKDCPEGYYADEDSNRCAHCHSSCRTCEGRHSRQCHSCRPGWFQLGKECLLQCREGYYADNSTGRCERCNRSCKGCQGPRPTDCLSCDRFFFLLRSKGECHRSCPDHYYVEQSTQTCERCHPTCDQCKGKGALNCLSCVWSYHLMGGICTSDCLVGEYRVGEGEKFNCEKCHESCMECKGPGAKNCTLCPANLVLHMDDSHCLHCCNTSDPPSAQECCDCQDTTDECILRTSKVRPATEHFKTALFITSSMMLVLLLGAAVVVWKKSRGRVQPAAKAGYEKLADPNKSYSSYKSSYRESTSFEEDQVIEYRDRDYDEDDDDDIVYMGQDGTVYRKFKYGLLDDDDIDELEYDDESYSYYQ

SEQ ID NO: 16433 - protein, 241 aa, Homo sapiens
MFRSDRMWSCHWKWKPSPLLFLFALYIMCVPHSVWGCANCRVVLSNPSGTFTSPCYPNDYPNSQACMWTLRAPTGYIIQITFNDFDIEEAPNCIYDSLSLDNGESQTKFCGATAKGLSFNSSANEMHVSFSSDFSIQKKGFNASYIRVAVSLRNQKVILPQTSDAYQVSVAKSISIPELSAFTLCFEATKVGHEDSDWTAFSYSNASFTQLLSFGKAKSGYFLSISDSKCLLNNALPVKEK

SEQ ID NO: 16434 - protein, 108 aa, Homo sapiens
MWGAFLLYVSMKMGGTAGQSLEQPSEVTAVEGAIVQINCTYQTSGFYGLSWYQQHDGGAPTFLSYNALDGLEETGRFSSFLSRSDSYGYLLLQELQMKDSASYFCAVR

SEQ ID NO: 16435 - protein, 113 aa, Homo sapiens
MKTFAGFSFLFLWLQLDCMSRGEDVEQSLFLSVREGDSSVINCTYTDSSSTYLYWYKQEPGAGLQLLTYIFSNMDMKQDQRLTVLLNKKDKHLSLRIADTQTGDSAIYFCAES

SEQ ID NO: 16436 - protein, 144 aa, Homo sapiens
MWLLYLLVPALFCRAGGSIPIPQKLFGEVTSPLFPKPYPNNFETTTVITVPTGYRVKLVFQQFDLEPSEGCFYDYVKISADKKSLGRFCGQLGSPLGNPPGKKEFMSQGNKMLLTFHTDFSNEENGTIMFYKGFLAYYQAVGLW

SEQ ID NO: 16437 - protein, 563 aa, Homo sapiens
METAKQKALEVANRLYQKDLRAPDVVIGADTIVTVGGLILEKPVDKQDAYRMLSRLSGREHSVFTGVAIVHCSSKDHQLDTRVSEFYEETKVKFSELSEELLWEYVHSGEPMDKAGGYGIQALGGMLVESVHGDFLNVVGFPLNHFCKQLVKLYYPPRPEDLRRSVKHDSIPAADTFEDLSDVEGGGSEPTQRDAGSRDEKAEAGEAGQATAEAECHRTRETLPPFPTRLLELIEGFMLSKGLLTACKLKVFDLLKDEAPQKAADIASKVDASACGMERLLDICAAMGLLEKTEQGYSNTETANVYLASDGEYSLHGFIMHNNDLTWNLFTYLEFAIREGTNQHHRALGKKAEDLFQDAYYQSPETRLRFMRAMHGMTKLTACQVATAFNLSRFSSACDVGGCTGALARELAREYPRMQVTVFDLPDIIELAAHFQPPGPQAVQIHFAAGDFFRDPLPSAELYVLCRILHDWPDDKVHKLLSRVAESCKPGAGLLLVETLLDEEKRVAQRALMQSLNMLVQTEGKERSLGEYQCLLELHGFHQVQVVHLGGVLDAILATKVAP

SEQ ID NO: 16438 - protein, 401 aa, Homo sapiens
METPEVPVGSLIDFGPEAPTSSPLEAPPPVLQDGDGSLGDGASESETTESADSENDMGESPSHPSWDQDRRSSSNESFSSNQSTESTQDEETLALRDFMRGYVEKIFSGGEDLDQEEKAKFGEYCSSENGKGREWFARYVSAQRCNSKCVSEATFYRLVQSFAVVLFECHQMDDFGPAKNLMTMCFTYYHIGKPQLLPPESREKPAGSIDSYLKSANSWLAEKKDIAERLLKNTSARTENVKGFFGGLETKLKGPLARRNEEDENKPQEKRPRAVTAYSPEDEKKGEKIYLYTHLKQQPIWHTLRFWNAAFFDAVHCERTKRSPTTREKWCHMTQEERDDSLRFNENITFGQLGTFTHNMLAFGLNKKLCNDFLKKQAVIGNLDEEQYKLLSDHIEQMATE

SEQ ID NO: 16439 - protein, 894 aa, Homo sapiens
MARQKKMGQSVLRAVFFLVLGLLGHSHGGFPNTISIGGLFMRNTVQEHSAFRFAVQLYNTNQNTTEKPFHLNYHVDHLDSSNSFSVTNAFCSQFSRGVYAIFGFYDQMSMNTLTSFCGALHTSFVTPSFPTDADVQFVIQMRPALKGAILSLLGHYKWEKFVYLYDTERGFSILQAIMEAAVQNNWQVTARSVGNIKDVQEFRRIIEEMDRRQEKRYLIDCEVERINTILEQVVILGKHSRGYHYMLANLGFTDILLERVMHGGANITGFQIVNNENPMVQQFIQRWVRLDEREFPEAKNAPLKYTSALTHDAILVIAEAFRYLRRQRVDVSRRGSAGDCLANPAVPWSQGIDIERALKMVQVQGMTGNIQFDTYGRRTNYTIDVYEMKVSGSRKAGYWNEYERFVPFSDQQISNDSASSENRTIVVTTILESPYVMYKKNHEQLEGNERYEGYCVDLAYEIAKHVRIKYKLSIVGDGKYGARDPETKIWNGMVGELVYGRADIAVAPLTITLVREEVIDFSKPFMSLGISIMIKKPQKSKPGVFSFLDPLAYEIWMCIVFAYIGVSVVLFLVSRFSPYEWHLEDNNEEPRDPQSPPDPPNEFGIFNSLWFSLGAFMQQGCDISPRSLSGRIVGGVWWFFTLIIISSYTANLAAFLTVERMVSPIESAEDLAKQTEIAYGTLDSGSTKEFFRRSKIAVYEKMWSYMKSAEPSVFTKTTADGVARVRKSKGKFAFLLESTMNEYIEQRKPCDTMKVGGNLDSKGYGVATPKGSALRNAVNLAVLKLNEQGLLDKLKNKWWYDKGECGSGGGDSKDKTSALSLSNVAGVFYILVGGLGLAMMVALIEFCYKSRAESKRMKLTKNTQNFKPAPATNTQNYATYREGYNVYGTESVKI

SEQ ID NO: 16440 - protein, 2092 aa, Homo sapiens
MVLKVDTSESLWHIQISRSRFLLDSDGKRLICEVSLCKINSKVLKSGQLEDTCLVELSLALDLCLKVGISSRHLTAITVDVWTLHAELHEGLFQSQLLCQGPSLASKPVPCSEVTENLVEPTLPGLFLLQQLPDQVKVKMENTSVVLSMNSQKRHLTWTLKLLQFLYHRDEDQLPLRSFTANSDMAQMSTELLLEDGLLLSQSRQRIVCLNSLKASVQVTTIDLSASLVLNTCIIHYRHQEFSHWLHLLALETQGSSSPVLKQRKKRTFPQILAPIIFSTSISNVNISIQLGDTPPFALGFNSISLDYQHLRPQSIHQRGVLTVDHLCWRVGSDSHIQRAPHPPNMHVWGEALVLDSFTLQGSYNQPLGLSSTQSDTLFLDCTIRGLQVEASDTCAQCLSRILSLMGPQSGKSAVSRHSSFGESVSLLWKVDLKVEDMNLFTLSALVGASEVRLDTLTILGSAETSTVGIQGLVLALVKSVTEKMQPCCKAPDIPTPVLSLSMLSITYHSSIRSLEVQCGAGLTLLWSPPDHMYLYQHVLATLQCRDLLRATVFPETVPSLALETSGTTSELEGRAPEPLPPKRLLNLTLEVSTAKLTAFVAEDKFITLAAESVSLSRHGGSLQAYCPELAAGFDGNSIFNFKEVEVQLLPELEEMILHRNPFPALQTLRNRVWLLSFGSVSVEFPYQYDFSRTLDEAVGVQKWLKGLHQGTRAWASPSPVPLPPDLLLKVEHFSWVFLDDVFEVKLHDNYELMKDESKESAKRLQLLDAKVAALRKQHGELLPARKIEELYASLERKNIEIYIQRSRRLYGNTPMRRALLTWSLAGLELVALADASFHGPEHVVEQVQELDPGSPFPPEGLDLVIQWCRMLKCNVKSFLVRIRDYPRYLFEIRDWRLMGRLVGTEQSGQPCSRRRQILHLGLPWGNVAVERNMPPLKFYHDFHSEIFQYTVVWGPCWDPAWTLIGQCVDLLTKPSADPSPPLPWWDKSRLLFHGDWHMDIEQANLHQLATEDPYNTTENMHWEWSHLSFHWKPGQFVFKGDLDINVRTASKYDDCCFLHLPDLCMTLDLQWLCHGNPHDHHSVTLRAPEFLPEVPLGQLHDSYRAFRSENLNLSIKMDLTRHSGTISQPRILLYSSTLRWMQNFWATWTSVTRPICRGKLFNNLKPSKKKLGQHYKQLSYTALFPQLQVHYWASFAQQRGIQIECSQGHVFTRGTQRLIPQAGTVMRRLISDWSVTQMVSDLSQVTVHLMASPTEENADHCLDPLVTKTHLLSLSSLTYQRHSNRTAEEELSARDGDPTFHTHQLHLVDLRISWTTTNRDIAFGLYDGYKKAAVLKRNLSTEALKGLKIDPQMPAKKPKRGVPTSASAPPRVNTPSFSGQPDKGSSGGAYMLQKLIEETDRFVVFTEEESGMSDQLCGIAACQTDDIYNRNCLIELVNCQMVLRGAETEGCVIVSAAKAQLLQCQHHPAWYGDTLKQKTSWTCLLDGMQYFATTESSPTEQDGRQLWLEVKNIEEHRQRSLDSVQELMESGQAVGGMVTTTTDWNQPAEAQQAQQVQRIISRCNCRMYYISYSHDIDPELATQIKPPEVLENQEKEDLLKKQEGAVDTFTLIHHELEISTNPAQYAMILDIVNNLLLHVEPKRKEHSEKKQRVRFQLEISSNPEEQRSSILHLQEAVRQHVAQIRQLEKQMYSIMKSLQDDSKNENLLDLNQKLQLQLNQEKANLQLESEELNILIRCFKDFQLQRANKMELRKQQEDVSVVRRTEFYFAQARWRLTEEDGQLGIAELELQRFLYSKVNKSDDTAEHLLELGWFTMNNLLPNAVYKVVLRPQSSCQSGRQLALRLFSKVRPPVGGISVKEHFEVNVVPLTIQLTHQFFHRMMGFFFPGRSVEDDEVGDEEDKSKLVTTGIPVVKPRQLIATDDAVPLGPGKGVAQGLTRSSGVRRSFRKSPEHPVDDIDKMKERAAMNNSFIYIKIPQVPLCVSYKGEKNSVDWGDLNLVLPCLEYHNNTWTWLDFAMAVKRDSRKALVAQVIKEKLRLKSATGSEVRGKLETKSDLNMQQQEEEEKARLLIGLSVGDKNPGKKSIFGRRK

SEQ ID NO: 16441 - protein, 145 aa, Homo sapiens
MAESLRSPRRSLYKLVGSPPWKEAFRQRCLERMRNSRDRLLNRYRQAGSSGPGNSQNSFLVQEVMEEEWNALQSVENCPEDLAQLEELIDMAVLEEIQQELINQEQSIISEYEKSLQFDEKCLSIMLAEWEANPLICPVCTNLLS

SEQ ID NO: 16442 - protein, 458 aa, Homo sapiens
MMLIPMASVMAVTEPKWVSVWSRFLWVTLLSMVLGSLLALLLPLGAVEEQCLAVLKGLYLLRSKPDRAQHAATKCTSPSTELSITSRGATLLVAKTKASPAGKLEARAALNQALEMKRQGKREKAQKLFMHALKMDPDFVDALTEFGIFSEEDKDIIQADYLYTRALTISPYHEKALVNRDRTLPLVEEIDQRYFSIIDSKVKKVMSIPKGNSALRRVMEETYYHHIYHTVAIEGNTLTLSEIRHILETRYAVPGKSLEEQNEVIGMHAAMKYINTTLVSRIGSVTISDVLEIHRRVLGYVDPVEAGRFRTTQVLVGHHIPPHPQDVEKQMQEFVQWLNSEEAMNLHPVEFAALAHYKLVYIHPFIDGNGRTSRLLMNLILMQAGYPPITIRKEQRSDYYHVLEAANEGDVRPFIRFIAKCTETTLDTLLFATTEYSVALPEAQPNHSGFKETLPVKP

SEQ ID NO: 16443 - protein, 460 aa, Homo sapiens
MNKPITPSTYVRCLNVGLIRKLSDFIDPQEGWKKLAVAIKKPSGDDRYNQFHIRRFEALLQTGKSPTSELLFDWGTTNCTVGDLVDLLIQNEFFAPASLLLPDAVPKTANTLPSKEAITVQQKQMPFCDKDRTLMTPVQNLEQSYMPPDSSSPENKSLEVSDTRFHSFSFYELKNVTNNFDERPISVGGNKMGEGGFGVVYKGYVNNTTVAVKKLAAMVDITTEELKQQFDQEIKVMAKCQHENLVELLGFSSDGDDLCLVYVYMPNGSLLDRLSCLDGTPPLSWHMRCKIAQGAANGINFLHENHHIHRDIKSANILLDEAFTAKISDFGLARASEKFAQTVMTSRIVGTTAYMAPEALRGEITPKSDIYSFGVVLLEIITGLPAVDEHREPQLLLDIKEEIEDEEKTIEDYIDKKMNDADSTSVEAMYSVASQCLHEKKNKRPDIKKVQQLLQEMTAS

SEQ ID NO: 16444 - protein, 106 aa, Homo sapiens [sequence omitted]

SEQ ID NO: 16445 - protein, 105 aa, Homo sapiens
MKGWGWLALLLGALLGTAWARRSQDLHCGACRALVDELEWEIAQVDPKKTIQMGSFRINPDGSQSVVENASCLVLAARHASASSTNLKDILADLIPKEQARIKTF

SEQ ID NO: 16446 - protein, 88 aa, Homo sapiens
MKATIILLLLAQVSWAGPFQQRGLFDFMLEDEASGIGPEVPDDRDFEPSLGPVCPFRCQCHLRVVQCSDLVETGFHRVSQDGLDLLIS

SEQ ID NO: 16447 - protein, 177 aa, Homo sapiens
MKATIILLLLAQVSWAGPFQQRGLFDFMLEDEASGIGPEVPDDRDFEPSLGPVCPFRCQCHLRVVQCSDLGLPPSLTELHLDGNKISRVDAASLKGLNNLAKLGLSFNSISAVDNGSLANTPHLRELHLDNNKLTRVPGGLAEHKYIQVVYLHNNNISVVGSSDFCPPGHNTKKASY

SEQ ID NO: 16448 - protein, 64 aa, Homo sapiens
MDFPCLWLGLLLPLVAALDFNYHRQEGMEAFLKTVAQNYSSVTHLHSIGKSVKDCWAGAAAPSD

SEQ ID NO: 16449 - protein, 151 aa, Homo sapiens
MDLVLKRCLLHLAVIGALLAVGATKVPRNQDWLGVSRQLRTKAWNRQLYPEWTEAQRLDCWRGGQVSLKVSNDGPTLIGANASFSIALNFPGSQKVLPDGQVIWVNNTIINGSQVWGGQPVYPQETDDACIFPDGGPCPSGSWSQKRSFVY

SEQ ID NO: 16450 - protein, 103 aa, Homo sapiens
MCDFTEDQTAEMNVKVLDFEHFLPMLQTVAKNKDQGTYEDYVEGLRVFDKEGNGTVMGAEIRHVLVTLGEKMTEEEVEMLVAGHEDSNGCINYEELVRMVLNG

SEQ ID NO: 16451 - protein, 208 aa, Homo sapiens
MPPKKDVPVKKPAGPSISKPAAKPAAAGAPPAKTKAEPAVPQAPQKTQEPPVDLSKVVIEFNKDQLEEFKEAFELFDRVGDGKILYSQCGDVMRALGQNPTNAEVLKVLGNPKSDELKSRRVDFETFLPMLQAVAKNRGQGTYEDYLEGFRVFDKEGNGKVMGAELRHVLTTLGEKMTEEEVETVLAGHEDSNGCINYEAFLKHILSV

SEQ ID NO: 16452 - protein, 67 aa, Homo sapiens
MAEGSRIPQARALLQQCLHARLQIRPADGDVAAQWVEVQRGLVIYVCFFKGADKELLPKMDLRLWLH

SEQ ID NO: 16453 - protein, 478 aa, Homo sapiens
MLGSLGLWALLPTAVEAPPNRRTCVFFEAPGVRGSTKTLGELLDTGTELPRAIRCLYSRCCFGIWNLTQDRAQVEMQGCRDSDEPGCESLHCDPSPRAHPSPGSTLFTCSCGTDFCNANYSHLPPPGSPGTPGSQGPQAAPGESIWMALVLLGLFLLLLLLLGSIILALLQRKNYRVRGEPVPEPRPDSGRDWSVELQELPELCFSQVIREGGHAVVWAGQLQGKLVAIKAFPPRSVAQFQAERALYELPGLQHDHIVRFITASRGGPGRLLSGPLLVLELHPKGSLCHYLTQYTSDWGSSLRMALSLAQGLAFLHEERWQNGQYKPGIAHRDLSSQNVLIREDGSCAIGDLGLALVLPGLTQPPAWTPTQPQGPAAIMEAGTQRYMAPELLDKTLDLQDWGMALRRADIYSLALLLWEILSRCPDLRPAVHHPSNWPMRQNWAIPLPLMSYGPWQCRRGGVPTSHPPGAALPQTLMG

SEQ ID NO: 16454 - protein, 299 aa, Homo sapiens
MDLVLKRCLLHLAVIGALLAVGATKVPRNQDWLGVSRQLRTKAWNRQLYPEWTEAQRLDCWRGSQVWGGQPVYPQETDDACIFPDGGPCPSGSWSQKRSFVYVWKTWGQYWQVLGGPVSGLSIGTGRAMLGTHTMEVTVYHRRGSRSYVPLAHSSSAFTITDQVPFSVSVSQLRALDGGNKHFLRNQPLTFALQLHDPSGYLAEADLSYTWDFGDSSGTLISRALVVTHTYLEPGPVTAQVVLQAAIPLTSCGSSPVPGTTDGHRPTAEAPNTTAGQVPTTEVVGTTPGQAPTAEPSGT

SEQ ID NO: 16455 - protein, 383 aa, Homo sapiens
MEAAVAAPRPRLLLLVLAAAAAAAAALLPGATALQCFCHLCTKDNFTCVTDGLCFVSVTETTDKVIHNSMCIAEIDLIPRDRPFVCAPSSKTGSVTTTYCCNQDHCNKIELPTTGPFSVKSSPGLGPVELAAVIAGPVCFVCISLMLMVYICHNRTVIHHRVPNEEDPSLDRPFISEGTTLKDLIYDMTTSGSGSGLPLLVQRTIARTIVLQESIGKGRFGEVWRGKWRGEEVAVKIFSSREERSWFREAEIYQTVMLRHENILGFIAADNKDNGTWTQLWLVSDYHEHGSLFDYLNRYTVTVEGMIKLALSTASGLAHLHMEIVGTQGKPAIAHRDLKSKNILVKKNGTCCIADLGLAVRHDSATDTIDIAPNHRVGTKRNS

SEQ ID NO: 16456 - protein, 88 aa, Homo sapiens
MVALPMVLVLLLVLSRGESELDAKIPSTGDATEWRNPHLSMLGSCQPAPSCQKCILSHPSCAWCKQLNFTASGEAEARRCARREELLA

SEQ ID NO: 16457 - protein, 119 aa, Homo sapiens
MGELFECVLFTASLAKYADPVTDLLDRCGVFRARLFRESCVFHQGCYVKDLSRLGRDLRKTLILDNSPASYIFHPENAVPVQSWFDDMADTELLNLIPIFEELSGAEDVYTSLGQLRAP

SEQ ID NO: 16458 - protein, 151 aa, Homo sapiens
MCDFTEDQTAEFKEAFQLFDRTGDGKILYSQCGDVMRALGQNPTNAEVLKVLGNPKSDEMNVKVLDFEHFLPMLQTVAKNKDQGTYEDYVEGLRVFDKEGNGTVMGAEIRHVLVTLGEKMTEEEVEMLVAGHEDSNGCINYEELVRMVLNG

SEQ ID NO: 16459 - protein, 159 aa, Homo sapiens
MALTPPLLLLSAGTMTLGSPRKGLLMLLMALVTQGDPVKPSRGPLVTCTCESPHCKGPTCRGAWCTVVLVREEGRHPQEHRGCGNLHRELCRGRPTEFVNHYCCDSHLCNHNVSLVLEGKGRYGEVWRGLWHGESVAVKIFSSRDEQSWFRETEIYNTV

SEQ ID NO: 16460 - protein, 176 aa, Homo sapiens
MKDKDTRKSKGVAFILFLDKDSAQNCTRAINNKQLFGRVIKASIAIDNGRAAEFIRRRNYFDKSKCYECGESGHLSYACPKNMLGEREPPKKKEKKKKKKAPEPEEEIEEVEESEDEGEDPALDSLSQAIAFQQAKIEEEQKKWKPSSGVPSTSDDSRRPRIKKSTYFSDEEELSD

SEQ ID NO: 16461 - protein, 263 aa, Homo sapiens
MKGWGWLALLLGALLGTAWARRSQDLHCGACRALVDELEWEIAQVDPKKTIQMGSFRINPDGSQSVVEVPYARSEAHLTELLEEICDRMKEYGEQIDPSTHRKNYVRVVGRNGESSELDLQGIRIDSDISGTLKFACESIVEEYEDELIEFFSREADNVKDKLCSKRTDGGTSKNRDRKGKMDVTNSAEKSRRSPAMALLTAAARLLGTKNASCLVLAARHASASSTNLKDILADLIPKEQARIKTFRQQHGKTVVGQITVDM

SEQ ID NO: 16462 - protein, 568 aa, Homo sapiens
MVLGPEQKMSDDSVSGDHGESASLGNINPAYSNPSLSQSPGDSEEYFATYFNEKISIPEEEYSCFSFRKLWAFTGPGFLMSIAYLDPGNIESDLQSGAVAGFKLLWILLLATLVGLLLQRLAARLGVVTGLHLAEVCHRQYPKVPRVILWLMVELAIIGSDMQEVIGSAIAINLLSVGRIPLWGGVLITIADTFVFLFLDKYGLRKLEAFFGFLITIMALTFGYEYVTVKPSQSQVLKGMFVPSCSGCRTPQIEQAVGIVGAVIMPHNMYLHSALVKSRQVNRNNKQEVREANKYFFIESCIALFVSFIINVFVVSVFAEAFFGKTNEQVVEVCTNTSSPHAGLFPKDNSTLAVDIYKGGVVLGCYFGPAALYIWAVGILAAGQSSTMTGTYSGQFVMEGFLNLKWSRFARVVLTRSIAIIPTLLVAVFQDVEHLTGMNDFLNVLQSLQLPFALIPILTFTSLRPVMSDFANGLGWRIAGGILVLIICSINMYFVVVYVRDLGHVALYVVAAVVSVAYLGFVFYLGWQCLIALGMSFLDCGHTCHLGLTAQPELYLLNTMDADSLVSR

SEQ ID NO: 16463 - protein, 63 aa, Homo sapiens
MNCQQLWLGFLLPMTVSGRVLGLAEVAPVDYLSQYGYLQKPLEGSNNFKPEDITEALSLRSAG

SEQ ID NO: 16464 - protein, 249 aa, Homo sapiens
MDFPCLWLGLLLPLVAALDFNYHRQEGMEAFLKTVAQNYSSVTHLHSIGKSVKGRNLWVLVVGRFPKEHRIGIPEFKYVANMHGDETVGRELLLHLIDYLVTSDGKDPEITNLINSTRIHIMPSMNPDGFEAVKKPDCYYSIGRENYNQYDLNRNFPDAFEYNNVSRQPETVAVMKWLKTETFVLSANLHGGALVASYPFDNGVQATGALYSRSLTPDDDVFQYLAHTYASRNPNMKKGDECKNKMNFP

SEQ ID NO: 16465 - protein, 281 aa, Homo sapiens
MRVVVIGAGVIGLSTALCIHERYHSVLQPLDIKVYADRFTPLTTTDVAAGLWQPYLSDPNNPQEADWSQQTFDYLLSHVHSPNAENLGLFLISGYNLFHEAIPVAREGADVIVNCTGVWAGALQRDPLLQPGRGQIMKVDAPWMKHFILTHDPERGIYNSPYIIPGTQTVTLGGIFQLGNWSELNNIQDHNTIWEGCCRLEPTLKNARIIGERTGFRPVRPQIRLEREQLRTGPSNTEVIHNYGHGGYGLTIHWGCALEAAKLFGRILEEKKLSRMPPSHL

SEQ ID NO: 16466 - protein, 136 aa, Homo sapiens
MWSRLVWLGLRAPLGGRQGFTSKADPQGSGRITAAVIEHLERLALVDFGSREAVARLEKAIAFADRLRAVDTDGVEPMESVLEDRCLYLRSDNVVEGNCADELLQNSHRVVEEYFVAPPGNISLPKLDEQEPFPHS

SEQ ID NO: 16467 - protein, 241 aa, Homo sapiens
MKFILLWALLNLTVALAFNPDYTVSSTPPYLVYLKSDYLPCAGVLIHPLWVITAAHCNLPKLRVILGVTIPADSNEKHLQVIGYEKMIHHPHFSVTSIDHDIMLIKLKTEAELNDYVKLANLPYQTISENTMCSVSTWSYNVCDIYKEPDSLQTVNISVISKPQCRDAYKTYNITENMLCVGIVPGRRQPCKEVSAAPAICNGMLQGILSFADGCVLRADVGIYAKIFYYIPWIENVIQNN

SEQ ID NO: 16468 - protein, 151 aa, Homo sapiens
MCDFTEDQTAEFKEAFQLFDRTGDGKILYSQCGDVMRALGQNPTNAEVLKVLGNPKSDEMNVKVLDFEHFLPMLQTVAKNKDQGTYEDYVEGLRVFDKEGNGTVMGAEIRHVLVTLGEKMTEEEVEMLVAGHEDSNGCINYEAFVRHILSG

SEQ ID NO: 16469 - protein, 485 aa, Homo sapiens
MNCQQLWLGFLLPMTVSGRVLGLAEVAPVDYLSQYGYLQKPLEGSNNFKPEDITEALRAFQEASELPVSGQLDDATRARMRQPRCGLEDPFNQKTLKYLLLARAALRQAFQDWSNVAPLTFQEVQAGAADIRLSFHGRQSSYCSNTFDGPGRVLAHADIPELGSVHFDEDEFWTEGTYRGVNLRIIAAHEVGHALGLGHSRYSQALMAPVYEGYRPHFKLHPDDVAGIQALYGKKSPVIRDEEEEETELPTVPPVPTEPSPMPDPCSSELDAMMLGPRGKTYAFKGDYVWTVSDSGPGPLFRVSALWEGLPGNLDAAVYSPRTQWIHFFKGDKVWRYINFKMSPGFPKKLNRVEPNLDAALYWPLNQKVFLFKGSGYWQWDELARTDFSSYPKPIKGLFTGVPNQPSAAMSWQDGRVYFFKGKVYWRLNQQLRVEKGYPRNISHNWMHCRPRTIDTTPSGGNTTPSGTGITLDTTLSATETTFEY

SEQ ID NO: 16470 - protein, 398 aa, Homo sapiens
MAAGAGAGSAPRWLRALSEPLSAAQLRRLEEHRYSAAGVSLLEPPLQLYWTWLLQWIPLWMAPNSITLLGLAVNVVTTLVLISYCPTATEEAPYWTYLLCALGLFIYQSLDAIDGKQARRTNSCSPLGELFDHGCDSLSTVFMAVGASIAARLGTYPDWFFFCSFIGMFVFYCAHWQTYVSGMLRFGKVDVTEIQIALVIVFVLSAFGGATMWDYTIPILEIKLKILPVLGFLGGVIFSCSNYFHVILHGGVGKNGSTIAGTSVLSPGLHIGLIIILAIMIYKKSATDVFEKHPCLYILMFGCVFAKVSQKLVVAHMTKSELYLQDTVFLGPGLLFLDQYFNNFIDEYVVLWMAMVISSFDMVIYFSALCLQISRHLHLNIFKTACHQAPEQVHKHID

SEQ ID NO: 16471 - protein, 188 aa, Homo sapiens [sequence omitted]

SEQ ID NO: 16472 - protein, 186 aa, Homo sapiens
MAAETLLSSLLGLLLLGLLLPASLTGGVGSLNLEELSEMRYGIEILPLPVMGGQSQSSDVVIVSSKYKQRYECRLPAGAIHFQREREEETPAYQGPGIPELLSPMRDAPCLLKTKDWWTYEFCYGRHIQQYHMEGILLPSDRDRLRSEVKAGMERELENIIQETEKELDPDGLKKESERDRAMLAL

SEQ ID NO: 16473 - protein, 82 aa, Homo sapiens
MKGWGWLALLLGALLGTAWARRSQDLHCGACRALVDELEWEIAQVDPKKTIQMGSFRINPDGSQSVVEIPEIARHGFTYCGR

SEQ ID NO: 16474 - protein, 185 aa, Homo sapiens
MEVHGKPKASPSCSSPTRDSSGVPVSKELLTAGSDGRGGIWDRLLINSQPKSRKTSTLQTVRIERSPLLDQVQTFLPQMARANEKLRKEMAAAPPGRFNIENIDGPHSKVIQMDVALFEMNQSDSKEVDSSEESSQDSSENSSESEDEDDSIPSEVTIDNIKLPNSEGGKGKIEVLDSPASKKKK

SEQ ID NO: 16475 - protein, 182 aa, Homo sapiens [sequence omitted]

SEQ ID NO: 16476 - protein, 232 aa, Homo sapiens
MAPSVPAAEPEYPKGIRAVLLGPPGAGKGTQAPRLAENFCVCHLATGDMLRAMVASGSELGKKLKATMDAGKLVSDEMVVELIEKNLETPLCKNGFLLDGFPRTVRQAEMLDDLMEKRKEKLDSVIEFSIPDSLLIRRITGRLIHPKSGRSYHEEFNPPKEPMKDDITGEPLIRRSDDNEKALKIRLQAYHTQTTPLIEYYRKRGIHSAIDASQTPDVVFASILAAFSKATC

SEQ ID NO: 16477 - protein, 321 aa, Homo sapiens
MESRVLLRTFCLIFGLGAVWGLGVDPSLQIDVLTELELGESTTGVRQVPGLHNGTKAFLFQDTPRSIKASTATAEQFFQKLRNKHEFTILVTLKQTHLNSGVILSIHHLDHRYLELESSGHRNEVRLHYRSGSHRPHTEVFPYILADDKWHKLSLAISASHLILHIDCNKIYERVVEKPSTDLPLGTTFWLGQRNNAHGYFKGIMQDVQLLVMPQGFIAQCPDLNRTCPTCNDFHGLVQKIMELQDILAKTSAKLSRAEQRMNRLDQCYCERTCTMKGTTYREFESWIDGCKNCTCLNGTIQCETLICPNPDCPLKSALAY

SEQ ID NO: 16478 - protein, 196 aa, Homo sapiens
MRVVVIGAGVIGLSTALCIHERYHSVLQPLDIKVYADRFTPLTTTDVAAGLWQPYLSDPNNPQEADWSQQTFDYLLSHVHSPNAENLGLFLISGYNLFHEAIPDPSWKDTVLGFRKLTPRELDMFPDYGYGWFHTSLILEGKNYLQWLTERLTERGVKFFQRKVESFEEVAREGADVIVNCTGVWAGALQRDPLLQ

SEQ ID NO: 16479 - protein, 187 aa, Homo sapiens
MRALVLLLSLFLLGGQAQHVSDWTYSEGALDEAHWPQHYPACGGQRQSPINLQRTKISLPSTMRMTVADGTVYIAQQMHFHWGGASSEISGSEHTVDGIRHVIEIHIVHYNSKYKSYDIAQDAPDGLAVLAAFVEVKNYPENTYYSNFISHLANIKYPGQRTTLTGLDVQDMLPRNLQHYYTYHGSL

SEQ ID NO: 16480 - protein, 44 aa, Homo sapiens
MVSAAAPSLLILLLLLLGSVPATDARSVPLKATFLEDVAGSGEA

SEQ ID NO: 16481 - protein, 471 aa, Homo sapiens
MCGDCVEKEYPNRGNTCLENGSFLLNFTGCAVCSKRDFMLITNKSLKEEDGEEIVTYDHLCKNCHHVIARHEYTFSIMDEFQAKVEEKIQEVFSSYKFNHLVPRLVLQREKHFHYLKRGLRQLTDAYECLDASRPWLCYWILHSLELLDEPIPQIVATDVCQFLELCQSPEGGFGGGPGQYPHLAPTYAAVNALCIIGTEEAYDIINREKLLQYLYSLKQPDGSFLMHVGGEVDVRSAYCAASVASLTNIITPDLFEGTAEWIARCQNWEGGIGGVPGMEAHGGYTFCGLAALVILKRERSLNLKSLLQWVTSRQMRFEGGFQGRCNKLVDGCYSFWQAGLLPLLHRALHAQGDPALSMSHWMFHQQALQEYILMCCQCPAGGLLDKPGKSRDFYHTCYCLSGLSIAQHFGSGAMLHDVVLGVPENALQPTHPVYNIGPDKVIQATTYFLQKPVPGFEELKDETSAEPATD

SEQ ID NO: 16482 - protein, 332 aa, Homo sapiens
MFLPLYLNLVLYFVFWLHWTNCDFSLAVRGSKPGKNVQLQENEIRGLCLKSREIFLSQPILLELEAPLKICGDIHGQYYDLLRLFEYGGFPPESNYLFLGDYVDRGKQSLETICLLLAYKIKYPENFFLLRGNHECASINRIYGFYDECKRRYNIKLWKTFTDCFNCLPIAAIVDEKIFCCHGGLSPDLQSMEQIRRIMRPTDVPDQGLLCDLLWSDPDKDVLGWGENDRGVSFTFGAEVVAKFLHKHDLDLICRAHQVVEDGYEFFAKRQLVTLFSAPNYCGEFDNAGAMMSVDETLMCSFQILKPAEKKKPNATRPVTPPRGMITKQAKK

SEQ ID NO: 16483 - protein, 125 aa, Homo sapiens
MAAETLLSSLLGLLLLGLLLPASLTGGVGSLNLEELSEMRYGIEILPLPVMGGQSQSSDVVIVSSKYKQRYECRLPAGAIHFQREREEETPAYQGPGIPELLSPMRDAPCLLKGGMERPQVENRL

SEQ ID NO: 16484 - protein, 2353 aa, Homo sapiens
MNIVRKLNLMIPWSIFLLHVLLFSLQEYICASSILMGTSKNGFNENRQKRALLAAQFEATSPRYFFHDAINWGESKIKGSCPYECLNGAFCSKTGTCDCQIFQALGTRCQIIPNMGNGRDGICKTWGQYHFETFDGIYYYFPGNCSYIFAKDCGDLEPRYTVWVHNSPKCLGSVYSCYRSISLFFSNQEEIRIYGHEIKKNGISLTLPQTIGQIFIEKLADYILVKTTFGFSLAWDGISGIYLKLSEDHKGKSCGLCGNYNDIQSDDFIILQEDYTEDIAMFANSWSVQTPDDTKCVLTPSDFPNPCSSGMPAFEAIFFKCQILLQFPFLSCHEYIDPYLYIASCVNDLCKTDDDETYCRAATEYARACSHAGYPIQDWRDDFPACTDKCDDSFVHRDCISCCPPTCTFEKQCLGSNLHCLDGCYCPDGLVMDNGTCISLENCPCGFHGLAYSVGSKIEQECTECVCVGGVWNCTEQDCPVQCSVVGDSHFTTFDGRHYSFIGMCQYILVKGTGKDKFTITLQKAPCEQNLGLVCLQSITLILEDDFNKQVTLGRGGQILTSPNQGFNLNGIVEIQTLSSLFILLKTTFGLKILFAIDGERIYIQLTSAWKRRTLGLCGTFNGNIRDDFLSPSGMIEGTPQLHANAWRVSSTCFAPVHVPVVDPCNINQQNIGYAAHCDVIHQELFAPCHIYISPGLYYQLCRHDACKCGSSCLCNALAHYAYLCGQHGVPIDFRTQISFCAVVCQKGMLYHHCSSFCLHSCISLSSPEQCSDDCAEGCNCPEGKFYEDTLNFCVPIFHCRCHYRGSVYQPGELIPTPSGLCQCSNGTVKCDELATPSAVHICPEGKEYFDCRFPDPELPAGGVNCETTCANLAMNFTCTPSSPCISGCVCAPGMAEHRGKCYVPESCPCIWKDWEYLSGEVIATPCYTCVCRRGMFNCTYYPCPAVCTIYGDRHYYSFDGLEYDYISDCQVFLIKSADDSDISVIAQNKKCFDNDIVCSKSVLISVGDTEIYLNDTPYKQKQSGFFLENKSTYQLWKAGYYIVVYFPEKDITILWDRKTTIHIKVGPQWKNKLSGLCGNFDKCTSNDMTTSNNLEVRNARVFGDSWALGQCESPDETIKPCEAHQNKFPYAKKECSILYSDIFASCRNVIDVTSFAKNCHEDTCNCNLGGDCECLCTSIAAYAYKCCQEGISIHWRSSTVCSLDCEYYNEGLGEGPYMLASYGQSGLVLGANMTSRSVFCLPRSSVHTSLFFYFMITPGLFKEKVSSLALVSLESAERPNYFLYVHDNDTLSLELWEANSAFHRRATFFHHQGLWIPGYSAFELYSKKGFFIIFTDSSVKASKYDDSEEFKHSSSFSIEEIQAAVPYRKMCEWRYEPCATPCFKTCSDPEALACKFLPPVEGCLPYCPKNMILDEVTLKCVYPRDCIPVIPTEPTLMPPAKPTVPMFTVWEMITPSDITVFDMLTPTTGLECEPQKFDPVYDCSQYICLNMEWQLYNWSLNCPKDVEMPDCGFRGRPVQVNSDICCPEWECPCRCSMLSELSIITFDGNNAALYSMASYILVRIPGEIIVAHIEKCSMNQNGNSLKKLAPSGRISGLCFKKLNVTTPIHKIIVNRLARKVEVDSIVVPLPFSSQELSIEDSGSMYVITTPAGLIIKWSHLTGIIDIHFGFRFNLSSYTEGLCGICNEDPDDDLRMQNGTIITNMEDIGLFIESWEIEKSFEVTMRRPVRNCTEHDCSQCIDLLNRRIFIPCHDKVSPEDFCEKMWINYTYFWNYECDALSAYVALCNKFDICIQWRTPDYCSLSCPEGKEYQPCVRPCEARTCLNQWFYGHTSCLNLREDCVCKVGTILHRPHSAQCIPEKECACTDSEDQPRTAGEIWNGGIDECTLYKCLENGSIIPIEPDCDEEPTPVCEREAEVVMGIIDKWTCCSKEVCGCDTTLCETSIPTCTNSQKLIVGHSPLSCCPQYKCECDPLKCPSISTPECREDQFMIQVRQEEPCCFSPFCVCESCTKPVPLCHDGEFLTVDLNSTHFCCPQYYCVCEPNLCPMPLLNCAEDMNLVKENVSGQCCPTWHCECNCENLIMPTCEVGEFTAIDHNFQSDCGCIQYLCEKDDVCVFQEVSVLNPGQSMIKYLEEDFCYAIECLEEKDNHTGFHTLNFTLVNCSKKCDVHQVYTPSPSDYGCCGTCKNVSCKFHMENGTSVVYAVGSTWHYNCTTYECVKTDEGAIILNYTMVCPPFNETECKMNEGIVKLYNEGCCKICKREERICQKVIIKSVIRKQDCMSQSPINVASCDGKCPSATIYNINIESHLRFCKCCRENGVRNLSVPLYCSGNGTEIMYTLQEPIDCTCQWN

SEQ ID NO: 16485 - protein, 907 aa, Homo sapiens
MDSSYAKRDAFTDSAISAKVNGEHKEKDLEPWDAGELTANEELEALENDVSNGWDPNDMFRYNEENYGVVSTYDSSLSSYTVPLERDNSEEFLKREARANQLAEEIESSAQYKARVALENDDRSEEEKYTAVQRNSSEREGHSINTRENKYIPPGQRNREVISWGSGRQNSPRMGQPGSGSMPSRSTSHTSDFNPNSGSDQRVVNGVFILSFISFVLSGVPWPSPCPSPSSRPPSRYQSGPNSLPPRAATPTRPPSRPPSRPSRPPSHPSAHGSPAPVSTMPKRMSSEGPPRMSPKAQRHPRNHRVSAGRGSISSGLEFVSHNPPSEAATPPVARTSPSGGTWSSVVSGAASPTPASPASNRAVTPSSEAKDSRLQDQRQNSPAGNKENIKPNETSPSFSKAENKGISPVVSEHRKQIDDLKKFKNDFRLQPSSTSESMDQLLNKNREGEKSRDLIKDKIEPSAKDSFIENSSSNCTSGSSKPNSPSISPSILSNTEHKRGPEVTSQGVQTSSPACKQEKDDKEEKKDAAEQVRKSTLNPNAKEFNPRSFSQPKPSTTPTSPRPQAQPSPSMVGHQQPTPVYTQPVCFAPNMMYPVPVSPGVQPLYPIPMTPMPVNQAKTYRAVPNMPQQRQDQHHQSAMMHPASAAGPPIAATPPAYSTQYVAYSPQQFPNQPLVQHVPHYQSQHPHVYSPVIQGNARMMAPPTHAQPGLVSSSATQYGAHEQTHAMYACPKLPYNKETSPSFYFAISTGSLAQQYAHPNATLHPHTPHPQPSATPTGQQQSQHGGSHPAPSPVQHHQHQAAQALHLASPQQQSAIYHAGLAPTPPSMTPASNTQSPQNSFPAAQQTVFTIHPSHVQPAYTNPPHMAHVPQYKPTTNSSCKAALEEPKGQIPSSLLLLLPTGSTEN

SEQ ID NO: 16486 - protein, 320 aa, Homo sapiens
MRLGLLSVALLFVGSSHLYSDHYSPSGRHRLGPSPEPAASSQQAEAVRKRLRRRREGGAHAEDCGTAPLKDVLQGSRIIGGTEAQAGAWPWVVSLQIKYGRVLVHVCGGTLVRERWVLTAAHCTKDASDPLMWTAVIGTNNIHGRYPHTKKIKIKAIIIHPNFILESYVNDIALFHLKKAVRYNDYIQPICLPFDVFQILDGNTKCFISGWGRTKEEGNATNILQDAEVHYISREMCNSERSYGGIIPNTSFCAGDEDGAFDTCRVRPSNFPLKYFLKPEGNLSNKAFDNFLVVLIIRPKNNKSFFLLFNYFNNPNLLGS

SEQ ID NO: 16487 - protein, 605 aa, Homo sapiens
MGSCARLLLLWGCTVVAAGLSGVAGVSSRCEKACNPRMGNLALGRKLWADTTCGQNATELYCFYSENTDLTCRQPKCDKCNAAYPHLAHLPSAMADSSFRFPRTWWQSAEDVHREKIQLDLEAEFYFTHLIVMFKSPRPAAMVLDRSQDFGKTWKPYKYFATNCSATFGLEDDVVKKGAICTSKYSSPFPCTGGEVIFKALSPPYDTENPYSAKVQEQLKITNLRVQLLKRQSCPCQRNDLNEEPQHFTHYAIYDFIVKGSCFCNGHADQCIPVHGFRPVKAPGTFHMVHGKCMCKHNTAGSHCQHCAPLYNDRPWEAADGKTGAPNECRTCKCNGHADTCHFDVNVWEASGNRSGGVCDDCQHNTEGQYCQRCKPGFYRDLRRPFSAPDACKPCSCHPVGSAVLPANSVTFCDPSNGDCPCKPGVAGRRCDRCMVGYWGFGDYGCRPCDCAGSCDPITGDCISSHTDIDWYHEVPDFRPVHNKSEPAWEWEDAQGFSALLHSVLKIKILSAHDKGTHVEVNVKIKKVLKSTKLKIFRGKRTLYPESWTDRGCTCPILNPGLEYLVAGHEDIRTGKLIVNMKSFVQHWKPSLGRKVMDILKRECK

SEQ ID NO: 16488 - protein, 507 aa, Homo sapiens
MEAAVAAPRPRLLLLVLAAAAAAAAALLPGATALQCFCHLCTKDNFTCVTDGLCFVSVTETTDKVIHNSMCIAEIDLIPRDRPFVCAPSSKTGSVTTTYCCNQDHCNKIELPTTGPFSVKSSPGLGPVELAAVIAGPVCFVCISLMLMVYICHNRTVIHHRVPNEEDPSLDRPFISEGTTLKDLIYDMTTSGSGSGLPLLVQRTIARTIVLQESIGKGRFGEVWRGKWRGEEVAVKIFSSREERSWFREAEIYQTVMLRHENILGFIAADNKDNGTWTQLWLVSDYHEHGSLFDYLNRYTVTVEGMIKLALSTASGLAHLHMEIVGTQGKPAIAHRDLKSKNILVKKNGTCCIADLGLAVRHDSATDTIDIAPNHRVGTKRYMAPEVLDDSINMKHFESFKRADIYAMGLVFWEIARRCSIGGIHEDYQLPYYDLVPSDPSVEEMRKVVCEQKLRPNIPNRWQSCEALRVMAKIMRECWYANGAARLTALRIKKTLSQLSQQEGIKM

SEQ ID NO: 16489 - protein, 1907 aa, Homo sapiens
MLSHGAGLALWITLSLLQTGLAEPERCNFTLAESKASSHSVSIQWRILGSPCNFSLIYSSDTLGAALCPTFRIDNTTYGCNLQDLQAGTIYNFRIISLDEERTVVLQTDPLPPARFGVSKEKTTSTSLHVWWTPSSGKVTSYEVQLFDENNQKIQGVQIQESTSWNEYTFFNLTAGSKYNIAITAVSGGKRSFSVYTNGSTVPSPVKDIGISTKANSLLISWSHGSGNVERYRLMLMDKGILVHGGVVDKHATSYAFHGLTPGYLYNLTVMTEAAGLQNYRWKLVRTAPMEVSNLKVTNDGSLTSLKVKWQRPPGNVDSYNITLSHKGTIKESRVLAPWITETHFKELVPGRLYQVTVSCVSGELSAQKMAVGRTFPLAVLQLRVKHANETSLSIMWQTPVAEWEKYIISLADRDLLLIHKSLSKDAKEFTFTDLVPGRKYMATVTSISGDLKNSSSVKGRTVPAQVTDLHVANQGMTSSLFTNWTQAQGDVEFYQVLLIHENVVIKNESISSETSRYSFHSLKSGSLYSVVVTTVSGGISSRQVVVEGRTVPSSVSGVTVNNSGRNDYLSVSWLLAPGDVDNYEVTLSHDGKVVQSLVIAKSVRECSFSSLTPGRLYTVTITTRSGKYENHSFSQERTVPDKVQGVSVSNSARSDYLRVSWVHATGDFDHYEVTIKNKNNFIQTKSIPKSENECVFVQLVPGRLYSVTVTTKSGQYEANEQGNGRTIPEPVKDLTLRNRSTEDLHVTWSGANGDVDQYEIQLLFNDMKVFPPFHLVNTATEYRFTSLTPGRQYKILVLTISGDVQQSAFIEGFTVPSAVKNIHISPNGATDSLTVNWTPGGGDVDSYTVSAFRHSQKVDSQTIPKHVFEHTFHRLEAGEQYQIMIASVSGSLKNQINVVGRTVPASVQGVIADNAYSSYSLIVSWQKAAGVAERYDILLLTENGILLRNTSEPATTKQHKFEDLTPGKKYKIQILTVSGGLFSKEAQTEGRTVPAAVTDLRITENSTRHLSFRWTASEGELSWYNIFLYNPDGNLQERAQVDPLVQSFSFQNLLQGRMYKMVIVTHSGELSNESFIFGRTVPASVSHLRGSNRNTTDSLWFNWSPASGDFDFYELILYNPNGTKKENWKDKDLTEWRFQGLVPGRKYVLWVVTHSGDLSNKVTAESRTAPSPPSLMSFADIANTSLAITWKGPPDWTDYNDFELQWLPRDALTVFNPYNNRKSEGRIVYGLRPGRSYQFNVKTVSGDSWKTYSKPIFGSVRTKPDKIQNLHCRPQNSTAIACSWIPPDSDFDGYSIECRKMDTQEVEFSRKLEKEKSLLNIMMLVPHKRYLVSIKVQSAGMTSEVVEDSTITMIDRPPPPPPHIRVNEKDVLISKSSINFTVNCSWFSDTNGAVKYFTVVVREADGSDELKPEQQHPLPSYLEYRHNASIRVYQTNYFASKCAENPNSNSKSFNIKLGAEMESLGGKCDPTQQKFCDGPLKPHTAYRISIRAFTQLFDEDLKEFTKPLYSDTFFSLPITTESEPLFGAIEGVSAGLFLIGMLVAVVALLICRQKVSHGRERPSARLSIRRDRPLSVHLNLGQKGNRKTSCPIKINQFEGHFMKLQADSNYLLSKEYEELKDVGRNQSCDIALLPENRGKNRYNNILPYDATRVKLSNVDDDPCSDYINASYIPGNNFRREYIVTQGPLPGTKDDFWKMVWEQNVHNIVMVTQCVEKGRVKCDHYWPADQDSLYYGDLILQMLSESVLPEWTIREFKICGEEQLDAHRLIRHFHYTVWPDHGVPETTQSLIQFVRTVRDYINRSPGAGPTVVHCSAGVGRTGTFIALDRILQQLDSKDSVDIYGAVHDLRLHRVHMVQTECQYVYLHQCVRDVLRARKLRSEQENPLFPIYENVNPEYHRDPVYSRH

SEQ ID NO: 16490 - protein, 81 aa, Homo sapiens
VNIAALLSVMLQPYMPTVSATIQAQLQLPPPACSILLTNFLCTLPAGHQIGTVSPLFQKLENDQIESLRQRFGGGQKRPST

SEQ ID NO: 16491 - protein, 28 aa, Homo sapiens
MVSAAAPSLLILLLLLLGSVPATDARSV

SEQ ID NO: 16492 - protein, 156 aa, Homo sapiens
MITFAIFLSLIMLVEVAAAIAGYVFRDKVMSEFNNNFRQQMENYPKNNHTASILDRMQADFKCCGAANYTDWEKIPSMSKNRVPDSCCINVTVGCGINFNEKAIHKEGCVEKIGGWLRKNVLVVAAAALGIAFVEVLGIVFACCLVKSIRSGYEVM

SEQ ID NO: 16493 - protein, 81 aa, Homo sapiens
MNCQQLWLGFLLPMTVSGRVLGLAEVAPVDYLSQYGYLQKPLEGSNNFKPEDITEALRESPGPCRHPRAGQCALRRRRVLD

SEQ ID NO: 16494 - protein, 661 aa, Homo sapiens
MDLVLKRCLLHLAVIGALLAVGATKVPRNQDWLGVSRQLRTKAWNRQLYPEWTEAQRLDCWRGGQVSLKVSNDGPTLIGANASFSIALNFPGSQKVLPDGQVIWVNNTIINGSQVWGGQPVYPQETDDACIFPDGGPCPSGSWSQKRSFVYVWKTWGQYWQVLGGPVSGLSIGTGRAMLGTHTMEVTVYHRRGSRSYVPLAHSSSAFTITDQVPFSVSVSQLRALDGGNKHFLRNQPLTFALQLHDPSGYLAEADLSYTWDFGDSSGTLISRALVVTHTYLEPGPVTAQVVLQAAIPLTSCGSSPVPGTTDGHRPTAEAPNTTAGQVPTTEVVGTTPGQAPTAEPSGTTSVQVPTTEVISTAPVQMPTAESTGMTPEKVPVSEVMGTTLAEMSTPEATGMTPAEVSIVVLSGTTAAQVTTTEWVETTARELPIPEPEGPDASSIMSTESITGSLGPLLDGTATLRLVKRQVPLDCVLYRYGSFSVTLDIVQGIESAEILQAVPSGEGDAFELTVSCQGGLPKEACMEISSPGCQPPAQRLCQPVLPSPACQLVLHQILKGGSGTYCLNVSLADTNSLAVVSTQLIMPGQEAGLGQVPLIVGILLVLMAVVLASLIYRRRLMKQDFSVPQLPHSSSHWLRLPRIFCSCPIGENSPLLSGQQV

SEQ ID NO: 16495 - protein, 53 aa, Homo sapiens
MPAGVPMSTYLKMFAASLLAMCAGAEVVHRYYRPDLMRNRLRRVKLISQSHIA

SEQ ID NO: 16496 - protein, 331 aa, Homo sapiens
METVISSDSSPAVENEHPQETPESNNSVYTSFMKSHRCYDLIPTSSKLVVFDTSLQVKKAFFALVTNGVRAAPLWDSKKQSFVGMLTITDFINILHRYYKSALVQIYELEEHKIETWREVYLQDSFKPLVCISPNASLFDAVSSLIRNKIHRLPVIDPESGNTLYILTHKRILKFLKLFITEFPKPEFMSKSLEELQIGTYANIAMVRTTTPVYVALGIFVQHRVSALPVVDEKGRVVDIYSKFDVINLAAEKTYNNLDVSVTKALQHRSHYFEGVLKCYLHETLETIINRLVEAEVHRLVVVDENDVVKGIVSLSDILQALVLTGGEKKP

SEQ ID NO: 16497 - protein, 146 aa, Homo sapiens
MAAETLLSSLLGLLLLGLLLPASLTGGVGSLNLEELSEMRYGIEILPLPVMGGQSQSSDVVIVSSKYKQRYECRLPAGAIHFQREREEETPAYQGPGIPELLSPMRDAPCLLKTKDWWTYEFCYGRHIQQYHMEDSEIKGLQAASS

SEQ ID NO: 16498 - protein, 59 aa, Homo sapiens
MPAGVPMSTYLKMFAASLLAMCAGAEVVHRYYRPDLQNWITSLSVGELEGLGRVEQRRP

SEQ ID NO: 16499 - protein, 1027 aa, Homo sapiens
MGNLESAEGVPGEPPSVPLLLPPGKMPMPEPCELEERFALVLSSMNLPPDKARLLRQYDNEKKWDLICDQERFQVKNPPHTYIQKLQSFLDPSVTRKKFRRRVQESTKVLRELEISLRTNHIGWVREFLNDENKGLDVLVDYLSFAQCSVMFDFEGLESGDDGAFDKLRSWSRSIEDLQPPSALSAPFTNSLARSARQSVLRYSTLPGRRALKNSRLVSQKDDVHVCILCLRAIMNYQYGFNLVMSHPHAVNEIALSLNNKNPRTKALVLELLAAVCLVRGGHEIILAAFDNFKEVCKELHRFEKLMEYFRNEDSNIDFMVACMQFINIVVHSVEDMNFRVHLQYEFTKLGLEEFLQKSRHTESEKLQVQIQAYLDNVFDVGGLLEDAETKNVALEKVEELEEHVSHLTEKLLDLENENMMRVAELEKQLLQREKELESIKETYENTSHQVHTLRRLIKEKEEAFQRRCHLEPNVRGLESVDSEALARVGPAELSEGMPPSDLDLLAPAPPPEEVLPLPPPPAPPLPPPPPPLPDKCPPAPPLPGAAPSVVLTVGLSAIRIKKPIKTKFRLPVFNWTALKPNQISGTVFSELDDEKILEDLDLDKFEELFKTKAQGPALDLICSKNKTAQKAASKVTLLEANRAKNLAITLRKAGRSAEEICRAIHTFDLQTLPVDFVECLMRFLPTEAEVKLLRQYERERQPLEELAAEDRFMLLFSKVERLTQRMAGMAFLGNFQDNLQMLTPQLNAIIAASASVKSSQKLKQMLEIILALGNYMNSSKRGAVYGFKLQSLDLLLDTKSTDRKMTLLHFIALTVKEKYPDLANFWHELHFVEKAAAVSLENVLLDVKELGRGMELIRRECSIHDNSVLRNFLSTNEGKLDKLQRDAKTAEAYNAVVRYFGESPKTTPPSVFFPVFVRFIRSYKEAEQENEARKKQEEVMREKQLAQEAKKLDAKTPSQRNKWQQQELIAELRRRQAKEHRPVYEGKDGTIEDIITVLKSVPFTARTAKRGSRFFCDAAHHDESNC

SEQ ID NO: 16500 - protein, 20 aa, Homo sapiens
GYLMMRLLLWLMIPWKASMK

SEQ ID NO: 16501 - protein, 53 aa, Homo sapiens
MAGRRLNLRWALSVLCVLLMAETVSGTRGSSTGAHISPQFPASVPQGVWPECL

SEQ ID NO: 16502 - protein, 331 aa, Homo sapiens
MRANDALQVLGLLFSLARGSEVGNSQAVCPGTLNGLSVTGDAENQYQTLYKLYERCEVVMGNLEIVLTGHNADLSFLQWIREVTGYVLVAMNEFSTLPLPNLRVVRGTQVYDGKFAIFVMLNYNTNSSHALRQLRLTQLTEILSGGVYIEKNDKLCHMDTIDWRDIVRDRDAEIVVKDNGRSCPPCHEVCKGRCWGPGSEDCQTLTKTICAPQCNGHCFGPNPNQCCHDECAGGCSGPQDTDCFACRHFNDSGACVPRCPQPLVYNKLTFQLEPNPHTKYQYGGVCVASCPHNFVVDQTSCVRACPPDKMEVDKNGLKMCEPCGGLCPKAF

SEQ ID NO: 16503 - protein, 102 aa, Homo sapiens
LLLGALLWAVLWLLRDRQSLPASNAFVFITGCDSGFGRLLALQLDQRGFRVLASCLTPSGAEDLQRVASSRLHTTLLDITDPQSVQQAAKWVEMHVKEAGGM

SEQ ID NO: 16504 - protein, 127 aa, Homo sapiens
MKFTTLLFLAAVAGALVYAEDASSDSTGADPAQEAGTSKPNEEISGPAEPASPPETTTTAQETSAAAVQGTAKVTSSRQELNPLKQALAKAGKGMHGGVPGGKQFIENGSEFAQKLLKKFSLLKPWA

SEQ ID NO: 16505 - protein, 142 aa, Homo sapiens
MAVAAVKWVMSKRTILKHLFPVQNGALYCVCHKSTYSPLPDDYNCNVELALTSDGRTIVCYHPSVDIPYEHTKPIPRPDPVHNNEETHDQVLKTRLEEKVEHLEEGPMIEQLSKMFFTTKHRWYPHGRYHRCRKNLNPPKDR

SEQ ID NO: 16506 - protein, 556 aa, Homo sapiens
MLLATLLLLLLGGALAHPDRIIFPNHACEDPPAVLLEVQGTLQRPLVRDSRTSPANCTWLILGSKEQTVTIRFQKLHLACGSERLTLRSPLQPLISLCEAPPSPLQLPGGNVTITYSYAGARAPMGQGFLLSYSQDWLMCLQEEFQCLNHRCVSAVQRCDGVDACGDGSDEAGCSSDPFPGLTPRPVPSLPCNVTLEDFYGVFSSPGYTHLASVSHPQSCHWLLDPHDGRRLAVRFTALDLGFGDAVHVYDGPGPPESSRLLRSLTHFSNGKAVTVETLSGQAVVSYHTVAWSNGRGFNATYHVRGYCLPWDRPCGLGSGLGAGEGLGERCYSEAQRCDGSWDCADGTDEEDCPGCPPGHFPCGAAGTSGATACYLPADRCNYQTFCADGADERRCRHCQPGNFRCRDEKCVYETWVCDGQPDCADGSDEWDCSYVLPRKVITAAVIGSLVCGLLLVIALGCTCKLYAIRTQEYSIFAPLSRMEAEIVQQQAPPSYGQLIAQGAIPPVEDFPTENPNDNSVLGNLRSLLQILRQDMTPGGGPGARRRQRGRLMRRL

SEQ ID NO: 16507 - protein, 371 aa, Homo sapiens
MEDEDYNTSISYGDEYPDYLDSIVVLEDLSPLEARVTRIFLVVVYSIVCFLGILGNGLVIIIATFKMKKTVNMVWFLNLAVADFLFNVFLPIHITYAAMDYHWVFGTAMCKISNFLLIHNMFTSVFLLTIISSDRCISVLLPVWSQNHRSVRLAYMACMVIWVLAFFLSSPSLVFRDTANLHGKISCFNNFSLSTPGSSSWPTHSQMDPVGYSRHMVVTVTRFLCGFLVPVLIITACYLTIVCKLQRNRLAKTKKPFKIIVTIIITFFLCWCPYHTLNLLELHHTAMPGSVFSLGLPLATALAIANSCMNPILYVFMGQDFKKFKVALFSRLVNALSEDTGHSSYPSHRSFTKMSSMNERTSMNERETGML

SEQ ID NO: 16508 - protein, 131 aa, Homo sapiens
MSKRYLQKATKGKLLIIIFIVTLWGKVVSSANHHKAHHVKTGTCEVVALHRCCNKNKIEERSQTVKCSCFPGQVAGTTRAAPSCVDASIVEQKWWCHMQPCLEGEECKVLPDRKGWSCSSGNKVKTTRANV

SEQ ID NO: 16509 - protein, 157 aa, Homo sapiens
MTSASTKVGEIFSAAGAAFTKLGELTMQLHPVADSSPAGAKWTETEIEMLRAAVKRFGDDLNHISCVIKERTVAQIKATVKRKVYEDSGIPLPAESPKKGPKKVASGVLSPPPAAPPPSSSSVPEAGGPPIKKQKADSLTLDSGLLMTSADPPLLSC

SEQ ID NO: 16510 - protein, 122 aa, Homo sapiens
MAPGSRGERSSFRSRRGPGVPSPQPDVTMLSRLLKEHQAKQNERKELQEKRRREAITAATCLTEALVDHLNVGVAQAYMNQRKLDHEVKTLQVQAAQFAKQTGQWIGMVENFNQALKGFLVW

SEQ ID NO: 16511 - protein, 142 aa, Homo sapiens
MRGTSCVGGGAESPGGAGLSEGPRGRWLRLAPVCAYFLCVSLAAVLLAVYYGLIWVPTRSPAAPAGPQPSAPSPPCAARPGVPPVPAPAAASLSCLLGVPGGPRPQLQLPLSRRRRYSDPDRRPSRQTPRETPEAAEGRRPG

SEQ ID NO: 16512 - protein, 213 aa, Homo sapiens
MATETVELHKLKLAELKQECLARGLETKGIKQDLIHRLQAYLEEHAEEEANEEDVLGDETEEEETKPIELPVKEEEPPEKTVDVAAEKKVVKITSEIPQTERMQKRAERFNVPVSLESKKAARAARFGISSVPTKGLSSDNKPMVNLDKLKERAQRFGLNVSSISRKSEDDEKLKKRKERFGIVTSSAGTGTTEDTEVKIYLERFIDLEGKLE

SEQ ID NO: 16513 - protein, 82 aa, Homo sapiens
MVTVCLCHLLQLGANVLLFLCTNVIGICTHYPAEVSQRQAFQETRGYIQARLHLQHENRQQERLLLSVLPQHVAMEMKEDIN

SEQ ID NO: 16514 - protein, 162 aa, Homo sapiens
MAAETLLSSLLGLLLLGLLLPASLTGGVGSLNLEELSEMRYGIEILPLPVMGGQSQSSDVVIVSSKYKQRYECRLPAGAIHFQREREEETPAYQGPGIPELLSPMRDAPCLLKTYGNGSKCDLNGRPREAEVRFLCDEGAGISGDYIDRVDEPLSCSYVLTI

SEQ ID NO: 16515 - protein, 296 aa, Homo sapiens
MDLVLKRCLLHLAVIGALLAVGATKVPRNQDWLGVSRQLRTKAWNRQLYPEWTEAQRLDCWRGGQVSLKVSNDGPTLIGANASFSIALNFPGSQKVLPDGQVIWVNNTIINGSQVWGGQPVYPQETDDACIFPDGGPCPSGSWSQKRSFVYVWKTWVPGTTDGHRPTAEAPNTTAGQVPTTEVVGTTPGQAPTAEPSGTTSVQVPTTEVISTAPVQMPTAESTAAQVTTTEWVETTARELPIPEPEGPDASSIMSTESITGSLGPLLDGTATLRLVKRQVPLDCVLYRYGSFSVTL

SEQ ID NO: 16516 - protein, 67 aa, Homo sapiens
MSLPLNPKPFLNGLTGKPVMVKLKWGMEYKGYLVSVDGYMNMQIFIYILGILKQSKILLFQLSEDLK

SEQ ID NO: 16517 - protein, 412 aa, Homo sapiens
MPLQLLLLLILLGPGNSLQLWDTWADEAEKALGPLLARDRRQATEYEYLDYDFLPETEPPEMLRNSTDTTPLTGPGTPESTTVEPAARRSTGLDAGGAVTELTTELANMGNLSTDSAAMEIQTTQPAATEAQTTQPVPTEAQTTPLAATEAQTTRLTATEAQTTPLAATEAQTTPPAATEAQTTQPTGLEAQTTAPAAMEAQTTAPAAMEAQTTPPAAMEAQTTQTTAMEAQTTAPEATEAQTTQPTATEAQTTPLAAMEALSTEPSATEALSMEPTTKRGLFIPFSVSSVTHKGIPMAASNLSVNYPVGAPDHISVKQCLLAILILALVATIFFVCTVVLAVRLSRKGHMYPVRNYSPTEMVCISSLLPDGGEGPSATANGGLSKAKSPGLTPEPREDREGDDLTLHSFLP

SEQ ID NO: 16518 - protein, 401 aa, Homo sapiens
MADPKYADLPGIARNEPDVYETSDLPEDDQAEFDAEELTSTSVEHIIVNPNAAYDKFKDKRVGTKGLDFSDRIGKTKRTGYESGEYEMLGEGLGVKETPQQKYQRLLHEVQELTTEVEKIKTTVKESATEEKLTPVLLAKQLAALKQQLVASHLEKLLGPDAAINLTDPDGALAKRLLLQLEATKNSKGGSGGKTTGTPPDSSLVTYELHSRPEQDKFSQAAKVAELEKRLTELETAVRCDQDAQNPLSAGLQGACLMETVELLQAKVSALDLAVLDQVEARLQSVLGKVNEIAKHKASVEDADTQSKVHQLYETIQRWSPIASTLPELVQRLVTIKQLHEQAMQFGQLLTHLDTTQQMIANSLKDNTTLLTQVQTTMRENLATVEGNFASIDERMKKLGK

SEQ ID NO: 16519 - protein, 575 aa, Homo sapiens
MASATEDPVLERYFKGHKAAITSLDLSPNGKQLGAGRARELGSRRLSDLQKNTEDLSRPLYKKPPADSRALGEWGKASKLQLNEDELKQQEELIERYAINIYLSDRISLHRHIEDKRMYECKSQKFNYRTLPTTSVIIAFYNEAWSTLLRTIHSVLETSPAVLLKEIILVDDLSDRVYLKTQLETYISNLDRVRLIRTNKREGLVRARLIGATFATGDVLTFLDCHCECNSGWLEPLLERIGRDETAVVCPVIDTIDWNTFEFYMQIGEPMIGGFDWRLTFQWHSVPKQERDRRISRIDPIRSPTMAGGLFAVSKKYFQYLGTYDTGMEVWGGENLELSFRVWQCGGKLEIHPCSHVGHVFPKRAPYARPNFLQNTARAAEVWMDEYKEHFYNRNPPARKEAYGDISERKLLRERLRCKSFDWYLKNVFPNLHVPEDRPGWHGAIRSRGISSECLDYNSPDNNPTGANLSLFGCHGQGGNQFFEYTSNKEIRFNSVTELCAEVPEQKNYVGMQNCPKDGFPVPANIIWHFKEDGTIFHPHSGLCLSAYRTPEGRPDVQMRTCDALDKNQIWSFEK

SEQ ID NO: 16520 - protein, 90 aa, Homo sapiens
MKMWLLVSHLVIISITTCLAEFTWYRRYGHGVSEEDKGFGPIFEEQPINTIYPEESLEGKVSLNCRARASPFPVYKWRMNNGDVDLTSDR

SEQ ID NO: 16521 - protein, 85 aa, Homo sapiens
MKMWLLVSHLVIISITTCLAEFTWYRRYGHGVSEEDKGFGPIFEEQPINTIYPEESLEGKVSLNCRARASPFPVYKWRMNNGDVD

SEQ ID NO: 16522 - protein, 580 aa, Homo sapiens
MAAETLLSSLLGLLLLGLLLPASLTGGVGSLNLEELSEMRYGIEILPLPVMGGQSQSSDVVIVSSKYKQRYECRLPAGAIHFQREREEETPAYQGPGIPELLSPMRDAPCLLKTKDWWTYEFCYGRHIQQYHMEDSEIKGEVLYLGYYQSAFDWDDETAKFLCDEGAGISGDYIDRVDEPLSCSYVLTIRTPRLCPHPLLRPPPSAAPQAILCHPSLQPEEYMAYVQRQAVDSKQYGDKIIEELQDLGPQVWSETKSGVAPQKMAGASPTKDDSKDSDFWKMLNEPEDQAPGGEEVPAEEQDPSPEAADSASGAPNDFQNNVQVKVIRSPADLIRFIEELKGGTKKGKPNIGQEQPVDDAAEVPQREPEKERGDPERQREMEEEEDEDEDEDEDEDERQLLGEFEKELEGILLPSDRDRLRSEVKAGMERELENIIQETEKELDPDGLKKESERDRAMLALTSTLNKLIKRLEEKQSPELVKKHKKKRVVPKKPPPSPQPTGKIEIKIVRPWAEGTEEGARWLTDEDTRNLKEIFFNILVPGAEEAQKERQRQKELESNYRRVWGSPGGEGTGDLDEFDF

SEQ ID NO: 16523 - protein, 979 aa, Homo sapiens
MSVCTLSVPVSSLSPGRRCNTFSDSGILGCVPINSNTDEEDVVEEKMVAEGVNKEAKQPAKKKRKKGLRIKGKRRRKKLILAKKFSKDLGSGRPVADAPALLASNDPEQDEESLFESNIEKQIYLPSTRAKTSIVWHFFHVDPQYTWRAICNLCEKSVSRGKPGSHLGTSTLQRHLQARHSPHWTRANKFGVASGEEDFTLDVSLSPSSGSNGSFEYIPTDPLDDNRMGKKHDKSASDALRAERGRFLIKSNIVKHALIPGTRAKTSAVWNFFYTDPQHISRAVCNICKRSVSRGRPGSHLGTSTLQRHLQATHPIHWAVANKDSGAVANGLDEAETERSDLLSDTLHGEKSTGSQDLTAEDLSDSDSDEPMLEVENRSESPIPVAEQGTLMRAQERETTCCGNPVSSHISQAIIQMIVEDMHPYNYFSTPAFQRFMQIVAPDYRLPSETYFFTKAVPQLYDCVREKIFLTLENVQSQKIHLTVDIWTHDPSTDYFIVTVHWVSLETASFLNNGRIPDFRKWAVLCVTGLAKDCLITNILQELNDQIGLWLSPNFLIPSFIVSDNSSNVVHAIKDGGFTHVPCFLHCLNMVIQDFFCEHKSIENMLVAARKTCHHFSHSVKARQILQEFQNDHQLPWKNLKQDETGHWISTFYMLKWLLEHCYSVHHSLGRASGVVLTSLQWTLMTYVCDILKPFEEATQKVSVKTAGLNQVLPLIHHLLLSLQKLREDFQVRGITQALNLVDSLSLKLETDTLLSAMLKSKPCILATLLDPCFKNSLEDFFPQGADLETYKQFLAEEVCNYMESSPEICQIPTSEASCPSVTVGADSFTSSLKEGTSSSGSVDSSAVDNVALGSKSFMFPSAVAVVDEYFKEKYSEFSGGDDPLIYWQRKISIWPALTQVAIQYLSCPMCSWQSECIFTKNSHFHPKQIMSLDFDNIEQLMFLKMNLKNVNYDYSTLVLSWDPEQNEVVQSSEKEILP

SEQ ID NO: 16524 - protein, 517 aa, Homo sapiens
MALTPPLLLLSAGTMTLGSPRKGLLMLLMALVTQGDPVKPSRGPLVTCTCESPHCKGPTCRGAWCTVVLVREEGRHPQEHRGCGNLHRELCRGRPTEFVNHYCCDSHLCNHNVSLVLEATQPPSEQPGTDGQLALILGPVLALLALVALGVLGLWHVRRRQEKQRGLHSELGESSLILKASEQGDSMLGDLLDSDCTTGSGSGLPFLVQRTVARQVALVECVGKGRYGEVWRGLWHGESVAVKIFSSRDEQSWFRETEIYNTVLLRHDNILGFIASDMTSRNSSTQLWLITHYHEHGSLYDFLQRQTLEPHLALRLAVSAACGLAHLHVEIFGTQGKPAIAHRDFKSRNVLVKSNLQCCIADLGLAVMHSQGSDYLDIGNNPRVGTKRYMAPEVLDEQIRTDCFESYKWTDIWAFGLVLWEIARRTIVNGIVEDYRPPFYDVVPNDPSFEDMKKVVCVDQQTPTIPNRLAADPVLSGLAQMMRECWYPNPSARLTALRIKKTLQKISNSPEKPKVIQ

SEQ ID NO: 16525 - protein, 178 aa, Homo sapiens
MKATIILLLLAQVSWAGPFQQRGLFDFMLEDEASGIGPEVPDDRDFEPSLGPVCPFRCQCHLRVVQCSDLGLDKVPKDLPPDTTLLDLQNNKITEIKDGDFKNLKNLHALILVNNKISKVSPGAFTPLVKLERLYLSKNQLKELPEKMPKTLQELRAHENEITKVRKVTFNGLNQMIV

SEQ ID NO: 16526 - protein, 81 aa, Homo sapiens
NAKLYISNWILIYFTRTLQLPAPFNTCTSSKSRGEPGCDSKSLTLLPRLECSGTILAHCSLRLPGSSDPPASASQVAEITA

SEQ ID NO: 16527 - protein, 182 aa, Homo sapiens
MTLRPSLLPLHLLLLLLLSAAVCRAEAGLETESPVRTLQVETLVEPPEPCAEPAAFGDTLHIHYTGSLVDGRIIDTSLTRDPLVIELGQKQVIPGLEQSLLDMCVGEKRRAIIPSHLAYGKRGFPPSVPDGVSLLLPRLECNSAIFTHHNLRHPGSSNSPVSASRVAGITGMRHHDRLILYF

SEQ ID NO: 16528 - protein, 1903 aa, Homo sapiens
MEANDHFNFTGLPPAPAASGLKPSPSSGEGLYTNGSPMNFPQQGKSLNGDVNVNGLSTVSHTTTSGILNSAPHSSSTSHLHHPSVAYDCLWNYSQYPSANPGSNLKDPPLLSQFSGGQYPLNGILGGSRQPSSPSHNTNLRAGSQEFWANGTQSPMGLNFDSQELYDSFPDQNFEVMPNGPPSFFTSPQTSPMLGSSIQTFAPSQEVGSGIHPDEAAEKEMTSVVAENGTGLVGSLELEEEQPELKMCGYNGSVPSVESLHQEVSVLVPDPTVSCLDDPSHLPDQLEDTPILSEDSLEPFNSLAPEPVSGGLYGIDDTELMGAEDKLPLEDSPVISALDCPSLNNATAFSLLADDSQTSTSIFASPTSPPVLGESVLQDNSFDLNNGSDAEQEEMETQSSDFPPSLTQPAPDQSSTIQLHPATSPAVSPTTSPAVSLVVSPAASPEISPEVCPAASTVVSPAVFSVVSPASSAVLPAVSLEVPLTASVTSPKASPVTSPAAAFPTASPANKDVSSFLETTADVEEITGEGLTASGSGDVMRRRIATPEEVRLPLQHGWRREVRIKKGSHRWQGETWYYGPCGKRMKQFPEVIKYLSRNVVHSVRREHFSFSPRMPVGDFFEERDTPEGLQWVQLSAEEIPSRIQAITGKRGRPRNTEKAKTKEVPKVKRGRGRPPKVKITELLNKTDNRPLKKLEAQETLNEEDKAKIAKSKKKMRQKVQRGECQTTIQGQARNKRKQETKSLKQKEAKKKSKAEKEKGKTKQEKLKEKVKREKKEKVKMKEKEEVTKAKPACKADKTLATQRRLEERQRQQMILEEMKKPTEDMCLTDHQPLPDFSRVPGLTLPSGAFSDCLTIVEFLHSFGKVLGFDPAKDVPSLGVLQEGLLCQGDSLGEVQDLLVRLLKAALHDPGFPSYCQSLKILGEKVSEIPLTRDNVSEILRCFLMAYGVEPALCDRLRTQPFQAQPPQQKAAVLAFLVHELNGSTLIINEIDKTLESMSSYRKNKWIVEGRLRRLKTVLAKRTGRSEVEMEGPEECLGRRRSSRIMEETSGMEEEEEEESIAAVPGRRGRRDGEVDATASSIPELERQIEKLSKRQLFFRKKLLHSSQMLRAVSLGQDRYRRRYWVLPYLAGIFVEGTEGNLVPEEVIKKETDSLKVAAHASLNPALFSMKMELAGSNTTASSPARARGRPRKTKPGSMQPRHLKSPVRGQDSEQPQAQLQPEAQLHAPAQPQPQLQLQLQSHKGFLEQEGSPLSLGQSQHDLSQSAFLSWLSQTQSHSSLLSSSVLTPDSSPGKLDPAPSQPPEEPEPDEAESSPDPQALWFNISAQMPCNAAPTPPPAVSEDQPTPSPQQLASSKPMNRPSAANPCSPVQFSSTPLAGLAPKRRAGDPGEMPQSPTGLGQPKRRGRPPSKFFKQMEQRYLTQLTAQPVPPEMCSGWWWIRDPEMLDAMLKALHPRGIREKALHKHLNKHRDFLQEVCLRPSADPIFEPRQLPAFQEGIMSWSPKEKTYETDLAVLQWVEELEQRVIMSDLQIRGWTCPSPDSTREDLAYCEHLSDSQEDITWRGRGREGLAPQRKTTNPLDLAVMRLAALEQNVERRYLREPLWPTHEVVLEKALLSTPNGAPEGTTTEISYEITPRIRVWRQTLERCRSAAQVCLCLGQLERSIAWEKSVNKVTCLVCRKGDNDEFLLLCDGCDRGCHIYCHRPKMEAVPEGDWFCTVCLAQQVEGEFTQKPGFPKRGQKRKSGYSLNFSEGDGRRRRVLLRGRESPAAGPRYSEEGLSPSKRRRLSMRNHHSDLTFCEIILMEMESHDAAWPFLEPVNPRLVSGYRRIIKNPMDFSTMRERLLRGGYTSSEEFAADALLVFDNCQTFNEDDSEVGKAGHIMRRFFESRWEEFYQGKQANL

SEQ ID NO: 16529 - protein, 117 aa, Homo sapiens
MLVLSILLYTCEMFQDSVAFEDVAVTFTQEEWALLDPSQKNLCRDVMQETFRNLASIGKKWKPQNIYVEYENLRRNLRIVGERLFESKEGHQHGEILTQVPDDMLKKTTTGVKSCES

SEQ ID NO: 16530 - protein, 103 aa, Homo sapiens
MAGRRLNLRWALSVLCVLLMAETVSGTRGSSTGAHISPQFPASGVNQTPVVDCRKVCGLNVSDRCDFIRTNPDCHSDGGYLDYLEGIFCHFPPSLLPLAVTLY

SEQ ID NO: 16531 - protein, 450 aa, Homo sapiens
MAWALKLPLADEVIESGLVQDFDASLSGIGQELGAGAYSMSDVLALPIFKQEESSLPPDNENKILPFQYVLCAATSPAVKLHDETLTYLNQGQSYEIRMLDNRKLGELPEINGKLVKSIFRVVFHDRRLQYTEHQQLEGWRWNRPGDRILDIDIPMSVGIIDPRANPTQLNTVEFLWDPAKRTSVFIQPKGADRKQKTDREKMEKRTPHEKEKYQPSYETTILTECSPWPEITYVNNSPSPGFNSSHSSFSLGEGNGSPNHQPEPPPPVTDNLLPTTTPQEAQQWLHRNRFSTFTRLFTNFSGADLLKLTRDDVIQICGPADGIRLFNALKGRMVRPRLTIYVCQESLQLREQQQQQQQQQQKHEDGDSNGTFFVYHAIYLEELTAVELTEKIAQLFSISPCQISQIYKQGPTGIHVLISDEMIQNFQEEACFILDTMKETNDSYHIILK

SEQ ID NO: 16532 - protein, 627 aa, Homo sapiens
MKMWLLVSHLVIISITTCLAEFTWYRRYGHGVSEEDKGFGPIFEEQPINTIYPEESLEGKVSLNCRARASPFPVYKWRMNNGDVDLTSDRYSMVGGNLVINNPDKQKDAGIYYCLASNNYGMVRSTEATLSFGYLDPFPPEERPEVRVKEGKGMVLLCDPPYHFPDDLSYRWLLNEFPVFITMDKRRFVSQTNGNLYIANVEASDKGNYSCFVSSPSITKSVFSKFIPLIPIPERTTKPYPADIVVQFKDVYALMGQNVTLECFALGNPVPDIRWRKVLEPMPSTAEISTSGAVLKIFNIQLEDEGIYECEAENIRGKDKHQARIYVQAFPEWVEHINDTEVDIGSDLYWPCVATGKPIPTIRWLKNGYAYHKGELRLYDVTFENAGMYQCIAENTYGAIYANAELKILALAPTFEMNPMKKKILAAKGGRVIIECKPKAAPKPKFSWSKGTEWLVNSSRILIWEDGSLEINNITRNDGGIYTCFAENNRGKANSTGTLVITDPTRIILAPINADITVGENATMQCAASFDPALDLTFVWSFNGYVIDFNKENIHYQRNFMLDSNGELLIRNAQLKHAGRYTCTAQTIVDNSSASADLVVRGKNRKGGEKNMVDSFLPVCASLPPTW

SEQ ID NO: 16533 - protein, 2479 aa, Homo sapiens
MPPNINWKEIMKVDPDDLPRQEELADNLLISLSKVEVNELKSEKQENVIHLFRITQSLMKMKAQEVELALEEVEKAGEEQAKFENQLKTKVMKLENELEMAQQSAGGRDTRFLRNEICQLEKQLEQKDRELEDMEKELEKEKKVNEQLALRNEEAENENSKLRRENKRLKKKNEQLCQDIIDYQKQIDSQKETLLSRRGEDSDYRSQLSKKNYELIQYLDEIQTLTEANEKIEVQNQEMRKNLEESVQEMEKMTDEYNRMKAIVHQTDNVIDQLKKENDHYQLQVQELTDLLKSKNEEDDPIMVAVNAKVEEWKLILSSKDDEIIEYQQMLHNLREKLKNAQLDADKSNVMALQQGIQERDSQIKMLTEQVEQYTKEMEKNTCIIEDLKNELQRNKGASTLSQQTHMKIQSTLDILKEKTKEAERTAELAEADAREKDKELVEALKRLKDYESGVYGLEDAVVEIKNCKNQIKIRDREIEILTKEINKLELKISDFLDENEALRERVGLEPKTMIDLTEFRNSKHLKQQQYRAENQILLKEIESLEEERLDLKKKIRQMAQERGKRSATSGLTTEDLNLTENISQGDRISERKLDLLSLKNMSEAQSKNEFLSRELIEKERDLERSRTVIAKFQNKLKELVEENKQLEEGMKEILQAIKEMQKDPDVKGGETSLIIPSLERLVNAIESKNAEGIFDASLHLKAQVDQLTGRNEELRQELRESRKEAINYSQQLAKANLKIDHLEKETSLLRQSEGSNVVFKGIDLPDGIAPSSASIINSQNEYLIHLLQELENKEKKLKNLEDSLEDYNRKFAVIRHQQSLLYKEYLSEKETWKTESKTIKEEKRKLEDQVQQDAIKVKEYNNLLNALQMDSDEMKKILAENSRKITVLQVNEKSLIRQYTTLVELERQLRKENEKQKNELLSMEAEVCEKIGCLQRFKEMAIFKIAALQKVVDNSVSLSELELANKQYNELTAKYRDILQKDNMLVQRTSNLEHLECENISLKEQVESINKELEITKEKLHTIEQAWEQETKLGNESSMDKAKKSITNSDIVSISKKITMLEMKELNERQRAEHCQKMYEHLRTSLKQMEERNFELETKFAELTKINLDAQKVEQMLRDELADSVSKAVSDADRQRILELEKNEMELKVEVSKLREISDIARRQVEILNAQQQSRDKEVESLRMQLLDYQAQSDEKSLIAKLHQHNVSLQLSEATALGKLESITSKLQKMEAYNLRLEQKLDEKEQALYYARLEGRNRAKHLRQTIQSLRRQFSGALPLAQQEKFSKTMIQLQNDKLKIMQEMKNSQQEHRNMENKTLEMELKLKGLEELISTLKDTKGAQKVINWHMKIEELRLQELKLNRELVKDKEEIKYLNNIISEYERTISSLEEEIVQQNKFHEERQMAWDQREVDLERQLDIFDRQQNEILNAAQKFEEATGSIPDPSLPLPNQLEIALRKIKENIRIILETRATCKSLEEKLKEKESALRLAEQNILSRDKVINELRLRLPATAEREKLIAELGRKEMEPKSHHTLKIAHQTIANMQARLNQKEEVLKKYQRLLEKAREEQREIVKKHEEDLHILHHRLELQADSSLNKFKQTAWDLMKQSPTPVPTNKHFIRLAEMEQTVAEQDDSLSSLLVKLKKVSQDLERQREITELKVKEFENIKLQLQENHEDEVKKVKAEVEDLKYLLDQSQKESQCLKSELQAQKEANSRAPTTTMRNLVERLKSQLALKEKQQKALSRALLELRAEMTAAAEERIISATSQKEAHLNVQQIVDRHTRELKTQVEDLNENLLKLKEALKTSKNRENSLTDNLNDLNNELQKKQKAYNKILREKEEIDQENDELKRQIKRLTSGLQGKPLTDNKQSLIEELQRKVKKLENQLEGKVEEVDLKPMKEKNAKEELIRWEEGKKWQAKIEGIRNKLKEKEGEVFTLTKQLNTLKDLFAKADKEKLTLQRKLKTTGMTVDQVLGIRALESEKELEELKKRNLDLENDILYMRAHQALPRDSVVEDLHLQNRYLQEKLHALEKQFSKDTYSKPSISGIESDDHCQREQELQKENLKLSSENIELKFQLEQANKDLPRLKNQVRDLKEMCEFLKKEKAEVQRKLGHVRGSGRSGKTIPELEKTIGLMKKVVEKVQRENEQLKKASGILTSEKMANIEQENEKLKAELEKLKAHLGHQLSMHYESKTKGTEKIIAENERLRKELKKETDAAEKLRIAKNNLEILNEKMTVQLEETGKRLQFAESRGPQLEGADSKSWKSIVVTRMYETKLKELETDIAKKNQSITDLKQLVKEATEREQKVNKYNEDLEQQIKILKHVPEGAETEQGLKRELQVLRLANHQLDKEKAELIHQIEANKDQSGAESTIPDADQLKEKIKDLETQLKMSDLEKQHLKEEIKKLKKELENFDPSFFEEIEDLKYNYKEEVKKNILLEEKVKKLSEQLGVELTSPVAASEEFEDEEESPVNFPIY

SEQ ID NO: 16534 - protein, 520 aa, Homo sapiens
MFGASRKKFVEGVDSDYHDENMYYSQSSMFPHRSEKDMLASPSTSGQLSQFGASLYGQQSALGLPMRGMSNNTPQLNRSLSQGTQLPSHVTPTTGVPTMSLHTPPSPSRGILPMNPRNMMNHSQVGQGIGIPSRTNSMSSSGLGSPNRSSPSIICMPKQQPSRQPFTVNSMSGFGMNRNQAFGMNNSLSSNIFNGTDGSENVTGLDLSDFPALADRNRREGSGNPTPLINPLAGRAPYVGMVTKPANEQSQDFSIHNEDFPALPGSSYKDPTSSNDDSKSNLNTSGKTTSSTDGPKFPGDKSSTTQNNNQQKKGIQVLPDGRVTNIPQGMVTDQFGMIGLLTFIRAAETDPGMVHLALGSDLTTLGLNLNSPENLYPKFASPWASSPCRPQDIDFHVPSEYLTNIHIRDKLAAIKLGRYGEDLLFYLYYMNGGDVLQLLAAVELFNRDWRYHKEERVWITRAPGMEPTMKTNTYERGTYYFFDCLNWRKVAKEFHLEYDKLEERPHLPSTFNYNPAQQAF

SEQ ID NO: 16535 - protein, 290 aa, Homo sapiens
MDLVLKRCLLHLAVIGALLAVGATKGGQVSLKVSNDGPTLIGANASFSIALNFPGSQKVLPDGQVIWVNNTIINGSQVWGGQPVYPQETDDACIFPDGGPCPSGSWSQKRSFVYVWKTWEGIESAEILQAVPSGEGDAFELTVSCQGGLPKEACMEISSPGCQPPAQRLCQPVLPSPACQLVLHQILKGGSGTYCLNVSLADTNSLAVVSTQLIMPGQEAGLGQVPLIVGILLVLMAVVLASLIYRRRLMKQDFSVPQLPHSSSHWLRLPRIFCSCPIGENSPLLSGQQV

SEQ ID NO: 16536 - protein, 235 aa, Homo sapiens
MPGEATETVPATEQELPQPQAETVAAFPLESADPAGVAPTTAKGSGTESDSDESVPELEEQDSTQATTQQAQLAAAAEIDEEPVSKAKQSRSEKKARKAMSKLGLRQVTGVTRVTIRKSKNILFVITKPDVYKSPASDTYIVFGEAKIEDLSQQAQLAAAEKFKVQGEAVSNIQENTQTPTVQEESEEEEVDETGVEVKDIELVMSQANVSRAKAVRALKNNSNDIVNAIMELTM

SEQ ID NO: 16537 - protein, 139 aa, Homo sapiens
MRQPYLSSREVSSSRKRWRTFPVDCVAMCGDCVEKEYPNRGNTCLENGSFLLNFTGCAVCSKRDFMLITNKSLKEEDGEEIVTYDHLCKNCHHVIARHEYTFSIMDEFQEYTMLCLLCGKAEDTISILPDDPRQMTLLF

SEQ ID NO: 16538 - protein, 98 aa, Homo sapiens
MKATIILLLLAQVSWAGPFQQRGLFDFMLEDEASGIGPEVPDDRDFEPSLGPVCPFRCQCHLRVVQCSDLEKKYCNNLSSYNLYTTNCLILCRLFTHH

SEQ ID NO: 16539 - protein, 452 aa, Homo sapiens
MSTAVLENPGLGRKLSDFGQETSYIEDNCNQNGAISLIFSLKEEVGALAKVLRLFEENDVNLTHIESRPSRLKKDEYEFFTHLDKRSLPALTNIIKILRHDIGATVHELSRDKKKDTVPWFPRTIQELDRFANQILSYGAELDADHPGFKDPVYRARRKQFADIAYNYRHGQPIPRVEYMEEEKKTWGTVFKTLKSLYKTHACYEYNHIFPLLEKYCGFHEDNIPQLEDVSQFLQTCTGFRLRPVAGLLSSRDFLGGLAFRVFHCTQYIRHGSKPMYTPEPDICHELLGHVPLFSDRSFAQFSQEIGLASLGAPDEYIEKLATIYWFTVEFGLCKQGDSIKAYGAGLLSSFGELQYCLSEKPKLLPLELEKTAIQNYTVTEFQPLYYVAESFNDAKEKVRNFAATIPRPFSVRYDPYTQRIEVLDNTQQLKILADSINSEIGILCSALQKIK

SEQ ID NO: 16540 - protein, 83 aa, Homo sapiens
MALLRKINQVLLFLLIVTLCVILYKKVHKGTVPKNDAESHSVAPAQIQWHNSSSLQPRPPGLKQSSGLSTPGSWNYRIPVLLG

SEQ ID NO: 16541 - protein, 72 aa, Homo sapiens
MDFPCLWLGLLLPLVAALDFNYHRQEGMEAFLKTVAQNYSSVTHLHSIGKSVKETCGFLLWGGFQRNTELGF

SEQ ID NO: 16542 - protein, 78 aa, Homo sapiens
MRVVVIGAGVIGLSTALCIHERYHSVLQPLDIKVYADRFTPLTTTDVAAGLWQPYLSDPNNPQEATLPGRTQFWDFGS

SEQ ID NO: 16543 - protein, 944 aa, Homo sapiens
MVVTTSARGGGGDRTPSRRRGCGLAPAGAAALLAGASCLCYGRSLQGEFVHDDVWAIVNNPDVRPGAPLRWGIFTNDFWGKGMAENTSHKSYRPLCVLTFKLNIFLTGMNPFYFHAVNIILHCLVTLVLMYTCDKTVFKNRGLAFVTALLFAVHPIHTEAVAGIVGRADVLACLLFLLAFLSYNRSLDQGCVGGSFPSTVSPFFLLLSLFLGTCAMLVKETGITVFGVCLVYDLFSLSNKQDKSSNGALCPRSPQQPGSPQPSSLPGHPHRENGKQQRFPHKGAWGGCHSPLPPEPKSSGFPVSPRAVWSMMRYLRASSNRNFLLTMRPFLKRAILVLSYVLVILYFRLWIMGGSMPLFSEQDNPASFSPYILTRFLTYSYLLAFNVWLLLAPVTLCYDWQVGSIPLVETIWDMRNLATIFLAVVMALLSLHCLAAFKRLEHKEVLVGLLFLVFPFIPASNLFFRVGFVVAERVLYMPSMGYCILFVHGLSKLCTWLNRCGATTLIVSTVLLLLLFSWKTVKQNEIWLSRESLFRSGVQTLPHNAKVHYNYANFLKDQGRNKEAIYHYRTALKLYPRHASALNNLGTLTRDTAEAKMYYQRALQLHPQHNRALFNLGNLLKSQEKKEEAITLLKDSIKYGPEFADAYSSLASLLAEQERFKEAEEIYQTGIKNCPDSSDLHNNYGVFLVDTGLPEKAVAHYQQAIKLSPSHHVAMVNLGRLYRSLGENSMAEEWYKRALQVAHKAEILSPLGALYYNTGRYEEALQIYQEAAALQPSQRELRLALAQVLAVMGQTKEAEKMTNHIVSEETGCLECYRLLSAIYSKQENHDKALDAIDKALQLKPKDPKVISELFFTKGNQLREQNLLDKAFESYRVAVQLNPDQAQAWMNMGGIQHIKGKYVSARAYYERALQLVPDSKLLKENLAKLDRLEKRLQEVREKDQT

SEQ ID NO: 16544 - protein, 1750 aa, Homo sapiens
MARAWQHPFLNVFRHFRVDEWKRSAKQGDVAVVTDKTLKGAVYRIRGSVSAANYIQLPKSSTQSLGLTGRYLYVLFRPLPSKHFVIHLDVSSKDNQVIRVSFSNLFKEFKSTATWLQFPLVLEARTPQRDLVGLAPSGARWTCLQLDLQDVLLVYLNRCYGHLKSIRLCASLLVRNLYTSDLCFEPAISGAQWAKLPVTPMPREMAFPVPKGESWHDRYIHVRFPSESLKVPSKPIEKSCSPPEAVLLGPGPQPLPCPVASSKPVRFSVSPVVQTPSPTASGRAALAPRPFPEVSLSQERSDASNADGPGFHSLEPWAQLEASDIHTAAAGTHVLTHESAEVPVARTGSCEGFLPDPVLRLKGVIGFGGHGTRQALWTPDGAAVVYPCHAVIVVLLVDTGEQRFFLGHTDKVSALALDGSSSLLASAQARAPSVMRLWDFQTGRCLCLFRSPMHVVCSLSFSDSGALLCGVGKDHHGRTMVVAWGTGQVGLGGEVVVLAKAHTDFDVQAFRVTFFDETRMASCGQGSVRLWRLRGGVLRSCPVDLGEHHALQFTDLAFKQARDGCPEPSAAMLFVCSRSGHILEIDCQRMVVRHARRLLPTRTPGGPHPQKQTFSSGPGIAISSLSVSPAMCAVGSEDGFLRLWPLDFSSVLLEAEHEGPVSSVCVSPDGLRVLSATSSGHLGFLDTLSRVYHMLARSHTAPVLALAMEQRRGQLATVSQDRTVRIWDLATLQQLYDFTSSEDAPCAVTFHPTRPTFFCGFSSGAVRSFSLEAAEVLVEHTCHRGAVTGLTATPDGRLLFSSCSQGSLAQYSCADPQWHVLRVAADMVCPDAPASPSALAVSRDGRLLAFVGPSRCTVTVMGSASLDELLRVDIGTLDLASSRLDSAMAVCFGPAALGHLLVSTSSNRVVVLDAVSGRIIRELPGVHPEPCPSLTLSEDARFLLIAAGRTIKVWDYATQASPGPQVYIGHSEPVQAVAFSPDQQQVLSAGDAVFLWDVLAPTESDQSFPGAPPACKTGPGAGPLEDAASRASELPRQQVPKPCQASPPRLGVCARPPEGGDGARDTRNSGAPRTTYLASCKAFTPARVSCSPHSAKGTCPPPASGGWLRLKAVVGYSGNGRANMVWRPDTGFFAYTCGRLVVVEDLHSGAQQHWSGHSAEISTLALSHSAQVLASASGRSSTTAHCQIRVWDVSGGLCQHLIFPHSTTVLALAFSPDDRLLVTLGDHDGRTLALWGTATYDLVSSTRLPEPVHGVAFNPWDAGELTCVGQGTVTFWLLQQRGADISLQVRREPVPEAVGAGELTSLCYGAPPLLYCGTSSGQVCVWDTRAGRCFLSWEADDGGIGLLLFSGSRLVSGSSTGRLRLWAVGAVSELRCKGSGARSSSVFMEHELVLDGAVVSASFDDSVDMGVVGTTAGTLWFVSWAEGTSTRLISGHRSKVNEVVFSPGESHCATCSEDGSVRVWALASMELVIQFQVLNQSCLCLAWSPPCCGRPEQQRLAAGYGDGSLRIFSVSRTAMELKMHPHPVALTTVAFSTDGQTVLSGDKDGLVAVSHPCTGTTFRVLSDHQGAPISTICVTCKECEDLGVEGTDLWLAASGDQRVSVWASDWLRNHCELVDWLSFPMPATTETQGHLPPSLAAFCPWDGALLMYVGPGVYKEVIIYNLCQKQVVEKIPLPFFAMSLSLSPGTHLLAVGFAECMLRLVDCAMGTAQDFAGHDNAVHLCRFTPSARLLFTAARNEILVWEVPGL

SEQ ID NO: 16545 - protein, 120 aa, Homo sapiens
FISGILAALSAMISLEIPQVNIMTKMDLLSKKAKKEIEKFLDPDMYSLLEDSTSDLRSKKFKKLTKAICGLSDEESMNIVLQHIDFAIQYGEDLEFKEPKEREDESSSMFDEYFQECQDE

SEQ ID NO: 16546 - protein, 45 aa, Homo sapiens
MRKEHGTESFFQHLLPQHFQLELAQRDEDENVNIYRARHREPRPA

SEQ ID NO: 16547 - protein, 1248 aa, Homo sapiens
MDAKARNCLLQHREALEKDIKTSYIMDHMISDGFLTISEEEKVRNEPTQQQRAAMLIKMILKKDNDSYVSFYNALLHEGYKDLAALLHDGIPVVSSSSGKDSVSGITSYVRTVLCEGGVPQRPVVFVTRKKLVNAIQQKLSKLKGEPGWVTIHGMAGCGKSVLAAEAVRDHSLLEGCFPGGVHWVSVGKQDKSGLLMKLQNLCTRLDQDESFSQRLPLNIEEAKDRLRILMLRKHPRSLLILDDVWDSWVLKAFDSQCQILLTTRDKSVTDSVMGPKYVVPVESSLGKEKGLEILSLFVNMKKADLPEQAHSIIKECKGSPLVVSLIGALLRDFPNRWEYYLKQLQNKQFKRIRKSSSYDYEALDEAMSISVEMLREDIKDYYTDLSILQKDVKVPTKVLCILWDMETEEVEDILQEFVNKSLLFCDRNGKSFRYYLHDLQVDFLTEKNCSQLQDLHKKIITQFQRYHQPHTLSPDQEDCMYWYNFLAYHMASAKMHKELCALMFSLDWIKAKTELVGPAHLIHEFVEYRHILDEKDCAVSENFQEFLSLNGHLLGRQPFPNIVQLGLCEPETSEVYQQAKLQAKQEVDNGMLYLEWINKKNITNLSRLVVRPHTDAVYHACFSEDGQRIASCGADKTLQVFKAETGEKLLEIKAHEDEVLCCAFSTDDRFIATCSVDKKVKIWNSMTGELVHTYDEHSEQVNCCHFTNSSHHLLLATGSSDCFLKLWDLNQKECRNTMFGHTNSVNHCRFSPDDKLLASCSADGTLKLWDATSANERKSINVKQFFLNLEDPQEDMEVIVKCCSWSADGARIMVAAKNKIFLFDIHTSGLLGEIHTGHHSTIQYCDFSPQNHLAVVALSQYCVELWNTDSRSKVADCRGHLSWVHGVMFSPDGSSFLTSSDDQTIRLWETKKVCKNSAVMLKQEVDVVFQENEVMVLAVDHIRRLQLINGRTGQIDYLTEAQVSCCCLSPHLQYIAFGDENGAIEILELVNNRIFQSRFQHKKTVWHIQFTADEKTLISSSDDAEIQVWNWQLDKCIFLRGHQETVKDFRLLKNSRLLSWSFDGTVKVWNIITGNKEKDFVCHQGTVLSCDISHDATKFSSTSADKTAKIWSFDLLLPLHELRGHNGCVRCSAFSVDSTLLATGDDNGEIRIWNVSNGELLHLCAPLSEEGAATHGGWVTDLCFSPDGKMLISAGGYIKWWNVVTGESSQTFYTNGTNLKKIHVSPDFKTYVTVDNLGILYILQTLE

SEQ ID NO: 16548 - protein, 60 aa, Homo sapiens
MNKPITPSTYVRCLNVGLIRKLSDFIDPQEGWKKLAVAIKKPSGDDRYNQFHIRCCSQNC

SEQ ID NO: 16549 - protein, 208 aa, Homo sapiens
MNLMDGDSSTTDASQLGISADYIGGSHYVIQPHDDTEDSMNDHEDTNGSKESFREQDIYLPIANVARIMKNAIPQTGKIAKDAKECVQECVSEFISFITSEASERCHQEKRKTINGEDILFAMSTLGFDSYVEPLKLYLQKFREAMKGEKGIGGAVTATDGLSEELTEEAFTNQLPAGLITTDGQQQNVMVYTTSYQQISGVQQIQFS

SEQ ID NO: 16550 - protein, 234 aa, Homo sapiens
MKTLAGLVLGLVIFDAAVTAPTLESINYDSETYDATLEDLDNLYNYENIPVDKVEIEIATVMPSGNRELLTPPPQPEKAQEEEEEEESTPRLIDGSSPQEPEFTGVLGPHTNEDFPTCLLCTCISTTVYCDDHELDAIPPLPKNTAYFYSRFNRIKKINKNDFASLSDLKRIDLTSNLISEIDEDAFRKLPQLRELVLRDNKIRQLPELPTTLTFIDISNNRLGRKGIKQEAFK

SEQ ID NO: 16551 - protein, 100 aa, Homo sapiens
MKATIILLLLAQVSWAGPFQQRGLFDFMLEDEASGIGPEVPDDRDFEPSLGPVCPFRCQCHLRVVQCSDLEKFGLEIPRALHLEDKSPERLKLSGWAKGE

SEQ ID NO: 16552 - protein, 56 aa, Homo sapiens
MGDKKSPTRPKRQPKPSSDEGYWDCSVCTFRNSAEAFKCMMCDVRKGTSTRTSKLL

SEQ ID NO: 16553 - protein, 637 aa, Homo sapiens
MIAELVSSALGLALYLNTLSADFCYDDSRAIKTNQDLLPETPWTHIFYNDFWGTLLTHSGSHKSYRPLCTLSFRLNHAIGGLNPWSYHLVNVLLHAAVTGLFTSFSKILLGDGYWTFMAGLMFASHPIHTEAVAGIVGRADVGASLFFLLSLLCYIKHCSTRGYSARTWGWFLGSGLCAGCSMLWKEQGVTVLAVSAVYDVFVFHRLKIKQILPTIYKRKNLSLFLSISLLIFWGSSLLGARLYWMGNKPPSFSNSDNPAADSDSLLTRTLTFFYLPTKNLWLLLCPDTLSFDWSMDAVPLLKTVCDWRNLHTVAFYTGLLLLAYYGLKSPSVDRECNGKTVTNGKQNANGHSCLSDVEYQNSETKSSFASKVENGIKNDVSQRTQLPSTENIVVLSLSLLIIPFVPATNLFFYVGFVIAERVLYIPSMGFCLLITVGARALYVKVQKRFLKSLIFYATATLIVFYGLKTAIRNGDWQNEEMLYRSGIKVNPAKAWGNLGNVLKSQSKISEAESAYRNALYYRSNMADMLYNLGLLLQENSRFAEALHYYKLAIGSRPTLASAYLNTGIILMNQGRTEEARRTFLKCSEIPDENLKDPHAHKSSVTSCLYNLGKLYHEQGHYEVWPMPLCPFPSPLF

SEQ ID NO: 16554 - protein, 95 aa, Homo sapiens
MMAGMKIQLVCMLLLAFSSWSLCSDSEEEMKALEADFLTNMHTSKLIQEDILDTGNDKNGKEEVIKRKIPYILKRQLYENKPRRPYILKRDSYYY

SEQ ID NO: 16555 - protein, 1504 aa, Homo sapiens
MWVAKWLTGLLYHLSLFITRSWEVDFHPRQEALVRTLTSYEVVIPERVNEFGEVFPQSHHFSRQKRSSEALEPMPFRTHYRFTAYGQLFQLNLTADASFLAAGYTEVHLGTPERGAWESDAGPSDLRHCFYRGQVNSQEDYKAVVSLCGGLTGTFKGQNGEYFLEPIMKADGNEYEDGHNKPHLIYRQDLNNSFLQTLKYCSVSESQIKETSLPFHTYSNMNEDLNVMKERVLGHTSKNVPLKDERRHSRKKRLISYPRYIEIMVTADAKVVSAHGSNLQNYILTLMSIVATIYKDPSIGNLIHIVVVKLVMIHREEEGPVINFDGATTLKNFCSWQQTQNDLDDVHPSHHDTAVLITREDICSSKEKCNMLGLSYLGTICDPLQSCFINEEKGLISAFTIAHELGHTLGVQHDDNPRCKEMKVTKYHVMAPALSFHMSPWSWSNCSRKYVTEFLDTGYGECLLDKPDEEIYNLPSELPGSRYDGNKQCELAFGPGSQMCPHINICMHLWCTSTEKLHKGCFTQHVPPADGTDCGPGMHCRHGLCVNKETETRPVNGEWGPWEPYSSCSRTCGGGIESATRRCNRPEPRNGGNYCVGRRMKFRSCNTDSCPKGTQDFREKQCSDFNGKHLDISGIPSNVRWLPRYSGIGTKDRCKLYCQVAGTNYFYLLKDMVEDGTPCGTETHDICVQGQCMAAGCDHVLNSSAKIDKCGVCGGDNSSCKTITGVFNSSHYGYNVVVKIPAGATNVDIRQYSYSGQPDDSYLALSDAEGNFLFNGNFLLSTSKKEINVQGTRTVIEYSGSNNAVERINSTNRQEKELILQVLCVGNLYNPDVHYSFNIPLEERSDMFTWDPYGPWEGCTKMCQGLQRRNITCIHKSDHSVVSDKECDHLPLPSFVTQSCNTDCELRWHVIGKSECSSQCGQGYRTLDIHCMKYSIHEGQTVQVDDHYCGDQLKPPTQELCHGNCVFTRWHYSEWSQCSRSCGGGERSRESYCMNNFGHRLADNECQELSRVTRENCNEFSCPSWAASEWSECLVTCGKGTKQRQVWCQLNVDHLSDGFCNSSTKPESLSPCELHTCASWQVGPWGPCTTTCGHGYQMRDVKCVNELASAVLEDTECHEASRPSDRQSCVLTPCSFISKLETALLPTVLIKKMAQWRHGSWTPCSVSCGRGTQARYVSCRDALDRIADESYCAHLPRPAEIWDCFTPCGEWQAGDWSPCSASCGHGKTTRQVLCMNYHQPIDENYCDPEVRPLMEQECSLAACPPAHSHFPSSPVQPSYYLSTNLPLTQKLEDNENQVVHPSVRGNQWRTGPWGSCSSSCSGGLQHRAVVCQDENGQSASYCDAASKPPELQQCGPGPCPQWNYGNWGECSQTCGGGIKSRLVICQFPNGQILEDHNCEIVNKPPSVIQCHMHACPADVSWHQEPWTSEDLKVKLLPQRTIILWELMKNIFCHGKHSHMYLINVVTDHLLYPRHCDPETIETYFLSLWSLQFTWGDLKYYKNSL

SEQ ID NO: 16556 - protein, 123 aa, Homo sapiens
NIAALLSVMLQPYMPTVSATIQAQLQLPPPACSILLTNFLCTLPAGHQIGTVSPLFQKLENDQIESLRQRFGGGQVRKLKAVPSLHNSHSITSLISLSSPHPSLFPSFGPAASSLTVFLSCLN

SEQ ID NO: 16557 - protein, 677 aa, Homo sapiens
MTGRVCRGCGGTDIELDAARGDAVCTACGSVLEDNIIVSEVQFVESSGGGSSAVGQFVSLDGAGKTPTLGGGFHVNLGKESRAQTLQNGRRHIHHLGNQLQLNQHCLDTAFNFFKMAVSRHLTRGRKMAHVIAACLYLVCRTEGTPHMLLDLSDLLQVNVYVLGKTFLLLARELCINAPAIDPCLYIPRFAHLLEFGEKNHEVSMTALRLLQRMKRDWMHTGRRPSGLCGAALLVAARMHDFRRTVKEVISVVKVCESTLRKRLTEFEDTPTSQLTIDEFMKIDLEEECDPPSYTAGQRKLRMKQLEQVLSKKLEEVEGEISSYQDAIEIELENSRPKAKGGLASLAKDGSTEDTASSLCGEEDTEDEELEAAASHLNKDLYRELLGGAPGSSEAAGSPEWGGRPPALGSLLDPLPTAASLGISDSIRECISSQSSDPKDASGDGELDLSGIDDLEIDRYILNESEARVKAELWMRENAEYLREQREKEARIAKEKELGIYKEHKPKKSCKRREPIQASTAREAIEKMLEQKKISSKINYSVLRGLSSAGGGSPHREDAQPEHSASARKLSRRRTPASRSGADPVTSVGKRLRPLVSTQPAKKVATGEALLPSSPTLGAEPARPQAVLVESGPVSYHADEEADEEEPDEEDGEPCVSALQMMGSNDYGCDGDEDDGY

SEQ ID NO: 16558 - protein, 121 aa, Homo sapiens
MWSRLVWLGLRAPLGGRQGFTSKADPQGSGRITAAVIEHLERLALVDFGSREAVARLEKAIAFADRLRAVDTDGVEPMESVLEDRLECSGVISAHYKLCFLHSSDSCASASQVAGITDVYT

SEQ ID NO: 16559 - protein, 75 aa, Homo sapiens
MAAETLLSSLLGLLLLGLLLPASLTGGVGSLNLEELSEMRYGIEILPLPVMGGQPFFASLPPDPPFFPRANLRTW

SEQ ID NO: 16560 - protein, 921 aa, Homo sapiens
MRANDALQVLGLLFSLARGSEVGNSQAVCPGTLNGLSVTGDAENQYQTLYKLYERCEVVMGNLEIVLTGHNADLSFLQWIREVTGYVLVAMNEFSTLPLPNLRVVRGTQVYDGKFAIFVMLNYNTNSSHALRQLRLTQLTEILSGGVYIEKNDKLCHMDTIDWRDIVRDRDAEIVVKDNGRSCPPCHEVCKGRCWGPGSEDCQTLTKTICAPQCNGHCFGPNPNQCCHDECAGGCSGPQDTDCFACRHFNDSGACVPRCPQPLVYNKLTFQLEPNPHTKYQYGGVCVASCPHNFVVDQTSCVRACPPDKMEVDKNGLKMCEPCGGLCPKACEGTGSGSRFQTVDSSNIDGFVNCTKILGNLDFLITGLNGDPWHKIPALDPEKLNVFRTVREITGYLNIQSWPPHMHNFSVFSNLTTIGGRSLYNRGFSLLIMKNLNVTSLGFRSLKEISAGRIYISANRQLCYHHSLNWTKVLRGPTEERLDIKHNRPRRDCVAEGKVCDPLCSSGGCWGPGPGQCLSCRNYSRGGVCVTHCNFLNGEPREFAHEAECFSCHPECQPMEGTATCNGSGSDTCAQCAHFRDGPHCVSSCPHGVLGAKGPIYKYPDVQNECRPCHENCTQGCKGPELQDCLGQTLVLIGKTHLTMALTVIAGLVVIFMMLGGTFLYWRGRRIQNKRAMRRYLERGESIEPLDPSEKANKVLARIFKETELRKLKVLGSGVFGTVHKGVWIPEGESIKIPVCIKVIEDKSGRQSFQAVTDHMLAIGSLDHAHIVRLLGLCPGSSLQLVTQYLPLGSLLDHVRQHRGALGPQLLLNWGVQIAKGMYYLEEHGMVHRNLAARNVLLKSPSQVQVADFGVADLLPPDDKQLLYSEAKTPIKWMALESIHFGKYTHQSDVWSYGQCIWMPSLPSLAPVSNLPFETPS

SEQ ID NO: 16561 - protein, 284 aa, Homo sapiens
MSGEDEQQEQTIAEDLVVTKYKMGGDIANRVLRSLVEASSSGVSVLSLCEKGDAMIMEETGKIFKKEKEMKKGIAFPTSISVNNCVCHFSPLKSDQDYILKEGDLVKIDLGVHVDGFIANVAHTFVVDVAQGTQVTGRKADVIKAAHLCAEAALRLVKPGNQNTQVTEAWNKVAHSFNCTPIEGMLSHQLKQHVIDGEKTIIQNPTDQQKKDHEKAEFEVHEVYAVDVLVSSGEGKAKDAGQRTTIYKRDPSKQYGLKMKTSRAFFSEVERRFDAMFLNTLKMT

SEQ ID NO: 16562 - protein, 230 aa, Homo sapiens
MSLLRSLRVFLVARTGSYPAGSLLRQSPQPRHTFYAGPRLSASASSKELLMKLRRKTGYSFVNCKKALETCGGDLKQAEIWLHKEAQKEGWSKAAKLQGRKTKEGLIGLLQEGNTTVLVEVNCETDFVSRNLKFQLLVQQVALGTMMHCQTLKDQPSAYSKGFLNSSELSGLPAGPDREGSLKDQLALAIGSQARNQPVKMGGSNPCLMIRIGVSGSRPLGSAFPNWSCL

SEQ ID NO: 16563 - protein, 140 aa, Homo sapiens
MVSAAAPSLLILLLLLLGSVPATDARSVPLKATFLEDVAGSGEAEGSSASSPSLPPPWTPALSPTSMGPQPITLGGPSPPTNFLDGIVDFFRQYVMLIAVVGSLAFLLMFIVCAAVITRQKQKASAYYPSSFPKKKYVDQ

SEQ ID NO: 16564 - protein, 192 aa, Homo sapiens
MTSASTKVGEIFSAAGAAFTKLGELTMQLHPVADSSPAGAKWTETEIEMLRAAVKRFGDDLNHISCVIKERTVAQIKATVKRKVYEDSGIPLPAESPKKGPKKVASGVLSPPPAAPPPSSSSVPEAGGPPIKKQKADVTLSALNDSDANSDVVDIEGLGETPPAKKLNFDQDSLTLDSGLLMTSADPPLLSC

SEQ ID NO: 16565 - protein, 115 aa, Homo sapiens
MGTRLLCWAAICLLGADHTGAGVSQSLRHKVAKKGKDVALRYDPISGHNALYWYRQSLGQGLEFPIYFQGKDAADKSGLPRDRFSAQRSEGSISTLKFQRTQQGDLAVYLCASSS

SEQ ID NO: 16566 - protein, 35 aa, Homo sapiens
MIAELVSSALGLALYLNTLSADFCYDDRGRTCRFS

SEQ ID NO: 16567 - protein, 112 aa, Homo sapiens
MESRVLLRTFCLIFGLGAVWGLGVDPSLQIDVLTELELGESTTGVRQVPGLHNGTKAFLFQDTPRSIKASTATAEQFFQKLRNKHEFTILVTLKQTHLNSGVILSIHHLDHR

SEQ ID NO: 16568 - protein, 126 aa, Homo sapiens
MRANDALQVLGLLFSLARGSEVGNSQAVCPGTLNGLSVTGDAENQYQTLYKLYERCEVVMGNLEIVLTGHNADLSFLQWIREVTGYVLVAMNEFSTLPLPNLRVVRGTQVYDGKFAIFVMLNYNTN

SEQ ID NO: 16569 - protein, 156 aa, Homo sapiens
MPREDRATWKSNYFLKIIQLLDDYPKCFIVGADNVGSKQMQQIRMSLRGKAVVLMGKNTMMRKAIRGHLENNPALEKLLPHIRGNVGFVFTKEDLTEIRDMLLANKVPAAARAGAIAPCEVTVPAQNTGLGPEKTSFFQALGVYCPTIIWFRVMCS

SEQ ID NO: 16570 - protein, 314 aa, Homo sapiens
MYQVDFLDTNIIITEPYFNFTSIQESMNEILFEEYQFQAVLRVNAGALSAHRYFRDNPSELCCIIVDSGYSFTHIVPYCRSKKKKEAIIRINVGGKLLTNHLKEIISYRQLHVMDETHVINQVKEDVCYVSQDFYRDMDIAKLKGEENTVMIDYVLPDFSTIKKGFCKPREEMVLSGKYKSGEQILRLANERFAVPEILFNPSDIGIQEMGIPEAIVYSIQNLPEEMQPHFFKNIVLTGGNSLFPGFRDRVYSEVRCLTPTDYDVSVVLPENPITYAWEGGKLISENDDFEDMVVTREDYEENGHSVCEEKFDI

SEQ ID NO: 16571 - protein, 892 aa, Homo sapiens
MACLHETRTPSPSFGGFVSTLSEASMRKLDPDTSDCTPEKDLTPTQCVLRDVVPLGGQGGGGPSPSPGGEPPPEPFANSVLQLHEQDAGGPGGAAGSPESRASRVRADEVRLQCQSGSGFLEGLFGCLRPVWTMIGKAYSTEHKQQQEDLWEVPFEEILDLQWVGSGAQGAVFLGRFHGEEVAVKKVRDLKETDIKHLRKLKHPNIITFKGVCTQAPCYCILMEFCAQGQLYEVLRAGRPVTPSLLVDWSMGIAGGMNYLHLHKIIHRDLKSPNMLITYDDVVKISDFGTSKELSDKSTKMSFAGTVAWMAPEVIRNEPVSEKVDIWSFGVVLWELLTGEIPYKDVDSSAIIWGVGSNSLHLPVPSSCPDGFKILLRQCWNSKPRNRPSFRQILLHLDIASADVLSTPQETYFKSQAEWREEVKLHFEKIKSEGTCLHRLEEELVMRRREELRHALDIREHYERKLERANNLYMELNALMLQLELKERELLRREQALERRCPGLLKPHPSRGLLHGNTMEKLIKKRNVPQKLSPHSKRPDILKTESLLPKLDAALSGVGLPGCPKGPPSPGRSRRGKTRHRKASAKGSCGDLPGLRTAVPPHEPGGPGSPGGLGGGPSAWEACPPALRGLHHDLLLRKMSSSSPDLLSAALGSRGRGATGGAGDPGSPPPARGDTPPSEGSAPGSTSPDSPGGAKGEPPPPVGPGEGVGLLGTGREGTSGRGGSRAGSQHLTPAALLYRAAVTRSQKRGISSEEEEGEVDSEVELTSSQRWPQSLNMRQSLSTFSSENPSDGEEGTASEPSPSGTPEVGSTNTDERPDERSDDMCSQGSEIPLDPPPSEVIPGPEPSSLPIPHQELLRERGPPNSEDSDCDSTELDNSNSVDALRPPASLPP

SEQ ID NO: 16572 - protein, 231 aa, Homo sapiens
MAGRRLNLRWALSVLCVLLMAETVSGTRGSSTGAHISPQFPASGVNQTPVVDCRKVCGLNVSDRCDFIRTNPDCHSDGGYLDYLEGIFCHFPPSLLPLAVTLYVSWLLYLFLILGVTAAKFFCPNLSAISTTLKLSHNVAGVTFLAFGNGAPDIFSALVAFSDPHTAGLALGALFGAGVLVTTVVAGGITILHPFMAASRPFFRDIVFYMVAVFLTFLMLFRGRVTLAWAL

SEQ ID NO: 16573 - protein, 587 aa, Homo sapiens
MRPRGLPPLLVVLLGCWASVSAQTDATPAVTTEGLNSTEAALATFGTFPSTRPPGTPRAPGPSSGPRPTPVTDVAVLCVCDLSPAQCDINCCCDPDCSSVDFSVFSACSVPVVTGDSQFCSQKAVIYSLNFTANPPQRVFELVDQINPSIFCIHITNYKPALSFINPEVPDENNFDTLMKTSDGFTLNAESYVSFTTKLDIPTAAKYEYGVPLQTSDSFLRFPSSLTSSLCTDNNPAAFLVNQAVKCTRKINLEQCEEIEALSMAFYSSPEILRVPDSRKKVPITVQSIVIQSLNKTLTRREDTDVLQPTLVNAGHFSLCVNVVLEVKYSLTYTDAGEVTKADLSFVLGTVSSVVVPLQQKFEIHFLQENTQPVPLSGNPGYVVGLPLAAGFQPHKGSGIIQTTNRYGQLTILHSTTEQDCLALEGVRTPVLFGYTMQSGCKLRLTGALPCQLVAQKVKSLLWGQGFPDYVAPFGNSQAQDMLDWVPIHFITQSFNRKDSCQLPGALVIEVKWTKYGSLLNPQAKIVNVTANLISSSFPEANSGNERTILISTAVTFVDVSAPAEAGFRAPPAINARLPFNFFFPFV

SEQ ID NO: 16574 - protein, 138 aa, Homo sapiens
MTSASTKVGEIFSAAGAAFTKLGELTMQLHPVADSSPAGAQIKATVKRKVYEDSGIPLPAESPKKGPKKVASGVLSPPPAAPPPSSSSVPEAGGPPIKKQKADVTLSALNDSDANSDVVDIEGLGETPPAKKLNFDQA

SEQ ID NO: 16575 - protein, 362 aa, Homo sapiens
MDTGVIEGGLNVTLTIRLLMHGKEVGSIIGKKGESVKKMREESGARINISEGNCPERIITLAGPTNAIFKAFAMIIDKLEEDISSSMTNSTAASRPPVTLRLVVPASQCGSLIGKGGCKIKEIRESTGAQVQVAGDMLPNSTERAITIAGIPQSIIECVKQICVVMLESPPKGVTIPYRPKPSSSPVIFAGGQDRYSTGSDSASFPHTTPSMCLNPDLEGPPLEAYTIQGQYAIPQPDLTKLHQLAMQQSHFPMTHGNTGFSGIESSSPEVKGYWAGLDASAQTTSHELTIPNDLIGCIIGRQGAKINEIRQMSGAQIKIANPVEGSTDRQVTITGSAASISLAQYLINVRLSSETGGMGSS

SEQ ID NO: 16576 - protein, 72 aa, Homo sapiens
MTLRPSLLPLHLLLLLLLSAAVCRAEAGLETESPVRTLQVETLSDRRWSPQNHVPSPLLLETRFTYTTREAW

SEQ ID NO: 16577 - protein, 168 aa, Homo sapiens
MKGWGWLALLLGALLGTAWARRSQDLHCGACRALVDELEWEIAQVDPKKTIQMGSFRINPDGSQSVVEVPYARSEAHLTELLEEICDRMKEYGEQIDPSTHRKNYVRVVGRNGESSELDLQGIRIDSDISGTLKFACESIVEEYEDELIEFFSREADNVKDKLCSKRT

SEQ ID NO: 16578 - protein, 708 aa, Homo sapiens
MSKRLRSSEVCADCSGPDPSWASVNRGTFLCDECCSVHRSLGRHISQVRHLKHTPWPPTLLQMVETLYNNGANSIWEHSLLDPASIMSGRRKANPQDKVHPNKAEFIRAKYQMLAFVHRLPCRDDDSVTAKDLSKQLHSSVRTGNLETCLRLLSLGAQANFFHPEKGNTPLHVASKAGQILQAELLAVYGADPGTQDSSGKTPVDYARQGGHHELAERLVEIQYELTDRLAFYLCGRKPDHKNGQHFIIPQMADSLDLSELAKAAKKKLQSLSNHLFEELAMDVYDEVDRRETDAVWLATQNHSALVTETTVVPFLPVNPEYSSTRNQGRQKLARFNAHEFATLVIDILSDAKRRQQGSSLSGSKDNVELILKTINNQHSVESQDNDQPDYDSVASDEDTDLETTASKTNRQKLQTLQSENSNLRKQATTNVYQVQTGSEYTDTSNHSSLKRRPSARGSRPMSMYETGSGQKPYLPMGEASRPEESRMRLQPFPAHIGRSALVTSSSSLPSFPSTLSWSRDESARRASRLEKQNSTPESDYDNTPNDMEPDGMGSSRKGRQRSMVWPGDGLVPDTAEPHVAPSPTLPSTEDVIRKTEQITKNIQELLRAAQENKHDSYIPCSERIHVAVTEMAALFPKKPKSDMVRTSLRLLTSSAYRLQSECKKTLPGDPGSPTDVQLVTQQVIQCAYDIAKAAKQLVTITTKENNN

SEQ ID NO: 16579 - protein, 344 aa, Homo sapiens
MDLVLKRCLLHLAVIGALLAVGATKVPRNQDWLGVSRQLRTKAWNRQLYPEWTEAQRLDCWRGGQVSLKVSNDGPTLIGANASFSIALNFPGSQKVLPDGQVIWVNNTIINGSQVWGGQPVYPQETDDACIFPDGGPCPSGSWSQKRSFVYVWKTWDQVPFSVSVSQLRALDGGNKHFLRNQPLTFALQLHDPSGYLAEADLSYTWDFGDSSGTLISRALVVTHTYLEPGPVTAQVVLQAAIPLTSCGSSPVPGTTDGHRPTAEAPNTTAGQVPTTEVVGTTPGQAPTAEPSGTTSVQVPTTEVISTAPVQMPTAESTGMTPEKVPVSEVMGTTLAEMSTPEAT

SEQ ID NO: 16580 - protein, 115 aa, Homo sapiens
MCDFTEDQTAEFKEAFQLFDRTEMNVKVLDFEHFLPMLQTVAKNKDQGTYEDYVEGLRVFDKEGNGTVMGAEIRHVLVTLGEKMTEEEVEMLVAGHEDSNGCINYEAFVRHILSG

SEQ ID NO: 16581 - protein, 280 aa, Homo sapiens
MSILKVKKAFFALVTNGVRAAPLWDSKKQSFVGMLTITDFINILHRYYKSALVQIYELEEHKIETWREVYLQDSFKPLVCISPNASLFDAVSSLIRNKIHRLPVIDPESGNTLYILTHKRILKFLKLFITEFPKPEFMSKSLEELQIGTYANIAMVRTTTPVYVALGIFVQHRVSALPVVDEKGRVVDIYSKFDVINLAAEKTYNNLDVSVTKALQHRSHYFEGVLKCYLHETLETIINRLVEAEVHRLVVVDENDVVKGIVSLSDILQALVLTGGEKKP

SEQ ID NO: 16582 - protein, 555 aa, Homo sapiens
MARAVGPERRLLAVYTGGTIGMRSELGVLVPGTGLAAILRTLPMFHDEEHARARGLSEDTLVLPPASRNQRILYTVLECQPLFDSSDMTIAEWVCLAQTIKRHYEQYHGFVVIHGTDTMAFAASMLSFMLENLQKTVILTGAQVPIHALWSDGRENLLGALLMAGQYVIPEVCLFFQNQLFRGNRATKVDARRFAAFCSPNLLPLATVGADITINRELVRKVDGKAGLVVHSSMEQDVGLLRLYPGIPAALVRAFLQPPLKGVVMETFGSGNGPTKPDLLQELRVATERGLVIVNCTHCLQGAVTTDYAAGMAMAGAGVISGFDMTSEAALAKLSYVLGQPGLSLDVRKELLTKDLRGEMTPPSVEERRPSLQGNTLGGGVSWLLSLSGSQEADALRNALVPSLACAAAHAGDVEALQALVELGSDLGLVDFNGQTPLHAAARGGHTEAVTMLLQRGVDVNTRDTDGFSPLLLAVRGRHPGVIGLLREAGASLSTQELEEAGTELCRQRQPGTWQWWPFYRAWRVRLVPRPHAQKCCLVSNLKASCCSISHSFLP

SEQ ID NO: 16583 - protein, 361 aa, Homo sapiens
MDTGVIEGGLNVTLTIRLLMHGKEVGSIIGKKGESVKKMREESGARINISEGNCPERIITLAGPTNAIFKAFAMIIDKLEEDISSSMTNSTAASRPPVTLRLVVPASQCGSLIGKGGCKIKEIRESTGAQVQVAGDMLPNSTERAITIAGIPQSIIECVKQICVVMLESPPKGVTIPYRPKPSSSPVIFAGGQDRYSTGSDSASFPHTTPSMCLNPDLEGPPLEAYTIQGQYAIPQPDLTKLHQLAMQQSHFPMTHGNTGFSGIESSSPEVKGYWGLDASAQTTSHELTIPNDLIGCIIGRQGAKINEIRQMSGAQIKIANPVEGSTDRQVTITGSAASISLAQYLINVRLSSETGGMGSS

SEQ ID NO: 16584 - protein, 238 aa, Homo sapiens
MTPHRLLPPLLLLLALLLAASPGGALARCPGCGQGVQAGCPGGCVEEEDGGSPAEGCAEAEGCLRREGQECGVYTPNCAPGLQCHPPKDDEAPLRALLLGRGRCLPARAPAEENPKESKPQAGTARPQDVNRRDQQRNPGTSTTPSQPNSAGVQDTEMGPCRRHLDSVLQQLQTEVYRGAQTLYVPNCDHRGFYRKRQCRSSQGQRRGPCWCVDRMGKSLPGSPDGNGSSSCPTGSSG

SEQ ID NO: 16585 - protein, 189 aa, Homo sapiens
MAVETLSPDWEFDRVDDGSQKIHAEVQLKNYGKFLEEYTSQLRRIEDALDDSIGDVWDFNLDPIALKLLPYEQSSLLELIKTENKVLNKVITVYAALCCEIKKLKYEAETKFYNGLLFYGEGATDASMVEGDCQIQMGRFISFLQELSCFVTRCYEVVMNVVHQLAALYISNKIAPKIIETTGVHFQVF

SEQ ID NO: 16586 - protein, 299 aa, Homo sapiens
MKSHRCYDLIPTSSKLVVFDTSLQVKKAFFALVTNGVRAAPLWDSKKQSFVGMLTITDFINILHRYYKSALVQIYELEEHKIETWREVYLQDSFKPLVCISPNASLFDAVSSLIRNKIHRLPVIDPESGNTLYILTHKRILKFLKLFITEFPKPEFMSKSLEELQIGTYANIAMVRTTTPVYVALGIFVQHRVSALPVVDEKGRVVDIYSKFDVINLAAEKTYNNLDVSVTKALQHRSHYFEGVLKCYLHETLETIINRLVEAEVHRLVVVDENDVVKGIVSLSDILQALVLTGGEKKP

SEQ ID NO: 16587 - protein, 190 aa, Homo sapiens
MAPSVPAAEPEYPKGIRAVLLGPPGAGKGTQVSDEMVVELIEKNLETPLCKNGFLLDGFPRTVRQAEMLDDLMEKRKEKLDSVIEFSIPDSLLIRRITGRLIHPKSGRSYHEEFNPPKEPMKDDITGEPLIRRSDDNEKALKIRLQAYHTQTTPLIEYYRKRGIHSAIDASQTPDVVFASILAAFSKATS

SEQ ID NO: 16588 - protein, 174 aa, Homo sapiens
MKATIILLLLAQVSWAGPFQQRGLFDFMLEDEASGIGPEVPDDRDFEPSLGPVCPFRCQCHLRVVQCSDLGLDKVPKDLPPDTTLLDLQNNKITEIKDGDFKNLKNLHALILVNNKISKVSPGAFTPLVKLERLYLSKNQLKELPEKMPKTLQELRAHENEITKVRKVTFNGLN

SEQ ID NO: 16589 - protein, 102 aa, Homo sapiens
MRLLAWLIFLANWGGARAEPGKFWHIADLHLDPDYKVSKDPFQVCPSAGSQPVPDAGPWGDYLCDSPWALINSSIYAMKEIEPEPDFILWTGAVPSFSSAAS

SEQ ID NO: 16590 - protein, 110 aa, Homo sapiens
METGLGAPLFKAWLLISVWGLGVDPSLQIDVLTELELGESTTGVRQVPGLHNGTKAFLFQDTPRSIKASTATAEQFFQKLRNKHEFTILVTLKQTHLNSGVILSIHHLDH

SEQ ID NO: 16591 - protein, 322 aa, Homo sapiens
MDTGVIEGGLNVTLTIRLLMHGKEVGSIIGKKGESVKKMREESGARINISEGNCPERIITLAGPTNAIFKAFAMIIDKLEEDISSSMTNSTAASRPPVTLRLVVPASQCGSLIGKGGCKIKEIRESTGAQVQVAGDMLPNSTERAITIAGIPQSIIECVKQICVVMLETLSQSPPKGVTIPYRPKPSSSPVIFAGGQAYTIQGQYAIPQPDLTKLHQLAMQQSHFPMTHGNTGFSAGLDASAQTTSHELTIPNDLIGCIIGRQGAKINEIRQMSGAQIKIANPVEGSTDRQVTITGSAASISLAQYLINVRLSSETGGMGSS

SEQ ID NO: 16592 - protein, 749 aa, Homo sapiens
MEALIPVINKLQDVFNTVGADIIQLPQIVVVGTQSSGKSSVLESLVGRDLLPRGTGIVTRRPLILQLVHVSQEDKRKTTGEENDPATWKNSRHLSKGVEAEEWGKFLHTKNKLYTDFDEIRQEIENETERISGNNKGVSPEPIHLKIFSPNVVNLTLVDLPGMTKVPVGDQPKDIELQIRELILRFISNPNSIILAVTAANTDMATSEALKISREVDPDGRRTLAVITKLDLMDAGTDAMDVLMGRVIPVKLGIIGVVNRSQLDINNKKSVTDSIRDEYAFLQKKYPSLANRNGTKYLARTLNRLLMHHIRDCLPELKTRINVLAAQYQSLLNSYGEPVDDKSATLLQLITKFATEYCNTIEGTAKYIETSELCGGARICYIFHETFGRTLESVDPLGGLNTIDILTAIRNATGPRPALFVPEVSFELLVKRQIKRLEEPSLRCVELVHEEMQRIIQHCSNYSTQELLRFPKLHDAIVEVVTCLLRKRLPVTNEMVHNLVAIELAYINTKHPDFADACGLMNNNIEEQRRNRLARELPSAVSRDKSSKVPSALAPASQEPSPAASAEADGKLIQDSRRETKNVASGGGGVGDGVQEPTTGNWRGMLKTSKAEELLAEEKSKPIPIMPASPQKGHAVNLLDVPVPVARKLSAREQRDCEVIERLIKSYFLIVRKNIQDSVPKAVMHFLVNHVKDTLQSELVGQLYKSSLLDDLLTESEDMAQRRKEAADMLKALQGASQIIAEIRETHLW

SEQ ID NO: 16593 - protein, 356 aa, Homo sapiens
MASLTAYDKDVSSGSYNLSSATTGSYYSCVSQITIGYDVAGPVAIGLTHWKNPYVQGRPTLPSDLPLFVSKDAGIPVYHRSFTRKTDQATPLSCPASLSITPVPSYSSSSQETLSQDTTGLSLSIHGAEKRLQIHQRRSVASRPASRRRLPVVRHSSLPPGRRSIKMEASSSGITNGKTKVFHPEGGVDLQGYQLDMQILPDGPKSDVDFSEILNAIQEMAKDVNILFDELEAVSSPCKDDDSLLHPGNLTSTSDDASRLEAGGETVPERNKSNGLYFRDGKCRIDYILVYRKSNPQTEKREVFERNIRAEGLQMEKESSLINSDIIFVKLHAPWEVLGRYAEQMNVRMPFSSNCN

SEQ ID NO: 16594 - protein, 86 aa, Homo sapiens
MIILGLVFIFQFVISCSCLAINRSKQTDVINASWWVMSNKTRDELERSFDCCGLFNLTTLYQQDYDFCTAICKSQSPTCQMCGEKF

SEQ ID NO: 16595 - protein, 123 aa, Homo sapiens
MRVVVIGAGVIGLSTALCIHERYHSVLQPLDIKVYADRFTPLTTTDVAAGLWQPYLSDPNNPQEADWSQQTFDYLLSHVHSPNAENLGLFLISGYNLFHEAIPLWLVPHKPNSGGKELSTVAD

SEQ ID NO: 16596 - protein, 72 aa, Homo sapiens
MIILGLVFIFQFVISCSCLAINRSKQTDVINASWWVMSNKTRDELERSFDCCGLFNLTTLYQQDYDFCTAIC

SEQ ID NO: 16597 - protein, 319 aa, Homo sapiens
MAYRRDEMWSEGRYEYERIPRERAPPRSHPSDESGYRWTRDDHSASRQPEYRDMRDGFRRKSFYSSHYARERSPYKRDNTFFRESPVGRKDSPHSRSGSSVSSRSYSPERSKSYSFHQSQHRKSVRPGASYKRQNEGNPERDKERPVQSLKTSRDTSPSSGSAVSSSKVLDKPSRLTEKELAEAASKWAAEKLEKSDESNLPEISEYEAGSTAPLFTDQPEEPESNTTHGIELFEDSQLTTRSKAIASKTKEIEQVYRQDCETFGMVVKMLIEKDPSLEKSIQFALRQNLHEIGERCVEELKHFIAEYDTSTQDFGEPF

SEQ ID NO: 16598 - protein, 768 aa, Homo sapiens
METGLGAPLFKAWLLISVWGLGVDPSLQIDVLTELELGESTTGVRQVPGLHNGTKAFLFQDTPRSIKASTATAEQFFQKLRNKHEFTILVTLKQTHLNSGVILSIHHLDHRYLELESSGHRNEVRLHYRSGSHRPHTEVFPYILADDKWHKLSLAISASHLILHIDCNKIYERVVEKPSTDLPLGTTFWLGQRNNAHGYFKGIMQDVQLLVMPQGFIAQCPDLNRTCPTCNDFHGLVQKIMELQDILAKTSAKLSRAEQRMNRLDQCYCERTCTMKGTTYREFESWIDGCKNCTCLNGTIQCETLICPNPDCPLKSALAYVDGKCCKECKSICQFQGRTYFEGERNTVYSSSGVCVLYECKDQTMKLVESSGCPALDCPESHQITLSHSCCKVCKGYDFCSERHNCMENSICRNLNDRAVCSCRDGFRALREDNAYCEDIDECAEGRHYCRENTMCVNTPGSFMCICKTGYIRIDDYSCTEHDECITNQHNCDENALCFNTVGGHNCVCKPGYTGNGTTCKAFCKDGCRNGGACIAANVCACPQGFTGPSCETDIDECGTGRHSCANDTICFNLDGGYDCRCPHGKNCTGDCIHDGKVKHNGQIWVLENDRCSVCSCQNGFVMCRRMVCDCENPTVDLFCCPECDPRLSSQCLHQNGETLYNSGDTWVQNCQQCRCLQGEVDCWPLPCPDVECEFSILPENECCPRCVTDPCQADTIRNDITKTCLDEMNVVRFTGSSWIKHGTECTLCQCKNGHICCSVDPQCLQEL

SEQ ID NO: 16599 - protein, 198 aa, Homo sapiens
MEALILEPSLYTVKAILILDNDGDRLFAKYYDDTYPSVKEQKAFEKNIFNKTHRTDSEIALLEGLTVVYKSSIDLYFYVIGSSYENELMLMAVLNCLFDSLSQMLRTGSTQAGGLHESSSRQAWATQKNVEKRALLENMEGLFLAVDEIVDGGVILESDPQQVVHRVALRGEDVPLTEQTVSQVLQSAKEQIKWSLLR

SEQ ID NO: 16600 - protein, 136 aa, Homo sapiens
MTPHRLLPPLLLLLALLLAASPGGALARCPGCGQGVQAGCPGGCVEEEDGGSPAEGCAEAEGCLRREGQECGVYTPNCAPGLQCHPPKDDEAPLRALLLGRGRCLPARAPAVLSSPRTLRKLSPEPGATCSCRGES

SEQ ID NO: 16601 - protein, 1344 aa, Homo sapiens
MKSSGPVERLLRALGRRDSSRAASRPRKAEPHSFREKVFRKKPPVCAVCKVTIDGTGVSCRVCKVATHRKCEAKVTSACQALPPVELRRNTAPVRRIEHLGSTKSLNHSKQRSTLPRSFSLDPLMERRWDLDLTYVTERILAAAFPARPDEQRHRGHLRELAHVLQSKHRDKYLLFNLSEKRHDLTRLNPKVQDFGWPELHAPPLDKLCSICKAMETWLSADPQHVVVLYCKGNKGKLGVIVSAYMHYSKISAGADQALATLTMRKFCEDKVATELQPSQRRYISYFSGLLSGSIRMNSSPLFLHYVLIPMLPAFEPGTGFQPFLKIYQSMQLVYTSGVYHIAGPGPQQLCISLEPALLLKGDVMVTCYHKGGRGTDRTLVFRVQFHTCTIHGPQLTFPKDQLDEAWTDERFPFQASVEFVFSSSPEKIKGSTPRNDPSVSVDYNTTEPAVRWDSYENFNQHHEDSVDGSLTHTRGPLDGSPYAQVQRPPRQTPPAPSPEPPPPPMLSVSSDSGHSSTLTTEPAAESPGRPPPTAAERQELDRLLGGCGVASGGRGAGRETAILDDEEQPTVGGGPHLGVYPGHRPGLSRHCSCRQGYREPCGVPNGGYYRPEGTLERRRLAYGGYEGSPQGYAEASMEKRRLCRSLSEGLYPYPPEMGKPATGDFGYRAPGYREVVILEDPGLPALYPCPACEEKLALPTAALYGLRLEREAGEGWASEAGKPLLHPVRPGHPLPLLLPACGHHHAPMPDYSCLKPPKAGEEGHEGCSYTMCPEGRKLSYEIPTEEGGDRYPLPGHLASAGPLASAESLEPVSWREGPSGHSTLPRSPRDAPCSASSELSGPSTPLHTSSPVQGKESTRRQDTRSPTSAPTQRLSPGEALPPVSQAGTGKAPELPSGSGPEPLAPSPVSPTFPPSSPSDWPQERSPGGHSDGASPRSPVPTTLPGLRHAPWQGPRGPPDSPDGSPLTPVPSQMPWLVASPEPPQSSPTPAFPLAASYDTNGLSQPPLPEKRHLPGPGQQPGPWGPEQASSPARGISHHVTFAPLLSDNVPQTPEPPTQESQSNVKFVQDTSKFWYKPHLSRDQAIALLKDKDPGAFLIRDSHSFQGAYGLALKVATPPPSAQPWKGDPVEQLVRHFLIETGPKGVKIKGCPSEPYFGSLSALVSQHSISPISLPCCLRIPSKDPLEETPEAPVPTNMSTAADLLRQGAACSVLYLTSVETESLTGPQAVARASSAALSCSPRPTPAVVHFKVSAQGITLTDNQRKLFFRRHYPVNSITFSSTDPQDRRWTNPDGTTSKIFGFVAKKPGSPWENVCHLFAELDPDQPAGAIVTFITKVLLGQRK

SEQ ID NO: 16602 - protein, 662 aa, Homo sapiens
MAANVGSMFQYWKRFDLQQLQRELDATATVLANRQDESEQSRKRLIEQSREFKKNTPEIDALSKRSKEAEAAFLNVYKRLIDVPDPVPALDLGQQLQLKVQRLHDIETENQKLRETLEEYNKEFAEVKNQEVTIKALKEKIREYEQTLKNQAETIALEKEQKLQNDFAEKERKLQETQMSTTSKLEEAEHKVQSLQTALEKTRTELFDLKTKYDEETTAKADEIEMIMTDLERANQRAEVAQREAETLREQLSSANHSLQLASQIQKAPDVEQAIEVLTRSSLEVELAAKEREIAQLVEDVQRLQASLTKLRENSASQISQLEQQLSAKNSTLKQLEEKLKGQADYEEVKKELNILKSMEFAPSEGAGTQDAAKPLEVLLLEKNRSLQSENAALRISNSDLSGRCAELQVRITEAVATATEQRELIARLEQDLSIIQSIQRPDAEGAAEHRLEKIPEPIKEATALFYGPAAPASGALPEGQVDSLLSIISSQRERFRARNQELEAENRLAQHTLQALQSELDSLRADNIKLFEKIKFLQSYPGRGSGSDDTELRYSSQYEERLDPFSSFSKRERQRKYLSLSPWDKATLSMGRLVLSNKMARTIGFFYTLFLHCLVFLVLYKLAWSESMERDCATFCAKKFADHLHKFHENDNGAAAGDLWQ

SEQ ID NO: 16603 - protein, 963 aa, Homo sapiens
MATAAETSASEPEAESKAGPKADGEEDEVKAARTRRKVLSRAVAAATYKTMGPAWDQQEEGVSESDGDEYAMASSAESSPGEYEWEYDEEEEKNQLEIERLEEQLSINVYDYNCHVDLIRLLRLEGELTKVRMARQKMSEIFPLTEELWLEWLHDEISMAQDGLDREHVYDLFEKAVKDYICPNIWLEYGQYSVGGIGQKGGLEKVRSVFERALSSVGLHMTKGLALWEAYREFESAIVEAARLEKVHSLFRRQLAIPLYDMEATFAEYEEWSEDPIPESVIQNYNKALQQLEKYKPYEEALLQAEAPRLAEYQAYIDFEMKIGDPARIQLIFERALVENCLVPDLWIRYSQYLDRQLKVKDLVLSVHNRAIRNCPWTVALWSRYLLAMERHGVDHQVISVTFEKALNAGFIQATDYVEIWQAYLDYLRRRVDFKQDSSKELEELRAAFTRALEYLKQEVEERFNESGDPSCVIMQNWARIEARLCNNMQKARELWDSIMTRGNAKYANMWLEYYNLERAHGDTQHCRKALHRAVQCTSDYPEHVCEVLLTMERTEGSLEDWDIAVQKTETRLARVNEQRMKAAEKEAALVQQEEEKAEQRKRARAEKKALKKKKKIRGPEKRGADEDDEKEWGDDEEEQPSKRRRVENSIPAAGETQNVEVAAGPAGKCAAVDVEPPSKQKEKAASLKRDMPKVLHDSSKDSITVFVSNLPYSMQEPDTKLRPLFEACGEVVQIRPIFSNRGDFRGYCYVEFKEEKSALQALEMDRKSVEGRPMFVSPCVDKSKNPDFKVFRYSTSLEKHKLFISGLPFSCTKEELEEICKAHGTVKDLRLVTNRAGKPKGLAYVEYENESQASQAVMKMDGMTIKENIIKVAISNPPQRKVPEKPETRKAPGGPMLLPQTYGARGKGRTQLSLLPRALQRPSAAAPQAENGPAAAPAVAAPAATEAPKMSNADFAKLFLRK

SEQ ID NO: 16604 - protein, 1245 aa, Homo sapiens
MAVRKKDGGPNVKYYEAADTVTQFDNVRLWLGKNYKKYIQAEPPTNKSLSSLVVQLLQFQEEVFGKHVSNAPLTKLPIKCFLDFKAGGSLCHILAAAYKFKSDQGWRRYDFQNPSRMDRNVEMFMTIEKSLVQNNCLSRPNIFLCPEIEPKLLGKLKDIIKRHQGTVTEDKNNASHVVYPVPGNLEEEEWVRPVMKRDKQVLLHWGYYPDSYDTWIPASEIEASVEDAPTPEKPRKVHAKWILDTDTFNEWMNEEDYEVNDDKNPVSRRKKISAKTLTDEVNSPDSDRRDKKGGNYKKRKRSPSPSPTPEAKKKNAKKGPSTPYTKSKRGHREEEQEDLTKDMDEPSPVPNVEEVTLPKTVNTKKDSESAPVKGGTMTDLDEQEDESMETTGKDEDENSTGNKGEQTKNPDLHEDNVTEQTHHIIIPSYAAWFDYNSVHAIERRALPEFFNGKNKSKTPEIYLAYRNFMIDTYRLNPQEYLTSTACRRNLAGDVCAIMRVHAFLEQWGLINYQVDAESRPTPMGPPPTSHFHVLADTPSGLVPLQPKTPQGRQVDADTKAGRKGKELDDLVPETAKGKPELQTSASQQMLNFPDKGKEKPTDMQNFGLRTDMYTKKNVPSKSKAAASATREWTEQETLLLLEALEMYKDDWNKVSEHVGSRTQDECILHFLRLPIEDPYLEDSEASLGPLAYQPIPFSQSGNPVMSTVAFLASVVDPRVASAAAKSALEEFSKMKEEVPTALVEAHVRKVEEAAKVTGKADPAFGLESSGIAGTTSDEPERIEESGNDEARVEGQATDEKKEPKEPREGGGAIEEEAKEKTSEAPKKDEEKGKEGDSEKESEKSDGDPIVDPEKEKEPKEGQEEVLKEVVESEGERKTKVERDIGEGNLSTAAAAALAAAAVKAKHLAAVEERKIKSLVALLVETQMKKLEIKLRHFEELETIMDREREALEYQRQQLLADRQAFHMEQLKYAEMRARQQHFQQMHQQQQQPPPALPPGSQPIPPTGAAGPPAVHGLAVAPASVVPAPAGSGAPPGSLGPSEQIGQAGSTAGPQQQQPAGAPQPGAVPPGVPPPGPHGPSPFPNQQTPPSMMPGAVPGSGHPGVAGNAPLGLPFGMPPPPPPPAPSIIPFGSLADSISINLPAPPNLHGHHHHLPFAPGTLPPPNLPVSMANPLHPNLPATTTMPSSLPLGPGLGSAAAQSPAIVAAVQGNLLPSASPLPDPGTPLPPDPTAPSPGTVTPVPPPQ

SEQ ID NO: 16605 - protein, 119 aa, Homo sapiens
MKATIILLLLAQVSWAGPFQQRGLFDFMLEDEASGIGPEVPDDRDFEPSLGPVCPFRCQCHLRVVQCSDLGLDKVPKDLPPDTTLLDLQNNKITEIKDGDFKNLKNLHALILVNNKISK

SEQ ID NO: 16606 - protein, 131 aa, Homo sapiens
MAGRRLNLRWALSVLCVLLMAETVSGTRGSSTGAHISPQFPASGVNQTPVVDCRKVCGLNVSDRCDFIRTNPDCHSDGGYLDYLEGIFCHFPPSLLPLAVTLYVSWLLYLFLILGVTAAKFFCPNLSAIST

SEQ ID NO: 16607 - protein, 407 aa, Homo sapiens
MRLLAWLIFLANWGGARAEPGKFWHIADLHLDPDYKVSKDPFQVCPSAGSQPVPDAGPWGDYLCDSPWALINSSIYAMKEIEPEPDFILWTGDDTPHVPDEKLGEAAVLEIVERLTKLIREVFPGAFYCEKLPGPSGAGRIVVLNTNLYYTSNALTADMADPGQQFQWLEDVLTDASKAGDMVYIVGHVPPGFFEKTQNKAWFREGFNEKYLKVVRKHHRVIAGQFFGHHHTDSFRMLYDDAGVPISAMFITPGVTPWKTTLPGVVNGANNPAIRVFEYDRATLSLKDMVTYFMNLSQANAQGTPRWELEYQLTEAYGVPDASAHSMHTVLDRIAGDQSTLQRYYVYNSVSYSAGVCDEACSMQHVCAMRQVDIDAYTTCLYASGTTPVPQLPLLLMALLGLCTLVL

SEQ ID NO: 16608 - protein, 932 aa, Homo sapiens
TITAFVEPFVILLILVANAIVGVWQERNAENAIEALKEYEPEMGKVYRQDRKSVQRIKAKDIVPGDIVEIAGESVSVIKHTDPVPDPRAVNQDKKNMLFSGTNIAAGKAMGVVVATGVNTEIGKIRDEMVATEQERTPLQQKLDEFGEQLSKVISLICIAVWIINIGHFNDPVHGGSWIRGAIYYFKIAVALAVAAIPEGLPAVITTCLALGTRRMAKKNAIVRSLPSVETLGCTSVICSDKTGTLTTNQMSVCRMFILDRVEGDTCSLNEFTITGSTYAPIGEVHKDDKPVNCHQYDGLVELATICALCNDSALDYNEAKGVYEKVGEATETALTCLVEKMNVFDTELKGLSKIERANACNSVIKQLMKKEFTLEFSRDRKSMSVYCTPNKPSRTSMSKMFVKGAPEGVIDRCTHIRVGSTKVPMTSGVKQKIMSVIREWGSGSDTLRCLALATHDNPLRREEMHLEDSANFIKYETNLTFVGCVGMLDPPRIEVASSVKLCRQAGIRVIMITGDNKGTAVAICRRIGIFGQDEDVTSKAFTGREFDELNPSAQRDACLNARCFARVEPSHKSKIVEFLQSFDEITAMTGDGVNDAPALKKAEIGIAMGSGTAVAKTASEMVLADDNFSTIVAAVEEGRAIYNNMKQFIRYLISSNVGEVVCIFLTAALGFPEALIPVQLLWVNLVTDGLPATALGFNPPDLDIMNKPPRNPKEPLISGWLFFRYLAIGCYVGAATVGAAAWWFIAADGGPRVSFYQLSHFLQCKEDNPDFEGVDCAIFESPYPMTMALSVLVTIEMCNALNSLSENQSLLRMPPWENIWLVGSICLSMSLHFLILYVEPLPLIFQITPLNVTQWLMVLKISLPVILMDETLKFVARNYLEPGKECVQPATKSCSFSACTDGISWPFVLLIMPLVIWVYSTDTNFSDMFWS

SEQ ID NO: 16609 - protein, 137 aa, Homo sapiens
MGWLRPGPRPLCPPARASWAFSHRFPSPLAPRRSPTPFFMASLLCCGPKLAACGIVLSAWGVIMLIMLGIFFNVHSAVLIEDVPFTEKDFENGPQNIYNLYEQVSYNCFIAAGLYLLLGGFSFCQVRLNKRKEYMVR

SEQ ID NO: 16610 - protein, 686 aa, Homo sapiens
MKPSWLQCRKVTSAGGLGGPLPGSSPARGAGAALRALVVPGPRGGLGGRGCRALSSGSGSEYKTHFAASVTDPERFWGKAAEQISWYKPWTKTLENKHSPSTRWFVEGMLNICYNAVDRHIENGKGDKIAIIYDSPVTNTKATFTYKEVLEQVSKLAGVLVKHGIKKGDTVVIYMPMIPQAMYTMLACARIGAIHSLIFGGFASKELSSRIDHVKPKVVVTASFGIEPGRRVEYVPLVEEALKIGQHKPDKILIYNRPNMEAVPLAPGRDLDWDEEMAKAQSHDCVPVLSEHPLYILYTSGTTGLPKGVIRPTGGYAVMLHWSMSSIYGLQPGEVWWAASDLGWVVGHSYICYGPLLHGNTTVLYEGKPVGTPDAGAYFRVLAEHGVAALFTAPTAIRAIRQQDPGAALGKQYSLTRFKTLFVAGERCDVETLEWSKNVFRVPVLDHWWQTETGSPITASCVGLGNSKTPPPGQAGKSVPGYNVMILDDNMQKLKARCLGNIVVKLPLPPGAFSGLWKNQEAFKHLYFEKFPGYYDTMDAGYMDEEGYLYVMSRVDDVINVAGHRISAGAIEESILSHGTVADCAVVGKEDPLKGHVPLALCVLRKDINATEEQVLEEIVKHVRQNIGPVAAFRNAVFVKQLPKTRSGKIPRSALSAIVNGKPYKITSTIEDPSIFGHVEEMLKQA

SEQ ID NO: 16611 - protein, 164 aa, Homo sapiens
MGVDIRHNKDRKVRRKEPKSQDIYLRLLVKLYRFLARRTNSTFNQVVLKRLFMSRTNRPPLSLSRMIRKMKLPGRENKTAVVVGTITDDVRVQEVPKLKVCALRVTSRARSRILRAGGKILTFDQLALDSPKGCGTVLLSGPRKGREVYRHFGKAPGTPHSHTK

SEQ ID NO: 16612 - protein, 471 aa, Homo sapiens
MSEESDMDKAIKETSILEEYSINWTQKLGAGISGPVRVCVKKSTQERFALKILLDRPKARNEVRLHMMCATHPNIVQIIEVFANSVQFPHESSPRARLLIVMEMMEGGELFHRISQHRHFTEKQASQVTKQIALALRHCHLLNIAHRDLKPENLLFKDNSLDAPVKLCDFGFAKIDQGDLMTPQFTPYYVAPQVLEAQRRHQKEKSGIIPTSPTPYTYNKSCDLWSLGVIIYVMLCGYPPFYSKHHSRTIPKDMRRKIMTGSFEFPEEEWSQISEMAKDVVRKLLKVKPEERLTIEGVLDHPWLNSTEALDNVLPSAQLMMDKAVVAGIQQAHAEQLANMRIQDLKVSLKPLHSVNNPILRKRKLLGTKPKDSVYIHDHENGAEDSNVALEKLRDVIAQCILPQAGENEDEKLNEVMQEAWKYNRECKLLRDTLQSFSWNGRGFTDKVDRLKLAEIVKQVIEEQTTSHESQ

SEQ ID NO: 16613 - protein, 72 aa, Homo sapiens
MKMWLLVSHLVIISITTCLAEFTWYRRYGHGVSEEDKGFGPIFEEQPINTIYPEESLEGKVSLNCRARASPF

SEQ ID NO: 16614 - protein, 675 aa, Homo sapiens
MAVLFPLSSCGWAAISLFLSAQSCYSASKQCQSQSPSCRLPGARISGDWSRRTKWRSHRLPRPGPVVRSEAGRDKGGVRGGGVAAAWGWCCRFPSCCSCASPEDTFSVVWFGVGPGMEGHAKGRQSHRCLWRLGEGGGDLRSVPYGDDFCMSFGNCPRDLCGAGIFGKGKGFLVFRLTPQVLVMNRIRIHVLPTNRGRITPVPRSQEPLSCAFTHRPCSHPRLEGQEFCIKHILEDKNAPFKQCSYISTKNGKRCPNAAPKPEKKDGVSFCAEHVRRNALALHAQMKKTNPGPVGETLLCQLSSYAKTELGSQTPESSRSEASRILDEDSWSDGEQEPITVDQTWRGDPDSEADSIDSDQEDPLKHAGVYTAEEVALIMREKLIRLQSLYIDQFKRLQHLLKEKKRRYLHNRKVEHEALGSSLLTGPEGLLAKERENLKRLKCLRRYRQRYGVEALLHRQLKERRMLATDGAAQQAHTTRSSQRCLAFVDDVRCSNQSLPMTRHCLTHICQDTNQVLFKCCQGSEEVPCNKPVPVSLSEDPCCPLHFQLPPQMYKPEQVLSVPDDLEAGPMDLYLSAAELQPTESLPLEFSDDLDVVGDGMQCPPSPLLFDPSLTLEDHLVKEIAEDPVDILGQMQMAGDGCRSQGSRNSEKASAPLSQSGLATANGKPEPTSIS

SEQ ID NO: 16615 - protein, 201 aa, Homo sapiens
MTLRPSLLPLHLLLLLLLSAAVCRAEAGLETESPVRTLQVETLVEPPEPCAEPAAFGDTLHIHYTGSLVDGRIIDTSLTRDPLVIELGQKQVIPGLEQSLLDMCVGEKRRAIIPSHLAYGKRGFPPSVPADAVVQYDVELIALIRANYWLKLVKGILPLVGMAMVPALLGLIGYHLYRKANRPKVSKKKLKEEKRNKSKKK

SEQ ID NO: 16616 - protein, 108 aa, Homo sapiens
MNCQQLWLGFLLPMTVSGRVLGLAEVAPVDYLSQYGYLQKPLEGSNNFKPEDITEALRPLEKEAPDFPHLEPALHPSTPHSPGSPASSLPGLEQCGSLDLPRGAGWCG

SEQ ID NO: 16617 - protein, 123 aa, Homo sapiens
MRFFVPLFLVGILFPAILAKQFTKCELSQLLKDIDGYGGIALPELICTMFHTSGYDTQAIVENNESTEYGLFQISNKLWCKSSQVPQSRNICDISCDKFLDDDITDDIMCAKKILDIKGIDYW

SEQ ID NO: 16618 - protein, 179 aa, Homo sapiens
MKATIILLLLAQVSWAGPFQQRGLFDFMLEDEASGIGPEVPDDRDFEPSLGPVCPFRCQCHLRVVQCSDLGLDKVPKDLPPDTTLLDLQNNKITEIKDGDFKNLKNLHALILVNNKISKVSPGAFTPLVKLERLYLSKNQLKELPEKMPKTLQELRAHENEITKVRKVTFNGLNQMIVI

SEQ ID NO: 16619 - protein, 4284 aa, Homo sapiens
MGLLLVFPLIQSQSRTDPSLCNITAEVLLNCLRDCQPLSLTKEPADCLNGIETLLCSWLEETSDTGRHIPHKQKENAAAALVALACARGSLKTFVHTVHLLQKQTDLGSLPVADVLYRLLLLEGGPGSPSCLLGGKHIVSWGYEDMLPAPDSNTGSSSENKDADLGRCLTADGLYLYTTNSVGRGVSKLGSGLHGTLRGFVYCRNEELEPGWVAFGSGSLLHRPVSFDNKPHSLFQVIDQNTLQVCQVVPMPANHLPIGSTMSTVHLSSDGTYFYWIWSPASLNEKTPKGHSVFMDIFELVVENGVFVANPLQERTILMRKEGESAKSINEMLLSRLSRYRASPSATLAALTGSTISNTLKEDQAANTSCGLPLKMLRKTPIYTCGTYLVMLVPPPGGSGSSATRSLFGGTSGLSSLKILASSLVYNISDGQFTSRADLIDAAGSSLGRGALVPGLGACYDTVNNMLWTCSNDYIDQWCNPGNQAFHYVCQRLGVSHIITEPKEEAITTNEVINQLLHHVGAMCIHQLNLLATNPNLPITSVLGKQHPIEAHHLSSICDIMEKAMVNGDTCIIRCILVVFQVVFKFFFSPQTERNRDIIRRSGLLLWQLLMAPKDQICPEIQKEVCLAISSGLNILYPGETEINNLLKLVLTEGERNSGLSQLRDVILTNLAEQLQNNRFGSDEDDHYRLNDELLHYILKIVVRESCILITKCQTVSKDDFQKLLSTVPAASSCLRYLMAVQNHLLSNTILIKPDENDDSDSSLQGETLKVQELKVSILALATQILTGCDEVLEMLQQVTTALINSDIADREQRLKGLEQVTKATMLGHLLPVLLTSLMHPNLQTLIMADALMPQLVQLVLYTSQTALLLKTQCPVFAEVGCSPCGAPDQKCRLFPDERMLEEKEEPGFLTGLKIPAPWAAGKTVETVHPVRDNYKFKETVHIPGARCLYLRFDSRCSSQYDYDKLVIYAGPNTNSRKVAEYGGNTLGYGSRSVLGTGWPKDLVKCISPPSLNFKVEGDTVTFSFEMRSGREHNTPDKAMWGFACTVRAQESSEDVSGGLPFLVDLALGLSVLACSMLRILYNGPEITKEEEACQELLRSKLLQRCQWQVEANGVISPALTPSPSPLPLTIEEDREFTYPSDVLVPPVGNYFDLPRIRLPPGIMIKLREISGRARPQFRPSIKEVIQPDVMEEMVVSCVIKHLNLVDALQSLINFQYQEEHAEEYDLLCKIMGETFKKLNAMERQLQSVAELEQKWQSEVDDAMQGKLENNMPFFYDYHFNENKMKELELLCSMKEVSFDGNDLENMVLSLREKFLQEVNSLIQKPSHPLAKTKTLVKSLMNRAELLLHVTIAAQSGLTRSISGTPAETPACKSASETKVISHAVRQPVFLRSMSAPSDLEMIGNEDLEFTRANQRRRHVTSHRSSSFTLLQSLAIEDSRDKPTYSVLLGQLFAFIGTNPDQAVSSSSFLLAAQTRWRRGNTRKQALVHMRELLTAAVRVGGVTHLVGPVTMVLQGGPRIEELTCGGMVEQVQEAFGETMTSVVSLCARYPIACANSIGLLCTIPYTRSEEKCLVRSGLVQLMDRLCSLSNQTESSSSEKQTKKQKVATMAWAAFQVLANRCVEWEKEEGGSTEAVHSGLARQVSSLLTNHLARATECCGNQAAGNDALQDVLSLLNDLSRSHIGKAILSQPACVSKLLSLLLDQRPSPKLVLIILQLCRAALPLMSVEDCGNVELPPWSYSVPSLNSEQEDPSDPASKIASLLLAKLADYVVPGCQTVLSPTASEPDTTLTKTSPKNSLKGDKDPGEESEAVDGKLSIFIHKREDQSSHEVLQPLLSSSEGRPFRLGTGANMEKVVKMDRDMTKGGCCEVITEEAAAALRKATKWAQSGLIVSIGPPVESINPETVSGLSTGDKKKTAQTSICRERNSELARTDPVRPFISGHVANSMAAEVIALLHSLLMAPESNAAQIWTTTAEKVLSRALMYIPQLGKYAESILENGSSSGRKLAKLQRIARQAVAALCALGGFKETIKIGSEVQVLGRGISGSIGVVASINEQEGIATVRFPPIDCRKTSQASDTLTIPLSRLCVPRSEALPLHKLSITEKVVQAVQSMLLPQEGSLSIHTSLPATGDGSAPVMAVVRLLAEIRTRACLVMAQLLEDSLFCEEFIQQCPAAVEVLNLVAQECSAGERLAVVEVQCERLRMLYRDCARPPPPPLQADRRQPKEITWSPSRVFPPVRACMFSSHLTSVTFLADPSAGGGLPRGTFIYATSPLPVQAPSFYWEIEIVSYGDTDDDTGPIVSFGFTTEAEKRDGAWTNPVGTCLFHNNGRAVHYNGSSLLQWKSVRLDVTLSPGDVAGIGWERTEGTPPPPGQPAKGRVYFTYCGQRLSPYLEDVSGGMWPVVHIQKKNTKTRANFGSRPFAYAEGQAHRNAADLCTDLAEEISANFEALPFAMASDSDNDAGTSIASDPGTHGPPCRIAAVATAQQQYDSDTSCHYKVELSYENFITSGPDPHPPPIADDESDDDDDDDIPQEDHYALLVKAWETKVFPTIRRRFRNEAERKSGLDQIKGALQLGMVDIARQTVEFLYEENGGIPRDLYLPTIEDIKDEANKFTIDKVRKGLTVVTRSPDSNNVASSAVGTALPKFAIRGMLKTFGLHGVVLDVDSVNELVQVETYLRSEGVLVRYWYPIDMLERPPAGYRRTATNGLVTLDNTNLQIHRELLRCEAALARLYCRMALLNIFAPKLPHLFTRLFHIPAIRDITLEHLQLLSNQLLAPPLPDGTISSSSILLAQSLQHCIHSQNCSATDLFYQGNSQTVREWLNVAITRTLHQGEESLLELTKQICSFLQTAPEQFPSEEFPISESKVNMDVNFPGAAFVVVSCKESQSGFRKDSSLYKAPWARVLVYGLGHKVKRNGQLNLIEAACYPRDASPANTGLAPPPTADQYPSVVLSTDRVHIKLGVSPPPGAVLVLHSLPLEFPLAMAFAEQLLSWKSEDSEGKSEDEPDTIPTSVLLQVVELLGNFLWTTDMAACVKELVFHLLAELLRTVHTLEQRRHPAGLSSSIALQLNPCLAMLMALQSELHKLYDEETQNWVSGGACGGSGGAAAGDQGRFSTYFHALMEGCLAVAEVTLPTNMSVTASGVTSATAPNLSDSSSSSSSSPGQTPQSPSLLSKRKKVKMKREKASSSGKRQSSRTVDSDPTVLSIGGSKPEDMLWFHRALTLLIILRHLTRKDPQGLGVTSDAIADACQALVGPTAHSRLLVISGIPTHLDEGVVRGAIRKACNAHGGVFKDEIYIPLQEEDTKKPKDKAEGGDGKVEPEKTLAFPGTDSMEVSTSSSLTPAMSISASASTSQASICSSQGISQTVSDLSVDPLPAGLELPIPPGLLEPHAVSSQESLDISLCSTGSLGSLGSLGEPLDNAETASVSDMGSMYTVTSLDNQPLAARPIKGFAVVEIRSRAKIEKIRASLFNNNDLIGLSSLDGEDELMEMSTEEILTVSVVNQSLFDTQGSPGLEDYFNDKSIKGEKLVPGAREVLTEIFKSCAHSEQTLSLTPAKPIRVSDIYLSKEQINSQTPGNLLHLFFTNVRPPKKVLEDQLTQILRKYGVPKPKFDKSKYSKAGKEQHPVKVVSTKRPITKPPAKDKAVLNSVSRTALSEKKPTVKPKSPEKSKPDEKDPEKSPTKKQEVPEEKYLTLEGFHKFVIDRARQDIRSVWRAILSCGYDLHFERCACIDVRHAQKASRKWTLEMDVALVQYINQLCRHLAITPARLHPHEVYLDPADAADPRVACLLNVPIESLRLRFALLQSLNTTLETFFLPLVELRQTPMYTHSIAALLKEAKGLIFYDTKVTVMNRVLNATVQRTADHAAPEITLDPLEIVGGEIRASENSYFCQAARQLASVPSSQLCVKLASGGDPTYAFNIRFTGEEVHGTSGSFRHFLWQVCKELQSSSLSLLLLCPSSAVNKNKGKYILTPSPITYGEEQLLHFLGQLLGIAIRADVPLPLDLLPSFWKTLVGEPLDPEQDLQEADILTYNYVKKFESINDETELEALCAEIASQHLATESPDSPNKPCCRFTYLTMTGEEVELCSRGRHILVAWENKDIYAAAIRSLRLRELQNVECVTAVRAGLGSIIPLQLLTMLSPLEMELRTCGLPYINLEFLKAHTMYQVGLMETDQHIEFFWGALEMFTQEELCKFIKFACNQERIPFTCPCKDGGPDTAHVPPYPMKIAPPDGTAGSPDSRYIRVETCMFMIKLPQYSSLEIMLEKLRCAIHYREDPLSG

SEQ ID NO: 16620 - protein, 76 aa, Homo sapiens
MNSVGEACTDMKREYDQCFNRWFAEKFLKGDSSGDPCTDLFKRYQQCVQKAIKEKEIPIEGLEFMGHGKEKPENSS

SEQ ID NO: 16621 - protein, 256 aa, Homo sapiens
MIAFLVLAGGFSKFQAEFSLHCETNLDGSCSSSSPPLPVLGLGGLRISSDSSSDIESDLDRDPNSATDSDGSPLSNSQPSFPVEILPFLYLGCAKDSTNLDVLEEFGIKYILNVTPNLPNLFENAGEFKYKQIPISDHWSQNLSQFFPEAISFIDEARGKNCGVLVHCLAGISRSVTVTVAYLMQKLNLSMNDAYDIVKMKKSNISPNFNFMGQLLDFERTLGLSSPCDNRVPAQQLYFTTPSNQNVYQVDSLQST

SEQ ID NO: 16622 - protein, 137 aa, Homo sapiens
MKALIVLGLVLLSVTVQGKVFERCELARTLKRLGMDGYRGISLANWMCLAKWESGYNTRATNYNAGDRSTDYGIFQINSRYWCNDGKTPGAVNACHLSCSGWHGEIVVKTEMSVSMFKVVECNSRIFLLQLILSLSH

SEQ ID NO: 16623 - protein, 136 aa, Homo sapiens
MDFPCLWLGLLLPLVAALDFNYHRQEGMEAFLKTVAQNYSSVTHLHSIGKSVKGRNLWVLVVGRFPKEHRIGIPEFKYVANMHGDETVGRELLLHLIDYLVTSDGKDPEITNLINSTRIHIMPSMNPDGFEAVKKP

SEQ ID NO: 16624 - protein, 691 aa, Homo sapiens
MEESPLSRAPSRGGVNFLNVARTYIPNTKVECHYTLPPGTMPSASDWIGIFKVEAACVRDYHTFVWSSVPESTTDGSPIHTSVQFQASYLPKPGAQLYQFRYVNRQGQVCGQSPPFQFREPRPMDELVTLEEADGGSDILLVVPKATVLQNQLDESQQERNDLMQLKLQLEGQVTELRSRVQELERALATARQEHTELMEQYKGISRSHGEITEERDILSRQQGDHVARILELEDDIQTISEKVLTKEVELDRLRDTVKALTREQEKLLGQLKEVQADKEQSEAELQVAQQENHHLNLDLKEAKSWQEEQSAQAQRLKDKVAQMKDTLGQAQQRVAELEPLKEQLRGAQELAASSQQKATLLGEELASAAAARDRTIAELHRSRLEVAEVNGRLAELGLHLKEEKCQWSKERAGLLQSVEAEKDKILKLSAEILRLEKAVQEERTQNQVFKTELAREKDSSLVQLSESKRELTELRSALRVLQKEKEQLQEEKQELLEYMRKLEARLEKVADEKWNEDATTEDEEAAVGLSCPAALTDSEDESPEDMRLPPYGLCERGDPGSSPAGPREASPLVVISQPAPISPHLSGPAEDSSSDSEAEDEKSVLMAAVQSGGEEANLLLPELGSAFYDMASGFTVGTLSETSTGGPATPTWKECPICKERFPAESDKDALEDHMDGHFFFSTQDPFTFE

SEQ ID NO: 16625 - protein, 104 aa, Homo sapiens
MKALIVLGLVLLSVTVQGKVFERCELARTLKRLGMDGYRGISLANWMCLAKWESGYNTRATNYNAGDRSTDYGIFQINSRYWCNDGKTPGAVNACHLSCSGKTS

SEQ ID NO: 16626 - protein, 347 aa, Homo sapiens
MKPALLEVMRMNRICRMVLATCLGSFILVIFYFQIMRRNPFGVDICCRKGSRSPLQELYNPIQLELSNTAVLHQMRRDQVTDTCRANSATSRKRRVLTPNDLKHLVVDEDHELIYCYVPKVACTNWKRLMMVLTGRGKYSDPMEIPANEAHVSANLKTLNQYSIPEINHRLKSYMKFLFVREPFERLVSAYRNKFTQKYNISFHKRYGTKIIKRQRKNATQEALRKGDDVKFEEFVAYLIDPHTQREEPFNEHWQTVYSLCHPCHIHYDLVGKYETLEEDSNYVLQLAGVGSYLKFPTYAKSTRTTDEMTTEFFQNISSEHQTQLYEVYKLDFLMFNYSVPSYLKLE

SEQ ID NO: 16627 - protein, 42 aa, Homo sapiens
MAPSVPAAEPEYPKGIRAVLLGPPGAGKGTQLEKLKFEWLVL

SEQ ID NO: 16628 - protein, 612 aa, Homo sapiens
MAAETLLSSLLGLLLLGLLLPASLTGGVGSLNLEELSEMRYGIEILPLPVMGGQSQSSDVVIVSSKYKQRYECRLPAGAIHFQREREEETPAYQGPGIPELLSPMRDAPCLLKTKDWWTYEFCYGRHIQQYHMEDSEIKGEVLYLGYYQSAFDWDDETAKASKQHRLKRYHSQTYGNGSKCDLNGRPREAEVRFLCDEGAGISGDYIDRVDEPLSCSYVLTIRTPRLCPHPLLRPPPSAAPQAILCHPSLQPEEYMAYVQRQADSKQYGDKIIEELQDLGPQVWSETKSGVAPQKMAGASPTKDDSKDSDFWKMLNEPEDQAPGGEEVPAEEQDPSPEAADSASGAPNDFQNNVQVKVIRSPADLIRFIEELKGGTKKGKPNIGQEQPVDDAAEVPQREPEKERGDPERQREMEEEEDEDEDEDEDEDERQLLGEFEKELEGILLPSDRDRLRSEVKAGMERELENIIQETEKELDPDGLKKESERDRAMLALTSTLNKLIKRLEEKQSPELVKKHKKKRVVPKKPPPSPQPTGKIEIKIVRPWAEGTEEGARWLTDEDTRNLKEIFFNILVPGAEEAQKERQRQKELESNYRRVWGSPGGEGTGDLDEFDF

SEQ ID NO: 16629 - protein, 575 aa, Homo sapiens
MDLVLKRCLLHLAVIGALLAVGATKGSQVWGGQPVYPQETDDACIFPDGGPCPSGSWSQKRSFVYVWKTWGQYWQVLGGPVSGLSIGTGRAMLGTHTMEVTVYHRRGSRSYVPLAHSSSAFTITDQVPFSVSVSQLRALDGGNKHFLRNQPLTFALQLHDPSGYLAEADLSYTWDFGDSSGTLISRALVVTHTYLEPGPVTAQVVLQAAIPLTSCGSSPVPGTTDGHRPTAEAPNTTAGQVPTTEVVGTTPGQAPTAEPSGTTSVQVPTTEVISTAPVQMPTAESTGMTPEKVPVSEVMGTTLAEMSTPEATGMTPAEVSIVVLSGTTAAQVTTTEWVETTARELPIPEPEGPDASSIMSTESITGSLGPLLDGTATLRLVKRQVPLDCVLYRYGSFSVTLDIVQGIESAEILQAVPSGEGDAFELTVSCQGGLPKEACMEISSPGCQPPAQRLCQPVLPSPACQLVLHQILKGGSGTYCLNVSLADTNSLAVVSTQLIMPGQEAGLGQVPLIVGILLVLMAVVLASLIYRRRLMKQDFSVPQLPHSSSHWLRLPRIFCSCPIGENSPLLSGQQV

SEQ ID NO: 16630 - protein, 573 aa, Homo sapiens
MARAVGPERRLLAVYTGGTIGMRSELGVLVPGTGLAAILRTLPMFHDEEHARARGLSEDTLVLPPASRNQRILYTVLECQPLFDSSDMTIAEWVCLAQTIKRHYEQYHGFVVIHGTDTMAFAASMLSFMLENLQKTVILTGAQVPIHALWSDGRENLLGALLMAGQYVIPEVCLFFQNQLFRGNRATKVDARRFAAFCSPNLLPLATVGADITINRELVRKVDGKAGLVVHSSMEQDVGLLRLYPGIPAALVRAFLQPPLKGVVMETFGSGNGPTKPDLLQELRVATERGLVIVNCTHCLQGAVTTDYAAGMAMAGAGVISGFDMTSEAALAKLSYVLGQPGLSLDVRKELLTKDLRGEMTPPSVEERRPSLQGNTLGGGVSWLLSLSGSQEADALRNALVPSLACAAAHAGDVEALQALVELGSDLGLVDFNGQTPLHAAARGGHTEAVTMLLQRGVDVNTRDTDGFSPLLLAVRGRHPGVIGLLREAGASLSTQELEEAGTELCRLAYRADLEGLQVWWQAGADLGQPGYDGHSALHVAEAAGNLAVVAFLQSLEGAVGAQAPCPEVLPGV

SEQ ID NO: 16631 - protein, 528 aa, Homo sapiens
MAGRRLNLRWALSVLCVLLMAETVSGTRGSSTGAHISPQFPASGVNQTPVVDCRKVCGLNVSDRCDFIRTNPDCHSDGGYLDYLEGIFCHFPPSLLPLAVTLYVSWLLYLFLILGVTAAKFFCPNLSAISTTLKLSHNVAGVTFLAFGNGAPDIFSALVAFSDPHTAGLALGALFGYLGLYVFYVVTVILCTWIYQRQRRGSLFCPMPVTPEILSDSEEDRVSSNTNSYDYGDEYRPLFFYQETTAQILVRALNPLDYMKWRRKSAYWKALKVFKLPVEFLLLLTVPVVDPDKDDQNWKRPLNCLHLVISPLVVVLTLQSGTYGVYEIGGLVPVWVVVVIAGTALASVTFFATSDSQPPRLHWLFAFLGFLTSALWINAAATEVVNILRSLGVVFRLSNTVLGLTLLAWGNSIGDAFSDFTLARQGYPRMAFSACFGGIIFNILVGVGLGCLLQISRSHTEVKLEPDGLLVWVLAGALGLSLVFSLVSVPLQCFQLSRVYGFCLLLFYLNFLVVALLTEFGVIHLKSM

SEQ ID NO: 16632 - protein, 270 aa, Homo sapiens
MKAGAFPPAPTAVPLHPSWAYVDPSSSSSYDNGFPTGDHELFTTFSWDDQKVRRVFVRKVYTILLIQLLVTLAVVALFTFCDPVKDYVQANPGWYWASYAVFFATYLTLACCSGPRRHFPWNLILLTVFTLSMAYLTGMLSSYYNTTSVLLCLGITALVCLSVTVFSFQTKFDFTSCQGVLFVLLMTLFFSGLILAILLPFQYVPWLHAVYAALGAGVFTLFLALDTQLLMGNRRHSLSPEEYIFGALNIYLDIIYIFTFFLQLFGTNRE

SEQ ID NO: 16633 - protein, 112 aa, Homo sapiens
MCGDCVEKEYPNRGNTCLENGSFLLNFTGCAVCSKRDFMLITNKSLKEEDGEEIVTYDHLCKNCHHVIARHEYTFSIMDEFQEYTMLCLLCGKAEDTISILPDDPRQMTLLF

SEQ ID NO: 16634 - protein, 623 aa, Homo sapiens
MVIGIPLFFLELSVGQRIRRGSIGVWNYISPKLGGIGFASCVVCYFVALYYNVIIGWSLFYFSQSFQQPLPWDQCPLVKNASHTFVEPECEQSSATTYYWYREALNISSSISESGGLNWKMTICLLAAWVMVCLAMIKGIQSSGKIIYFSSLFPYVVLICFLIRAFLLNGSIDGIRHMFTPKLEIMLEPKVWREAATQVFFALGLGFGGVIAFSSYNKRDNNCHFDAVLVSFINFFTSVLATLVVFAVLGFKANVINEKCITQNSETIMKFLKMGNISQDIIPHHINLSTVTAEDYHLVYDIIQKVKEEEFPALHLNSCKIEEELNKAVQGTGLAFIAFTEAMTHFPASPFWSVMFFLMLVNLGLGSMFGTIEGIVTPIVDTFKVRKEILTVICCLLAFCIGLIFVQRSGNYFVTMFDDYSATLPLLIVVILENIAVCFVYGIDKFMEDLKDMLGFAPSRYYYYMWKYISPLMLLSLLIASVVNMGLSPPGYNAWIEDKASEEFLSYPTWGLVVCVSLVVFAILPVPVVFIVRRFNLIDDSSGNLASVTYKRGRVLKEPVNLEGDDTSLIHGKIPSEMPSPNFGKNIYRKQSGSPTLDTAPNGRYGIGYLMADIMPDMPESDL

SEQ ID NO: 16635 - protein, 72 aa, Homo sapiens
MKGRFLFPLRLLLWMCLHLQRQASELHQPSMPGCPLTSSSRLFDNAQMHQFLNIHVKFENCTFGEIKFYIQL

SEQ ID NO: 16636 - protein, 304 aa, Homo sapiens
MSYVVTKTKAINGKYHRFLGRHFPRFYVLYTIFMKGLQMLWADAKKARRIKTNMWKHNIKFHQLPYREMEHLRQFRQDVTKCLFLGIISIPPFANYLVFLLMYLFPRQLLIRHFWTPKQQTDFLDIYHAFRKQSHPEIISYLEKVIPLISDAGLRWRLTDLCTKIQRGTHPAIHDILALRECFSNHPLGMNQLQALHVKALSRAMLLTSYLPPPLLRHRLKTHTTVIHQLDKALAKLGIGQLTAQEVKSACYLRGLNSTHIGEDRCRTWLGEWLQISCSLKEAELSLLLHNVVLLSTNYLGTRR

SEQ ID NO: 16637 - protein, 105 aa, Homo sapiens
MRQPYLSSREVSSSRKRWRTFPVDCVAMCGDCVEKEYPNRGNTCLENGSFLLNFTGCAVCSKRDFMLITNKSLKEEDGEEIVTYDRVYHAVSVMRQSRRYYQYSP

SEQ ID NO: 16638 - protein, 37 aa, Homo sapiens
MPAGVPMSTYLKMFAASLLAMCAGAEVVHRYYRPDLV

SEQ ID NO: 16639 - protein, 599 aa, Homo sapiens
MENCLGESRHEVEKSEISENTDASGKIEKYNVPLNRLKMMFEKGEPTQTKILRAQSRSASGRKISENSYSLDDLEIGPGQLSSSTFDSEKNESRRNLELPRLSETSIKDRMAKYQAAVSKQSSSTNYTNELKASGGEIKIHKMEQKENVPPGPEVCITHQEGEKISANENSLAVRSTPAEDDSRDSQVKSEVQQPVHPKPLSPDSRASSLSESSPPKAMKKFQAPARETCVECQKTVYPMERLLANQQVFHISCFRCSYCNNKLSLGTYASLHGRIYCKPHFNQLFKSKGNYDEGFGHRPHKDLWASKNENEEILERPAQLANARETPHSPGVEDAPIAKVGVLAASMEAKASSQQEKEDKPAETKKLRIAWPPPTELGSSGSALEEGIKMSKPKWPPEDEISKPEVPEDVDLDLKKLRRSSSLKERSRPFTVAASFQSTSVKSPKTVSPPIRKGWSMSEQSEESVGGRVAERKQVENAKASKKNGNVGKTTWQNKESKGETGKRSKEGHSLEMENENLVENGADSDEDDNSFLKQQSPQEPKSLNWSSFVDNTFAEEFTTQNQKSQDVELWEGEVVKELSVEEQIKRNRYYDEDEDEE

SEQ ID NO: 16640 - protein, 71 aa, Homo sapiens
MSPAPRPPRCLLLPLLTLGTALASLGSAQSSSFSPESLEELYNWGELPLPRFPWALLSALEPPDKHLDSAQ

SEQ ID NO: 16641 - protein, 158 aa, Homo sapiens
MVALPMVLVLLLVLSRGESELDAKIPSTGDATEWRNPHLSMLGSCQPAPSCQKCILSHPSCAWCKQLNFTASGEAEARRCARREELLARGCPLEELEEPRGQQEVLQDQPLSQGARGEGATQLAPQRVRVTLRPGEPQQLQVRFLRAEGYPVDLYYLM

SEQ ID NO: 16642 - protein, 736 aa, Homo sapiens
MEALIPVINKLQDVFNTVGADIIQLPQIVVVGTQSSGKSSVLESLVGRDLLPRGTGIVTRRPLILQLVHVSQEDKRKTTGEENGVEAEEWGKFLHTKNKLYTDFDEIRQEIENETERISGNNKGVSPEPIHLKIFSPNVVNLTLVDLPGMTKVPVGDQPKDIELQIRELILRFISNPNSIILAVTAANTDMATSEALKISREVDPDGRRTLAVITKLDLMDAGTDAMDVLMGRVIPVKLGIIGVVNRSQLDINNKKSVTDSIRDEYAFLQKKYPSLANRNGTKYLARTLNRLLMHHIRDCLPELKTRINVLAAQYQSLLNSYGEPVDDKSATLLQLITKFATEYCNTIEGTAKYIETSELCGGARICYIFHETFGRTLESVDPLGGLNTIDILTAIRNATGPRPALFVPEVSFELLVKRQIKRLEEPSLRCVELVHEEMQRIIQHCSNYSTQELLRFPKLHDAIVEVVTCLLRKRLPVTNEMVHNLVAIELAYINTKHPDFADACGLMNNNIEEQRRNRLARELPSAVSRDKSSKVPSALAPASQEPSPAASAEADGKLIQDSRRETKNVASGGGGVGDGVQEPTTGNWRGMLKTSKAEELLAEEKSKPIPIMPASPQKGHAVNLLDVPVPVARKLSAREQRDCEVIERLIKSYFLIVRKNIQDSVPKAVMHFLVNHVKDTLQSELVGQLYKSSLLDDLLTESEDMAQRRKEAADMLKALQGASQIIAEIRETHLW

SEQ ID NO: 16643 - protein, 62 aa, Homo sapiens
MKMWLLVSHLVIISITTCLAEFTWYRRYGHGVSEEDKGFGPIFEEQPINTIYPEESLEGKVS

SEQ ID NO: 16644 - protein, 1032 aa, Homo sapiens
MAERGGDGGESERFNPGELRMAQQQALRFRGPAPPPNAVMRGPPPLMRPPPPFGMMRGPPPPPRPPFGRPPFDPNMPPMPPPGGIPPPMGPPHLQRPPFMPPPMSSMPPPPGMMFPPGMPPVTAPGTPALPPTEEIWVENKTPDGKVYYYNARTRESAWTKPDGVKVIQQSELTPMLAAQAQVQAQAQAQAQAQAQAQAQAQAQAQAQAQAQAQAQAQAQAQAQAQAQAQAQAQAQAQAQAQVQAQVQAQVQAQAVGASTPTTSSPAPAVSTSTSSSTPSSTTSTTTTATSVAQTVSTPTTQDQTPSSAVSVATPTVSVSTPAPTATPVQTVPQPHPQTLPPAVPHSVPQPTTAIPAFPPVMVPPFRVPLPGMPIPLPGVAMMQIVSCPYVKTVATTKTGVLPGMAPPIVPMIHPQVAIAASPATLAGATAVSEWTEYKTADGKTYYYNNRTLESTWEKPQELKEKEKLEEKIKEPIKEPSEEPLPMETEEEDPKEEPIKEIKEEPKEEEMTEEEKAAQKAKPVATAPIPGTPWCVVWTGDERVFFYNPTTRLSMWDRPDDLIGRADVDKIIQEPPHKKGMEELKKLRHPTPTMLSIQKWQFSMSAIKEEQELMEEINEDEPVKAKKRKRDDNKDIDSEKEAAMEAEIKAARERAIVPLEARMKQFKDMLLERGVSAFSTWEKELHKIVFDPRYLLLNPKERKQVFDQYVKTRAEEERREKKNKIMQAKEDFKKMMEEAKFNPRATFSEFAAKHAKDSRFKAIEKMKDREALFNEFVAAARKKEKEDSKTRGEKIKSDFFELLSNHHLDSQSRWSKVKDKVESDPRYKAVDSSSMREDLFKQYIEKIAKNLDSEKEKELERQARIEASLREREREVQKARSEQTKEIDREREQHKREEAIQNFKALLSDMVRSSDVSWSDTRRTLRKDHRWESGSLLEREEKEKLFNEHIEALTKKKREHFRQLLDETSAITLTSTWKEVKKIIKEDPRCIKFSSSDRKKQREFEEYIRDKYITAKADFRTLLKETKFITYS

SEQ ID NO: 16645 - protein, 77 aa, Homo sapiens
MRFMTLLFLTALAGALVCAYDPEAASAPGSGNHKQMDCLQLQKPPSETAKFLSSSTNLPRREKLVPSAKPPHTRGLV

SEQ ID NO: 16646 - protein, 186 aa, Homo sapiens
MVELMFPLLLLLLPFLLYMAAPQIRKMLSSGVCTSTVQLPGKVVVVTGANTGIGKETAKELAQREEKHLHVLINNAGVMMCPYSKTADGFEMHIGVNHLGHFLLTHLLLEKLKESAPSRIVNVSSLAHHLGRIHFHNLQGEKFYNAGLAYCHSKLANILFTQELARRLKGSGVTTYSVHPGTVQSE

SEQ ID NO: 16647 - protein, 535 aa, Homo sapiens
MAALLAAAAVRARILQVSSKVKSSPTWYSASSFSSSVPTVKLFIGGKFVESKSDKWIDIHNPATNEVIGRVPQATKAEMDAAIASCKRAFPAWADTSVLSRQQVLLRYQQLIKENLKEIAKLITLEQGKTLADAEGDVFRGLQVVEHACSVTSLMMGETMPSITKDMDLYSYRLPLGVCAGIAPFNFPAMIPLWMFPMAMVCGNTFLMKPSERVPGATMLLAKLLQDSGAPDGTLNIIHGQHEAVNFICDHPDIKAISFVGSNKAGEYIFERGSRHGKRVQANMGAKNHGVVMPDANKENTLNQLVGAAFGAAGQRCMALSTAVLVGEAKKWLPELVEHAKNLRVNAGDQPGADLGPLITPQAKERVCNLIDSGTKEGASILLDGRKIKVKGYENGNFVGPTIISNVKPNMTCYKEEIFGPVLVVLETETLDEAIQIVNNNPYGNGTAIFTTNGATARKYAHLVDVGQVGVNVPIPVPLPMFSFTGSRSSFRGDTNFYGKQGIQFYTQLKTITSQWKEEDATLSSPAVVMPTMGR

SEQ ID NO: 16648 - protein, 285 aa, Homo sapiens
MPFPVTTQGSQQTQPPQKHYGITSPISLAAPKETDCVLTQKLIETLKPFGVFEEEEELQRRILILGKLNNLVKEWIREISESKNLPQSVIENVGGKIFTFGSYRLGVHTKGADIDALCVAPRHVDRSDFFTSFYDKLKLQEEVKDLRAVEEAFVPVIKLCFDGIEIDILFARLALQTIPEDLDLRDDSLLKNLDIRCIRSLNGCRVTDEILHLVPNIDNFRLTLRAIKLWAKRHNIYSNILGFLGGVSWAMLVARTCQLYPNAIASTLVHKFFLVFSKWYVFRLY

SEQ ID NO: 16649 - protein, 113 aa, Homo sapiens
MLLVVILLLGMFFTLSKTQSVTQLDGHITVSEEAPLELKCNYSYSGVPSLFWYVQYSSQSLQLLLKDLTKATQVKGIRGFEAEFKKSETSFYLRKPSTHVSDAAEYFCAVGDR

SEQ ID NO: 16650 - protein, 504 aa, Homo sapiens
VDVWSLGVILYTLVSGSLPFDGQNLKELRERVLRGKYRIPFYMSTDCENLLKRFLVLNPIKRGTLEQIMKDRWINAGHEEDELKPFVEPELDISDQKRIDIMVGMGYSQEEIQESLSKMKYDEITATYLLLGRKSSEVRPSSDLNNSTGQSPHHKVQRSVSSSQKQRRYSDHAGPAIPSVVAYPKRSQTSTADSDLKEDGISSRKSSGSAVGGKGIAPASPMLGNASNPNKADIPERKKSSTVPSSNTASGGMTRRNTYVCSERTTADRHSVIQNGKENSTIPDQRTPVASTHSISSAATPDRIRFPRGTASRSTFHGQPRERRTATYNGPPASPSLSHEATPLSQTRSRGSTNLFSKLTSKLTRRNMSFRFIKRLPTEYERNGRYEGSSRNVSAEQKDENKEAKPRSLRFTWSMKTTSSMDPGDMMREIRKVLDANNCDYEQRERFLLFCVHGDGHAENLVQWEMEVCKLPRLSLNGVRFKRISGTSIAFKNIASKIANELKL

SEQ ID NO: 16651 - protein, 821 aa, Homo sapiens
MAGSDAEWVTIANNLLFKCHIHLRIHELQDCDANVFIALYQSILGEKVPDLIVIPRSQEDDAHNVQAVIDSLALDYLQVSLSHITGENIVKGDKESIKNLLEIFDGLLEYLTERISETSHEKSETEQYFKESDRGERLEEPESTKESKSSWKRVSFGRCSLSSEMLGPSWDGDEAESTGEIIRLGDTAHTFSLRSNGAQCPNEMLSKKALASPSSKSHEDMLYPPSVLSKSRTSFVEDTETLSVSGIPNARKLGEPIRAAIPLHPPYHPSEPRAPCPIGKEYLHSSHCSPAVNSTGEHTEFSGDLDDGLFLISKLPKGSKWEVYPAQVQGPRTRKPPKGKRNENRATASSCNSPFPQRPRKRLTEQELHDVSEKLSQRLSELDWMLKSALGDRIKEKTDHKEENTGNEEVEDGTEETLSQHSDGIVEYGPKKSRPGLSMRRKPPYRSHSLSPSPVNKHKQFHLERKRQRKPRETDVRQFQAQAFTEAFERELRRHKVQENIGPLRIHEKEEETEKIYRGEAVRKGTPECSQPWKIYSRKTTTQSLRGGLPKPNKAVPMKVSEHSLLPLMLEQFPFLYVSGPTLSKMWKQQIAQVEQLKKEACRENRSKKKLQDEIEEALRRHDLLTTLVKKEYEHNKRLQDFKDCIRRQRLTQSKIKENRQQIVRARKYYDDYRVQLCAKMMRMRTREEMIFKKLFEEGLNIQKQRLRDLRNYAKEKRDEQRRRHQDELDSMENYYKDQFSLLAEAISQEHQELKAREKSQAQTLHKVKRELRSKMEKEIQQLQDMITQNDDDVFFRELEAERFRSRLQLASFQYSKSPSL

SEQ ID NO: 16652 - protein, 391 aa, Homo sapiens
MFSPWKISMFLSVREDSVPTTASFSADMLNVTLQGPTLNGTFAQSKCPQVEWLGWLNTIQPPFLWVLFVLATLENIFVLSVFCLHKSSCTVAEIYLGNLAAADLILACGLPFWAITISNNFDWLFGETLCRVVNAIISMNLYSSICFLMLVSIDRYLALVKTMSMGRMRGVRWAKLYSLVIWGCTLLLSSPMLVFRTMKEYSDEGHNVTACVISYPSLIWEVFTNMLLNVVGFLLPLSVITFCTMQIMQVLRNNEMQKFKEIQTERRATVLVLVVLLLFIICWLPFQISTFLDTLHRLGILSSCQDERIIDVITQIASFMAYSNSCLNPLVYVIVGKRFRKKSWEVYQGVCQKGGCRSEPIQMENSMGTLRTSISVERQIHKLQDWAGSRQ

SEQ ID NO: 16653 - protein, 48 aa, Homo sapiens
MVWKVAVFLSVALGIGAVPIDDPEDGGKHWVVIVAGSNGWYNYRHQEL

SEQ ID NO: 16654 - protein, 172 aa, Homo sapiens
MQLFLLLCLVLLSPQGASLHRHHPREMKKRVEDLHVGATVAPSSRRDFTFDLYRALASAAPSQSIFFSPVSISMSLAMLSLGAGSSTKMQILEGLGLNLQKSSEKELHRGFQQLLQELNQPRDGFQLSLGNALFTDLVVDLQDTFVSAMKTLYLADTFPTNFRDSAGAMKQI

SEQ ID NO: 16655 - protein, 157 aa, Homo sapiens
MQLFLLLCLVLLSPQGASLHRHHPREMKKRVEDLHVGATVAPSSRRDFTFDLYRALASAAPSQSIFFSPVSISMSLAMLSLGAGSSTKMQILEGLGLNLQKSSEKELHRGFQQLLQELNQPRDGFQLSLGNALFTDLVVDLQDTFVSAMKTLYLADT

SEQ ID NO: 16656 - protein, 113 aa, Homo sapiens
MLLLLVPAFQVIFTLGGTRAQSVTQLDSQVPVFEEAPVELRCNYSSSVSVYLFWYVQYPNQGLQLLLKYLSGSTLVESINGFEAEFNKSQTSFHLRKPSVHISDTAEYFCAVS

SEQ ID NO: 16657 - protein, 125 aa, Homo sapiens
MPSEKTFKQRRTFEQRVEDVRLIREQHPTKIPVIIERYKGEKQLPVLDKTKFLVPDHVNMSELIKIIRRRLQLNANQAFFLLVNGHSMVSVSTPISEVYESEKDEDGFLYMVCASQETFGMKLSV

SEQ ID NO: 16658 - protein, 139 aa, Homo sapiens
MSSSCSGLSRVLVAVATALVSASSPCPQAWGPPGVQYGQPGRSVKLCCPGVTAGDPVSWFRDGEPKLLQGPDSGLGHELVLAQADSTDEGTYICQTLDGALGGTVTLQLGYPPARPVVSCQAADYENFSCTWSPSQISG

SEQ ID NO: 16659 - protein, 115 aa, Homo sapiens
MQPFLLLLAFLLTPGAGTEEIIGGHEAKPHSRPYMAFVQFLQEKSRKRCGGILVRKDFVLTAAHCQGRGDSGGPLVCKDVAQGILSYGNKKGTPPGVYIKVSHFLPWIKRTMKRL

SEQ ID NO: 16660 - protein, 147 aa, Homo sapiens
MIIMVIIFLVLLFWENEVNDEAVMSTLEHLHVDYPQNDVPVPARYCNHMIIQRVIREPDHTCKKEHVFIHERPRKINGICISPKKVACQNLSAIFCFQSETKFKMTVCQLIEGTRYPACRYHYSPTEGFVLVTCDDLRPDSFLGYVK

SEQ ID NO: 16661 - protein, 901 aa, Homo sapiens
MGAASCEDEELEFKLVFGEEKEAPPLGAGGLGEELDSEDAPPCCRLALGEPPPYGAAPIGIPRPPPPRPGMHSPPPRPAPSPGTWESQPARSVRLGGPGGGAGGAGGGRVLECPSIRITSISPTPEPPAALEDNPDAWGDGSPRDYPPPEGFGGYREAGGQGGGAFFSPSPGSSSLSSWSFFSDASDEAALYAACDEVESELNEAASRFGLGSPLPSPRASPRPWTPEDPWSLYGPSPGGRGPEDSWLLLSAPGPTPASPRPASPCGKRRYSSSGTPSSASPALSRRGSLGEEGSEPPPPPPLPLARDPGSPGPFDYVGAPPAESIPQKTRRTSSEQAVALPRSEEPASCNGKLPLGAEESVAPPGGSRKEVAGMDYLAVPSPLAWSKARIGGHSPIFRTSALPPLDWPLPSQYEQLELRIEVQPRAHHRAHYETEGSRGAVKAAPGGHPVVKLLGYSEKPLTLQMFIGTADERNLRPHAFYQVHRITGKMVATASYEAVVSGTKVLEMTLLPENNMAANIDCAGILKLRNSDIELRKGETDIGRKNTRVRLVFRVHVPQGGGKVVSVQAASVPIECSQRSAQELPQVEAYSPSACSVRGGEELVLTGSNFLPDSKVVFIERGPDGKLQWEEEATVNRLQSNEVTLTLTVPEYSNKRVSRPVQVYFYVSNGRRKRSPTQSFRFLPVICKEEPLPDSSLRGFPSASATPFGTDMDFSPPRPPYPSYPHEDPACETPYLSEGFGYGMPPLYPQTGPPPSYRPGLRMFPETRGTTGCAQPPAVSFLPRPFPSDPYGGRGSSFSLGLPFSPPAPFRPPPLPASPPLEGPFPSQSDVHPLPAEGYNKVGPGYGPGEGAPEQEKSRGGYSSGFRDSVPIQGITLEEGGCGTGGCECECVQEIALHVC

SEQ ID NO: 16662 - protein, 19 aa, Homo sapiens
MVWKVAVFLSVALGIGAVP

SEQ ID NO: 16663 - protein, 92 aa, Homo sapiens
MGKESGWDSGRAAVAAVVGGVVAVGTVLVALSAMGFTSVGIAASSIAAKMMSTAAIANGGGVAAGSLVAILQSVGECSGQDDQSQEMIQPRG

SEQ ID NO: 16664 - protein, 454 aa, Homo sapiens
MPEFLEDPSVLTKDKLKSELVANNVTLPAGEQRKDVYVQLYLQHLTARNRPPLPAGTNSKGPPDFSSDEEREPTPVLGSGAAAAGRSRAAVGRKATKKTDKPRQEDKDDLDVTELTNEDLLDQLVKYGVNPGPIVGTTRKLYEKKLLKLREQGTESRSSTPLPTISSSAENTRQNGSNDSDRYSDNEEDSKIELKLEKREPLKGRAKTPVTLKQRRVEHNQSYSQAGITETEWTSGSSKGGPLQALTRESTRGSRRTPRKRVETSEHFRIDGPVISESTPIAETIMASSNESLVVNRVTGNFKHASPILPITEFSDIPRRAPKKPLTRAEVGEKTEERRVERDILKEMFPYEASTPTGISASCRRPIKGAAGRPLELSDFRMEESFSSKYVPKYVPLADVKSEKTKKGRSIPVWIKILLFVVVAVFLFLVYQAMETNQVNPFSNFLHVDPRKSN

SEQ ID NO: 16665 - protein, 520 aa, Homo sapiens
MATEGGGKEMNEIKTQFTTREGLYKLLPHSEYSRPNRVPFNSQGSNPVRVSFVNLNDQSGNGDRLCFNVGRELYFYIYKGVRKRLIDKSRVTCVKWVPGSESLFLVAHSSGNMYLYNVEHTCGTTAPHYQLLKQGESFAVHTCKSKSTRNPLLKWTVGEGALNEFAFSPDGKFLACVSQDGFLRVFNFDSVELHGTMKSYFGGLLCVCWSPDGKYIVTGGEDDLVTVWSFVDCRVIARGHGHKSWVSVVAFDPYTTSVEEGDPMEFSGSDEDFQDLLHFGRDRANSTQSRLSKRNSTDSRPVSVTYRFGSVGQDTQLCLWDLTEDILFPHQPLSRARTHTNVMNATSPPAGSNGNSVTTPGNSVPPPLPRSNSLPHSAVSNAGSKSSVMDGAIASGVSKFATLSLHDRKERHHEKDHKRNHSMGHISSKSSDKLNLVTKTKTDPAKTLGTPLCPRMEDVPLLEPLICKKIAHERLTVLIFLEDCIVTACQEGFICTWGRPGKVGSLSSPSQASSPGGTVV

SEQ ID NO: 16666 - protein, 270 aa, Homo sapiens
MSSSCSGLSRVLVAVATALVSASSPCPQAWGPPGVQYGQPGRSVKLCCPGVTAGDPVSWFRDGEPKLLQGPDSGLGHELVLAQADSTDEGTYICQTLDGALGGTVTLQLGYPPARPVVSCQAADYENFSCTWSPSQISGLPTRYLTSYRKKTVLGADSQRRSPSTGPWPCPQDPLGAARCVVHGAEFWSQYRINVTEVNPLGASTRLLDVSLQSILRPDPPQGLRVESVPGYPRRLRASWTYPASWPCQPHFLLKFRLQYRPAQHPAWST

SEQ ID NO: 16667 - protein, 564 aa, Homo sapiens
MYDNMSTMVYIKEDKLEKLTQDEIISKTKQVIQGLEALKNEHNSILQSLLETLKCLKKDDESNLVEEKSNMIRKSLEMLELGLSEAQVMMALSNHLNAVESEKQKLRAQVRRLCQENQWLRDELANTQQKLQKSEQSVAQLEEEKKHLEFMNQLKKYDDDISPSEDKDTDSTKEPLDDLFPNDEDDPGQGIQQQHSSAAAAAQQGGYEIPARLRTLHNLVIQYASQGRYEVAVPLCKQALEDLEKTSGHDHPDVATMLNILALVYRDQNKYKDAANLLNDALAIREKTLGKDHPAVAATLNNLAVLYGKRGKYKEAEPLCKRALEIREKVLGKDHPDVAKQLNNLALLCQNQGKYEEVEYYYQRALEIYQTKLGPDDPNVAKTKNNLASCYLKQGKFKQAETLYKEILTRAHEREFGSVDDENKPIWMHAEEREECKGKQKDGTSFGEYGGWYKACKVDSPTVTTTLKNLGALYRRQGKFEAAETLEEAAMRSRKQGLDNVHKQRVAEVLNDPENMEKRRSRESLNVDVVKYESGPDGGEEGVSGRASFCGKRQQQQWPGRRHR

SEQ ID NO: 16668 - protein, 178 aa, Homo sapiens
MVELMFPLLLLLLPFLLYMAAPQIRKMLSSGVCTSTVQLPGKVVVVTGANTGIGKETAKELAQRGHFLLTHLLLEKLKESAPSRIVNVSSLAHHLGRIHFHNLQGEKFYNAGLAYCHSKLANILFTQELARRLKGSGVTTYSVHPGTVQSELVRHSSFMRWMWWLFSFFIKTPQQGAQ

SEQ ID NO: 16669 - protein, 351 aa, Homo sapiens
MDELVHDLASALEQTSEQNKLGELWEEMALSPRQQRRQLRKRRGRKRRSDFTHLAEHTCCYSEASESSLDEATKDCREVAPVTNFSDSDDTMVAKRHPALNAIVKSKQHSWHESDSFTENAPCRPLRRRRKVKRVTSEVAASLQQKLKVSDWSYERGCRFKSAKKQRLSRWKENTPWTSSGHGLCESAENRTFLSKTGRKERMECETDEQKQGSDENMSECETSSVCSSSDTGLFTNDEGRQGDDEQSDWFYEGECVPGFTVPNLLPKWAPDHCSEVERMDSGLDKFSDSTFLLPSRPAQRGYHTRLNRLPGAAARCLRKGRRRLVGKVIPLTVSLAQWGDNIPYGSCVSY

SEQ ID NO: 16670 - protein, 78 aa, Homo sapiens
MVWKVAVFLSVALGIGAVPIDDPEDGGKHWVVIVAGSNGWYNYRHQADACHAYQIIHRNGIPDEQIVVMMYDDIAYSE

SEQ ID NO: 16671 - protein, 890 aa, Homo sapiens
MPASISSIFPGPTLLLSCGSEELDSEDAPPCCRLALGEPPPYGAAPIGIPRPPPPRPGMHSPPPRPAPSPGTWESQPARSVRLGGPGGGAGGAGGGRVLECPSIRITSISPTPEPPAALEDNPDAWGDGSPRDYPPPEGFGGYREAGGQGGGAFFSPSPGSSSLSSWSFFSDASDEAALYAACDEVESELNEAASRFGLGSPLPSPRASPRPWTPEDPWSLYGPSPGGRGPEDSWLLLSAPGPTPASPRPASPCGKRRYSSSGTPSSASPALSRRGSLGEEGSEPPPPPPLPLARDPGSPGPFDYVGAPPAESIPQKTRRTSSEQAVALPRSEEPASCNGKLPLGAEESVAPPGGSRKEVAGMDYLAVPSPLAWSKARIGGHSPIFRTSALPPLDWPLPSQYEQLELRIEVQPRAHHRAHYETEGSRGAVKAAPGGHPVVKLLGYSEKPLTLQMFIGTADERNLRPHAFYQVHRITGKMVATASYEAVVSGTKVLEMTLLPENNMAANIDCAGILKLRNSDIELRKGETDIGRKNTRVRLVFRVHVPQGGGKVVSVQAASVPIECSQRSAQELPQVEAYSPSACSVRGGEELVLTGSNFLPDSKVVFIERGPDGKLQWEEEATVNRLQSNEVTLTLTVPEYSNKRVSRPVQVYFYVSNGRRKRSPTQSFRFLPVICKEEPLPDSSLRGFPSASATPFGTDMDFSPPRPPYPSYPHEDPACETPYLSEGFGYGMPPLYPQTGPPPSYRPGLRMFPETRGTTGCAQPPAVSFLPRPFPSDPYGGRGSSFSLGLPFSPPAPFRPPPLPASPPLEGPFPSQSDVHPLPAEGYNKVGPGYGPGEGAPEQEKSRGGYSSGFRDSVPIQGITLEEVSEIIGRDLSGFPAPPGEEPPA

SEQ ID NO: 16672 - protein, 54 aa, Homo sapiens
MSSSCSGLSRVLVAVATALVSASSPCPQAWGPPGTQCPGFGMGSQSCSRDLTLG

SEQ ID NO: 16673 - protein, 301 aa, Homo sapiens
MRVRIGLTLLLCAVLLSLASASSDEEGSQDESLDSKTTLTSDESVKDHTTAGRVVAGQIFLDSEESELESSIQEEEDSLKSQEGESVTEDISFLESPNPENKDYEEPKKVRKPALTAIEGTAHGEPCHFPFLFLDKEYDECTSDGREDGRLWCATTYDYKADEKWGFCETEEEAAKRRQMQEAEMMYQTGMKILNGSNKKSQKREAYRYLQKAASMNHTKALERVSYALLFGDYLPQNIQAAREMFEKLTEEGSPKGQTALGFLYASGLGVNSSQAKALVYYTFGALGGNLIAHMVLVSRL

SEQ ID NO: 16674 - protein, 1281 aa, Homo sapiens
MPIVMARDLEETASSSEDEEVISQEDHPCIMWTGGCRRIPVLVFHADAILTKDNNIRVIGERYHLSYKIVRTDSRLVRSILTAHGFHEVHPSSTDYNLMWTGSHLKPFLLRTLSEAQKVNHFPRSYELTRKDRLYKNIIRMQHTHGFKAFHILPQTFLLPAEYAEFCNSYSKDRGPWIVKPVASSRGRGVYLINNPNQISLEENILVSRYINNPLLIDDFKFDVRLYVLVTSYDPLVIYLYEEGLARFATVRYDQGAKNIRNQFMHLTNYSVNKKSGDYVSCDDPEVEDYGNKWSMSAMLRYLKQEGRDTTALMAHVEDLIIKTIISAELAIATACKTFVPHRSSCFELYGFDVLIDSTLKPWLLEVNLSPSLACDAPLDLKIKASMISDMFTVVGFVCQDPAQRASTRPIYPTFESSRRNPFQKPQRPVSAQFQSSKAKQRCRPLSASDAEMKNLVGSAREKGPGKLGGSVLGLSMEEIKVLRRVKEENDRRGGFIRIFPTSETWEIYGSYLEHKTSMNYMLATRLFQDRMTADGAPELKIESLNSKAKLHAALYERKLLSLEVRKRRRRSSRLRAMRPKYPVITQPAEMNVKTETESEEEEEVALDNEDEEQEASQEESAGFLRENQAKYTPSLTALVENTPKENSMKVREWNNKGGHCCKLETQELEPKFNLMQILQDNGNLSKMQARIAFSAYLQHVQIRLMKDSGGQTFSASWAAKEDEQMELVVRFLKRASNNLQHSLRMVLPSRRLALLERRRILAHQLGDFIIVYNKETEQMAEKKSKKKVEEEEEDGVNMENFQEFIRQASEAELEEVLTFYTQKNKSASVFLGTHSKISKNNNNYSDSGAKGDHPETIMEEVKIKPPKQQQTTEIHSDKLSRFTTSAEKEAKLVYSNSSSGPTATLQKIPNTHLSSVTTSDLSPGPCHHSSLSQIPSAIPSMPHQPTILLNTVSASASPCLHPGAQNIPSPTGLPRCRSGSHTIGPFSSFQSAAHIYSQKLSRPSSAKAAGSCYLNKHHSGIAKTQKEGEDASLYSKRYNQSMVTAELQRLAEKQAARQYSPSSHINLLTQQVTNLNLATGIINRSSASAPPTLRPIISPSGPTWSTQSDPQAPENHSSSPGSRSLQTGGFAWEGEVENNVYSQATGVVPQHKYHPTAGSYQLQFALQQLEQQKLQSRQLLDQSRARHQAIFGSQTLPNSNLWTMNNGAGCRISSATASGQKPTTLPQKVVPPPSSCASLVPKPPPNHEQVLRRATSQKASNTRFRSSFQNYLWYFFQAVS

SEQ ID NO: 16675 - protein, 165 aa, Homo sapiens
MDNGMFSGFIMIKNLLLFCISMNLSSHFGFSQMPTSSVKDETNDNITIFTRILDGLLDGYDNRLRPGLGERITQVRTDIYVTSFGPVSDTEMEYTIDVFFRQSWKDERLRFKGPMQRLPLNNLLASKIWTPDTFFHNGKKSIAHNMTTPNKLLRLEDDGTLLYTM

SEQ ID NO: 16676 - protein, 86 aa, Homo sapiens
MDTASHSLVLLQQLNMQREFGFLCDCTVAIGDVYFKAHRAVLAAFSNYFKMIFIHQTRQQITHLEVIKELEAAGCLCCSLDGLSQG

SEQ ID NO: 16677 - protein, 274 aa, Homo sapiens
MTARTLSLMASLVAYDDSDSEAETEHAGSFNATGQQKDTSGVARPPGQDFASGTLDVPKAGAQPTKHGSCEDPGGYRLPLAQLGRSDWGSCPSQRLQWPGKEPQVTFPIKEPSCSSLWTSHVPASHMPLAAARFKQVKLSRNFPKSSFHAQSESETVGKNGSSFQKKKCEDCVVPYTPRRLRQRQALSTETGKGKDVEPQGPPAGRAPAPLYVGPGVSEFIQPYLNSHYKETTVPRKVLFHLRGHRGPVNTIQWCPVLSKSHMLLSTSMDKTFK

SEQ ID NO: 16678 - protein, 232 aa, Homo sapiens
MASSAASSEHFEKLHEIFRGLHEDLQGVPERLLGTAGTEEKKKLIRDFDEKQQEANETLAEMEEELRYAPLSFRNPMMSKLRNYRKDLAKLHREVRSTPLTATPGGRGDMKYGIYAVENEHMNRLQSQRAMLLQGTESLNRATQSIERSHRIATETDQIGSEIIEELGEQRDQLERTKSRLVNTSENLSKSRKILRSMSRKVTTNKLLLSIIILLELAILGGLVYYKFFRSH

SEQ ID NO: 16679 - protein, 777 aa, Homo sapiens
MSAQTSPAEKGLNPGLMCQESYACSGTDEAIFECDECCSLQCLRCEEELHRQERLRNHERIRLKPGHVPYCDLCKGLSGHLPGVRQRAIVRCQTCKINLCLECQKRTHSGGNKRRHPVTVYNVSNLQESLEAEEMDEETKRKKMTEKVVSFLLVDENEEIQVTNEEDFIRKLDCKPDQHLKVVSIFGNTGDGKSHTLNHTFFYGREVFKTSPTQESCTVGVWAAYDPVHKVAVIDTEGLLGATVNLSQRTRLLLKVLAISDLVIYRTHADRLHNDLFKFLGDASEAYLKHFTKELKATTARCGLDVPLSTLGPAVIIFHETVHTQLLGSDHPSEVPEKLIQDRFRKLGRFPEAFSSIHYKGTRTYNPPTDFSGLRRALEQLLENNTTRSPRHPGVIFKALKALSDRFSGEIPDDQMAHSSFFPDEYFTCSSLCLSCGVGCKKSMNHGKEGVPHEAKSRCRYSHQYDNRVYTCKACYERGEEVSVVPKTSASTDSPWMGLAKYAWSGYVIECPNCGVVYRSRQYWFGNQDPVDTVVRTEIVHVWPGTDGFLKDNNNAAQRLLDGMNFMAQSVSELSLGPTKAVTSWLTDQIAPAYWRPNSQILSCNKCATSFKDNDTKHHCRACGEGFCDSCSSKTRPVPERGWGPAPVRVCDNCYEARNVQLAVTEAQVDDEGGTLIARKVGEAVQNTLGAVVTAIDIPLGLVKDAARPAYWVPDHEILHCHNCRKEFSIKLSKHHCRACGQGFCDECSHDRRAVPSRGWDHPVRVCFNCNKKPGDL

SEQ ID NO: 16680 - protein, 231 aa, Homo sapiens
MQLFLLLCLVLLSPQGASLHRHHPREMKKRVEDLHVGATVAPSSRRDFTFDLYRALASAAPSQSIFFSPVSISMSLAMLSLGAGSSTKMQILEGLGLNLQKSSEKELHRGFQQLLQELNQPRDGFQLSLGNALFTDLVVDLQDTFVSAMKTLYLADTFPTNFRDSAGAMKQINDYVAKQTKGKIVDLLKNLDSNAVVIMVNYIFFKAKWETSFNHKGTQEQDFYVTSETVV

SEQ ID NO: 16681 - protein, 847 aa, Homo sapiens
MAQWEMLQNLDSPFQDQLHQLYSHSLLPVDIRQYLAVWIEDQNWQEAALGSDDSKATMLFFHFLDQLNYECGRCSQDPESLLLQHNLRKFCRDIQDPTQLAEMIFNLLLEEKRILIQAQRAQLEQGEPVLETPVESQQHEIESRILDLRAMMEKLVKSISQLKDQQDVFCFRYKIQAKGKTPSLDPHQTKEQKILQETLNELDKRRKEVLDASKALLGRLTTLIELLLPKLEEWKAQQQKACIRAPIDHGLEQLETWFTAGAKLLFHLRQLLKELKGLSCLVSYQDDPLTKGVDLRNAQVTELLQRLLHRAFVVETQPCMPQTPHRPLILKTGSKFTVRTRLLVRLQEGNESLTVEVSIDRNPPQLQGFRKFNILTSNQKTLTPEKGQSQGLIWDFGYLTLVEQRSGGSGKGSNKGPLGVTEELHIISFTVKYTYQGLKQELKTDTLPVVIISNMNQLSIAWASVLWFNLLSPNLQNQQFFSNPPKAPWSLLGPALSWQFSSYVGRGLNSDQLSMLRNKLFGQNCRTEDPLLSWADFTKRESPPGKLPFWTWLDKILELVHDHLKDLWNDGRIMGFVSRSQERRLLKKTMSGTFLLRFSESSEGGITCSWVEHQDDDKVLIYSVQPYTKEVLQSLPLTEIIRHYQLLTEENIPENPLRFLYPRIPRDEAFGCYYQEKVNLQERRKYLKHRLIVVSNRQVDELQQPLELKPEPELESLELELGLVPEPELSLDLEPLLKAGLDLGPELESVLESTLEPVIEPTLCMVSQTVPEPDQGPVSQPVPEPDLPCDLRHLNTEPMEIFRNCVKIEEIMPNGDPLLAGQNTVDEVYVSRPSHFYTDGPLMPSDF

SEQ ID NO: 16682 - protein, 35 aa, Homo sapiens
MPGIKRILTVTILALCLPSPGNAQQQERWTPVCQP

SEQ ID NO: 16683 - protein, 305 aa, Homo sapiens
MASNVTNKTDPRSMNSRVFIGNLNTLVVKKSDVEAIFSKYGKIVGCSVHKGFAFVQYVNERNARAAVAGEDGRMIAGQVLDINLAAEPKVNRGKAGVKRSAAEMYGSVTEHPSPSPLLSSSFDLDYDFQRDYYDRMYSYPARVPPPPPIARAVVPSKRQRVSGNTSRRGKSGFNSKSGQRGSSKSGKLKGDDLQAIKKELTQIKQKVDSLLENLEKIEKEQSKQAEMKNDKSEEEQSSSSVKKDETNVKMESEGGADDSAEEGDLLDDDDNEDRGDDQLELIKDDEKEAEEGEDDRDSANGEDDS

SEQ ID NO: 16684 - protein, 185 aa, Homo sapiens
MRALRDRAGLLLCVLLLAALLEAALGLPVKKPRLRGPRPGSLTRLAEVSASPDPRPLKEEEEAPLLPRTHLQAEPHQHGCWTVTEPAAMTPGNATPPRTPEVTPLRLELQKLPGLANTTLSTPNPDTQVTIKVVEDPQAEVSIDLLAEPSNPPPQDTLSWLPALWSFLWGDYKGEEKDRAPGEKG

SEQ ID NO: 16685 - protein, 447 aa, Homo sapiens
MAAALKCLLTLGRWCPGLGVAPQARALAALVPGVTQVDNKSGFLQKRPHRQHPGILKLPHVRLPQALANGAQLLLLGSAGPTMENQVQTLTSYLWSRHLPVEPEELQRRARHLEKKFLENPDLSQTEEKLRGAVLHALRKTTYHWQELSYTEGLSLVYMAARLDGGFAAVSRAFHEIRARNPAFQPQTLMDFGSGTGSVTWAAHSIWGQSLREYMCVDRSAAMLVLAEKLLKGGSESGEPYIPGVFFRQFLPVSPKVQFDVVVSAFSLSELPSKADRTEVVQTLWRKTGHFLVLVENGTKAGHSLLMDARDLVLKGKEKSPLDPRPGFVFAPCPHELPCPQLTNLACSFSQAYHPIPFSWNKKPKEEKFSMVILARGSPEEAHRWPRITQPVLKRPRHVHCHLCCPDGHMQHAVLTARRHGSSWGDLLPVLTPSAFPPSTAQDPSES

SEQ ID NO: 16686 - protein, 38 aa, Homo sapiens
MRSAAVLALLLCAGQVTALPVNSPMNKGDTEMNGSFPF

SEQ ID NO: 16687 - protein, 113 aa, Homo sapiens
MMKCPQALLAIFWLLLSWVSSEDKVVQSPLSLVVHEGDTVTLNCSYEVTNFRSLLWYKQEKKAPTFLFMLTSSGIEKKSGRLSSILDKKELFSILNITATQTGDSAIYLCAVE

SEQ ID NO: 16688 - protein, 148 aa, Homo sapiens
MDNGMFSGFIMIKNLLLFCISMNLSSHFGFSQMPTSSVKDETNDNITIFTRILDGLLDGYDNRLRPGLGERITQVRTDIYVTSFGPVSDTEMEYTIDVFFRQSWKDERLRFKGPMQRLPLNNLLASKIWTPDTFFHNGKKSIAHNMTT

SEQ ID NO: 16689 - protein, 238 aa, Homo sapiens
MPFPVTTQGSQQTQPPQKHYGITSPISLAAPKETDCVLTQKLIETLKPFGVFEEEEELQRRILILGKLNNLVKEWIREISESKNLPQSVIENVGGKIFTFGSYRLGVHTKGADIDALCVAPRHVDRSDFFTSFYDKLKLQEEVKDLRAVEEAFVPVIKLCFDGIEIDILFARLALQTIPEDLDLRDDSLLKNLDIRCIRSLNGMRKPTSFCVLQFLSDISCFYTSFVLKLFIAILLTQ

SEQ ID NO: 16690 - protein, 136 aa, Homo sapiens
MTATEALLRVLLLLLAFGHSTYGAECFPACNPQNGFCEDDNVCRCQPGWQGPLCDQCVTSPGCLHGLCGEPGQCICTDGWDGELCDRGWHSPLFTSALRPYLPALAPTTSSQSPVAGVPHFLIPAHSVPCILKICL

SEQ ID NO: 16691 - protein, 1804 aa, Homo sapiens
MTSLKRSQTERPLATDRASVVGTDGTPKVHTDDFYMRRFRSQNGSLGSSVMAPVGPPRSEGSHHITSTPGVPKMGVRARIADWPPRKENIKESSRSSQEIETSSCLDSLSSKSSPVSQGSSVSLNSNDSAMLKSIQNTLKNKTRPSENMDSRFLMPEAYPSSPRKALRRIRQRSNSDITISELDVDSFDECISPTYKTGPSLHREYGSTSSIDKQGTSGESFFDLLKGYKDDKSDRGPTPTKLSDFLITGGGKGSGFSLDVIDGPISQRENLRLFKEREKPLKRRSKSETGDSSIFRKLRNAKGEELGKSSDLEDNRSEDSVRPWTCPKCFAHYDVQSILFDLNEAIMNRHNVIKRRNTTTGASAAAVASLVSGPLSHSASFSSPMGSTEDLNSKGSLSMDQGDDKSNELVMSCPYFRNEIGGEGERKISLSKSNSGSFSGCESASFESTLSSHCTNAGVAVLEVPKENLVLHLDRVKRYIVEHVDLGAYYYRKFFYQKEHWNYFGADENLGPVAVSIRREKPDEMKENGSPYNYRIIFRTSELMTLRGSVLEDAIPSTAKHSTARGLPLKEVLEHVVPELNVQCLRLAFNTPKVTEQLMKLDEQGLNYQQKVGIMYCKAGQSTEEEMYNNESAGPAFEEFLQLLGERVRLKGFEKYRAQLDTKTDSTGTHSLYTTYKDYEIMFHVSTMLPYTPNNKQQLLRKRHIGNDIVTIVFQEPGAQPFSPKNIRSHFQHVFVIVRVHNPCSDSVCYSVAVTRSRDVPSFGPPIPKGVTFPKSNVFRDFLLAKVINAENAAHKSEKFRAMATRTRQEYLKDLAEKNVTNTPIDPSGKFPFISLASKKKEKSKPYPGAELSSMGAIVWAVRAEDYNKAMELDCLLGISNEFIVLIEQETKSVVFNCSCRDVIGWTSTDTSLKIFYERGECVSVGSFINIEEIKEIVKRLQFVSKGCESVEMTLRRNGLGQLGFHVNYEGIVADVEPYGYAWQAGLRQGSRLVEICKVAVATLSHEQMIDLLRTSVTVKVVIIPPHDDCTPRRSCSETYRMPVMEYKMNEGVSYEFKFPFRNNNKWQRNASKGPHSPQVPSQVQSPMTSRLNAGKGDGKMPPPERAANIPRSISSDGRPLERRLSPGSDIYVTVSSMALARSQCRNSPSNLSSSSDTGSVGGTYRQKSMPEGFGVSRRSPASIDRQNTQSDIGGSGKSTPSWQRSEDSIADQMAYSYRGPQDFNSFVLEQHEYTEPTCHLPAVSKVLPAFRESPSGRLMRQDPVVHLSPNKQGHSDSHYSSHSSSNTLSSNASSAHSDEKWYDGDRTESELNSYNYLQGTSADSGIDTTSYGPSHGSTASLGAATSSPRSGPGKEKVAPLWHSSSEVISMADRTLETESHGLDRKTESSLSLDIHSKSQAGSTPLTRENSTFSINDAASHTSTMSSRHSASPVVFTSARSSPKEELHPAAPSQLAPSFSSSSSSSSGPRSFYPRQGATSKYLIGWKKPEGTINSVGFMDTRKRHQSDGNEIAHTRLRASTRDLRASPKPTSKSTIEEDLKKLIDLESPTPESQKSFKFHALSSPQSPFPSTPTSRRALHRTLSDESIYNSQREHFFTSRASLLDQALPNDVLFSSTYPSLPKSLPLRRPSYTLGMKSLHGEFSASDSSLTDIQETRRQPMPDPGLMPLPDTAADLDWSNLVDAAKAYEVQRASFFAASDENHRPLSAASNSDQLEDQALAQMKPYSSSKDSSPTLASKVDQLEGMLKMLREDLKKEKEDKAHLQAEVQHLREDNLRLQEESQNASDKLKKFTEWVFNTIDMS

SEQ ID NO: 16692 - protein, 351 aa, Homo sapiens
MTWSATARGAHQPDNTAFTQQRLPAWQPLLSASIALPLFFCAGLAFIGLGLGLYYSSNGIKELEYDYTGDPGTGNCSVCAAAGQGRALPPPCSCAWYFSLPELFQGPVYLYYELTNFYQNNRRYGVSRDDAQLSGLPSALRHPVNECAPYQRSAAGLPIAPCGAIANSLFNDSFSLWHQRQPGGPYVEVPLDRSGIAWWTDYHVKFRNPPLVNGSLALAFQGTAPPPNWRRPVYELSPDPNNTGFINQDFVVWMRTAALPTFRKLYARIRQGNYSAGLPRGAYRVNITYNYPVRAFGGHKLLIFSSISWMGGKNPFLGIAYLVVGSLCILTGFVMLVVYIRYQDQDDDDEE

SEQ ID NO: 16693 - protein, 332 aa, Homo sapiens
MQLQFRSWMLAALTLLVVFLIFADISEIEEEIGNSGGRGTIRSAVNSLHSKSNRKQILKFLDAEKDISVLKGTLKPGDIIHYIFDRDSTMNVSQNLYELLPRTSPLKNKHFGTCAIVGNSGVLLNSGCGQEIDAHSFVIRCNLAPVQEYARDVGLKTDLVTMNPSVIQRAFEDLVNATWREKLLQRLHSLNGSILWIPAFMARGGKERVEWVNELILKHHVNVRTAYPSLRLLHAVRGYWLTNKVHIKRPTTGLLMYTLATRFCKQIYLYGFWPFPLDQNQNPVKYHYYDSLKYGYTSQASPHTMPLEFKALKSLHEQGALKLTVGQCDGAT

SEQ ID NO: 16694 - protein, 135 aa, Homo sapiens
MVWKVAVFLSVALGIGAVPIDDPEDGGKHWVVIVAGSNGWYNYRHQADACHAYQIIHRNGIPDEQIVVMINPTPGIVINRPNGTDVYQGVPKDYTGEDVTPQNFLAVLRGDAEAVKGIGSGKVLKSGPQDHVFIY

SEQ ID NO: 16695 - protein, 820 aa, Homo sapiens
MTDTRRRVKVYTLNEDRQWDDRGTGHVSSGYVERLKGMSLLVRAESDGSLLLESKINPNTAYQKQQDTLIVWSEAENYDLALSFQEKAGCDEIWEKICQVQGKDPSVDITQDLVDESEEERFDDMSSPGLELPSCELSRLEEIAELVASSLPSPLRREKLALALENEGYIKKLLELFHVCEDLENIEGLHHLYEIIKGIFLLNRTALFEVMFSEECIMDVIGCLEYDPALSQPRKHREFLTKTAKFKEVIPISDPELKQKIHQTYRVQYIQDMVLPTPSVFEENMLSTLHSFIFFNKVEIVGMLQEDEKFLTDLFAQLTDEATDEEKRQELVNFLKEFCAFSQTLQPQNRDAFFKTLSNMGILPALEVILGMDDTQVRSAATDIFSYLVEYNPSMVREFVMQEAQQNDDDILLINLIIEHMICDTDPELGGAVQLMGLLRTLVDPENMLATANKTEKTEFLGFFYKHCMHVLTAPLLANTTEDKPSKDDFQTAQLLALVLELLTFCVEHHTYHIKNYIINKDILRRVLVLMASKHAFLALCALRFKRKIIGLKDEFYNRYIMKSFLFEPVVKAFLNNGSRYNLMNSAIIEMFEFIRVEDIKSLTAHVIENYWKALEDVDYVQTFKGLKLRFEQQRERQDNPKLDSMRSILRNHRYRRDARTLEDEEEMWFNTDEDDMEDGEAVVSPSDKTKNDDDIMDPISKFMERKKLKESEEKEVLLKTNLSGRQSPSFKLSLSSGTKTNLTSQSSTTNLPGSPGSPGSPGSPGSPGSVPKNTSQTAAITTKGGLVGLVDYPDDDEDDDEDEDKEDTLPLSKKAKFDS

SEQ ID NO: 16696 - protein, 110 aa, Homo sapiens
MKKLLAMILWLQLDRLSGELKVEQNPLFLSMQEGKNYTIYCNYSTTSDRLYWYRQDPGKSLESLFVLLSNGAVKQEGRLMASLDTKARLSTLHITAAVHDLSATYFCAVD

SEQ ID NO: 16697 - protein, 129 aa, Homo sapiens
MPASARLAGAGLLLAFLRALGCAGRAPGLSMAEGNTLISVDYEIFGKVQGVFFRKHTQAEGKKLGLVGWVQNTDRGTVQGQLQGPISKVRHMQEWLETRGSPKSHIDKANFNNEKVILKLDYSDFQIVK

SEQ ID NO: 16698 - protein, 577 aa, Homo sapiens
MKIKSSWDIDGRATKRRKKSGDLKKAKVQVERMREVNSRCYQPEPFACGIEHCSVHYVSDSGDGVYAGRPLSVIQMVAFLEQRASALLASCSKNCTNSPAIVRFSGQSRGVPAVSESYSAPGACEEPTERGNLEVGEPQSEPVRVLDMVAKLESECLKRQGQREPGSLSRNNSFRRNVGRVLLANSTQADEGKTKKGVLEAPDTQVNPVGSVSVDCGPSRADRCSPKEDQAWDGASQDCPPLPAGVSFHIDSAELEPGSQTAVKNSNRYDVEMTDELVGLPFSSHTYSQASELPTDAVDCMSRELVSLTSRNPDQRKESLCISITVSKVDKDQPSILNSCEDPVPGMLFFLPPGQHLSDYSQLNESTTKESSEASQLEDAAGGDSASEEKSGSAEPFVLPASSVESTLPVLEASSWKKQVSHDFLETRFKIQQLLEPQQYMAFLPHHIMVKIFRLLPTKSLVALKCTCCYFKFIIEYYNIRPADSRWVRDPRYREDPCKQCKKKYVKGDVSLCRWHPKPYCQALPYGPGYWMCCHRSQKGFPGCKLGLHDNHWVPACHSFNRAIHKKAKGTEAEEEY

SEQ ID NO: 16699 - protein, 833 aa, Homo sapiens
MTDTRRRVKVYTLNEDRQWDDRGTGHVSSGYVERLKGMSLLVRAESDGSLLLESKINPNTAYQKQQDTLIVWSEAENYDLALSFQEKAGCDEIWEKICQVQGKDPSVDITQDLVDESEEERFDDMSSPGLELPSCELSRLEEIAELVASSLPSPLRREKLALALENEGYIKKLLELFHVCEDLENIEGLHHLYEIIKGIFLLNRTALFEVMFSEECIMDVIGCLEYDPALSQPRKHREFLTKTAKFKEVIPISDPELKQKIHQTYRVQYIQDMVLPTPSVFEENMLSTLHSFIFFNKVEIVGMLQEDEKFLTDLFAQLTDEATDEEKRQELVNFLKEFCAFSQTLQPQNRDAFFKTLSNMGILPALEVILGMDDTQVRSAATDIFSYLVEYNPSMVREFVMQEAQQNDDVSKKLTEQKITSKDILLINLIIEHMICDTDPELGGAVQLMGLLRTLVDPENMLATANKTEKTEFLGFFYKHCMHVLTAPLLANTTEDKPSKDDFQTAQLLALVLELLTFCVEHHTYHIKNYIINKDILRRVLVLMASKHAFLALCALRFKRKIIGLKDEFYNRYIMKSFLFEPVVKAFLNNGSRYNLMNSAIIEMFEFIRVEDIKSLTAHVIENYWKALEDVDYVQTFKGLKLRFEQQRERQDNPKLDSMRSILRNHRYRRDARTLEDEEEMWFNTDEDDMEDGEAVVSPSDKTKNDDDIMDPISKFMERKKLKESEEKEVLLKTNLSGRQSPSFKLSLSSGTKTNLTSQSSTTNLPGSPGSPGSPGSPGSPGSVPKNTSQTAAITTKGGLVGLVDYPDDDEDDDEDEDKEDTLPLSKKAKFDS

SEQ ID NO: 16700 - protein, 232 aa, Homo sapiens
MAAAKCRNRRRELTDTLQAETDQLEDEKSALQTEIANLLKEKEKLEFILAAHRPACKIPDDLGFPEEMSVASLDLTGGLPEVATPESEEAFTLPLLNDPEPKPSVEPVKSISSMELKTEPFDDFLFPASSRPSGSETARSVPDMDLSGSFYAADWEPLHSGSLGMGPMATELEPLCTPVVTCTPSCTAYTSSFVFTYPEADSFPSCAAAHRKGSSSNEPSSDSLSSPTLLAL

SEQ ID NO: 16701 - protein, 122 aa, Homo sapiens
MRFLAATFLLLALSTAAQAEPVQFKDCGSVDGVIKEVNVSPCPTQPCQLSKGQSYSVNVTFTSNIQSKSSKAVVHGILMGVPVPFPIPEPDGCKSGINCPIQKDKTYSYLNKLPVKSEYPSV

SEQ ID NO: 16702 - protein, 398 aa, Homo sapiens
LWLLVLCALLLLLVQLLRFLRADGDLTLLWAEWQGRRPEWELTDMVVWVTGASSGIGEELAYQLSKLGVSLVLSARRVHELERVKRRCLENGNLKEKDILVLPLDLTDTGSHEAATKAVLQEFGRIDILVNNGGMSQRSLCMDTSLDVYRKLIELNYLGTVSLTKCVLPHMIERKQGKIVTVNSILGIISVPLSIGYCASKHALRGFFNGLRTELATYPGIIVSNICPGPVQSNIVENSLAGEVTKTIGNNGDQSHKMTTSRCVRLMLISMANDLKEVWISEQPFLLVTYLWQYMPTWAWWITNKMGKKRIENFKSGVVRPISKFLNSMYQSCRKVQNFPVFKKLSGWVQWLMSVIPALWEAKADHLRPGVQDQPGQHSETPSLLKIQKVAGHGGACL

SEQ ID NO: 16703 - protein, 109 aa, Homo sapiens
MAASAARGAAALRRSINQPVAFVRRIPWTAASSQLKEHFAQFGHVRRCILPFDKETGFHRGLGWVQFSSEEGLRNALQQENHIIDGVKVQVHTRRPKLPQTSDDEKKDF

SEQ ID NO: 16704 - protein, 138 aa, Homo sapiens
MSGCRVFIGRLNPAAREKDVERFFKGYGRIRDIDLKRGFGFVEFEDPRDADDAVYELDGKELCSERVTIEHARARSRGGRGRGRYSDRFSSRRPRNDRRNAPPVRTENRLIVENLSSRVSWQPVCVVGLMTRSACGLS

SEQ ID NO: 16705 - protein, 81 aa, Homo sapiens
MPRPGSAQRWAAVAGRWGCRLLALLLLVPGPGGASEITFELPDNAKQCFYEDIAQGTKCTLEFQVITGGHYDVDCRLEDPD

SEQ ID NO: 16706 - protein, 116 aa, Homo sapiens
MTRVSLLWAVVVSTCLESGMAQTVTQSQPEMSVQEAETVTLSCTYDTSENNYYLFWYKQPPSRQMILVIRQEAYKQQNATENRFSVNFQKAAKSFSLKISDSQLGDTAMYFCAFMK

SEQ ID NO: 16707 - protein, 252 aa, Homo sapiens
MFQPAPKRCFTIESLVAKDSPLPASRSEDPIRPAALSYANSSPINPFLNGFHSAAAAAAGRGVYSNPDLVFAEAVSHPPNPAVPVHPVPPPHALAAHPLPSSHSPHPLFASQQRDPSTFYPWLIHRYRYLGHRFQGNDTSPESFLLHNALARKPKRIRTAFSPSQLLRLEHAFEKNHYVVGAERKQLAHSLSLTETQVKVWFQNRRTKFKRQKLEEEGSDSQQKKKGTHHINRWRIATKQASPEEIDVTSDD

SEQ ID NO: 16708 - protein, 109 aa, Homo sapiens
MKLVTSITVLLSLGIMGDAKTTQPNSMESNEEEPVHLPCNHSTISGTDYIHWYRQLPSQGPEYVIHGLTSNVNNRMASLAIAEDRKSSTLILHRATLRDAAVYYCILRD

SEQ ID NO: 16709 - protein, 713 aa, Homo sapiens
MAKPSHSSYVLQQLNNQREWGFLCDCCIAIDDIYFQAHKAVLAACSSYFRMFFMNHQHSTAQLNLSNMKISAECFDLILQFMYLGKIMTAPSSFEQFKVAMNYLQLYNVPDCLEDIQDADCSSSKCSSSASSKQNSKMIFGVRMYEDTVARNGNEANRWCAEPSSTVNTPHNREADEESLQLGNFPEPLFDVCKKSSVSKLSTPKERVSRRFGRSFTCDSCGFGFSCEKLLDEHVLTCTNRHLYQNTRSYHRIVDIRDGKDSNIKAEFGEKDSSKTFSAQTDKYRGDTSQAADDSASTTGSRKSSTVESEIASEEKSRAAERKRIIIKMEPEDIPTDELKDFNIIKVTDKDCNESTDNDELEDEPEEPFYRYYVEEDVSIKKSGRKTLKPRMSVSADERGGLENMRPPNNSSPVQEDAENASCELCGLTITEEDLSSHYLAKHIENICACGKCGQILVKGRQLQEHAQRCGEPQDLTMNGLGNTEEKMDLEENPDEQSEIRDMFVEMLDDFRDNHYQINSIQKKQLFKHSACPFRCPNCGQRFETENLVVEHMSSCLDQDMFKSAIMEENERDHRRKHFCNLCGKGFYQRCHLREHYTVHTKEKQFVCQTCGKQFLRERQLRLHNDMHKGMARYVCSICDQGNFRKHDHVRHMISHLSAGETICQVCFQIFPNNEQLEQHMDVHLYTCGICGAKFNLRKDMRSHYNAKHLKRT

SEQ ID NO: 16710 - protein, 44 aa, Homo sapiens
MPGIKRILTVTILALCLPSPGNAQAQCTNGFDLDRQSGQCLASL

SEQ ID NO: 16711 - protein, 170 aa, Homo sapiens
MPVMRLFPCFLQLLAGLALPAVPPQQWALSAGNGSSEVEVVPFQEVWGRSYCRALERLVDVVSEYPSEVEHMFSPSCVSLLRCTGCCGDENLHCVPVETANVTMQLLKIRSGDRPSYVELTFSQHVRCECRPLREKMKPERRRPKGRGKRRREKQRPTDCHLCGDAVPRR

SEQ ID NO: 16712 - protein, 278 aa, Homo sapiens
MPLLLYTCLLWLPTSGLWTVQAMDPNAAYVNMSNHHRGLASANVDFAFSLYKHLVALSPKKNIFISPVSISMALAMLSLGTCGHTRAQLLQGLGFNLTERSETEIHQGFQHLHQLFAKSDTSLEMTMGNALFLDGSLELLESFSADIKHYYESEVLAMNFQDWATASRQINSYVKNKTQGKIVDLFSGLDSPAILVLVNYIFFKGIPTHPHLKAHPLWPGITAAKIQGTLLGKVFDSVKHIHIWESPSSPQSCWAHGHSPLTWQAPGRRTSMWTRQLW

SEQ ID NO: 16713 - protein, 73 aa, Homo sapiens
MESPLIYVSVLLLNIFEFSSGIVYNKDDTEKRFACSNKGFPQENEIIKLYLFLENLKIQCFFQTENEIASKAM

SEQ ID NO: 16714 - protein, 466 aa, Homo sapiens
MEKILFYLFLIGIAVKAQICPKRCVCQILSPNLATLCAKKGLLFVPPNIDRRTVELRLADNFVTNIKRKDFANMTSLVDLTLSRNTISFITPHAFADLRNLRALHLNSNRLTKITNDMFSGLSNLHHLILNNNQLTLISSTAFDDVFALEELDLSYNNLETIPWDAVEKMVSLHTLSLDHNMIDNIPKGTFSHLHKMTRLDVTSNKLQKLPPDPLFQRAQVLATSGIISPSTFALSFGGNPLHCNCELLWLRRLSREDDLETCASPPLLTGRYFWSIPEEEFLCEPPLITRHTHEMRVLEGQRATLRCKARGDPEPAIHWISPEGKLISNATRSLVYDNGTLDILITTVKDTGAFTCIASNPAGEATQIVDLHIIKLPHLLNSTNHIHEPDPGSSDISTSTKSGSNTSSSNGDTKLSQDKIVVAEATSSTALLKFNFQRNIPGIRMFQIQYNGTYDDTLVYRCFAD

SEQ ID NO: 16715 - protein, 289 aa, Homo sapiens
MTARTLSLMASLVAYDDSDSEAETEHAGSFNATGQQKDTSGVARPPGQDFASGTLDVPKAGAQPTKHGSCEDPGGYRLPLAQLGRSDWGSCPSQRLQWPGKEPQVTFPIKEPSCSSLWTSHVPASHMPLAAARFKQVKLSRNFPKSSFHAQSESETVGKNGSSFQKKKCEDCVVPYTPRRLRQRQALSTETGKGKDVEPQGPPAGRAPAPLYVGPGVSEFIQPYLNSHYKETTVPRKVLFHLRGHRGPVNTIQWCPVLSKSHMLLSTSMDKTFKEPSYLVVEVTLESLP

SEQ ID NO: 16716 - protein, 105 aa, Homo sapiens
MWGLAGGRLFGIFSAPVLVAVVCCAQSVNDPGNMSFVKETVDKLLKGYDIRLRPDFGGPPVCVGMNIDIASIDMVSEVNMNHHDSSMHDGPQEIPPGRAELHSGN

SEQ ID NO: 16717 - protein, 104 aa, Homo sapiens
MSHTILLVQPTKRPEGRTYADYESVNECMEGVCKMYEEHLKRMNPNSPSITYDISQLFDFIDDLADLSCLVYRADTQTYQPYNKDWIKEKIYVLLRRQAQQAGK

SEQ ID NO: 16718 - protein, 117 aa, Homo sapiens
MPSSVSWGILLLAGLCCLVPVSLAEDPQGDAAQKTDTSHHDQDHPTFNKITPNLAEFAFSLYRQLAHQSNSTNIFFSPVSIATAFAMLSLGTKADTHDEILEGLNFNLTEIPEAQIH

SEQ ID NO: 16719 - protein, 1853 aa, Homo sapiens
MAASELYTKFARVWIPDPEEVWKSAELLKDYKPGDKVLLLHLEEGKDLEYHLDPKTKELPHLRNPDILVGENDLTALSYLHEPAVLHNLRVRFIDSKLIYTYCGIVLVAINPYEQLPIYGEDIINAYSGQNMGDMDPHIFAVAEEAYKQMARDERNQSIIVSGESGAGKTVSAKYAMRYFATVSGSASEANVEEKVLASNPIMESIGNAKTTRNDNSSRFGKYIEIGFDKRYRIIGANMRTYLLEKSRVVFQAEEERNYHIFYQLCASAKLPEFKMLRLGNADNFNYTKQGGSPVIEGVDDAKEMAHTRQACTLLGISESHQMGIFRILAGILHLGNVGFTSRDADSCTIPPKHEPLCIFCELMGVDYEEMCHWLCHRKLATATETYIKPISKLQATNARDALAKHIYAKLFNWIVDNVNQALHSAVKQHSFIGVLDIYGFETFEINSFEQFCINYANEKLQQQFNMHVFKLEQEEYMKEQIPWTLIDFYDNQPCINLIESKLGILDLLDEECKMPKGTDDTWAQKLYNTHLNKCALFEKPRLSNKAFIIQHFADKVEYQCEGFLEKNKDTVFEEQIKVLKSSKFKMLPELFQDDEKAISPTSATSSGRTPLTRTPAKPTKGRPGQMAKEHKKTVGHQFRNSLHLLMETLNATTPHYVRCIKPNDFKFPFTFDEKRAVQQLRACGVLETIRISAAGFPSRWTYQEFFSRYRVLMKQKDVLSDRKQTCKNVLEKLILDKDKYQFGKTKIFFRAGQVAYLEKLRADKLRAACIRIQKTIRGWLLRKKYLRMRKAAITMQRYVRGYQARCYAKFLRRTKAATIIQKYWRMYVVRRRYKIRRAATIVLQSYLRGFLARNRYRKILREHKAVIIQKRVRGWLARTHYKRSMHAIIYLQCCFRRMMAKRELKKLKIEARSVERYKKLHIGMENKIMQLQRKVDEQNKDYKCLVEKLTNLEGIYNSETEKLRSDLERLQLSEEEAKVATGRVLSLQEEIAKLRKDLEQTRSEKKCIEEHADRYKQETEQLVSNLKEENTLLKQEKEALNHRIVQQAKEMTETMEKKLVEETKQLELDLNDERLRYQNLLNEFSRLEERYDDLKEEMTLMVHVPKPGHKRTDSTHSSNESEYIFSSEIAEMEDIPSRTEEPSEKKVPLDMSLFLKLQKRVTELEQEKQVMQDELDRKEEQVLRSKAKEEERPQIRGAELEYESLKRQELESENKKLKNELNELRKALSEKSAPEVTAPGAPAYRVLMEQLTSVSEELDVRKEEVLILRSQLVSQKEAIQPKDDKNTMTDSTILLEDVQKMKDKGEIAQAYIGLKETNRLLESQLQSQKRSHENEAEALRGEIQSLKEENNRQQQLLAQNLQLPPEARIEASLQHEITRLTNENLYFEELYADDPKKYQSYRISLYKRMIDLMEQLEKQDKTVRKLKKQLKVFAKKIGELEVGQMENISPGQIIDEPIRPVNIPRKEKDFQGMLEYKKEDEQKLVKNLILELKPRGVAVNLIPGLPAYILFMCVRHADYLNDDQKVRSLLTSTINSIKKVLKKRGDDFETVSFWLSNTCRFLHCLKQYSGEEGFMKHNTSRQNEHCLTNFDLAEYRQVLSDLAIQIYQQLVRVLENILQPMIVSGMLEHETIQGVSGVKPTGLRKRTSSIADEGTYTLDSILRQLNSFHSVMCQHGMDPELIKQVVKQMFYIIGAITLNNLLLRKDMCSWSKGMQIRYNVSQLEEWLRDKNLMNSGAKETLEPLIQAAQLLQVKKKTDDDAEAICSMCNALTTAQIVKVLNLYTPVNEFEERVSVSFIRTIQMRLRDRKDSPQLLMDAKHIFPVTFPFNPSSLALETIQIPASLGLGFISRV

SEQ ID NO: 16720 - protein, 309 aa, Homo sapiens
MKMHLQRALVVLALLNFATVSLSLSTCTTLDFGHIKKKRVEAIRGQILSKLRLTSPPEPTVMTHVPYQVLALYNSTRELLEEMHGEREEGCTQENTESEYYAKEIHKFDMIQGLAEHNELAVCPKGITSKVFRFNVSSVEKNRTNLFRAEFRVLRVPNPSSKRNEQRIELFQILRPDEHIAKQRYIGGKNLPTRGTAEWLSFDVTDTVREWLLRRESNLGLEISIHCPCHTFQPNGDILENIHEVMEIKFKGVDNEDDHGRGDLGRLKKQKDHHNPHLILMMIPPHRLDNPGQGGQRKKRALDTNYCFR

SEQ ID NO: 16721 - protein, 151 aa, Homo sapiens
MRFLAATFLLLALSTAAQAEPVQFKDCGSVDGVIKEVNVSPCPTQPCQLSKGQSYSVNVTFTSNIQSKSSKAVVHGILMGVPVPFPIPEPDGCKSGINCPIQKDKTYSYLNKLPVKSEYPSIKLVVEWQLQDDKNQSLFCWEIPVQIVSHL

SEQ ID NO: 16722 - protein, 52 aa, Homo sapiens
DLSKSLSAALLTAALLTFGDCGKTPDCSCPVPHSAAPGSLYSHLCCSLHGAE

SEQ ID NO: 16723 - protein, 571 aa, Homo sapiens
MALTSFLPAPTQLSQDQLEAEEKARSQRSRQTSLVSSRREPPPYGYRKGWIPRLLEDFGDGGAFPEIHVAQYPLDMGRKKKMSNALAIQVDSEGKIKYDAIARQGQSKDKVIYSKYTDLVPKEVMNADDPDLQRPDEEAIKEITEKTRVALEKSVSQKVAAAMPVRAADKLAPAQYIRYTPSQQGVAFNSGAKQRVIRMVEMQKDPMEPPRFKINKKIPRGPPSPPAPVMHSPSRKMTVKEQQEWKIPPCISNWKNAKGYTIPLDKRLAADGRGLQTVHINENFAKLAEALYIADRKAREAVEMRAQVERKMAQKEKEKHEEKLREMAQKARERRAGIKTHVEKEDGEARERDEIRHDRRKERQHDRNLSRAAPDKRSKLQRNENRDISEVIALGVPNPRTSNEVQYDQRLFNQSKGMDSGFAGGEDEIYNVYDQAWRGGKDMAQSIYRPSKNLDKDMYGDDLEARIKTNRCQAIQLNFSVYTGESKVVHSFFSFSLDLFPTRSFLVQTVDREAEKDQCSLRKILLVWTSFWKKPNSMVALKDPQIAAAPRNTSMKARRGGRNRHRSLQSE

SEQ ID NO: 16724 - protein, 163 aa, Homo sapiens
MRVRIGLTLLLCAVLLSLASASSDEEGSQDESLDSKTTLTSDESVKDHTTAGRVVAGQIFLDSEESELESSIQEEEDSLKSQEGESVTEDISFLESPNPENKDYEEPKKVRKPDKEYDECTSDGREDGRLWCATTYDYKADEKWGFCETEEEAAKRRQMQEAE

SEQ ID NO: 16725 - protein, 119 aa, Homo sapiens
MKQVPTLKIDGITIHQSNLSVLKQVGEEMQLTWAQNAITCGFNALEQILQSTAGIYCVGDEVTMADLCLVPQVANAERFKVDLTPYPTISSINKRLLVLEAFQVSHPCRQPDTPTELRA

SEQ ID NO: 16726 - protein, 86 aa, Homo sapiens
MLYFSLFWAARPLQRCGQLVRMAIRAQHSNAAQTQTGEANRGWTGQESLSDSDPEMWELLQREKDRQCRGLELIASEILWGSRGGG

SEQ ID NO: 16727 - protein, 112 aa, Homo sapiens
MVKIRQFLLAILWLQLSCVSAAKNEVEQSPQNLTAQEGEFITINCSYSVGISALHWLQQHPGGGIVSLFMLSSGKKKHGRLIATINIQEKHSSLHITASHPRDSAVYICAVR

SEQ ID NO: 16728 - protein, 221 aa, Homo sapiens
MRFLAATFLLLALSTAAQAEPVQFKDCGSVDGVIKEVNVSPCPTQPCQLSKGQSYSVNVTFTSNIQSKSSKAVVHGILMGVPVPFPIPEPDGCKSGINCPIQKDKTYSYLNKLPVKSEYPSIKLVVEWQLQDDKNQSLFCWEIPVQIVSLSGGFSSLSASLSSVHLANESAETLDSTSSSAASTTVTCSPMVSSDSLKRRCSVAETELRVAGSQWLSHVSF

SEQ ID NO: 16729 - protein, 121 aa, Homo sapiens
MDKILGASFLVLWLQLCWVSGQQKEKSDQQQVKQSPQSLIVQKGGISIINCAYENTAFDYFPWYQQFPGKGPALLIAIRPDVSEKKEGRFTISFNKSAKQFSSHIMDSQPGDSATYFCAAS

SEQ ID NO: 16730 - protein, 257 aa, Homo sapiens
MGRGWGFLFGLLGAVWLLSSGHGEEQPPETAAQRCFCQVSGYLDDCTCDVETIDRFNNYRLFPRLQKLLESDYFRYYKVNLKRPCPFWNDISQCGRRDCAVKPCQSDEVPDGIKSASYKYSEEANNLIEECEQAERLGAVDESLSEETQKAVLQWTKHDDSSDNFCEADDIQSPEAEYVDLLLNPERYTGYKGPDAWKIWNVIYEENCFKPQTIKRPLNPLASGQGKLLICVSLLFLRSLCRKKSILQTYIWPTCKH

SEQ ID NO: 16731 - protein, 174 aa, Homo sapiens
MRFLAATFLLLALSTAAQAEPVQFKDCGSVDGVIKEVNVSPCPTQPCQLSKGQSYSVNVTFTSNIQSKSSKAVVHGILMGVPVPFPIPEPDGCKSGINCPIQKDKTYSYLNKLPVKSEYPSIKLVVEWQLQDDKNQSLFCWEIPVQIVSLSGGERAWVEGRKWRRNQTETKSVP

SEQ ID NO: 16732 - protein, 667 aa, Homo sapiens
MHFTGAVMQENLRFASSGDDIKIWDASSMTLVDKFNPHTSPHGISSICWSSNNNFLVTASSSGDKIVVSSCKCKPVPLLELAEGQKQTCVNLNSTSMYLVSGGLNNTVNIWDLKSKRVHRSLKDHKDQVTCVTYNWNDCYIASGSLSGEIILHSVTTNLSSTPFGHGSNQSVRHLKYSLFKKSLLGSVSDNGIVTLWDVNSQSPYHNFDSVHKAPASGICFSPVNELLFVTIGLDKRIILYDTSSKKLVKTLVADTPLTAVDFMPDGATLAIGSSRGKIYQYDLRMLKSPVKTISAHKTSVQCIAFQYSTVLTKSSLNKGCSNKPTTVNKRSVNVNAASGGVQNSGIVREAPATSIATVLPQPMTSAMGKGTVAVQEKAGLPRSINTDTLSKETDSGKNQDFSSFDDTGKSSLGDMFSPIRDDAVVNKGSDESIGKGDGFDFLPQLNSVFPPRKNPVTSSTSVLHSSPLNVFMGSPGKEENENRDLTAESKKIYMGKQESKDSFKQLAKLVTSGAESGNLNTSPSSNQTRNSEKFEKPENEIEAQLICEPPINGSSTPNPKIASSVTAGVASSLSEKIADSIGNNRQNAPLTSIQIRFIQNMIQETLDDFREACHRDIVNLQVEMIKQFHMQLNEMHSLLERYSVNEGLVAEIERLREENKRLRAHF

SEQ ID NO: 16733 - protein, 90 aa, Homo sapiens
MQLFLLLCLVLLSPQGASLHRHHPREMKKRVEDLHVGATVAPSSRRDFTFDLYRALASAAPSQSIFFSPVSISMSLAMLSLGAGSSTKMQ

SEQ ID NO: 16734 - protein, 609 aa, Homo sapiens
MYDNMSTMVYIKEDKLEKLTQDEIISKTKQVIQGLEALKNEHNSILQSLLETLKCLKKDDESNLVEEKSNMIRKSLEMLELGLSEAQVMMALSNHLNAVESEKQKLRAQVRRLCQENQWLRDELANTQQKLQKSEQSVAQLEEEKKHLEFMNQLKKYDDDISPSEDKDTDSTKEPLDDLFPNDEDDPGQGIQQQHSSAAAAAQQGGYEIPARLRTLHNLVIQYASQGRYEVAVPLCKQALEDLEKTSGHDHPDVATMLNILALVYRDQNKYKDAANLLNDALAIREKTLGKDHPAVAATLNNLAVLYGKRGKYKEAEPLCKRALEIREKVLGKDHPDVAKQLNNLALLCQNQGKYEEVEYYYQRALEIYQTKLGPDDPNVAKTKNNLASCYLKQGKFKQAETLYKEILTRAHEREFGSVDDENKPIWMHAEEREECKGKQKDGTSFGEYGGWYKACKVDSPTVTTTLKNLGALYRRQGKFEAAETLEEAAMRSRKQGLDNVHKQRVAEVLNDPENMEKRRSRESLNVDVVKYESGPDGGEEDGTGSLKRSGSFSKLRASIRRSSEKLVRKLKGGSSRESEPKNPGASLAEPLFVENDSSSSGLEDATAN

SEQ ID NO: 16735 - protein, 1519 aa, Homo sapiens
MRIPDQKYVTLKLNDVIRFGYDSNMYVLERVQHRVPEEALKHEKYTSQLQVSVKGLAPKRSEALPEHTPYCEASNPRPEKGDRRPGTEAASYRTPLYGQPSWWGEDDGSTLPDAQRQGEPYPERPKGPVQQDGELHGFRAPAEPQGCSFRREPSYFEIPTKETPQPSQPPEVPAHEMPTKDAEAGGGGAAPVVQSHASFTIEFDDCSPGKMKIKDHITKFSLRQRRPPGKEATPGEMVSAETKVADWLVQNDPSLLHRVGPGDDRHSTKSDLPVHTRTLKGHKHEDGTQSDSEDPLAKAASAAGVPLEASGEQVRLQRQIKRDPQELLHNQQAFVIEFFDEDTPRKKRSQSFTHSPSGDPKADKRRGPTPADRDRPSVPAPVQAGGRSSGPQRAGSLKREKTEERLGSPSPASRTPARPFGSVGRRSRLAQDFMAQCLRESSPAARPSPEKVPPVLPAPLTPHGTSPVGPPTPPPAPTDPQLTKARKQEEDDSLSDAGTYTIETEAQDTEVEEARKMIDQVFGVLESPELSRASSATFRPVIRGDRDESDDGGVAQRMALLQEFASRPLGAAPQAEHQGLPVPGSPGGQKWVSRWASLADSYSDPGLTEDGLGRRGGEPEGSLPVRMRRRLPQLPSERADSPAGPESSRRSGPGPPELDSEQPSRLFGQEELDPDSLSDASGSDGGRGPEPGVEPQDSRRRSPQEGPTWSRGRRSPRAPGEPTPASFFIGDQNGDAVLSRKPLAAPGDGEGLGQTAQPSPPARDGVYVSANGRMVIQLRPGRSPEPDGPAPAFLRQESFTKEPASGPPAPGKPPHISSHPLLQDLAATRAARMDFHSQDTHLILKETETALAALEARLLSNSVDAECEGGSTPRPPEDALSGDSDVDTASTVSLRSGKSGPSPTTPQPLRAQKEMSPSPPAAQDPGGTALVSAREQSSERQHHPLGPTDMGRGEPVRRSAIRRGHRPRGSLDWPSEERGPVLAHLPSSDVMASNHETPEATGAGRLGSRRKPAAPPPSPAAREEQSRSSASSQKGPQALTRSNSLSTPRPTRASRLRRARLGDASDTEAADGERGSLGNPEPVGRPAAEQAKKLSRLDILAMPRKRAGSFTGTSDPEAAPARTSFSGRSVELCCASRKPTMAEARAVSRKAANTATTTGPRQPFSRARSGSARYTSNTRRRQQGSDYTSTSEEEYGSRHGSPKHTRSHTSTATQTPRAGSSSRARSRAPGPRDTDDDEEEPDPYGFIVQTAEIAEIARLSQTLVKDVAILAQEIHDVAGDGDTLGSSEPAHSASLSNMPSTPASTISAREELVQRIPEASLNFQKVPPGSLNSRDFDQNMNDSCEDALANKTRPRNREEVIFDNLMLNPVSQLSQAIRENTEHLAEKMKILFQNTGRAWEDLEARINAENEVPILKTSNKEISSILKELRRVQKQLEVINAIVDPSGSLDLLTGNRSLASSAQPGLGKGRVAAQSPPSPASAEALLPALPLRNFPQRASCGPPSLPDPTFLPDAERFLI

SEQ ID NO: 16736 - protein, 318 aa, Homo sapiens
METRYNLKSPAVKRLMKEAAELKDPTDHYHAQPLEDNLFEWHFTVRGPPDSDFDGGVYHGRIVLPPEYPMKPPSIILLTANGRFEVGKKICLSISGHHPETWQPSWSIRTALLAIIGFMPTKGEGAIGSLDYTPEERRALAKKSQDFCCEGCGSAMKDVLLPLKSGSDSSQADQEAKELARQISFKAEVNSSGKTISESDLNHSFSLTDLQDDIPTTFQGATASTSYGLQNSSAASFHQPTQPVAKNTSMSPRQRRAQQQSQRRLSTSPDVIQGHQPRDNHTDHGGSAVLIVILTLALAALIFRRIYLANEYIFDFEL

SEQ ID NO: 16737 - protein, 1118 aa, Homo sapiens
MEPSRALLGCLASAAAAAPPGEDGAGAGAEEEEEEEEEAAAAVGPGELGCDAPLPYWTAVFEYEAAGEDELTLRLGDVVEVLSKDSQVSGDEGWWTGQLNQRVGIFPSNYVTPRSAFSSRCQPGGEDPSCYPPIQLLEIDFAELTLEEIIGIGGFGKVYRAFWIGDEVAVKAARHDPDEDISQTIENVRQEAKLFAMLKHPNIIALRGVCLKEPNLCLVMEFARGGPLNRVLSGKRIPPDILVNWAVQIARGMNYLHDEAIVPIIHRDLKSSNILILQKVENGDLSNKILKITDFGLAREWHRTTKMSAAGTYAWMAPEVIRASMFSKGSDVWSYGVLLWELLTGEVPFRGIDGLAVAYGVAMNKLALPIPSTCPEPFAKLMEDCWNPDPHSRPSFTNILDQLTTIEESGFFEMPKDSFHCLQDNWKHEIQEMFDQLRAKEKELRTWEEELTRAALQQKNQEELLRRREQELAEREIDILERELNIIIHQLCQEKPRVKKRKGKFRKSRLKLKDGNRISLPSDFQHKFTVQASPTMDKRKSLINSRSSPPASPTIIPRLRAIQLTPGESSKTWGRSSVVPKEEGEEEEKRAPKKKGRTWGPGTLGQKELASGDEGSPQRREKANGLSTPSESPHFHLGLKSLVDGYKQWSSSAPNLVKGPRSSPALPGFTSLMEMALLAASWVVPIDIEEDEDSEGPGSGESRLQHSPSQSYLCIPFPRGEDGDGPSSDGIHEEPTPVNSATSTPQLTPTNSLKRGGAHHRRCEVALLGCGAVLAATGLGFDLLEAGKCQLLPLEEPEPPAREEKKRREGLFQRSSRPRRSTSPPSRKLFKKEEPMLLLGDPSASLTLLSLSSISECNSTRSLLRSDSDEIVVYEMPVSPVEAPPLSPCTHNPLVNVRVERFKRDPNQSLTPTHVTLTTPSQPSSHRRTPSDGALKPETLLASRSPSSNGLSPSPGAGMLKTPSPSRDPGEFPRLPDPNVVFPPTPRRWNTQQDSTLERPKTLEFLPRPRPSANRQRLDPWWFVSPSHARSTSPANSSSTETPSNLDSCFASSSSTVEERPGLPALLPFQAGPLPPTERTLLDLDAEGQSQDSTVPLCRAELNTHRPAPYEIQQEFWS

SEQ ID NO: 16738 - protein, 61 aa, Homo sapiens
MVELMFPLLLLLLPFLLYMAAPQIRSLPPNPSAARETKGISPIKDSKCVFPRTSPGKDPLP

SEQ ID NO: 16739 - protein, 112 aa, Homo sapiens
METLLKVLSGTLLWQLTWVRSQQPVQSPQAVILREGEDAVINCSSSKALYSVHWYRQKHGEAPVFLMILLKGGEQKGHDKISASFNEKKQQSSLYLTASQLSYSGTYFCGTE

SEQ ID NO: 16740 - protein, 333 aa, Homo sapiens
MATPASAPDTRALVADFVGYKLRQKGYVCGAGPGEGPAADPLHQAMRAAGDEFETRFRRTFSDLAAQLHVTPGSAQQRFTQVSDELFQGGPNWGRLVAFFVFGAALCAESVNKEMEPLVGQVQEWMVAYLETQLADWIHSSGGWELEAIKARVREMEEEAEKLKELQNEVEKQMNMSPPPGNAGPVIMSIEEKMEADARSIYVGNVDYGATAEELEAHFHGCGSVNRVTILCDKFSGHPKGFAYIEFSDKESVRTSLALDESLFRGRQIKVIPKRTNRPGISTTDRGFPRARYRARTTNYNSSRSRFYSGFNSRPRGRVYRGRARATSWYSPY

SEQ ID NO: 16741 - protein, 109 aa, Homo sapiens
MKPTLISVLVIIFILRGTRAQRVTQPEKLLSVFKGAPVELKCNYSYSGSPELFWYVQYSRQRLQLLLRHISRESIKGFTADLNKGETSFHLKKPFAQEEDSAMYYCALS

SEQ ID NO: 16742 - protein, 269 aa, Homo sapiens
MSGCRVFIGRLNPAAREKDVERFFKGYGRIRDIDLKRGFGFVDPRDADDAVYELDGKELCSERVTIEHARARSRGGRGRGRYSDRFSSRRPRNDRRNAPPVRTENRLIVENLSSRVSWQDLKDFMRQAGEVTFADAHRPKLNEGVVEFASYGDLKNAIEKLSGKEINGRKIKLIEGSKRHSRSRSRSRSRTRSSSRSRSRSRSRSRKSYSRSRSRSRSRSRSKSRSVSRSPVPEKSQKRGSSSRSKSPASVDRQRSRSRSRSRSVDSGN

SEQ ID NO: 16743 - protein, 149 aa, Homo sapiens
MPVMRLFPCFLQLLAGLALPAVPPQQWALSAGNGSSEVEVVPFQEVWGRSYCRALERLVDVVSEYPSEVEHMFSPSCVSLLRCTGCCGDENLHCVPVETANVTMQLLKIRSGDRPSYVELTFSQHVRCECRPLREKMKPERCGDAVPRR

SEQ ID NO: 16744 - protein, 51 aa, Homo sapiens
MRRRVVLLSQEMDAGLQAWQLRQQKLQEEQRKQENALKPKGASLKSPLPSQ

SEQ ID NO: 16745 - protein, 195 aa, Homo sapiens
MLRAALPALLLPLLGLAAAAVAGADMISIHNEEENAFILDTLKKQWKGPDDILLGMFYDTDDASFKWFDNSNMTFDKWTDQDDDEDLVDTCAFLHIKTGEWKKGNCEVSSVEGTLCKTAIPYKRKYLSDNHILISALVIASTVILTVLGAIIWFLYKKHSDSRFTTVFSTAPQSPYNEDCVLVVGEENEYPVQFD

SEQ ID NO: 16746 - protein, 167 aa, Homo sapiens
MSSSCSGLSRVLVAVATALVSASSPCPQAWGPPGVQYGQPGRSVKLCCPGVTAGDPVSWFRDGEPKLLQGPDSGLGHELVLAQADSTDEGTYICQTLDGALGGTVTLQLGYPPARPVVSCQAADYENFSCTWSPSQISGLPTRYLTSYRKKTVLGADSQRRSPSTGP

SEQ ID NO: 16747 - protein, 296 aa, Homo sapiens
MLTPPLLLLLPLLSALVAAAIDAPKTCSPKQFACRDQITCISKGWRCDGERDCPDGSDEAPEICPQSKAQRCQPNEHNCLGTELCVPMSRLCNGVQDCMDGSDEGPHCRELQGNCSRLGCQHHCVPTLDGPTCYCNSSFQLQADGKTCKDFDECSVYGTCSQLCTNTDGSFICGCVEGYLLQPDNRSCKAKNEPVDRPPVLLIANSQNILATYLSGAQVSTITPTSTRQTTAMDFSYANETVCWVHVGDSAAQTQLKCARMPGLKGFVDEHTINISLSLHRRSRKRAQENEVTQHG

SEQ ID NO: 16748 - protein, 136 aa, Homo sapiens
METFPLLLLSLGLVLAEASESTMKIIKEEFTDEEMQYDMAKSGQEKQTIEILMNPILLVKNTSLSMSKDDMSSTLLTFRSLHYNDPKGNSSGNDKECCNDMTVWRKVSEANGSCKWSNNFIRSSTEVMRRVHRAPS

SEQ ID NO: 16749 - protein, 38 aa, Homo sapiens
MSESLVVCDVAEDLVEKLRKFRFRKETNNAAIIRHFTR

SEQ ID NO: 16750 - protein, 1777 aa, Homo sapiens
MRPRTKARSPGRALRNPWRGFLPLTLALFVGAGHAQRDPVGRYEPAGGDANRLRRPGGSYPAAAAAKVYSLFREQDAPVAGLQPVERAQPGWGSPRRPTEAEARRPSRAQQSRRVQPPAQTRRSTPLGQQQPAPRTRAAPALPRLGTPQRSGAAPPTPPRGRLTGRNVCGGQCCPGWTTANSTNHCIKPVCEPPCQNRGSCSRPQLCVCRSGFRGARCEEVIPDEEFDPQNSRLAPRRWAERSPNLRRSSAAGEGTLARAQPPAPQSPPAPQSPPAGTLSGLSQTHPSQQHVGLSRTVRLHPTATASSQLSSNALPPGPGLEQRDGTQQAVPLEHPSSPWGLNLTEKIKKIKIVFTPTICKQTCARGHCANSCERGDTTTLYSQGGHGHDPKSGFRIYFCQIPCLNGGRCIGRDECWCPANSTGKFCHLPIPQPDREPPGRGSRPRALLEAPLKQSTFTLPLSNQLASVNPSLVKVHIHHPPEASVQIHQVAQVRGGVEEALVENSVETRPPPWLPASPGHSLWDSNNIPARSGEPPRPLPPAAPRPRGLLGRCYLNTVNGQCANPLLELTTQEDCCGSVGAFWGVTLCAPCPPRPASPVIENGQLECPQGYKRLNLTHCQDINECLTLGLCKDAECVNTRGSYLCTCRPGLMLDPSRSRCVSDKAISMLQGLCYRSLGPGTCTLPLAQRITKQICCCSRVGKAWGSECEKCPLPGTEAFREICPAGHGYTYASSDIRLSMRKAEEEELARPPREQGQRSSGALPGPAERQPLRVVTDTWLEAGTIPDKGDSQAGQVTTSVTHAPAWVTGNATTPPMPEQGIAEIQEEQVTPSTDVLVTLSTPGIDRCAAGATNVCGPGTCVNLPDGYRCVCSPGYQLHPSQAYCTDDNECLRDPCKGKGRCINRVGSYSCFCYPGYTLATSGATQECQDINECEQPGVCSGGQCTNTEGSYHCECDQGYIMVRKGHCQDINECRHPGTCPDGRCVNSPGSYTCLACEEGYRGQSGSCVDVNECLTPGVCAHGKCTNLEGSFRCSCEQGYEVTSDEKGCQDVDECASRASCPTGLCLNTEGSFACSACENGYWVNEDGTACEDLDECAFPGVCPSGVCTNTAGSFSCKDCDGGYRPSPLGDSCEDVDECEDPQSSCLGGECKNTVGSYQCLCPQGFQLANGTVCEDVNECMGEEHCAPHGECLNSHGSFFCLCAPGFVSAEGGTSCQDVDECATTDPCVGGHCVNTEGSFNCLCETGFQPSPESGECVDIDECANDTMCGSHGFCDNTDGSFRCLCDQGFEISPSGWDCVDVNECELMLAVCGAALCENVEGSFLCLCASDLEEYDAQEGHCRPRGAGGQSMSEAPTGDHAPAPTRMDCYSGQKGHAPCSSVLGRNTTQAECCCTQGASWGDACDLCPSEDSAEFSEICPSGKGYIPVEGAWTFGQTMYTDADECVIFGPGLCPNGRCLNTVPGYVCLCNPGFHYDASHKKCEDHDECQDLACENGECVNTEGSFHCFCSPPLTLDLSQQRCMNSTSSTEDLPDHDIHMDICWKKVTNDVCSEPLRGHRTTYTECCCQDGEAWSQQCALCPPRSSEVYAQLCNVARIEAEREAGVHFRPGYEYGPGPDDLHYSIYGPDGAPFYNYLGPEDTVPEPAFPNTAGHSADRTPILESPLQPSELQPHYVASHPEPPAGFEGLQAEECGILNGCENGRCVRVREGYTCDCFEGFQLDAAHMACVDVNECDDLNGPAVLCVHGYCENTEGSYRCHCSPGYVAEAGPPHCTAKE

SEQ ID NO: 16751 - protein, 287 aa, Homo sapiens
MIVQRVVLNSRPGKNGNPVAENFRMEEVYLPDNINEGQVQVRTLYLSVDPYMRCRMNEDTGTDYITPWQLSQVVDGGGIGIIEESKHTNLTKGDFVTSFYWPWQTKVILDGNSLEKVDPQLVDGHLSYFLGAIGMPGLTSLIGIQEKGHITAGSNKTMVVSGAAGACGSVAGQMNENSHIILCGQISQYNKDVPYPPPLSPAIEAIQKERNITRERFLVLNYKDKFEPGILQLSQWFKEGKLKIKETVINGLENMGAAFQSMMTGGYIDYPPSTTSYGKSIVFPRGI

SEQ ID NO: 16752 - protein, 91 aa, Homo sapiens
MPGIKRILTVTILALCLPSPGNAQAQCTNGFDLDRQSGQCLDIDECRTIPEACRGDMMCVNQNGGYLCIPRTNPVYRGPYSNPYSTPYSGP

SEQ ID NO: 16753 - protein, 24 aa, Homo sapiens
MQLFLLLCLVLLSPQGASLHRHHP

SEQ ID NO: 16754 - protein, 88 aa, Homo sapiens
MWLYLAAFVGLYYLLHWYRERQVVSHLQDKYVFITGCDSGFGNLLARQLDARGLRVLAACLTEKGAEQLRGQTSDRLETVTLDVTKME

SEQ ID NO: 16755 - protein, 99 aa, Homo sapiens
MLQSIIKNIWIPMKPYYTKVYQEIWIGMGLMGFIVYKIRAAEMGFCHVTQAGLELLGSSSPPILASQSAGINKREPQHLAQLGNFEQDFNIRIIKEVRL

SEQ ID NO: 16756 - protein, 117 aa, Homo sapiens
MVWKVAVFLSVALGIGAVPIDDPEDGGKHWVVIVAGSNGWYNYRHQADACHAYQIIHRNGIPDEQIVVMMYDDIAYSEDNPTPGIVINRPNGTDVYQGVPKDYTGEWPPGSRVHLLH

SEQ ID NO: 16757 - protein, 371 aa, Homo sapiens
MIEDSGKRGNTMAERRQLFAEMRAQDLDRIRLSTYRTACKLRFVQKKCNLHLVDIWNVIEALRENALNNLDPNTELNVSRLEAVLSTIFYQLNKRMPTTHQIHVEQSISLLLNFLLAAFDPEGHGKISVFAVKMALATLCGGKIMDKLRYIFSMISDSSGVMVYGRYDQFLREVLKLPTAVFEGPSFGYTEQSARSCFSQQKKVTLNGFLDTLMSDPPPQCLVWLPLLHRLANVENVFHPVECSYCHSESMMGFRYRCQQCHNYQLCQDCFWRGHAGGSHSNQHQMKEYTSWKSPAKKLTNALSKSLSCASSREPLHPMFPDQPEKPLNLAHIVPPRPVTSMNDTLFSHSVPSSGSPFITRSSDGAFGGCV

SEQ ID NO: 16758 - protein, 306 aa, Homo sapiens
MPSSVSWGILLLAGLCCLVPVSLAEDPQGDAAQKTDTSHHDQDHPTFNKITPNLAEFAFSLYRQLAHQSNSTNIFFSPVSIATAFAMLSLGTKADTHDEILEGLNFNLTEIPEAQIHEGFQELLRTLNQPDSQLQLTTGNGLFLSEGLKLVDKFLEDVKKLYHSEAFTVNFGDTEEAKKQINDYVEKGTQGKIVDLVKELDRDTVFALVNYIFFKGKWERPFEVKDTEEEDFHVDQVTTVKVPMMKRLGMFNIQHCKKLSSWVLLMKYLGNATAIFFLPDEGKLQHLENELTHDIITKFLENEDRR

SEQ ID NO: 16759 - protein, 86 aa, Homo sapiens
MDNGMFSGFIMIKNLLLFCISMNLSSHFGFSQMPTSSVKDETNDNITIFTRILDGLLDGYDNRLRPGLGERITQVRTDIYVTSFGP

SEQ ID NO: 16760 - protein, 494 aa, Homo sapiens
MSAAWIPALGLGVCLLLLPGPAGSEGAAPIAITCFTRGLDIRKEKADVLCPGGCPLEEFSVYGNIVYASVSSICGAAVHRGVISNSGGPVRVYSLPGRENYSSVDANGIQSQMLSRWSASFTVTKGKSSTQEATGQAVSTAHPPTGKRLKKTPEKKTGNKDCKADIAFLIDGSFNIGQRRFNLQKNFVGKVALMLGIGTEGPHVGLVQASEHPKIEFYLKNFTSAKDVLFAIKEVGFRGGNSNTGKALKHTAQKFFTVDAGVRKGIPKVVVVFIDGWPSDDIEEAGIVAREFGVNVFIVSVAKPIPEELGMVQDVTFVDKAVCRNNGFFSYHMPNWFGTTKYVKPLVQKLCTHEQMMCSKTCYNSVNIAFLIDGSSSVGDSNFRLMLEFVSNIAKTFEISDIGAKIAAVQFTYDQRTEFSFTDYSTKENVLAVIRNIRYMSGGTATGDAISFTVRNVFGPIRESPNKNFLVIVTDGQSYDDVQGPAAAAHDAAK

SEQ ID NO: 16761 - protein, 109 aa, Homo sapiens
MRQVARVIVFLTLSTLSLAKTTQPISMDSYEGQEVNITCSHNNIATNDYITWYQQFPSQGPRFIIQGYKTKVTNEVASLFIPADRKSSTLSLPRVSLSDTAVYYCLVGD

SEQ ID NO: 16762 - protein, 68 aa, Homo sapiens
MSSSCSGLSRVLVAVATALVSASSPCPQAWGPPGVQYGQPGRSVKLCCPGVTAGPSSPPCCLLPSSRL

SEQ ID NO: 16763 - protein, 203 aa, Homo sapiens
MKEEGVKLLREAMGIYISTLKTEFTQGMILPTMNGESVDPVGQPALKTEERKAKPAPSKTQARPVGVKIPTCKITLKETFLTSPEELYRVFTTQELVQAFTHAPATLEADRGGKFHMVDGNVSGEFTDLVPEKHIVMKWRFKSWPEGHFATITLTFIDKNGETELCMEGRGIPAPEEERTRQGWQRYYFEGIKQTFGYGARLF

SEQ ID NO: 16764 - protein, 111 aa, Homo sapiens
MLSASCSGLVILLIFRRTSGDSVTQTEGPVTLPERAALTLNCTYQSSYSTFLFWYVQYLNKEPELLLKSSENQETDSRGFQASPIKSDSSFHLEKPSVQLSDSAVYYCALR

SEQ ID NO: 16765 - protein, 15 aa, Homo sapiens
MRPWTGSWRWIMLIL

SEQ ID NO: 16766 - protein, 115 aa, Homo sapiens
MQRISSLIHLSLFWAGVMSAIELVPEHQTVPVSIGVPATLRCSMKGEAIGNYYINWYRKTQGNTMTFIYREKDIYGPGFKDNFQGDIDIAKNLAVLKILAPSERDEGSYYCACDT

SEQ ID NO: 16767 - protein, 105 aa, Homo sapiens
MAPSGSLAVPLAVLVLLLWGAPWTHGRRSNVRVITDENWRELLEGDWMIEFYAPWCPACQNLQPEWESFAEWGEDLEVNIAKVDVTEQPGLSGRFIITALPTIYQ

SEQ ID NO: 16768 - protein, 1104 aa, Homo sapiens
MEPSRALLGCLASAAAAAPPGEDGAGAGAEEEEEEEEEAAAAVGPGELGCDAPLPYWTAVFEYEAAGEDELTLRLGDVVEVLSKDSQVSGDEGWWTGQLNQRVGIFPSNYVTPRSAFSSRCQPGGEDPSCYPPIQLLEIDFAELTLEEIIGIGGFGKVYRAFWIGDEVAVKAARHDPDEDISQTIENVRQEAKLFAMLKHPNIIALRGVCLKEPNLCLVMEFARGGPLNRVLSGKRIPPDILVNWAVQIARGMNYLHDEAIVPIIHRDLKSSNILILQKVENGDLSNKILKITDFGLAREWHRTTKMSAAGTYAWMAPEVIRASMFSKGSDVWSYGVLLWELLTGEVPFRGIDGLAVAYGVAMNKLALPIPSTCPEPFAKLMEDCWNPDPHSRPSFTNILDQLTTIEESGFFEMPKDSFHCLQDNWKHEIQEMFDQLRAKEKELRTWEEELTRAALQQKNQEELLRRREQELAEREIDILERELNIIIHQLCQEKPRVKKRKGKFRKSRLKLKDGNRISLPSDFQHKFTVQASPTMDKRKSLINSRSSPPASPTIIPRLRAIQLTPGESSKTWGRSSVVPKEEGEEEEKRAPKKKGRTWGPGTLGQKELASGDEGSPQRREKANGLSTPSESPHFHLGLKSLVDGYKQWSSSAPNLVKGPRSSPALPGFTSLMEMEDEDSEGPGSGESRLQHSPSQSYLCIPFPRGEDGDGPSSDGIHEEPTPVNSATSTPQLTPTNSLKRGGAHHRRCEVALLGCGAVLAATGLGFDLLEAGKCQLLPLEEPEPPAREEKKRREGLFQRSSRPRRSTSPPSRKLFKKEEPMLLLGDPSASLTLLSLSSISECNSTRSLLRSDSDEIVVYEMPVSPVEAPPLSPCTHNPLVNVRVERFKRDPNQSLTPTHVTLTTPSQPSSHRRTPSDGALKPETLLASRSPSSNGLSPSPGAGMLKTPSPSRDPGEFPRLPDPNVVFPPTPRRWNTQQDSTLERPKTLEFLPRPRPSANRQRLDPWWFVSPSHARSTSPANSSSTETPSNLDSCFASSSSTVEERPGLPALLPFQAGPLPPTERTLLDLDAEGQSQDSTVPLCRAELNTHRPAPYEIQQEFWS

SEQ ID NO: 16769 - protein, 508 aa, Homo sapiens
MATEGGGKEMNEIKTQFTTREGLYKLLPHSEYSRPNRVPFNSQGSNPVRVSFVNLNDQSGNGDRLCFNVGRELYFYIYKGVRKRLIDKSRVTCVKWVPGSESLFLVAHSSGNMYLYNVEHTCGTTAPHYQLLKQGESFAVHTCKSKSTRNPLLKWTVGEGALNEFAFSPDGKFLACVSQDGFLRVFNFDSVELHGTMKSYFGGLLCVCWSPDGKYIVTGGEDDLVTVWSFVDCRVIARGHGHKSWVSVVAFDPYTTSVEEGDPMEFSGSDEDFQDLLHFGRDRANSTQSRLSKRNSTDSRPVSVTYRFGSVGQDTQLCLWDLTEDILFPHQPLSRARTHTNVMNATSPPAGSNGNSVTTPGNSVPPPLPRSNSLPHSAVSNAGSKSSVMDGAIASGVSKFATLSLHDRKERHHEKDHKRNHSMGHISSKSSDKLNLVTKTKTDPAKTLGTPLCPRMEDVPLLEPLICKKIAHERLTVLIFLEDCIVTACQEGFICTWGRPGKVVSFNP

SEQ ID NO: 16770 - protein, 178 aa, Homo sapiens
MNCKEGTDSSCGCRGNDEKKMLKCVVVGDGAVGKTCLLMSYANDAFPEEYVPTVFDHYAVTVTVGGKQHLLGLYDTAGQEDYNQLRPLSYPNTDVFLICFSVVNPASYHNVQEEWVPELKDCMPHVPYVLIGTQIDLRDDPKTLARLLYMKEKPLTYEHGVKLAKAVQSDLNFILNVC

SEQ ID NO: 16771 - protein, 144 aa, Homo sapiens
MQLFLLLCLVLLSPQGASLHRHHPREMKKRVEDLHVGATVAPSSRRDFTFDLYRALASAAPSQSIFFSPVSISMSLAMLSLGAGSSTKMQILEGLGLNLQKSSEKELHRGFQQLLQELNQPRDGFQLSLGNALFTDLVVDLQDT

SEQ ID NO: 16772 - protein, 637 aa, Homo sapiens
MHLRIHARRSPPRRPAWTLGIWFLFWGCIVSSVWSSSNVASSSSTSSSPGSHSQHEHHFHGSKHHSVPISIYRSPVSLRGGHAGATYIFGKSGGLILYTWPANDRPSTRSDRLAVGFSTTVKDGILVRIDSAPGLGDFLQLHIEQGKIGVVFNIGTVDISIKEERTPVNDGKYHVVRFTRNGGNATLQVDNWPVNEHYPTGRQLTIFNTQAQIAIGGKDKGRLFQGQLSGLYYDGLKVLNMAAENNPNIKINGSVRLVGEVPSILGTTQTTSMPPEMSTTVMETTTTMATTTTRKNRSTASIQPTSDDLVSSAECSSDDEDFVECEPSTGGELVIPLLVEDPLATPPIATRAPSITLPPTFRPLLTIIETTKDSLSMTSEAGLPCLSDQGSDGCDDDGLVISGYGSGETFDSNLPPTDDEDFYTTFSLVTDKSLSTSIFEGGYKAHAPKWESKDFRPNKVSETSRTTTTSLSPELIRFTASSSSGMVPKLPAGKMNNRDLKPQPDIVLLPLPTAYELDSTKLKSPLITSPMFRNVPTANPTEPGIRRVPGASEVIRESSSTTGMVVGIVAAAALCILILLYAMYKYRNRDEGSYQVDETRNYISNSAQSNGTLMKEKQQSSKSGHKKQKNKDREYYV

SEQ ID NO: 16773 - protein, 86 aa, Homo sapiens
MQLFLLLCLVLLSPQGASLHRHHPREMKKRVEDLHVGATVAPSSRRDFTFDLYRALASAAPSQSIFFSPVSISMSLAMLSLGAGSS

SEQ ID NO: 16774 - protein, 292 aa, Homo sapiens
MASNVTNKTDPRSMNSRVFIGNLNTLVVKKSDVEAIFSKYGKIVGCSVHKGFAFVQYVNERNARAAVAGEDGRMIAGQVLDINLAAEPKVNRGKAGVKRSAAEMYGSSFDLDYDFQRDYYDRMYSYPARVPPPPPIARAVVPSKRQRVSGNTSRRGKSGFNSKSGQRGSSKSGKLKGDDLQAIKKELTQIKQKVDSLLENLEKIEKEQSKQAEMKNDKSEEEQSSSSVKKDETNVKMESEGGADDSAEEGDLLDDDDNEDRGDDQLELIKDDEKEAEEGEDDRDSANGEDDS

SEQ ID NO: 16775 - protein, 90 aa, Homo sapiens
MGMGRGAGRSALGFWPTLAFLLCSFPAATSPCKILKCNSEFWSATSGSHAPASDDTPEFCAALRSYALCTRRTARTCRGDLAYHSAVHGI

SEQ ID NO: 16776 - protein, 105 aa, Homo sapiens
MGFTGAGIAASSIAAKMMSAAAIANGGGVSAGSLVATLQSVGAAGLSTSSNILLASVGSVLGACLGNSPSSSLPAEPEAKEDEARENVPQGEPPKPPLKSEKHEE

SEQ ID NO: 16777 - protein, 1262 aa, Homo sapiens
MRLLLLVPLLLAPAPGSSAPKVRRQSDTWGPWSQWSPCSRTCGGGVSFRERPCYSQRRDGGSSCVGPARSHRSCRTESCPDGARDFRAEQCAEFDGAEFQGRRYRWLPYYSAPNKCELNCIPKGENFYYKHREAVVDGTPCEPGKRDVCVDGSCRVVGCDHELDSSKQEDKCLRCGGDGTTCYPVAGTFDANDLSRGYNQILIVPMGATSILIDEAAASRNFLAVKNVRGEYYLNGHWTIEAARALPAASTILHYERGAEGDLAPERLHARGPTSEPLVIELISQEPNPGVHYEYHLPLRRPSPGFSWSHGSWSDCSAECGGGHQSRLVFCTIDHEAYPDHMCQRQPRPADRRSCNLHPCPETKRWKAGPWAPCSASCGGGSQSRSVYCISSDGAGIQEAVEEAECAGLPGKPPAIQACNLQRCAAWSPEPWGECSVSCGVGVRKRSVTCRGERGSLLHTAACSLEDRPPLTEPCVHEDCPLLSDQAWHVGTWGLCSKSCSSGTRRRQVICAIGPPSHCGSLQHSKPVDVEPCNTQPCHLPQEVPSMQDVHTPASNPWMPLGPQESPASDSRGQWWAAQEHPSARGDHRGERGDPRGDQGTHLSALGPAPSLQQPPYQQPLRSGSGPHDCRHSPHGCCPDGHTASLGPQWQGCPGAPCQQSRYGCCPDRVSVAEGPHHAGCTKSYGGDSTGGMPRSRAVASTVHNTHQPQAQQNEPSECRGSQFGCCYDNVATAAGPLGEGCVGQPSHDWAARWYFVASVGQCNRFWYGGCHGNANNFASEQECMSSCQGSLHGPRRPQPGASGRSTHTDGGGSSPAGEQEPSQHRTGAAVQRKPWPSGGLWRQDQQPGPGEAPHTQAFGEWPWGQELGSRAPGLGGDAGSPAPPFHSSSYRISLAGVEPSLVQAALGQLVRLSCSDDTAPESQAAWQKDGQPISSDRHRLQFDGSLIIHPLQAEDAGTYSCGSTRPGRDSQKIQLRIIGGDMAVLSEAELSRFPQPRDPAQDFGQAGAAGPLGAIPSSHPQPANRLRLDQNQPRVVDASPGQRIRMTCRAEGFPPPAIEWQRDGQPVSSPRHQLQPDGSLVISRVAVEDGGFYTCVAFNGQDRDQRWVQLRVLGELTISGLPPTVTVPEGDTARLLCVVAGESVNIRWSRNGLPVQADGHRVHQSPDGTLLIYNLRARDEGSYTCSAYQGSQAVSRSTEVKVVSPAPTAQPRDPGRDCVDQPELANCDLILQAQLCGNEYYSSFCCASCSRFQPHAQPIWQ

SEQ ID NO: 16778 - protein, 109 aa, Homo sapiens
MVLKFSVSILWIQLAWVSTQLLEQSPQFLSIQEGENLTVYCNSSSVFSSLQWYRQEPGEGPVLLVTVVTGGEVKKLKRLTFQFGDARKDSSLHITAAQTGDTGLYLCAG

SEQ ID NO: 16779 - protein, 439 aa, Homo sapiens
MLTPPLLLLLPLLSALVAAAIDAPKTCSPKQFACRDQITCISKGWRCDGERDCPDGSDEAPEICPQSKAQRCQPNEHNCLGTELCVPMSRLCNGVQDCMDGSDEGPHCRELQGNCSRLGCQHHCVPTLDGPTCYCNSSFQLQADGKTCKDFDECSVYGTCSQLCTNTDGSFICGCVEGYLLQPDNRSCKAKNEPVDRPPVLLIANSQNILATYLSGAQVSTITPTSTRQTTAMDFSYANETVCWVHVGDSAAQTQLKCARMPGLKGFVDEHTINISLSLHHVEQMAIDWLTGNFYFVDDIDDRIFVCNRNGDTCVTLLDLELYNPKGIALDPAMGKVFFTDYGQIPKVERCDMDGQNRTKLVDSKIVFPHGITLDLVSRLVYWADAYLDYIEVVDYEGKGRQTIIQGILVRELLSEVLWGNHDPGPSGEGGSLCRGTVL

SEQ ID NO: 16780 - protein, 223 aa, Homo sapiens
MVWKVAVFLSVALGIGAVPIDDPEDGGKHWVVIVAGSNGWYNYRHQADACHAYQIIHRNGIPDEQIVVMMYDDIAYSEDNPTPGIVINRPNGTDVYQGVPKDYTGEDVTPQNFLAVLRGDAEAVKGIGSGKVLKSGPQDHVFIYFTDHGSTGILVFPNEDLHVKDLNETIHYMYKHKMYRKMVFYIEACESGSMMNHLPDNINGRWLGRRPRPGLASRLLRHR

SEQ ID NO: 16781 - protein, 113 aa, Homo sapiens
MILTVGFSFLFFYRGTLCDKVTQSSPDQTVASGSEVVLLCTYDTVYSNPDLFWYRIRPDYSFQFVFYGDNSRSEGADFTQGRFSVKHILTQKAFHLVISPVRTEDSATYYCAF

SEQ ID NO: 16782 - protein, 108 aa, Homo sapiens
ATSPSSSWAATLALWLGLLFPMETAQHLAQPWTPTRPAIITVNAKPIPSLQCVGQMASPTCLPALLAATARISRAVRASPPSLLRTQPWFLENAPVLGAKRPSSLSSV

SEQ ID NO: 16783 - protein, 57 aa, Homo sapiens
MVWKVAVFLSVALGIGAVPIDDPEDGGKHWVVIVAGSNGWYNYRHQADACHAYQIIH

SEQ ID NO: 16784 - protein, 1278 aa, Homo sapiens
MRLLLLVPLLLAPAPGSSAPKVRRQSDTWGPWSQWSPCSRTCGGGVSFRERPCYSQRRDGGSSCVGPARSHRSCRTESCPDGARDFRAEQCAEFDGAEFQGRRYRWLPYYSAPNKCELNCIPKGENFYYKHREAVVDGTPCEPGKRDVCVDGSCRVVGCDHELDSSKQEDKCLRCGGDGTTCYPVAGTFDANDLSRGYNQILIVPMGATSILIDEAAASRNFLAVKNVRGEYYLNGHWTIEAARALPAASTILHYERGAEGDLAPERLHARGPTSEPLVIELISQEPNPGVHYEYHLPLRRPSPGFSWSHGSWSDCSAECGGGHQSRLVFCTIDHEAYPDHMCQRQPRPADRRSCNLHPCPETKRWKAGPWAPCSASCGGGSQSRSVYCISSDGAGIQEAVEEAECAGLPGKPPAIQACNLQRCAAWSPEPWGECSVSCGVGVRKRSVTCRGERGSLLHTAACSLEDRPPLTEPCVHEDCPLLSDQAWHVGTWGLCSKSCSSGTRRRQVICAIGPPSHCGSLQHSKPVDVEPCNTQPCHLPQEVPSMQDVHTPASNPWMPLGPQESPASDSRGQWWAAQEHPSARGDHRGERGDPRGDQGTHLSALGPAPSLQQPPYQQPLRSGSGPHDCRHSPHGCCPDGHTASLGPQWQGCPGAPCQQSRYGCCPDRVSVAEGPHHAGCTKSYGGDSTGGMPRSRAVASTVHNTHQPQAQQNEPSECRGSQFGCCYDNVATAAGPLGEGCVGQPSHAYPVRCLLPSAHGSCADWAARWYFVASVGQCNRFWYGGCHGNANNFASEQECMSSCQGSLHGPRRPQPGASGRSTHTDGGGSSPAGEQEPSQHRTGAAVQRKPWPSGGLWRQDQQPGPGEAPHTQAFGEWPWGQELGSRAPGLGGDAGSPAPPFHSSSYRISLAGVEPSLVQAALGQLVRLSCSDDTAPESQAAWQKDGQPISSDRHRLQFDGSLIIHPLQAEDAGTYSCGSTRPGRDSQKIQLRIIGGDMAVLSEAELSRFPQPRDPAQDFGQAGAAGPLGAIPSSHPQPANRLRLDQNQPRVVDASPGQRIRMTCRAEGFPPPAIEWQRDGQPVSSPRHQLQPDGSLVISRVAVEDGGFYTCVAFNGQDRDQRWVQLRVLGELTISGLPPTVTVPEGDTARLLCVVAGESVNIRWSRNGLPVQADGHRVHQSPDGTLLIYNLRARDEGSYTCSAYQGSQAVSRSTEVKVVSPAPTAQPRDPGRDCVDQPELANCDLILQAQLCGNEYYSSFCCASCSRFQPHAQPIWQ

SEQ ID NO: 16785 - protein, 407 aa, Homo sapiens
MATSWGTVFFMLVVSCVCSAVSHRNQQTWFEGIFLSSMCPINVSASTLYGIMFDAGSTGTRIHVYTFVQKMPGQLPILEGEVFDSVKPGLSAFVDQPKQGAETVQGLLEVAKDSIPRSHWKKTPVVLKATAGLRLLPEHKAKALLFEVKEIFRKSPFLVPKGSVSIMDGSDEGILAWVTVNFLTGQLHGHRQETVGTLDLGGASTQITFLPQFEKTLEQTPRGYLTSFEMFNSTYKLYTHSYLGFGLKAARLATLGALETEGTDGHTFRSACLPRWLEAEWIFGGVKYQYGGNQEGEVGFEPCYAEVLRVVRGKLHQPEEVQRGSFYAFSYYYDRAVDTDMIDYEKGGILKVEDFERKAREVCDNLENFTSGSPFLCMDLSYITALLKDGFGFADSTVLQHIISWVN

SEQ ID NO: 16786 - protein, 114 aa, Homo sapiens
MMKSLRVLLVILWLQLSWVWSQQKEVEQDPGPLSVPEGAIVSLNCTYSNSAFQYFMWYRQYSRKGPELLMYTYSSGNKEDGRFTAQVDKSSKYISLFIRDSQPSDSATYLCAMS

SEQ ID NO: 16787 - protein, 90 aa, Homo sapiens
MLIGPDGRLIRSLGQASEADPSGVASIACSSCVRAVDGKAVCGQCERALCGQCVRTCWGCGSVACTLCGLVDCSDMYEKVLCTSCAMFET

SEQ ID NO: 16788 - protein, 22 aa, Homo sapiens
MPSSVSWGILLLAGLCCLVPVS

SEQ ID NO: 16789 - protein, 284 aa, Homo sapiens
MDDFISISLLSLAMLVGCYVAGIIPLAVNFSEERLKLVTVLGAGLLCGTALAVIVPEGVHALYEDILEGKHHQASETHNVIASDKAAEKSVVHEHEHSHDHTQLHAYIGVSLVLGFVFMLLVDQIGNSHVHSTDADGVALGAAASTSQTSVQLIVFVAIMLHKAPAAFGLVSFLMHAGLERNRIRKHLLVFALAAPVMSMVTYLGLSKSSKEALSEVNATGVAMLFSAGTFLYVATVHVLPEVGGIGHSHKPDATGGRGLSRLEVAALVLGCLIPLILSVGHQH

SEQ ID NO: 16790 - protein, 151 aa, Homo sapiens
MDASLSMLANCEKLSLSTNCIEKIANLNGLKNLRILSLGRNNIKNLNGLEAVGDTLEELWISYNFIEKLKGIHIMKKLKILYMSNNLVKDWAEFVKLAELPCLEDLVFVGNPLEEKHSAENNWIEEATKRVPKLKKLDGTPVIKGDEEEDN

SEQ ID NO: 16791 - protein, 114 aa, Homo sapiens
MEKNPLAAPLLILWFHLDCVSSILNVEQSPQSLHVQEGDSTNFTCSFPSSNFYALHWYRWETAKSPEALFVMTLNGDEKKKGRISATLNTKEGYSYLYIKGSQPEDSATYLCAF

SEQ ID NO: 16792 - protein, 43 aa, Homo sapiens
MTEYKLVVVGAGGVGKSALTIQLIQNHFVDEYDPTIEVLLSSM

SEQ ID NO: 16793 - protein, 372 aa, Homo sapiens
MVWKVAVFLSVALGIGAVPIDDPEDGGKHWVVIVAGSNGWYNYRHQADACHAYQIIHRNGIPDEQIVVMMYDDIAYSEDNPTPGIVINRPNGTDVYQGVPKDYTGEDVTPQNFLAVLRGDAEAVKGIGSGKVLKSGPQDHVFIYFTDHGSTGILVFPNEDLHVKDLNETIHYMYKHKMYRKMVFYIEACESGSMMNHLPDNINVYATTAANPRESSYACYYDEKRSTYLGDWYSVNWMEDSDVEDLTKETLHKQYHLVKSHTNTSHVMQYGNKTISTMKVMQFQGMKRKASSPVPLPPVTHLDLTPSPDVPLTIMKRKLMNTNDLEESRQLTEEIQRHLDDKIVHGPRVPWSLLKSCLLEAFPSVSAPPTVC

SEQ ID NO: 16794 - protein, 92 aa, Homo sapiens
MAKFGVHRILLLAISLTKCLESTKLLADLKKCGDLECEALINRVSAMRDYRGPDCRYLNFTKGEEISVYVKLAGEREDLWAGSKGKEFGYFP

SEQ ID NO: 16795 - protein, 295 aa, Homo sapiens
MEDDRICSPPFMELTSLCGDDTMRLLEKNGLTFPFICKTRVAHGTNSHEMAIVFNQEGLNAIQPPCVVQNFINHNAVLYKVFVVGESYTVVQRPSLKNFSAGTSDRESIFFNSHNVSKPESSSVLTELDKIEGVFERPSDEVIRELSRALRQALGVSLFGIDIIINNQTGQHAVIDINAFPGYEGVSEFFTDLLNHIATVLQGQSTAMAATGDVALLRHSKLLAEPAGGLVGERTCSASPGCCGSMMGQDAPWKAEADAGGTAKLPHQRLGCNAGVSPSFQQHCVASLATKASSQ

SEQ ID NO: 16796 - protein, 465 aa, Homo sapiens
MEKILFYLFLIGIAVKAQICPKRCVCQILSPNLATLCAKKGLLFVPPNIDRRTVELRLADNFVTNIKRKDFANMTSLVDLTLSRNTISFITPHAFADLRNLRALHLNSNRLTKITNDMFSGLSNLHHLILNNNQLTLISSTAFDDVFALEELDLSYNNLETIPWDAVEKMVSLHTLSLDHNMIDNIPKGTFSHLHKMTRLDVTSNKLQKLPPDPLFQRAQVLATSGIISPSTFALSFGGNPLHCNCELLWLRRLSREDDLETCASPPLLTGRYFWSIPEEEFLCEPPLITRHTHEMRVLEGQRATLRCKARGDPEPAIHWISPEGKLISNATRSLVYDNGTLDILITTVKDTGAFTCIASNPAGEATQIVDLHIIKLPHLLNSTNHIHEPDPGSSDISTSTKSGSNTSSSNGDTKLSQDKIVVAEATSSTALLKFNFQRNIPGIRMFQIQYNGTYDDTLVYRGWS

SEQ ID NO: 16797 - protein, 178 aa, Homo sapiens
MSEVRLPPLRALDDFVLGSARLAAPDPCDPQRWCHRVINNLLYYQTNYLLCFGIGLALAGYVRPLHTLLSALVVAVALGVLVWAAETRAAVRRCRRSHPAACLAAVLAVGLLVLWVAGGACTFLFSIAGPVLLILVHASLRLRNLKNKIENKIESIGLKRTPMGLLLEALGQEQEAGS

SEQ ID NO: 16798 - protein, 453 aa, Homo sapiens
MRSGNCRQRYMILTVTILALCLPSPGNAQAQCTNGFDLDRQSGQCLDIDECRTIPEACRGDMMCVNQNGGYLCIPRTNPVYRGPYSNPYSTPYSGPYPAAAPPLSAPNYPTISRPLICRFGYQMDESNQCVDVDECATDSHQCNPTQICINTEGGYTCSCTDGYWLLEGQCLDIDECRYGYCQQLCANVPGSYSCTCNPGFTLNEDGRSCQDVNECATENPCVQTCVNTYGSFICRCDPGYELEEDGVHCSDMDECSFSEFLCQHECVNQPGTYFCSCPPGYILLDDNRSCQDINECEHRNHTCNLQQTCYNLQGGFKCIDPIRCEEPYLRISDNRCMCPAENPGCRDQPFTILYRDMDVVSGRSVPADIFQMQATTRYPGAYYIFQIKSGNEGREFYMRQTGPISATLVMTRPIKGPREIQLDLEMITVNTVINFRGSSVIRLRIYVSQYPF

SEQ ID NO: 16799 - protein, 112 aa, Homo sapiens
METVLQVLLGILGFQAAWVSSQELEQSPQSLIVQEGKNLTINCTSSKTLYGLYWYKQKYGEGLIFLMMLQKGGEEKSHEKITAKLDEKKQQSSLHITASQPSHAGIYLCGAD

SEQ ID NO: 16800 - protein, 468 aa, Homo sapiens
MGPVMPPSKKPESSGISVSSGLSQCYGGSGFSKALQEDDDLDFSLPDIRLEEGAMEDEELTNLNWLHESKNLLKSFGESVLRSVSPVQDLDDDTPPSPAHSDMPYDARQNPNCKPPYSFSCLIFMAIEDSPTKRLPVKDIYNWILEHFPYFANAPTGWKNSVRHNLSLNKCFKKVDKERSQSIGKGSLWCIDPEYRQNLIQALKKTPYHPHPHVFNTPPTCPQAYQSTSGPPIWPGSTFFKRNGALLQVPPGVIQNGARVLSRGLFPGVRPLPITPIGVTAAMRNGITSCRMRTESEPSCGSPVVSGDPKEDHNYSSAKSSNARSTSPTSDSISSSSSSADDHYEFATKGSQEGSEGSEGSFRSHESPSDTEEDDRKHSQKEPKDSLGDSGYASQHKKRQHFAKARKVPSDTLPLKKRRTEKPPESDDEEMKEAAGSLLHLAGIRSCLNNITNRTAKGQKEQKETTKN

SEQ ID NO: 16801 - protein, 112 aa, Homo sapiens
MNYSPGLVSLILLLLGRTRGDSVTQMEGPVTLSEEAFLTINCTYTATGYPSLFWYVQYPGEGLQLLLKATKADDKGSNKGFEATYRKETTSFHLEKGSVQVSDSAVYFCALS

SEQ ID NO: 16802 - protein, 136 aa, Homo sapiens
MPLLLYTCLLWLPTSGLWTVQAMDPNAAYVNMSNHHRGLASANVDFAFSLYKHLVALSPKKNIFISPVSISMALAMLSLGTCGHTRAQLLQGLGFNLTERSETEIHQGFQHLHQLFAKSDTSLEMTMGNALFLDGS

SEQ ID NO: 16803 - protein, 87 aa, Homo sapiens
MWGLAGGRLFGIFSAPVLVAVVCCAQSVNDPGNMSFVKETVDKLLKGYDIRLRPDFGGPPVCVGMNIDIASIDMVSEVNMAMQELHS

SEQ ID NO: 16804 - protein, 112 aa, Homo sapiens
MEKMLECAFIVLWLQLGWLSGEDQVTQSPEALRLQEGESSSLNCSYTVSGLRGLFWYRQDPGKGPEFLFTLYSAGEEKEKERLKATLTKKESFLHITAPKPEDSATYLCAVQ

SEQ ID NO: 16805 - protein, 305 aa, Homo sapiens
MVELMFPLLLLLLPFLLYMAAPQIRKMLSSGVCTSTVQLPGKVVVVTGANTGARVYLACRDVEKGELVAKEIQTTTGNQQVLVRKLDLSDTKSIRAFAKGFLAEEKHLHVLINNAGVMMCPYSKTADGFEMHIGVNHLGHFLLTHLLLEKLKESAPSRIVNVSSLAHHLGRIHFHNLQGEKFYNAGLAYCHSKLANILFTQELARRLKGSGVTTYSVHPGTVQSELVRHSSFMRWMWWLFSFFIKTPQQGAQTSLHCALTEGLEILSGNHFSDCHVAWVSAQARNETIARRLWDVSCDLLGLPID

SEQ ID NO: 16806 - protein, 112 aa, Homo sapiens
METLLGVSLVILWLQLARVNSQQGEEDPQALSIQEGENATMNCSYKTSINNLQWYRQNSGRGLVHLILIRSNEREKHSGRLRVTLDTSKKSSSLLITASRAADTASYFCATD

SEQ ID NO: 16807 - protein, 124 aa, Homo sapiens
MSGCRVFIGRLNPAAREKDVERFFKGYGRIRDIDLKRGFGFVEFEDPRDADDAVYELDGKELCSERVTIEHARARSRGGRGRGRYSDRFSSRRPRNDRRNAPPVRTENRLIVENLSSRVSWQVC

SEQ ID NO: 16808 - protein, 125 aa, Homo sapiens
MGRGWGFLFGLLGAVWLLSSGHGEEQPPETAAQRCFCQVSGYLDDCTCDVETIDRFNNYRLFPRLQKLLESDYFRYYKVNLKRPCPFWNDISQCGRRDCAVKPCQSDEVPDGIKSASYKVCTYTY

SEQ ID NO: 16809 - protein, 109 aa, Homo sapiens
MLLITSMLVLWMQLSQVNGQQVMQIPQYQHVQEGEDFTTYCNSSTTLSNIQWYKQRPGGHPVFLIQLVKSGEVKKQKRLTFQFGEAKKNSSLHITATQTTDVGTYFCAG

SEQ ID NO: 16810 - protein, 75 aa, Homo sapiens
MWLYLAAFVGLYYLLHWYRERQVVSHLQDKYVFITGCDSGFGNLLARQLDARGLRVLAACLTEKGAEQLRGQTSD

SEQ ID NO: 16811 - protein, 62 aa, Homo sapiens
MVELMFPLLLLLLPFLLYMAAPQIRSSSIFSLPGCGKGGIGGQRDPDHDREPAGVGAETGPV

SEQ ID NO: 16812 - protein, 1769 aa, Homo sapiens
MRPRTKARSPGRALRNPWRGFLPLTLALFVGAGHAQRDPVGRYEPAGGDANRLRRPGGSYPAAAAAKVYSLFREQDAPVAGLQPVERAQPGWGSPRRPTEAEARRPSRAQQSRRVQPPAQTRRSTPLGQQQPAPRTRAAPALPRLGTPQRSGAAPPTPPRGRLTGRNVCGGQCCPGWTTANSTNHCIKPVCEPPCQNRGSCSRPQLCVCRSGFRGARCEEVIPDEEFDPQNSRLAPRRWAERSPNLRRSSAAGEGTLARAQPPAPQSPPAPQSPPAGTLSGLSQTHPSQQHVGLSRTVRLHPTATASSQLSSNALPPGPGLEQRDGTQQAVPLEHPSSPWGLNLTEKIKKIKIVFTPTICKQTCARGHCANSCERGDTTTLYSQGGHGHDPKSGFRIYFCQIPCLNGGRCIGRDECWCPANSTGKFCHLPIPQPDREPPGRGSRPRALLEAPLKQSTFTLPLSNQLASVNPSLVKVHIHHPPEASVQIHQVAQVRGGVEEALVENSVETRPPPWLPASPGHSLWDSNNIPARSGEPPRPLPPAAPRPRGLLGRCYLNTVNGQCANPLLELTTQEDCCGSVGAFWGVTLCAPCPPRPASPVIENGQLECPQGYKRLNLTHCQDINECLTLGLCKDAECVNTRGSYLCTCRPGLMLDPSRSRCVSDKAISMLQGLCYRSLGPGTCTLPLAQRITKQICCCSRVGKAWGSECEKCPLPGTEAFREICPAGHGYTYASSDIRLSMRKAEEEELARPPREQGQRSSGALPGPAERQPLRVVTDTWLEAGTIPDKGDSQAGQVTTSVTHAPAWVTGNATTPPMPEQGIAEIQEEQVTPSTDVLVTLSTPGIDRCAAGATNVCGPGTCVNLPDGYRCVCSPGYQLHPSQAYCTDDNECLRDPCKGKGRCINRVGSYSCFCYPGYTLATSGATQECQDINECEQPGVCSGGQCTNTEGSYHCECDQGYIMVRKGHCQDINECRHPGTCPDGRCVNSPGSYTCLACEEGYRGQSGSCVDVNECLTPGVCAHGKCTNLEGSFRCSCEQGYEVTSDEKGCQDVDECASRASCPTGLCLNTEGSFACSACENGYWVNEDGTACEDLDECAFPGVCPSGVCTNTAGSFSCKDCDGGYRPSPLGDSCEDVDECEDPQSSCLGGECKNTVGSYQCLCPQGFQLANGTVCEDVNECMGEEHCAPHGECLNSHGSFFCLCAPGFVSAEGGTSCQDVDECATTDPCVGGHCVNTEGSFNCLCETGFQPSPESGECVDIDECEDYGDPVCGTWKCENSPGSYRCVLGCQPGFHMAPNGDCIDIDECANDTMCGSHGFCDNTDGSFRCLCDQGFEISPSGWDCVDVNECELMLAVCGAALCENVEGSFLCLCASDLEEYDAQEGHCRPRGAGGQSMSEAPTGDHAPAPTRMDCYSGQKGHAPCSSVLGRNTTQAECCCTQGASWGDACDLCPSEDSAEFSEICPSGKGYIPVEGAWTFGQTMYTDADECVIFGPGLCPNGRCLNTVPGYVCLCNPGFHYDASHKKCEDHDECQDLACENGECVNTEGSFHCFCSPPLTLDLSQQRCMNSTSSTEDLPDHDIHMDICWKKVTNDVCSEPLRGHRTTYTECCCQDGEAWSQQCALCPPRSSEVYAQLCNVARIEAEREAGVHFRPGYEYGPGPDDLHYSIYGPDGAPFYNYLGPEDTVPEPAFPNTAGHSADRTPILESPLQPSELQPHYVASHPGLCCCKTGEEVGTKAVSLPSPPPASHIASRSPQPASKGFRRRSAAS

SEQ ID NO: 16813 - protein, 115 aa, Homo sapiens
MLFSSLLCVFVAFSYSGSSVAQKVTQAQSSVSMPVRKAVTLNCLYETSWWSYYIFWYKQLPSKEMIFLIRQGSDEQNAKSGRYSVNFKKAAKSVALTISALQLEDSAKYFCALGE

SEQ ID NO: 16814 - protein, 1141 aa, Homo sapiens
MAGARSRDPWGASGICYLFGSLLVELLFSRAVAFNLDVMGALRKEGEPGSLFGFSVALHRQLQPRPQSWLLVGAPQALALPGQQANRTGGLFACPLSLEETDCYRVDIDQGADMQKESKENQWLGVSVRSQGPGGKIVTCAHRYEARQRVDQILETRDMIGRCFVLSQDLAIRDELDGGEWKFCEGRPQGHEQFGFCQQGTAAAFSPDSHYLLFGAPGTYNWKGTARVELCAQGSADLAHLDDGPYEAGGEKEQDPRLIPVPANSYFGFSIDSGKGLVRAEELSFVAGAPRANHKGAVVILRKDSASRLVPEVMLSGERLTSGFGYSLAVADLNSDGWPDLIVGAPYFFERQEELGGAVYVYLNQGGHWAGISPLRLCGSPDSMFGISLAVLGDLNQDGFPDIAVGAPFDGDGKVFIYHGSSLGVVAKPSQVLEGEAVGIKSFGYSLSGSLDMDGNQYPDLLVGSLADTAVLFRARPILHVSHEVSIAPRSIDLEQPNCAGGHSVCVDLRVCFSYIAVPSSYSPTVALDYVLDADTDRRLRGQVPRVTFLSRNLEEPKHQASGTVWLKHQHDRVCGDAMFQLQENVKDKLRAIVVTLSYSLQTPRLRRQAPGQGLPPVAPILNAHQPSTQRAEIHFLKQGCGEDKICQSNLQLVRARFCTRVSDTEFQPLPMDVDGTTALFALSGQPVIGLELMVTNLPSDPAQPQADGDDAHEAQLLVMLPDSLHYSGVRALDPAEKPLCLSNENASHVECELGNPMKRGAQVTFYLILSTSGISIETTELEVELLLATISEQELHPVSARARVFIELPLSIAGMAIPQQLFFSGVVRGERAMQSERDVGSKVKYEVTVSNQGQSLRTLGSAFLNIMWPHEIANGKWLLYPMQVELEGGQGPGQKGLCSPRPNILHLDVDSRDRRRRELEPPEQQEPGERQEPSMSWWPVSSAEKKKNITLDCARGTANCVVFSCPLYSFDRAAVLHVWGRLWNSTFLEEYSAVKSLEVIVRANITVKSSIKNLMLRDASTVIPVMVYLDPMAVVAEGVPWWVILLAVLAGLLVLALLVLLLWKMGFFKRAKHPEATVPQYHAVKIPREDRQQFKEEKTGTILRNNWGSPRREGPDAHPILAADGHPELGPDGHPGPGTA

SEQ ID NO: 16815 - protein, 116 aa, Homo sapiens
MLTASLLRAVIASICVVSSMAQKVTQAQTEISVVEKEDVTLDCVYETRDTTYYLFWYKQPPSGELVFLIRRNSFDEQNEISGRYSWNFQKSTSSFNFTITASQVVDSAVYFCALSE

SEQ ID NO: 16816 - protein, 156 aa, Homo sapiens
MPSSVSWGILLLAGLCCLVPVSLAEDPQGDAAQKTDTSHHDQDHPTFNKITPNLAEFAFSLYRQLAHQSNSTNIFFSPVSIATAFAMLSLGTKADTHDEILEGLNFNLTEIPEAQIHEGFQELLRTLNQPDSQLQLTTGNGLFLSEGLKLVDKFLE

SEQ ID NO: 16817 - protein, 46 aa, Homo sapiens
MGMGRGAGRSALGFWPTLAFLLCSFPAAHHHLQELPGVCGPEGVPG

SEQ ID NO: 16818 - protein, 152 aa, Homo sapiens
MSSSCSGLSRVLVAVATALVSASSPCPQAWGPPDPPARPVVSCQAADYENFSCTWSPSQISGLPTRYLTSYRKKTVLGADSQRRSPSTGPWPCPQDPLGAARCVVHGAEFWSQYRINVTEVNPLGASTRLLDVSLQSILRPDPPQGLRVESV

SEQ ID NO: 16819 - protein, 62 aa, Homo sapiens
KAMTAAAGSAGRAAVPLLLCALLAPGGAYVLDDSDGLGREFDGIGAVSGGGDWCLKVSLKGR

SEQ ID NO: 16820 - protein, 119 aa, Homo sapiens
MAMLLGASVLILWLQPDWVNSQQKNDDQQVKQNSPSLSVQEGRISILNCDYTNSMFDYFLWYKKYPAEGPTFLISISSIKDKNEDGRFTVFLNKSAKHLSLHIVPSQPGDSAVYFCAAS

SEQ ID NO: 16821 - protein, 1501 aa, Homo sapiens
MMAKNKEPRPPSYTISIVGLSGTEKDKGNCGVGKSCLCNRFVRSKADEYYPEHTSVLSTIDFGGRVVNNDHFLYWGDIIQNSEDGVECKIHVIEQTEFIDDQTFLPHRSTNLQPYIKRAAASKLQSAEKLMYICTDQLGLEQDFEQKQMPEGKLNVDGFLLCIDVSQGCNRKFDDQLKFVNNLFVQLSKSKKPVIIAATKCDECVDHYLREVQAFASNKKNLLVVETSARFNVNIETCFTALVQMLDKTRSKPKIIPYLDAYKTQRQLVVTATDKFEKLVQTVRDYHATWKTVSNKLKNHPDYEEYINLEGTRKARNTFSKHIEQLKQEHIRKRREEYINTLPRAFNTLLPNLEEIEHLNWSEALKLMEKRADFQLCFVVLEKTPWDETDHIDKINDRRIPFDLLSTLEAEKVYQNHVQHLISEKRRVEMKEKFKKTLEKIQFISPGQPWEEVMCFVMEDEAYKYITEADSKEVYGRHQREIVEKAKEEFQEMLFEHSELFYDLDLNATPSSDKMSEIHTVLSEEPRYKALQKLAPDRESLLLKHIGFVYHPTKETCLSGQNCTDIKVEQLLASSLLQLDHGRLRLYHDSTNIDKVNLFILGKDGLAQELANEIRTQSTDDEYALDGKIYELDLRPVDAKSPYFLSQLWTAAFKPHGCFCVFNSIESLSFIGEFIGKIRTEASQIRKDKYMANLPFTLILANQRDSISKNLPILRHQGQQLANKLQCPFVDVPAGTYPRKFNETQIKQALRGVLESVKHNLDVVSPIPANKDLSEADLRIVMCAMCGDPFSVDLILSPFLDSHSCSAAQAGQNNSLMLDKIIGEKRRRIQITILSYHSSIGVRKDELVHGYILVYSAKRKASMGMLRAFLSEVQDTIPVQLVAVTDSQADFFENEAIKELMTEGEHIATEITAKFTALYSLSQYHRQTEVFTLFFSDVLEKKNMIENSYLSDNTRESTHQSEDVFLPSPRDCFPYNNYPDSDDDTEAPPPYSPIGDDVQLLPTPSDRSRYRLDLEGNEYPIHSTPNCHDHERNHKVPPPIKPKPVVPKTNVKKLDPNLLKTIEAGIGKNPRKQTSRVPLAHPEDMDPSDNYAEPIDTIFKQKGYSDEIYVVPDDSQNRIKIRNSFVNNTQGDEENGFSDRTSKSHGERRPSKYKYKSKTLFSKAKSYYRRTHSDASDDEAFTTSKTKRKGRHRGSEEDPLLSPVETWKGGIDNPAITSDQELDDKKMKKKTHKVKEDKKKKKTKNFNPPTRRNWESNYFGMPLQDLVTAEKPIPLFVEKCVEFIEDTGLCTEGLYRVSGNKTDQDNIQKQFDQDHNINLVSMEVTVNAVAGALKAFFADLPDPLIPYSLHPELLEAAKIPDKTERLHALKEIVKKFHPVNYDVFRYVITHLNRVSQQHKINLMTADNLSICFWPTLMRPDFENREFLSTTKIHQSVVETFIQQCQFFFYNGEIVETTNIVAPPPPSNPGQLVEPMVPLQLPPPLQPQLIQPQLQTDPLGII

SEQ ID NO: 16822 - protein, 253 aa, Homo sapiens
MAPKLLLLLCLFSGLHARSRKVEEDEYEDSSSNQKWVLAPKSQDTDVTLILNKLLREYDKKLRPDIGIKPTVIDVDIYVNSIGPVSSINMEYQIDIFFAQTWTDSRLRFNSTMKILTLNSNMVGLIWIPDTIFRNSKTAEAHWITTPNQLLRIWNDGKILYTLRLTINAECQLQLHNFPMDEHSCPLIFSSYGYPKEEMIYRWRKNSVEAADQKSWRLYQFDFMGLRNTTEIVTTSAGRNLLKEAQLSKAREA

SEQ ID NO: 16823 - protein, 305 aa, Homo sapiens
MERMLPLLALGLLAAGFCPAVLCHPNSPLDEENLTQENQDRGTHVDLGLASANVDFAFSLYKQLVLKAPDKNVIFSPLSISTALAFLSLGAHNTTLTEILKGLKFNLTETSEAEIHQSFQHLLRTLNQSSDELQLSMGNAMFVKEQLSLLDRFTEDAKRLYGSEAFATDFQDSAAAKKLINDYVKNGTRGKITDLIKDLDSQTMMVLVNYIFFKAKWEMPFDPQDTHQSRFYLSKKKWVMVPMMSLHHLTIPYFRDEELSCTVVELKYTGNASALFILPDQDKMEEVEAMLLPETLKRWRDSLEF

SEQ ID NO: 16824 - protein, 1339 aa, Homo sapiens
MAKFGVHRILLLAISLTKCLESTKLLADLKKCGDLECEALINRVSAMRDYRGPDCRYLNFTKGEEISVYVKLAGEREDLWAGSKGKEFGYFPRDAVQIEEVFISEEIQMSTKESDFLCLLGVSYTFDNEDSELNGDYGENIYPYEEDKDEKSSIYESDFQIEPGFYATYESTLFEDQVPALEAPEDIGSTSESKDWEEVVVESMEQDRIPEVHVPPSSAVSGVKEWFGLGGEQAEEKAFESVIEPVQESSFRSRKIAVEDENDLEELNNGEPQTEHQQESESEIDSVPKTQSELASESEHIPKPQSTGWFGGGFTSYLGFGDEDTGLELIAEESNPPLQDFPNSISSDKEATVPCTEILTEKKDTITNDSLSLKPSWFDFGFAILGFAYAKEDKIMLDDRKNEEDGGADEHEHPLTSELDPEKEQEIETIKIIETEDQIDKKPVSEKTDESDTIPYLKKFLYNFDNPWNFQNIPKETELPFPKQILDQNNVIENEETGEFSIDNYPTDNTKVMIFKSSYSLSEDASEFQILKYLFQIDVYDFMNSAFSPIVILTERVVAALPEGMRPDSNLYGFPWELVICAAVVGFFAVLFFLWRSFRSVRSRLYVGREKKLALMLSGLIEEKSKLLEKFSLVQKEYEGYEVESSLKDASFEKEATEAQSLEATCEKLNRSNSELEDEILCLEKELKEEKSKHSEQDELMADISKRIQSLEDESKSLKSQVAEAKMTFKIFQMNEERLKIAIKDALNENSQLQESQKQLLQEAEVWKEQVSELNKQKVTFEDSKVHAEQVLNDKESHIKTLTERLLKMKDWAAMLGEDITDDDNLELEMNSESENGAYLDNPPKGALKKLIHAAKLNASLKTLEGERNQIYIQLSEVDKTKEELTEHIKNLQTEQASLQSENTHFENENQKLQQKLKVMTELYQENEMKLHRKLTVEENYRLEKEEKLSKVDEKISHATEELETYRKRAKDLEEELERTIHSYQGQIISHEKKAHDNWLAARNAERNLNDLRKENAHNRQKLTETELKFELLEKDPYALDVPNTAFGREHSPYGPSPLGWPSSETRAFLSPPTLLEGPLRLSPLLPGGGGRGSRGPGNPLDHQITNERGESSCDRLTDPHRAPSDTGSLSPPWDQDRRMMFPPPGQSYPDSALPPQRQDRFCSNSGRLSGPAELRSFNMPSLDKMDGSMPSEMESSRNDTKDDLGNLNVPDSSLPAENEATGPGFVPPPLAPIRGPLFPVDARGPFLRRGPPFPPPPPGAMFGASRDYFPPGDFPGPPPAPFAMRNVYPPRGFPPYLPPRPGFFPPPPHSEGRSEFPSGLIPPSNEPATEHPEPQQET

SEQ ID NO: 16825 - protein, 169 aa, Homo sapiens
MGRGWGFLFGLLGAVWLLSSGHGEEQPPETAAQRCFCQVNLKRPCPFWNDISQCGRRDCAVKPCQSDEVPDGIKSASYKYSEEANNLIEECEQAERLGAVDESLSEETQKAVLQWTKHDDSSDNFCEADDIQSPEAEYVDLLLNPERYTGYKGPDAWKIWNVIYEENCF

SEQ ID NO: 16826 - protein, 36 aa, Homo sapiens
MRLLPEWFLLLFGPWLLRKPRPGLSLPPARSWEHPA

SEQ ID NO: 16827 - protein, 113 aa, Homo sapiens
MKSFEHMKKSGDYYVTVVEDVTLGQIVATATLIIEHKFIHSCAKRGRVEDVVVSDECRGKQLGKLLLSTLTLLSKKLNCYKITLECLPQNVGFYKKFGYTVSEENYMCRRFLK

SEQ ID NO: 16828 - protein, 67 aa, Homo sapiens
MFAFLNVVVTLAWPSQLLLPLFSFWRPHYPIMSLCEDMLLCNYRKCRIKLSGYAWVTACSHIFCDQH

SEQ ID NO: 16829 - protein, 116 aa, Homo sapiens
MACPGFLWALVISTCLEFSMAQTVTQSQPEMSVQEAETVTLSCTYDTSESDYYLFWYKQPPSRQMILVIRQEAYKQQNATENRFSVNFQKAAKSFSLKISDSQLGDAAMYFCAYRS

SEQ ID NO: 16830 - protein, 80 aa, Homo sapiens
MSAAWIPALGLGVCLLLLPGPAGSEGAAPIAITCFTRGLDIRKEKADVLCPGGCPLEEFSVYGNIVYASVSSICGAAVHR

SEQ ID NO: 16831 - protein, 462 aa, Homo sapiens
MSSAPTTPPSVDKVDGFSRKSVRKARQKRSQSSSQFRSQGKPIELTPLPLLKDVPSSEQPELFLKKLQQCCVIFDFMDTLSDLKMKEYKRSTLNELVDYITISRGCLTEQTYPEVVRMVSCNIFRTLPPSDSNEFDPEEDEPTLEASWPHLQLVYEFFIRFLESQEFQPSIAKKYIDQKFVLQLLELFDSEDPRERDYLKTVLHRIYGKFLGLRAFIRKQINNIFLRFVYETEHFNGVAELLEILGSIINGFALPLKAEHKQFLVKVLIPLHTVRSLSLFHAQLAYCIVQFLEKDPSLTEPVIRGLMKFWPKTCSQKEVMFLGELEEILDVIEPSQFVKIQEPLFKQIAKCVSSPHFQVAERALYYWNNEYIMSLIEENSNVILPIMFSSLYRISKEHWNPAIVALVYNVLKAFMEMNSTMFDELTATYNEKKKEKEREELWKKLEDLELKRGLRRDGIIPT

SEQ ID NO: 16832 - protein, 171 aa, Homo sapiens
METFPLLLLSLGLVLAEASESTMKIIKEEFTDEEMQYDMAKSGQEKQTIEILMNPILLVKNTSLSMSKDDMSSTLLTFRSLHYNDPKGNSSGNDKECCNDMTVWRKVSEANGSCKWSNNFIRSSTEVMRRVHRAPSCKFVQNPGISCCESLELENTVCQFTTGKQFPRCQY

SEQ ID NO: 16833 - protein, 110 aa, Homo sapiens
MKRILGALLGLLSAQVCCVRGIQVEQSPPDLILQEGANSTLRCNFSDSVNNLQWFHQNPWGQLINLFYIPSGTKQNGRLSATTVATERYSLLYISSSQTTDSGVYFCAVE

SEQ ID NO: 16834 - protein, 203 aa, Homo sapiens
MALASVLERPLPVNQRGFFGLGGRADLLDLGPGSLSDGLSLAAPGWGVPEEPGIEMLHGTTTLAFKFRHGVIVAADSRATAGAYIASQTVKKVIEINPYLLGTMAGGAADCSFWERLLARQCRIYELRNKERISVAAASKLLANMVYQYKGMGLSMGTMICGWDKRGPVSEVLCLKPKSFGMYLFCGCAERIGNMARPLLRGQ

SEQ ID NO: 16835 - protein, 109 aa, Homo sapiens
MRLVARVTVFLTFGTIIDAKTTQPTSMDCAEGRAANLPCNHSTISGNEYVYWYRQIHSQGPQYIIHGLKNNETNEMASLIITEDRKSSTLILPHATLRDTAVYYCIVRV

SEQ ID NO: 16836 - protein, 144 aa, Homo sapiens
MPSSVSWGILLLAGLCCLVPVSLAEDPQGDAAQKTDTSHHDQDHPTFNKITPNLAEFAFSLYRQLAHQSNSTNIFFSPVSIATAFAMLSLGTKADTHDEILEGLNFNLTEIPEAQIHEGFQELLRTLNQPDSQLQLTTGNGLFL

SEQ ID NO: 16837 - protein, 376 aa, Homo sapiens
MANSANTNTVPKLYRSVIEDVINDVRDIFLDDGVDEQVLMELKTLWENKLMQSRAVDGFHSEEQQLLLQVQQQHQPQQQQHHHHHHHQQAQPQQTVPQQAQTQQVLIPASQQATAPQVIVPDSKLIQHMNASNMSAAATAATLALPAGVTPVQQILTNSGQLLQVVRAANGAQYIFQPQQSVVLQQQVIPQMQPGGVQAPVIQQVLAPLPGGISPQTGVIIQPQQILFTGNKTQVIPTTVAAPTPAQAQITATGQQQPQAQPAQTQAPLVLQVDGTGDTSSEEDEDEEEDYDDDEEEDKEKDGAEDGQVEEEPLNSEDDVSDEEGQELFDTENVVVCQYDKIHRSKNKWKFHLKDGIMNLNGRDYIFSKAIGDAEW

SEQ ID NO: 16838 - protein, 929 aa, Homo sapiens
MRLLLLVPLLLAPAPGSSAPKVRRQSDTWGPWSQWSPCSRTCGGGVSFRERPCYSQRRDGGSSCVGPARSHRSCRTESCPDGARDFRAEQCAEFDGAEFQGRRYRWLPYYSAPNKCELNCIPKGENFYYKHREAVVDGTPCEPGKRDVCVDGSCRVVGCDHELDSSKQEDKCLRCGGDGTTCYPVAGTFDANDLSRAVKNVRGEYYLNGHWTIEAARALPAASTILHYERGAEGDLAPERLHARGPTSEPLVIELISQEPNPGVHYEYHLPLRRPSPGFSWSHGSWSDCSAECGGGHQSRLVFCTIDHEAYPDHMCQRQPRPADRRSCNLHPCPETKRWKAGPWAPCSASCGGGSQSRSVYCISSDGAGIQEAVEEAECAGLPGKPPAIQACNLQRCAAWSPEPWGECSVSCGVGVRKRSVTCRGERGSLLHTAACSLEDRPPLTEPCVHEDCPLLSDQAWHVGTWGLCSKSCSSGTRRRQVICAIGPPSHCGSLQHSKPVDVEPCNTQPCHLPQEVPSMQDVHTPASNPWMPLGPQESPASDSRGQWWAAQEHPSARGDHRGERGDPRGDQGTHLSALGPAPSLQQPPYQQPLRSGSGPHDCRHSPHGCCPDGHTASLGPQWQGCPGAPCQQSRYGCCPDRVSVAEGPHHAGCTKSYGGDSTGGMPRSRAVASTVHNTHQPQAQQNEPSECRGSQFGCCYDNVATAAGPLGEGCVGQPSHAYPVRCLLPSAHGSCADWAARWYFVASVGQCNRFWYGGCHGNANNFASEQECMSSCQGSLHGPRRPQPGASGRSTHTDGGGSSPAGEQEPSQHRTGAAVQRKPWPSGGLWRQDQQPGPGEAPHTQAFGEWPWGQELGSRAPGLGGDAGSPAPPFHSSSYRISLAGVEPSLVQAALGQLVRLSCSDDTAPESQAAWQKDGQPISSDRFT

SEQ ID NO: 16839 - protein, 216 aa, Homo sapiens
MERMLPLLALGLLAAGFCPAVLCHPNSPLDEENLTQENQDRGTHVDLGLASANVDFAFSLYKQLVLKAPDKNVIFSPLSISTALAFLSLGAHNTTLTEILKGLKFNLTETSEAEIHQSFQHLLRTLNQSSDELQLSMGNAMFVKEQLSLLDRFTEDAKRLYGSEAFATDFQDSAAAKKLINDYVKNGTRGKITDLIKDLDSQTMMVLVNYIFFKER

SEQ ID NO: 16840 - protein, 92 aa, Homo sapiens
MPSSVSWGILLLAGLCCLVPVSLAEDPQGDAAQKTDTSHHDQDHPTFNKITPNLAEFAFSLYRQLAHQSNSTNIFFSPVSIATAFAMLSLGT

SEQ ID NO: 16841 - protein, 630 aa, Homo sapiens
MYDNMSTMVYIKEDKLEKLTQDEIISKTKQVIQGLEALKNEHNSILQSLLETLKCLKKDDESNLVEEKSNMIRKSLEMLELGLSEAQVMMALSNHLNAVESEKQKLRAQVRRLCQENQWLRDELANTQQKLQKSEQSVAQLEEEKKHLEFMNQLKKYDDDISPSEDKDTDSTKEPLDDLFPNDEDDPGQGIQQQHSSAAAAAQQGGYEIPARLRTLHNLVIQYASQGRYEVAVPLCKQALEDLEKTSGHDHPDVATMLNILALVYRDQNKYKDAANLLNDALAIREKTLGKDHPAVAATLNNLAVLYGKRGKYKEAEPLCKRALEIREKVLGKDHPDVAKQLNNLALLCQNQGKYEEVEYYYQRALEIYQTKLGPDDPNVAKTKNNLASCYLKQGKFKQAETLYKEILTRAHEREFGSVDDENKPIWMHAEEREECKGKQKDGTSFGEYGGWYKACKVDSPTVTTTLKNLGALYRRQGKFEAAETLEEAAMRSRKQGLDNVHKQRVAEVLNDPENMEKRRSRESLNVDVVKYESGPDGGEEDGTGSLKRSGSFSKLRASIRRSSEKLVRKLKGGSSRESEPKNPGMKRASSLNVLNVGGKAAEDRFQGVSGRASFCGKRQQQQWPGRRHR

SEQ ID NO: 16842 - protein, 362 aa, Homo sapiens
MAEVPPGPSSLLPPPAPPAPAAVEPRCPFPAGAALACCSEDEEDDEEHEGGGSRSPAGGESATVAAKGHPCLRCPQPPQEQQQLNGLISPELRHLRAAASLKSKVLSVAEVAATTATPDGGPRATATKGAGVHSGERPPHSLSSNARTAVPSPVEAAAASDPAAARNGLAEGTEQEEEEEDEQVRLLSSSLTADCSLRSPSGREVEPGEDRTIRYVRYESELQMPDIMRLITKDLSEPYSIYTYRYFIHNWPQLCFLAMVGEECVGAIVCKLDMHKKMFRRGYIAMLAVDSKYRRNGIGTNLVKKAIYAMVEGDCDEVVLETEITNKSALKLYENLGFVRDKRLFRYYLNGVDALRLKLWLR

SEQ ID NO: 16843 - protein, 112 aa, Homo sapiens
METLLGLLILWLQLQWVSSKQEVTQIPAALSVPEGENLVLNCSFTDSAIYNLQWFRQDPGKGLTSLLLIQSSQREQTSGRLNASLDKSSGRSTLYIAASQPGDSATYLCAVR

SEQ ID NO: 16844 - protein, 193 aa, Homo sapiens
MSAAWIPALGLAPIAITCFTRGLDIRKEKADVLCPGGCPLEEFSVYGNIVYASVSSICGAAVHRGVISNSGGPVRVYSLPGRENYSSVDANGIQSQMLSRWSASFTVTKGKSSTQEATGQAVSTAHPPTGKRLKKTPEKKTGNKDCKADIAFLIDGSFNIGQRRFNLQKNFVGKVALMLGIGTEGPHVGLVQA

SEQ ID NO: 16845 - protein, 273 aa, Homo sapiens
MAASKVKQDMPPPGGYGPIDYKRNLPRRGLSGYSMLAIGIGTLIYGHWSIMKWNRERRRLQIEDFEARIALLPLLQAETDRRTLQMLRENLEEEAIIMKDVPDWKAFPLPALSRKQRTVLVVCGPEQNGAVGLVCARHLRVFEYEPTIFYPTRSLDLLHRDLTTQCEKMDIPFLSYLPTEVQLINEAYGLVVDAVLGPGVEPGEVGGPCTRALATLKLLSIPLVSLDIPSGMPGRGGHIGAWGAWVEAPVPQLLVAPACLNLNLPSLDGPTLG

SEQ ID NO: 16846 - protein, 202 aa, Homo sapiens
MSAAWIPALGLGVCLLLLPGPAGSEGAGKRLKKTPEKKTGNKDCKADIAFLIDGSFNIGQRRFNLQKNFVGKVALMLGIGTEGPHVGLVQASEHPKIEFYLKNFTSAKDVLFAIKEVGFRGGNSNTGKALKHTAQKFFTVDAGVRKGIPKVVVVFIDGWPSDDIEEAGIVAREFGVNVFIVSVAKPIPEELGMVQDVTFVDK

SEQ ID NO: 16847 - protein, 376 aa, Homo sapiens
MVWKVAVFLSVALGIGAVPIDDPEDGGKHWVVIVAGSNGWYNYRHQADACHAYQIIHRNGIPDEQIVVMMYDDIAYSEDNPTPGIVINRPNGTDVYQGVPKDYTGEDVTPQNFLAVLRGDAEAVKGIGSGKVLKSGPQDHVFIYFTDHGSTGILVFPNEDLHVKDLNETIHYMYKHKMYRKMVFYIEACESGSMMNHLPDNINVYATTAANPRESSYACYYDEKRSTYLGDWYSVNWMEDSDVEDLTKETLHKQYHLVKSHTNTSHVMQYGNKTISTMKVMQFQGMKRKASSPVPLPPVTHLDLTPSPDVPLTIMKRKLMNTNDLEESRQLTEEIQRHLDYEYALRHLYVLVNLCEKPYPLHRIKLSMDHVCLGHY

SEQ ID NO: 16848 - protein, 105 aa, Homo sapiens
MNSSLDFLILILMFGGTSSNSVKQTGQITVSEGASVTMNCTYTSTGYPTLFWYVEYPSKPLQLLQRETMENSKNFGGGNIKDKNSPIVKYSVQVSDSAVYYCLLG

SEQ ID NO: 16849 - protein, 444 aa, Homo sapiens
MGFCLALAWTLLVGAWTPLGAQNPISWEVQRFDGWYNNLMEHRWGSKGSRLQRLVPASYADGVYQPLGEPHLPNPRDLSNTISRGPAGLASLRNRTVLGVFFGYHVLSDLVSVETPGCPAEFLNIRIPPGDPMFDPDQRGDVVLPFQRSRWDPETGRSPSNPRDPANQVTGWLDGSAIYGSSHSWSDALRSFSRGQLASGPDPAFPRDSQNPLLMWAAPDPATGQNGPRGLYAFGAERGNREPFLQALGLLWFRYHNLWAQRLARQHPDWEDEELFQHARKRVIATYQNIAVYEWLPSFLQKTLPEYTGYRPFLDPSISSEFVAASEQFLSTMVPPGVYMRNASCHFQGVINRNSSVSRALRVCNSYWSREHPSLQSAEDVDALLLGMASQIAEREDHVLVEDVRGTGGHSCPVQPGLILARAAPWGTPGEPPGPWTSVQHHRP

SEQ ID NO: 16850 - protein, 38 aa, Homo sapiens
MVLLRVLILLLSWAAGMGVPTMGKLHSKEKPIKSSSPN

SEQ ID NO: 16851 - protein, 156 aa, Homo sapiens
MLRRRGSPGMGVHVGAALGALWFCLTGALEVQVPEDPVVALVGTDATLCCSFSPEPGFSLAQLNLIWQLTDTKQLVHSFAEGQDQGSAYANRTALFPDLLAQGNASLRLQRVRVADEGSFTCFVSIRDFGSAAVSLQVAAPYSKPSMTLEPNKDLR

SEQ ID NO: 16852 - protein, 248 aa, Homo sapiens
MAGSSSLEAVRRKIRSLQEQADAAEERAGTLQRELDHERKLRETAEADVASLNRRIQLVEEELDRAQERLATALQKLEEAEKAADESERGMKVIESRAQKDEEKMEIQEIQLKEAKHIAEDADRKYEEVARKLVIIESDLERAEERAELSEGKCAELEEELKTVTNNLKSLEAQAEKYSQKEDRYEEEIKVLSDKLKEAETRAEFAERSVTKLEKSIDDLEDELYAQKLKYKAISEELDHALNDMTSI

SEQ ID NO: 16853 - protein, 165 aa, Homo sapiens
MLRRRGSPGMGVHVGAALGALWFCLTGALEVQVPEDPVVALVGTDATLCCSFSPEPGFSLAQLNLIWQLTDTKQLVHSFAEGQDQGSAYANRTALFPDLLAQGNASLRLQRVRVADEGSFTCFVSIRDFGSAAVSLQVAAPYSKPSMTLEPNKDLRPGDTVTITC

SEQ ID NO: 16854 - protein, 70 aa, Homo sapiens
MPHIDNDVKLDFKDVLLRPKRSTLKSRSEVDLTRSFSFRNSKQTYSGVPIIAANMDTVGTFEMAKVLCKS

SEQ ID NO: 16855 - protein, 115 aa, Homo sapiens
MVLLRVLILLLSWAAGMGGQYGNPLNKYIRHYEGLSYNVDSLHQKHQRAKRAVSHEDQFLRLDFHAHGRDGVLPCCPGWSQTPGLKRSTCLSLPQCWDYRCEPSPMISVFDYPHK

SEQ ID NO: 16856 - protein, 321 aa, Homo sapiens
MSDIVEKTLTALPGLFLQNQPGGGPAAAKASFSSRLGSLVRGITALTSKHEEEKLIQQELSSLKATVSAPTTTLKMMKECMVRLIYCEMLGYDASFGYIHAIKLAQQGNLLEKRVGYLAVSLFLHESHELLLLLVNTVVKDLQSTNLVEVCMALTVVSQIFPCEMIPAVLPLIEDKLQHSKEIVRRKAVLALYKFHLIAPNQVQHIHIKFRKALCDRDVGVMAASLHIYLRMIKENSSGYKDLTGSFVTILKQVVGGKLPVEFNYHSVPAPWLQIQLLRILGLLGKDDQRSSVLKRSLKNCFIGLEYYNSTANKISFKQDK

SEQ ID NO: 16857 - protein, 143 aa, Homo sapiens
MAVTKELLQMDLYALLGIEEKAADKEVKKAYRQKALSCHPDKNPDNPRAAELFHQLSQALEVLTDAAARAAYDKVRKAKKQAAERTQKLDEKRKKVKLGRCHHSARWPVVSCGHFHSSPSPEASLPATHLKAFWLRLWAKRCS

SEQ ID NO: 16858 - protein, 235 aa, Homo sapiens
MRGAAPGKKTSGLQQKNVEVKTKKNKQKTPGNGDGGSTSETPQPPRKKRARVDPTVENEETFMNRVEVKVKIPEELKPWLVDDWDLITRQKQLFYLPAKKNVDSILEDYANYKKSRGNTDNKEYAVNEVVAGIKEYFNVMLGTQLLYKFERPQYAEILADHPDAPMSQVYGAPHLLRLFVRIGAMLAYTPLDEKSLALLLNYLHDFLKYLAKNSATLFSASDYEVAPPEYHRKAV

SEQ ID NO: 16859 - protein, 69 aa, Homo sapiens
MELRPWLLWVVAATGTLVLLAADAQGQKVFTNTWAVRIPGGPAVANSVARKHGFLNLGQIFGDYYHFWH

SEQ ID NO: 16860 - protein, 994 aa, Homo sapiens
MSQWTPEYNELYTLKVDMKSEIPSDAPKTQESLKGILLHPEPIGAAKSFPAGVEMINSKVGNEFSHLCDDSQKQEKEMNGNQQEQEKSLVVRKKRKSQQAGPSYVQNCVKENQGILGLRQHLGTPSDEDNDSSFSDCLSSPSSSLHFGDSDTVTSDEDKEVSVRHSQTILNAKSRSHSARSHKWPRTETESVSGLLMKRPCLHGSSLRRLPCRKRFVKNNSSQRTQKQKERILMQRKKREVLARRKYALLPSSSSSSENDLSSESSSSSSTEGEEDLFVSASENHQNNPAVPSGSIDEDVVVIEASSTPQVTANEEINVTSTDSEVEIVTVGESYRSRSTLGHSRSHWSQGSSSHASRPQEPRNRSRISTVIQPLRQNAAEVVDLTVDEDEPTVVPTTSARMESQATSASINNSNPSTSEQASDTASAVTSSQPSTVSETSATLTSNSTTGTSIGDDSRRTTSSAVTETGPPAMPRLPSCCPQHSPCGGSSQNHHALGHPHTSCFQQHGHHFQHHHHHHHTPHPAVPVSPSFSDPACPVERPPQVQAPCGANSSSGTSYHEQQALPVDLSNSGIRSHGSGSFHGASAFDPCCPVSSSRAAIFGHQAAAAAPSQPLSSIDGYGSSMVAQPQPQPPPQPSLSSCRHYMPPPYASLTRPLHHQASACPHSHGNPPPQTQPPPQVDYVIPHPVHAFHSQISSHATSHPVAPPPPTHLASTAAPIPQHLPPTHQPISHHIPATAPPAQRLHPHEVMQRMEVQRRRMMQHPTRAHERPPPHPHRMHPNYGHGHHIHVPQTMSSHPRQAPERSAWELGIEAGVTAATYTPGALHPHLAHYHAPPRLHHLQLGALPLMVPDMAGYPHIRYISSGLDGTSFRGPFRGNFEELIHLEERLGNVNRGASQGTIERCTYPHKYKKVTTDWFSQRKLHCKQDGEEGTEEDTEEKCTICLSILEEGEDVRRLPCMHLFHQVCVDQWLITNKKCPICRVDIEAQLPSES

SEQ ID NO: 16861 - protein, 25 aa, Homo sapiens
MPRPRLLAALCGALLCAPSLLVALG

SEQ ID NO: 16862 - protein, 533 aa, Homo sapiens
MLRRRGSPGMGVHVGAALGALWFCLTGALEVQVPEDPVVALVGTDATLCCSFSPEPGFSLAQLNLIWQLTDTKQLVHSFAEGQDQGSAYANRTALFPDLLAQGNASLRLQRVRVADEGSFTCFVSIRDFGSAAVSLQVAAPYSKPSMTLEPNKDLRPGDTVTITCSSYQGYPEAEVFWQDGQGVPLTGNVTTSQMANEQGLFDVHSILRVVLGANGTYSCLVRNPVLQQDAHSSVTITPQRSPTGAVEVQVPEDPVVALVGTDATLRCSFSPEPGFSLAQLNLIWQLTDTKQLVHSFTEGRDQGSAYANRTALFPDLLAQGNASLRLQRVRVADEGSFTCFVSIRDFGSAAVSLQVAAPYSKPSMTLEPNKDLRPGDTVTITCSSYRGYPEAEVFWQDGQGVPLTGNVTTSQMANEQGLFDVHSVLRVVLGANGTYSCLVRNPVLQQDAHGSVTITGQPMTFPPEALWVTVGLSVCLIALLVALAFVCWRKIKQSCEEENAGAEDQDGEGEGSKTALQPLKHSDSKEGKDTWA

SEQ ID NO: 16863 - protein, 56 aa, Homo sapiens
MAYSNLLRANMDGLKKRDKKNKTKKTKAAAAAAAAAPAAAATAPTTAATTAATAAQ

SEQ ID NO: 16864 - protein, 333 aa, Homo sapiens
MFRAAAPGQLRRAASLLRFQSTLVIAEHANDSLAPITLNTITAATRLGGEVSCLVAGTKCDKVAQDLCKVAGIAKVLVAQHDVYKGLLPEELTPLILATQKQFNYTHICAGASAFGKNLLPRVAAKLEVAPISDIIAIKSPDTFVRTIYAGNALCTVKCDEKVKVFSVRGTSFDAAATSGGSASSEKASSTSPVEISEWLDQKLTKSDRPELTGAKVVVSGGRGLKSGENFKLLYDLADQLHAAVGASRAAVDAGFVPNDMQVGQTGKIVAPELYIAVGISGAIQHLAGMKDSKTIVAINKDPEAPIFQVADYGIVADLFKVVPEMTEILKKK

SEQ ID NO: 16865 - protein, 1141 aa, Homo sapiens
MASVRFMVTPTKIDDIPGLSDTSPDLSSRSSSRVRFSSRESVPETSRSEPMSEMSGATTSLATVALDPPSDRTSHPQDVIEDLSQNSITGEHSQLLDDGHKKARNAYLNNSNYEEGDEYFDKNLALFEEEMDTRPKVSSLLNRMANYTNLTQGAKEHEEAENITEGKKKPTKTPQMGTFMGVYLPCLQNIFGVILFLRLTWVVGTAGVLQAFAIVLICCCCTMLTAISMSAIATNGVVPAGGSYFMISRALGPEFGGAVGLCFYLGTTFAAAMYILGAIEIFLVYIVPRAAIFHSDDALKESAAMLNNMRVYGTAFLVLMVLVVFIGVRYVNKFASLFLACVIVSILAIYAGAIKSSFAPPHFPVCMLGNRTLSSRHIDVCSKTKEINNMTVPSKLWGFFCNSSQFFNATCDEYFVHNNVTSIQGIPGLASGIITENLWSNYLPKGEIIEKPSAKSSDVLGSLNHEYVLVDITTSFTLLVGIFFPSVTGIMAGSNRSGDLKDAQKSIPIGTILAILTTSFVYLSNVVLFGACIEGVVLRDKFGDAVKGNLVVGTLSWPSPWVIVIGSFFSTCGAGLQSLTGAPRLLQAIAKDNIIPFLRVFGHSKANGEPTWALLLTAAIAELGILIASLDLVAPILSMFFLMCYLFVNLACALQTLLRTPNWRPRFRYYHWALSFMGMSICLALMFISSWYYAIVAMVIAGMIYKYIEYQGAEKEWGDGIRGLSLSAARFALLRLEEGPPHTKNWRPQLLVLLKLDEDLHVKHPRLLTFASQLKAGKGLTIVGSVIVGNFLENYGEALAAEQTIKHLMEAEKVKGFCQLVVAAKLREGISHLIQSCGLGGMKHNTVVMGWPNGWRQSEDARAWKTFIGTVRVTTAAHLALLVAKNISFFPSNVEQFSEGNIDVWWIVHDGGMLMLLPFLLKQHKVWRKCSIRIFTVAQLEDNSIQMKKDLATFLYHLRIEAEVEVVEMHDSDISAYTYERTLMMEQRSQMLRHMRLSKTERDREAQLVKDRNSMLRLTSIGSDEDEETETYQEKVHMTWTKDKYMASRGQKAKSMEGFQDLLNMRPDQSNVRRMHTAVKLNEVIVNKSHEAKLVLLNMPGPPRNPEGDENYMEFLEVLTEGLERVLLVRGGGSEVITIYS

SEQ ID NO: 16866 - protein, 788 aa, Homo sapiens
MRARPRPRPLWATVLALGALAGVGVGGPNICTTRGVSSCQQCLAVSPMCAWCSDEALPLGSPRCDLKENLLKDNCAPESIEFPVSEARVLEDRPLSDKGSGDSSQVTQVSPQRIALRLRPDDSKNFSIQVRQVEDYPVDIYYLMDLSYSMKDDLWSIQNLGTKLATQMRKLTSNLRIGFGAFVDKPVSPYMYISPPEALENPCYDMKTTCLPMFGYKHVLTLTDQVTRFNEEVKKQSVSRNRDAPEGGFDAIMQATVCDEKIGWRNDASHLLVFTTDAKTHIALDGRLAGIVQPNDGQCHVGSDNHYSASTTMDYPSLGLMTEKLSQKNINLIFAVTENVVNLYQNYSELIPGTTVGVLSMDSSNVLQLIVDAYGKIRSKVELEVRDLPEELSLSFNATCLNNEVIPGLKSCMGLKIGDTVSFSIEAKVRGCPQEKEKSFTIKPVGFKDSLIVQVTFDCDCACQAQAEPNSHRCNNGNGTFECGVCRCGPGWLGSQCECSEEDYRPSQQDECSPREGQPVCSQRGECLCGQCVCHSSDFGKITGKYCECDDFSCVRYKGEMCSGHGQCSCGDCLCDSDWTGYYCNCTTRTDTCMSSNGLLCSGRGKCECGSCVCIQPGSYGDTCEKCPTCPDACTFKKECVECKKFDRGALHDENTCNRYCRDEIESVKELKDTGKDAVNCTYKNEDDCVVRFQYYEDSSGKSILYVVEEPECPKGPDILVVLLSVMGAILLIGLAALLIWKLLITIHDRKEFAKFEEERARAKWDTANNPLYKEATSTFTNITYRGT

SEQ ID NO: 16867 - protein, 88 aa, Homo sapiens
MTSCLPALRFIATPRLSAMPHIDNDVKLDFKDVLLRPKRSTLKSRSEVDLTRSFSFRNSKQTYSGVPIIAANMDTVGTFEMAKVLCKS

SEQ ID NO: 16868 - protein, 78 aa, Homo sapiens
MLLSAVCVMLNLAGSILSCQNAQLVNSLEGCQLIKFDSVEVCVCCELQHQSSGCSNLGETLKLNPLQENCNAVRLTLK

SEQ ID NO: 16869 - protein, 51 aa, Homo sapiens
MSRSVALAVLALLSLSGLEAIQHSGLLTSSSREWKVKFPELLCVWVSSIRH

SEQ ID NO: 16870 - protein, 284 aa, Homo sapiens
MDAIKKKMQMLKLDKENALDRAEQAEADKKAAEDRSKQLEEDIAAKEKLLRVSEDERDRVLEELHKAEDSLLAAEEAAAKAEADVASLNRRIQLVEEELDRAQERLATALQKLEEAEKAADESERGMKVIESRAQKDEEKMEIQEIQLKEAKHIAEDADRKYEEVARKLVIIESDLERAEERAELSEGQVRQLEEQLRIMDQTLKALMAAEDKYSQKEDRYEEEIKVLSDKLKEAETRAEFAERSVTKLEKSIDDLEEKVAHAKEENLSMHQMLDQTLLELNNM

SEQ ID NO: 16871 - protein, 621 aa, Homo sapiens
MESSPESLQPLEHGVAAGPASGTGSSQEGLQETRLAAGDGPGVWAAETSGGNGLGAAAARRSLPDSASPAGSPEVPGPCSSSAGLDLKDSGLESPAAAEAPLRGQYKVTASPETAVAGVGHELGTAGDAGARPDLAGTCQAELTAAGSEEPSSAGGLSSSCSDPSPPGESPSLDSLESFSNLHSFPSSCEFNSEEGAENRVPEEEEGAAVLPGAVPLCKEEEGEETAQVLAASKERFPGQSVYHIKWIQWKEENTPIITQNENGPCPLLAILNVLLLAWKVKLPPMMEIITAEQLMEYLGDYMLDAKPKEISEIQRLNYEQNMSDAMAILHKLQTGLDVNVRFTGVRVFEYTPECIVFDLLDIPLYHGWLVDPQIDDIVKAVGNCSYNQLVEKIISCKQSDNSELVSEGFVAEQFLNNTATQLTYHGLCELTSTVQEGELCVFFRNNHFSTMTKYKGQLYLLVTDQGFLTEEKVVWESLHNVDGDGNFCDSEFHLRPPSDPETVYKGQQDQIDQDYLMALSLQQEQQSQEINWEQIPEGISDLELAKKLQEEEDRRASQYYQEQEQAAAAAAAASTQAQQGQPAQASPSSGRQSGNSERKRKEPREKDKEKEKEKNSCVIL

SEQ ID NO: 16872 - protein, 51 aa, Homo sapiens
MLRRRGSPGMGVHVGAALGALWFCLTGALEVQVPEDPVVALVGTDATLCCS

SEQ ID NO: 16873 - protein, 268 aa, Homo sapiens
MPRPRLLAALCGALLCAPSLLVALDICSKNPCHNGGLCEEISQEVRGDVFPSYTCTCLKGYAGNHCETKCVEPLGLENGNIANSQIAASSVRVTFLGLQHWVPELARLNRAGMVNAWTPSSNDDNPWIQVNLLRRMWVTGVVTQGASRLASHEYLKAFKVAYSLNGHEFDFIHDVNKKHKEFVGNWNKNAVHVNLFETPVEAQYVRLYPTSCHTACTLRFELLGCELNAATRPGACISSAGTPPMHGWTSRATSTPGLRGATVTISGC

SEQ ID NO: 16874 - protein, 129 aa, Homo sapiens
MLSLDFLDDVRRMNKRQLYYQVLNFGMIVSSALMIWKGLMVITGSESPIVVVLRQNGHIKFLTKGDNNAVDDRGLYKQGQHWLEKKDVVGRARGFVPYIGIVTILMNDYPKFKYAVLFLLGLFVLVHRE

SEQ ID NO: 16875 - protein, 774 aa, Homo sapiens
MPPPPPLSCLRGLQAPHQPGQPGFKFTVAESCDRIKDEFQFLQAQYHSLKVEYDKLANEKTEMQRHYVMYYEMSYGLNIEMHKQTEIAKRLNTILAQIMPFLSQEHQQQVAQAVERAKQVTMTELNAIIGQQLQAQHLSHATHGPPVQLPPHPSGLQPPGIPPVTGSSSGLLALGALGSQAHLTVKDEKNHHELDHRERESSANNSVSPSESLRASEKHRGSADYSMEAKKRKAEEKDSLSRYDSDGDKSDDLVVDVSNEDPATPRVSPAHSPPENGLDKARSLKKDAPTSPASVASSSSTPSSKTKDLGHNDKSSTPGLKSNTPTPRNDAPTPGTSTTPGLRSMPGKPPGMDPIASALRTPISITSSYAAPFAMMSHHEMNGSLTSPGAYAGLHNIPPQMSAAAAAAAAAYGRSPMVSFGAVGFDPHPPMRATGLPSSLASIPGGKPAYSFHVSADGQMQPVPFPHDALAGPGIPRHARQINTLSHGEVVCAVTISNPTRHVYTGGKGCVKIWDISQPGSKSPISQLDCLNRDNYIRSCKLLPDGRTLIVGGEASTLTIWDLASPTPRIKAELTSSAPACYALAISPDAKVCFSCCSDGNIAVWDLHNQTLVRQFQGHTDGASCIDISHDGTKLWTGGLDNTVRSWDLREGRQLQQHDFTSQIFSLGYCPTGEWLAVGMESSNVEVLHHTKPDKYQLHLHESCVLSLKFAYCGKWFVSTGKDNLLNAWRTPYGASIFQSKESSSVLSCDISADDKYIVTGSGDKKATVYEVIY

SEQ ID NO: 16876 - protein, 130 aa, Homo sapiens
MQRVSGLLSWTLSRVLWLSGLSEPGAARQPRIMEEKALEVYDLIRTIRDPEKPNTLEELEVVSESCVEVQEINEEEYLVIIRFTPTVPHCSLATLIGLCLRVKLQRCLPFKHKLEIYISEGTHSTEEDSK

SEQ ID NO: 16877 - protein, 109 aa, Homo sapiens
MRGLGLWLLGAMMLPGPAPREGELRPWGHRAQLHPPPAEEQGPAGLRLHRDLYGCQWLRGDGAASRAGPLLLPGPRRGVPGLSRQPQHLCRPQGFLPGGVRPAPDRAPG

SEQ ID NO: 16878 - protein, 721 aa, Homo sapiens
MTTLLWVFVTLRVITAAVTVETSDHDNSLSVSIPQPSPLRVLLGTSLTIPCYFIDPMHPVTTAPSTAPLAPRIKWSRVSKEKEVVLLVATEGRVRVNSAYQDKVSLPNYPAIPSDATLEVQSLRSNDSGVYRCEVMHGIEDSEATLEVVVKGIVFHYRAISTRYTLDFDRAQRACLQNSAIIATPEQLQAAYEDGFHQCDAGWLADQTVRYPIHTPREGCYGDKDEFPGVRTYGIRDTNETYDVYCFAEEMEGEVFYATSPEKFTFQEAANECRRLGARLATTGQLYLAWQAGMDMCSAGWLADRSVRYPISKARPNCGGNLLGVRTVYVHANQTGYPDPSSRYDAICYTGEDFVDIPENFFGVGGEEDITVQTVTWPDMELPLPRNITEGEARGSVILTVKPIFEVSPSPLEPEEPFTFAPEIGATAFAEVENETGEATRPWGFPTPGLGPATAFTSEDLVVQVTAVPGQPHLPGGVVFHYRPGPTRYSLTFEEAQQACLRTGAVIASPEQLQAAYEAGYEQCDAGWLRDQTVRYPIVSPRTPCVGDKDSSPGVRTYGVRPSTETYDVYCFVDRLEGEVFFATRLEQFTFQEALEFCESHNATLATTGQLYAAWSRGLDKCYAGWLADGSLRYPIVTPRPACGGDKPGVRTVYLYPNQTGLPDPLSRHHAFCFRGMQPHFGSNSPFCLERTPLGSPDPATTQYPIHQSKKMSVPLGQSQL

SEQ ID NO: 16879 - protein, 733 aa, Homo sapiens
MRGLGLWLLGAMMLPGPAPREGELRPWGHRAQLHPPPAEEQGPAGLRLHRDLYGCQWLRGDGAASRAGPLLLPGPRRGVPGLSRQPQHLCRPQVGSDLHLIEPLDEGGEGGRHAVYQAEHLLQTAGTCGVSDDSLGSLLGPRTAAVFRPRPGDSLPSRETRYVELYVVVDNAEFQMLGSEAAVRHRVLEVVNHVDKLYQKLNFRVVLVGLEIWNSQDRFHVSPDPSVTLENLLTWQARQRTRRHLHDNVQLITGVDFTGTTVGFARVSAMCSHSSGAVNQDHSKNPVGVACTMAHEMGHNLGMDHDENVQGCRCQERFEAGRCIMAGSIGSSFPRMFSDCSQAYLESFLERPQSVCLANAPDLSHLVGGPVCGNLFVERGEQCDCGPPEDCRNRCCNSTTCQLAEGAQCAHGTCCQECKVKPAGELCRPKKDMCDLEEFCDGRHPECPEDAFQENGTPCSGGYCYNGACPTLAQQCQAFWGPGGQAAEESCFSYDILPGCKASRYRADMCGVLQCKGGQQPLGRAICIVDVCHALTTEDGTAYEPVPEGTRCGPEKVCNHKQECHCHAGWAPPHCAKLLTEVHAASGSLPVFVVVVLVLLAVVLVTLAGIIVYRKARSRILSRNVAPKTTMGRSNPLFHQAASRVPAKGGAPAPSRGPQELVPTTHPGQPARHPASSVALKRPPPAPPVTVSSPPFPVPVYTRQAPKQGAVGPKVALKPPIQRKQGAGAPTAP

SEQ ID NO: 16880 - protein, 747 aa, Homo sapiens
MAELFMECEEEELEPWQKKVKEVEDDDDDEPIFVGEISSSKPAISNILNRVNPSSYSRGLKNGALSRGITAAFKPTSQHYTNPTSNPVPASPINFHPESRSSDSSVIVQPFSKPGYITNSSRVVSNKSSELLFDLTQDTGLSHYQGGPTLSMAGMSESSFLSKRPSTSEVNNVNPKKPKPSESVSGANSSAVLPSVKSPSVTSSQAMLAKGTNTSSNQSKNGTPFPRACPKCNIHFNLLDPLKNHMKYCCPDMINNFLGLAKTEFSSTVNKNTTIDSEKGKLIMLVNDFYYGKHEGDVQEEQKTHTTFKCFSCLKILKNNIRFMNHMKHHLELEKQSSESWENHTTCQHCYRQFPTPFQLQCHIESTHTPHEFSTICKICELSFETEHVLLQHMKDNHKPGEMPYVCQVCNYRSSSFSDVETHFRTSHENTKNLLCPFCLKVIKIATPYMHHYMKHQKKGIHRCTKCRLQFLTCKEKMDHKTQHHRTFIKPKQLEGLPPGTKVTIRASVGPLQSGASPTPSISASASTLQLSPPRTKNITAKNPAKSNTSKPNTVKSNASKPNTSKPNGSKSKYKPKISNMQKKQSTLASSNKKSKVNTALRNLRYRRGIHKCIECCSEIKDFANHFPTYVHCSFCRYNTSCSKAYVNHMMSFHSNRPSKRFCIFKKHSENLRGITLVCLNCDFLSDVSGLDNMATHLSQHKTHTCQVVMQKDAEAAQRFQKISRVYLDSVPLRWTQLMPVLSFQGM

SEQ ID NO: 16881 - protein, 515 aa, Homo sapiens
MGHNGSWISPNASEPHNASGAEAAGVNRSALGEFGEAQLYRQFTTTVQVVIFIGSLLGNFMVLWSTCRTTVFKSVTNRFIKNLACSGICASLVCVPFDIILSTSPHCCWWIYTMLFCKVVKFLHKVFCSVTILSFPAIALDRYYSVLYPLERKISDAKSRELVMYIWAHAVVASVPVFAVTNVADIYATSTCTEVWSNSLGHLVYVLVYNITTVIVPVVVVFLFLILIRRALSASQKKKVIIAALRTPQNTISIPYASQREAELHATLLSMVMVFILCSVPYATLVVYQTVLNVPDTSVFLLLTAVWLPKVSLLANPVLFLTVNKSVRKCLIGTLVQLHHRYSRRNVVSTGSGMAEASLEPSIRSGSQLLEMFHIGQQQIFKPTEDEEESEAKYIGSADFQAKEIFSTCLEGEQGPQFAPSAPPLSTVDSVSQVAPAAPVEPETFPDKYSLQFGFGPFELPPQWLSETRNSKKRLLPPLGNTPEELIQTKVPKVGRVERKMSRNNKVSIFPKVDS

SEQ ID NO: 16882 - protein, 782 aa, Homo sapiens
MYPQGRHPAPHQPGQPGFKFTVAESCDRIKDEFQFLQAQYHSLKVEYDKLANEKTEMQRHYVMYYEMSYGLNIEMHKQTEIAKRLNTILAQIMPFLSQEHQQQVAQAVERAKQVTMTELNAIIGVRGLPNLPLTQQQLQAQHLSHATHGPPVQLPPHPSGLQPPGIPPVTGSSSGLLALGALGSQAHLTVKDEKNHHELDHRERESSANNSVSPSESLRASEKHRGSADYSMEAKKRKAEEKDSLSRYDSDGDKSDDLVVDVSNEDPATPRVSPAHSPPENGLDKARSLKKDAPTSPASVASSSSTPSSKTKDLGHNDKSSTPGLKSNTPTPRNDAPTPGTSTTPGLRSMPGKPPGMDPIGIMASALRTPISITSSYAAPFAMMSHHEMNGSLTSPGAYAGLHNIPPQMSAAAAAAAAAYGRSPMVSFGAVGFDPHPPMRATGLPSSLASIPGGKPAYSFHVSADGQMQPVPFPHDALAGPGIPRHARQINTLSHGEVVCAVTISNPTRHVYTGGKGCVKIWDISQPGSKSPISQLDCLNRDNYIRSCKLLPDGRTLIVGGEASTLTIWDLASPTPRIKAELTSSAPACYALAISPDAKVCFSCCSDGNIAVWDLHNQTLVRQFQGHTDGASCIDISHDGTKLWTGGLDNTVRSWDLREGRQLQQHDFTSQIFSLGYCPTGEWLAVGMESSNVEVLHHTKPDKYQLHLHESCVLSLKFAYCGKWFVSTGKDNLLNAWRTPYGASIFQSKESSSVLSCDISADDKYIVTGSGDKKATVYEVIY

SEQ ID NO: 16883 - protein, 764 aa, Homo sapiens
MYPQGRHPAPHQPGQPGFKFTVAESCDRIKDEFQFLQAQYHSLKVEYDKLANEKTEMQRHYVMYYEMSYGLNIEMHKQTEIAKRLNTILAQIMPFLSQEHQQQVAQAVERAKQVTMTELNAIIGQQQLQAQHLSHATHGPPVQLPPHPSGLQPPGIPPVTGSSSGLLALGALGSQAHLTVKDEKNHHELDHRERESSANNSVSPSESLRASEKHRGSADYSMEAKKRKAEEKDSLSRYDSDGDKSDDLVVDVSNEDPATPRVSPAHSPPENGLDKARSLKKDAPTSPASVASSSSTPSSKTKDLGHNDKSSTPGLKSNTPTPRNDAPTPGTSTTPGLRSMPGKPPGMDPIASALRTPISITSSYAAPFAMMSHHEMNGSLTSPGAYAGLHNIPPQMSAAAAAAAAAYGRSPMVGFDPHPPMRATGLPSSLASIPGGKPAYSFHVSADGQMQPVPFPHDALAGPGIPRHARQINTLSHGEVVCAVTISNPTRHVYTGGKGCVKIWDISQPGSKSPISQLDCLNRDNYIRSCKLLPDGRTLIVGGEASTLTIWDLASPTPRIKAELTSSAPACYALAISPDAKVCFSCCSDGNIAVWDLHNQTLVRQFQGHTDGASCIDISHDGTKLWTGGLDNTVRSWDLREGRQLQQHDFTSQIFSLGYCPTGEWLAVGMESSNVEVLHHTKPDKYQLHLHESCVLSLKFAYCGKWFVSTGKDNLLNAWRTPYGASIFQSKESSSVLSCDISADDKYIVTGSGDKKATVYEVIY

SEQ ID NO: 16884 - protein, 22 aa, Homo sapiens
MRVFLLCAYILLLMVSQLRAVS

SEQ ID NO: 16885 - protein, 183 aa, Homo sapiens
MQELHLLWWALLLGLAQACPEPCDCGEKYGFQIADCAYRDLESVPPGFPANVTTLSLSANRLPGLPEGAFREVPLLQSLWLAHNEIRTVAAGALASLSHLKSLDLSHNLISDFAWSDLHNLSALQLLKMDSNELTFIPRDAFRSLRALRSLQLNHNRLHTLAEGTFTPLTALSHLQINENPFD

SEQ ID NO: 16886 - protein, 368 aa, Homo sapiens
MAVAGAVSGEPLVHWCTQQLRKTFGLDVSEEIIQYVLSIESAEEIREYVTDLLQGNEGKKGQFIEELITKWQKNDQELISDPLQQCFKKDEILDGQKSGDHLKRGRKKGRNRQEVPAFTEPDTTAEVKTPFDLAKAQENSNSVKKKTKFVNLYTREGQDRLAVLLPGRHPCDCLGQKHKLINNCLICGRIVCEQEGSGPCLFCGTLVCTHEEQDILQRDSNKSQKLLKKLMSGVENSGKVDISTKDLLPHQELRIKSGLEKAIKHKDKLLEFDRTSIRRTQVIDDESDYFASDSNQWLSKLERETLQKREEELRELRHASRLSKKVTIDFAGRKILEEENSLAEYHSSGLTTQVQPHRRRLSVLQDLD

SEQ ID NO: 16887 - protein, 48 aa, Homo sapiens
MAKTYDYLFKLLLIGDSGVGKTCLLFRFSEDAFNTTFISTIVRPHIEE

SEQ ID NO: 16888 - protein, 121 aa, Homo sapiens
CKIRCLYLSISATSLALSLMLGPACRSEQYTLCLCTPRGHGAQPGTGTQVPTAQDPKTLSLPEQHLTACVRMKADLHRHLLAVLLVLIHPLFSYVASPLAVPGGVAECGVLVGWVPRPSAS

SEQ ID NO: 16889 - protein, 118 aa, Homo sapiens
MQAVRNAGSRFLRSWTWPQTAGRVVARTPAGTICTGARQLQDAAAKQKVEQNAAPSHTKFSIYPPIPGEESSLRWAGKKFEEIPIAHIKASHNKGISECQEGHRHRSTDSRHSRSGES

SEQ ID NO: 16890 - protein, 535 aa, Homo sapiens
MGDNPFQPKSNSKMAELFMECEEEELEPWQKKVKEVEDDDDDEPIFVGEISSSKPAISNILNRVNPSSYSRGLKNGALSRGITAAFKPTSQHYTNPTSNPVPASPINFHPESRSSDSSVIVQPFSKPGYITNSSRVVSNKSSELLFDLTQDTGLSHYQGGPTLSMAGMSESSFLSKRPSTSEVNNVNPKKPKPSESVSGANSSAVLPSVKSPSVTSSQAMLAKGTNTSSNQSKNGTPFPRACPKCNIHFNLLDPLKNHMKYCCPDMINNFLGLAKTEFSSTVNKNTTIDSEKGKLIMLVNDFYYGKHEGDVQEEQKTHTTFKCFSCLKILKNNIRFMNHMKHHLELEKQSSESWENHTTCQHCYRQFPTPFQLQCHIESTHTPHEFSTICKICELSFETEHVLLQHMKDNHKPGEMPYVCQVCNYRSSSFSDVETHFRTSHENTKNLLCPFCLKVIKIATPYMHHYMKHQKKGIHRCTKCRLQFLTCKEKMDHKTQHHRTFIKPKQLEGLPPGTKSALEYLLQWRETEAWIIQSE

SEQ ID NO: 16891 - protein, 458 aa, Homo sapiens
MATESPATRRVQVAEHPRLLKLKEMFNSKFGSIPKFYVRAPGRVNIIGEHIDYCGYSVLPMAVEQDVLIAVEPVKTYALQLANTNPLYPDFSTSANNIQIDKTKPLWHNYFLCGLKGIQEHFGLSNLTGMNCLVDGNIPPSSGLSSSSALVCCAGLVTLTVLGRNLSKVELAEICAKSERYIGTEGGGMDQSISFLAEEGTAKLIEFSPLRATDVKLPSGAVFVIANSCVEMNKAATSHFNIRVMECRLAAKLLAKYKSLQWDKVLRLEEVQAKLGISLEEMLLVTEDALHPEPYNPEEICRCLGISLEELRTQILSPNTQDVLIFKLYQRAKHVYSEAARVLQFKKICEEAPENMVQLLGELMNQSHMSCRDMYECSCPELDQLVDICRKFGAQGSRLTGAGWGGCTVSMVPADKLPSFLANVHKAYYQRSDGSLAPEKQSLFATKPGGGALVLLEA

SEQ ID NO: 16892 - protein, 143 aa, Homo sapiens
MSRTAYTVGALLLLLGTLLPAAEGKKKGSQGAIPPPDKALHVTERKYLKRDWCKTQPLKQTIHEEGCNSRTIINRFCYGQCNSFYIPRHIRKEEGSFQSCSFCKPKKFTTMMVTLNCPELQPPTKKKRVTRVKQCRCISIDLD

SEQ ID NO: 16893 - protein, 174 aa, Homo sapiens
MSRRYDSRTTIFSPEGRLYQVEYAMEAIGHAGTCLGILANDGVLLAAERRNIHKLLDEVFFSEKIYKLNEDMACSVAGITSDANVLTNELRLIAQRYLLQYQEPIPCEQLVTALCDIKQAYTQFGGKRPFGVSLLYIGWDKHYGFQLYQSDPSGNYGGWKATCIGNNSAWKLQH

SEQ ID NO: 16894 - protein, 119 aa, Homo sapiens
MSRSVALAVLALLSLSGLEAIQRTPKIQVYSRHPAENGKSNFLNCYVSGFHPSDIEVDLLKNGERIEKVEHSDLSFSKDWSFYLLYYTEFTPTEKDEYACRVNHVTLSQPKIVKWDRDM

SEQ ID NO: 16895 - protein, 1450 aa, Homo sapiens
MAAERGARRLLSTPSFWLYCLLLLGRRAPGAAAARSGSAPQSPGASIRTFTPFYFLVEPVDTLSVRGSSVILNCSAYSEPSPKIEWKKDGTFLNLVSDDRRQLLPDGSLFISNVVHSKHNKPDEGYYQCVATVESLGTIISRTAKLIVAGLPRFTSQPEPSSVYAGNNAILNCEVNADLVPFVRWEQNRQPLLLDDRVIKLPSGMLVISNATEGDGGLYRCVVESGGPPKYSDEVELKVLPDPEVISDLVFLKQPSPLVRVIGQDVVLPCVASGLPTPTIKWMKNEEALDTESSERLVLLAGGSLEISDVTEDDAGTYFCIADNGNETIEAQAELTVQAQPEFLKQPTNIYAHESMDIVFECEVTGKPTPTVKWVKNGDMVIPSDYFKIVKEHNLQVLGLVKSDEGFYQCIAENDVGNAQAGAQLIILEHAPATTGPLPSAPRDVVASLVSTRFIKLTWRTPASDPHGDNLTYSVFYTKEGIARERVENTSHPGEMQVTIQNLMPATVYIFRVMAQNKHGSGESSAPLRVETQPEVQLPGPAPNLRAYAASPTSITVTWETPVSGNGEIQNYKLYYMEKGTDKEQDVDVSSHSYTINGLKKYTEYSFRVVAYNKHGPGVSTPDVAVRTLSDVPSAAPQNLSLEVRNSKSIMIHWQPPAPATQNGQITGYKIRYRKASRKSDVTETLVSGTQLSQLIEGLDRGTEYNFRVAALTINGTGPATDWLSAETFESDLDETRVPEVPSSLHVRPLVTSIVVSWTPPENQNIVVRGYAIGYGIGSPHAQTIKVDYKQRYYTIENLDPSSHYVITLKAFNNVGEGIPLYESAVTRPHTDTSEVDLFVINAPYTPVPDPTPMMPPVGVQASILSHDTIRITWADNSLPKHQKITDSRYYTVRWKTNIPANTKYKNANATTLSYLVTGLKPNTLYEFSVMVTKGRRSSTWSMTAHGTTFELVPTSPPKDVTVVSKEGKPKTIIVNWQPPSEANGKITGYIIYYSTDVNAEIHDWVIEPVVGNRLTHQIQELTLDTPYYFKIQARNSKGMGPMSEAVQFRTPKASGSGGKGSRLPDLGSDYKPPMSGSNSPHGSPTSPLDSNMLLVIIVSVGVITIVVVVIIAVFCTRRTTSHQKKKRAACKSVNGSHKYKGNSKDVKPPDLWIHHERLELKPIDKSPDPNPIMTDTPIPRNSQDITPVDNSMDSNIHQRRNSYRGHESEDSMSTLAGRRGMRPKMMMPFDSQPPQPVISAHPIHSLDNPHHHFHSSSLASPARSHLYHPGSPWPIGTSMSLSDRANSTESVRNTPSTDTMPASSSQTCCTDHQDPEGATSSSYLASSQEEDSGQSLPTAHVRPSHPLKSFAVPAIPPPGPPTYDPALPSTPLLSQQALNHHIHSVKTASIGTLGRSRPPMPVVVPSAPEVQETTRMLEDSESSYEPDELTKEMAHLEGLMKDLNAITTA

SEQ ID NO: 16896 - protein, 69 aa, Homo sapiens
MQRVSGLLSWTLSRVLWLSGLSEPGAARQPRIMEEKALEVYGWNAMAGSRLTATSAFWFQVILLPQSPK

SEQ ID NO: 16897 - protein, 405 aa, Homo sapiens
MLSSFPVVLLETMSHYTDEPRFTIEQIDLLQRLRRTGMTKHEILHALETLDRLDQEHSDKFGRRSSYGGSSYGNSTNNVPASSSTATASTQTQHSGMSPSPSNSYDTSPQPCTTNQNGRENNERLSTSNGKMSPTRYHANSMGQRSYSFEASEEDLDVDDKVEELMRRDSSVIKEEIKAFLANRRISQAVVAQVTGISQSRISHWLLQQGSDLSEQKKRAFYRWYQLEKTNPGATLSMRPAPIPIEDPEWRQTPPPVSATSGTFRLRRGSRFTWRKECLAVMESYFNENQYPDEAKREEIANACNAVIQKPGKKLSDLERVTSLKVYNWFANRRKEIKRRANIAAILESHGIDVQSPGGHSNSDDVDGNDYSEQDTWQVRNGEEEEGRSSEGGREAEKVEEERRI

SEQ ID NO: 16898 - protein, 175 aa, Homo sapiens
MELRPWLLWVVAATGTLVLLAADAQGQKVFTNTWAVRIPGGPAVANSVARKHGFLNLGQIFGDYYHFWHRGVTKRSLSPHRPRHSRLQREPQWLEQQVAKRRTKRDVYQEPTDPKFPQQWYLSGVTQRDLNVKAAWAQGYTGHGIVVSILDDGIEKNHPDLAGNYDPGASFDVND

SEQ ID NO: 16899 - protein, 80 aa, Homo sapiens
MAASRWARKAVVLLCASDLLLLLLLLPPPGSCAAEGSPGTPDESTPPPRKKKKDIRDYNDADMARLLEQWEANTCPTSTH

SEQ ID NO: 16900 - protein, 205 aa, Homo sapiens
MIQAILVFNNHGKPRLVRFYQRFPEEIQQQIVRETFHLVLKRDDNICNFLEGGSLIGGSDYKLIYRHYATLYFVFCVDSSESELGILDLIQVHLEVVFFIAPKVFVETLDKCFENVCELDLIFHMDKVHYILQEVVMGGMVLETNMNEIVAQIEAQNRLEKSEGGLSAAPARAVSAVKNINLPEIPRNINIGDLNIKVPNLSQFV

SEQ ID NO: 16901 - protein, 269 aa, Homo sapiens
MAPKQDPKPKFQEGERVLCFHGPLLYEAKCVKVAIKDKQVKYFIHYSGWNKNWDEWVPESRVLKYVDTNLQKQRELQKANQKTKKNKQKTPGNGDGGSTSETPQPPRKKRARVDPTVENEETFMNRVEVKVKIPEELKPWLVDDWDLITRQKQLFYLPAKKNVDSILEDYANYKKSRGNTDNKEYAVNEVVAGIKEYFNVMLGTQLLYKFERPQYAEILADHPDAPMSQVYGAPHLLRLFVRIGAMLAYTPLDEKSLALLLNYLHDFLK

SEQ ID NO: 16902 - protein, 47 aa, Homo sapiens
MAKTYDYLFKLLLIGDSGVGKTCLLFRFSEDAFNTTFISTIEQLPVL

SEQ ID NO: 16903 - protein, 297 aa, Homo sapiens
MEACKDSRIGGMMKTLLLFVGLLLTWESGQVLGDQTVSDNELQEMSNQGSKYVNKEIQNAVNGVKQIKTLIEKTNEERKTLLSNLEEAKKKKEDALNETRESETKLKELPGVCNETMMALWEECKPCLKQTCMKFYARVCRSGSGLVGRQLEEFLNQSSPFYFWMNGDRIDSLLENDRQQTHMLDVMQDHFSRASSIIDELFQDRFFTREPQDTYHYLPFSLPHRRPHFFFPKSRIVRSLMPFSPYEPLNFHAMFQPFLEMIHEAQQAMDIHFHSPAFQHPPTEFIREGDDDRTVCR

SEQ ID NO: 16904 - protein, 824 aa, Homo sapiens
MRGLGLWLLGAMMLPAIAPSRPWALMEQYEVVLPWRLPGPRVRRALPSHLGLHPERVSYVLGATGHNFTLHLRKNRDLLGSGYTETYTAANGSEVTEQPRGQDHCFYQGHVEGYPDSAASLSTCAGLRGFFQVGSDLHLIEPLDEGGEGGRHAVYQAEHLLQTAGTCGVSDDSLGSLLGPRTAAVFRPRPGDSLPSRETRYVELYVVVDNAEFQMLGSEAAVRHRVLEVVNHVDKLYQKLNFRVVLVGLEIWNSQDRFHVSPDPSVTLENLLTWQARQRTRRHLHDNVQLITGVDFTGTTVGFARVSAMCSHSSGAVNQDHSKNPVGVACTMAHEMGHNLGMDHDENVQGCRCQERFEAGRCIMAGSIGSSFPRMFSDCSQAYLESFLERPQSVCLANAPDLSHLVGGPVCGNLFVERGEQCDCGPPEDCRNRCCNSTTCQLAEGAQCAHGTCCQECKVKPAGELCRPKKDMCDLEEFCDGRHPECPEDAFQENGTPCSGGYCYNGACPTLAQQCQAFWGPGGQAAEESCFSYDILPGCKASRYRADMCGVLQCKGGQQPLGRAICIVDVCHALTTEDGTAYEPVPEGTRCGPEKVCWKGRCQDLHVYRSSNCSAQCHNHGVCNHKQECHCHAGWAPPHCAKLLTEVHAASGSLPVFVVVVLVLLAVVLVTLAGIIVYRKARSRILSRNVAPKTTMGRSNPLFHQAASRVPAKGGAPAPSRGPQELVPTTHPGQPARHPASSVALKRPPPAPPVTVSSPPFPVPVYTRQAPKQVIKPTFAPPVPPVKPGAGAANPGPAEGAVGPKVALKPPIQRKQGAGAPTAP

SEQ ID NO: 16905 - protein, 1408 aa, Homo sapiens
MAAERGARRLLSTPSFWLYCLLLLGRRAPGAAAARSGSAPQSPGASIRTFTPFYFLVEPVDTLSVRGSSVILNCSAYSEPSPKIEWKKDGTFLNLVSDDRRQLLPDGSLFISNVVHSKHNKPDEGYYQCVATVESLGTIISRTAKLIVAGLPRFTSQPEPSSVYAGNNAILNCEVNADLVPFVRWEQNRQPLLLDDRVIKLPSGMLVISNATEGDGGLYRCVVESGGPPKYSDEVELKVLPDPEVISDLVFLKQPSPLVRVIGQDVVLPCVASGLPTPTIKWMKNEEALDTESSERLVLLAGGSLEISDVTEDDAGTYFCIADNGNETIEAQAELTVQAQPEFLKQPTNIYAHESMDIVFECEVTGKPTPTVKWVKNGDMVIPSDYFKIVKEHNLQVLGLVKSDEGFYQCIAENDVGNAQAGAQLIILEHAPATTGPLPSAPRDVVASLVSTRFIKLTWRTPASDPHGDNLTYSVFYTKEGIARERVENTSHPGEMQVTIQNLMPATVYIFRVMAQNKHGSGESSAPLRVETQPEVQLPGPAPNLRAYAASPTSITVTWETPVSGNGEIQNYKLYYMEKGTDKEQDVDVSSHSYTINGLKKYTEYSFRVVAYNKHGPGVSTPDVAVRTLSDVPSAAPQNLSLEVRNSKSIMIHWQPPAPATQNGQITGYKIRYRKASRKSDVTETLVSGTQLSQLIEGLDRGTEYNFRVAALTINGTGPATDWLSAETFESDLDETRVPEVPSSLHVRPLVTSIVVSWTPPENQNIVVRGYAIGYGIGSPHAQTIKVDYKQRYYTIENLDPSSHYVITLKAFNNVGEGIPLYESAVTRPHTDTSEVDLFVINAPYTPVPDPTPMMPPVGVQASILSHDTIRITWADNSLPKHQKITDSRYYTVRWKTNIPANTKYKNANATTLSYLVTGLKPNTLYEFSVMVTKGRRSSTWSMTAHGTTFELVPTSPPKDVTVVSKEGKPKTIIVNWQPPSEANGKITGYIIYYSTDVNAEIHDWVIEPVVGNRLTHQIQELTLDTPYYFKIQARNSKGMGPMSEAVQFRTPKADSSDKMPNDQASGSGGKGSRLPDLGSDYKPPMSGSNSPHGSPTSPLDSNMLLVIIVSVGVITIVVVVIIAVFCTRRTTSHQKKKRAACKSVNGSHKYKGNSKDVKPPDLWIHHERLELKPIDKSPDPNPIMTDTPIPRNSQDITPVDNSMDSNIHQRRNSYRGHESEDSMSTLAGRRGMRPKMMMPFDSQPPQQSVRNTPSTDTMPASSSQTCCTDHQDPEGATSSSYLASSQEEDSGQSLPTAHVRPSHPLKSFAVPAIPPPGPPTYDPALPSTPLLSQQALNHHIHSVKTASIGTLGRSRPPMPVVVPSAPEVQETTRMLEDSESSYEPDELTKEMAHLEGLMKDLNAITTA

SEQ ID NO: 16906 - protein, 137 aa, Homo sapiens
MAPPLRPLARLRPPGMLLRALLLLLLLSPLPGVWCFSELSFVKEPQDVTVTRKDPVVLDCQAHGEVPIKVTWLKNGAKMSENKRIEVLSNGSLYISEVEGRRGEQSDEGFYQCLAMNKYGAILSQKAHLALSRIGST

SEQ ID NO: 16907 - protein, 132 aa, Homo sapiens
MLRRRGSPGMGVHVGAALGALWFCLTGALEVQVPEDPVVALVGTDATLCCSFSPEPGFSLAQLNLIWQLTDTKQLVHSFAEGQDQGSAYANRTALFPDLLAQGNASLRLQRVRVADEGSFTCFVSIRDFGSA

SEQ ID NO: 16908 - protein, 858 aa, Homo sapiens
MGPWGWKLRWTVALLLAAAGTAVGDRCERNEFQCQDGKCISYKWVCDGSAECQDGSDESQETCLSVTCKSGDFSCGGRVNRCIPQFWRCDGQVDCDNGSDEQGCPPKTCSQDEFRCHDGKCISRQFVCDSDRDCLDGSDEASCPVLTCGPASFQCNSSTCIPQLWACDNDPDCEDGSDEWPQRCRGLYVFQGDSSPCSAFEFHCLSGECIHSSWRCDGGPDCKDKSDEENCAVATCRPDEFQCSDGNCIHGSRQCDREYDCKDMSDEVGCVNVTLCEGPNKFKCHSGECITLDKVCNMARDCRDWSDEPIKECGTNECLDNNGGCSHVCNDLKIGYECLCPDGFQLVAQRRCEDIDECQDPDTCSQLCVNLEGGYKCQCEEGFQLDPHTKACKAVGSIAYLFFTNRHEVRKMTLDRSEYTSLIPNLRNVVALDTEVASNRIYWSDLSQRMICSTQLDRAHGVSSYDTVISRDIQAPDGLAVDWIHSNIYWTDSVLGTVSVADTKGVKRKTLFRENGSKPRAIVVDPVHGFMYWTDWGTPAKIKKGGLNGVDIYSLVTENIQWPNGITLDLLSGRLYWVDSKLHSISSIDVNGGNRKTILEDEKRLAHPFSLAVFEDKVFWTDIINEAIFSANRLTGSDVNLLAENLLSPEDMVLFHNLTQPRGVNWCERTTLSNGGCQYLCLPAPQINPHSPKFTCACPDGMLLARDMRSCLTEAEAAVATQETSTVRLKVSSTAVRTQHTTTRPVPDTSRLPGATPGLTTVEIVTMSHQALGDVAGRGNEKKPSSVRALSIVLPIVLLVFLCLGVFLLWKNWRLKNINSINFDNPVYQKTTEDEVHICHNQDGYSYPSMVSLEDDVA

SEQ ID NO: 16909 - protein, 116 aa, Homo sapiens
MSRLGALGGARAGLGLLLGLYADFRSRTPRDAPAGCPRWGWRCLSAAQPSTGRTGEGAGPPGLCADQPCGAAAGGGGAEKQPARACGGDCWGGPMPHGREPESGSAAKVSVCPGEE

SEQ ID NO: 16910 - protein, 188 aa, Homo sapiens
MHKAGLLGLCARAWNSVRMASSGMTRRDPLANKVALVTASTDGIGFAIARRLAQDGAHVVVSSRKQQNVDQAVATLQGEGLSVTGTVCHVGKAEDRERLVATAVKLHGGIDILVSNAAVNPFFGSIMDVTEEVWDKRRLSGDRVFHSSLQSISSLDGQGKRGKHERNPADKKVRRARGLCWHRVFPVL

SEQ ID NO: 16911 - protein, 136 aa, Homo sapiens
MIQAILVFNNHGKPRLVRFYQRFPEEIQQQIVRETFHLVLKRDDNICNFLEGGSLIGGSDYKLIYRHYATLYFVFCVDSSESELGILDLIQVHLEVVFFIAPKLKKRERKKSQCNTLQTGTLALWEQGPDIRTRRL

SEQ ID NO: 16912 - protein, 810 aa, Homo sapiens
MKSARAKTPRKPTVKKGSQTNLKDPVGVYCRVRPLGFPDQECCIEVINNTTVQLHTPEGYRLNRNGDYKETQYSFKQVFGTHTTQKELFDVVANPLVNDLIHGKNGLLFTYGVTGSGKTHTMTGSPGEGGLLPRCLDMIFNSIGSFQAKRYVFKSNDRNSMDIQCEVDALLERQKREAMPNPKTSSSKRQVDPEFADMITVQEFCKAEEVDEDSVYGVFVSYIEIYNNYIYDLLEEVPFDPIKPKWNSCSTPMRNTDFVPPQSKLLREDKNHNMYVAGCTEVEVKSTEEAFEVFWRGQKKRRIANTHLNRESSRSHSVFNIKLVQAPLDADGDNVLQEKEQITISQLSLVDLAGSERTNRTRAEGNRLREAGNINQSLMTLRTCMDVLRENQMYGTNKMVPYRDSKLTHLFKNYFDGEGKVRMIVCVNPKAEDYEENLQVMRFAEVTQEVEVARPVDKAICGLTPGRRYRNQPRGPVGNEPLVTDVVLQSFPPLPSCEILDINDEQTLPRLIEALEKRHNLRQMMIDEFNKQSNAFKALLQEFDNAVLSKENHMQGKLNEKEKMISGQKLEIERLEKKNKTLEYKIEILEKTTTIYEEDKRNLQQELETQNQKLQRQFSDKRRLEARLQGMVTETTMKWEKECLLFQPDQNAPPIRLRHRRSRSAGDRWVDHKPASNMQTETVMQPHVPHAITVSVANEKALAKCEKYMLTHQELASDGEIETKLIKGDIYKTRGGGQSVQFTDIETLKQESPNGSRKRRSSTVAPAQPDGAESEWTDVETRCSVAVEMRAGSQLGPGYQHHAQPKRKKP

SEQ ID NO: 16913 - protein, 42 aa, Homo sapiens
MSRTAYTVGALLLLLGTLLPAAEGKKKGSQGAIPPPAKRPCM

SEQ ID NO: 16914 - protein, 388 aa, Homo sapiens
MDGVGVPASMYGDPHAPRPIPPVHHLNHGPPLHATQHYGAHAPHPNVMPASMGSAVNDALKRDKDAIYGHPLFPLLALVFEKCELATCTPREPGVAGGDVCSSDSFNEDIAVFAKQVRAEKPLFSSNPELDNLMIQAIQVLRFHLLELEKVHELCDNFCHRYISCLKGKMPIDLVIDERDGSSKSDHEELSGSSTNLADHNPSSWRDHDDATSTHSAGTPGPSSGGHASQSGDNSSEQGDGLDNSVASPGTGDDDDPDKDKKRQKKRGIFPKVATNIMRAWLFQHLTHPYPSEEQKKQLAQDTGLTILQVNNWFINARRRIVQPMIDQSNRAGFLLDPSVSQGAAYSPEGQPMGSFVLDGQQHMGIRPAGPMSGMGMNMGMDGQWHYM

SEQ ID NO: 16915 - protein, 350 aa, Homo sapiens
MNPRGLFQDFNPSKFLIYTCLLLFSVLLPLRLDGIIQWSYWAVFAPIWLWKLLVVAGASVGAGVWARNPRYRTEGEACVEFKAMLIAVGIHLLLLMFEVLVCDRVERGTHFWLLVFMPLFFVSPVSVAACVWGFRHDRSLELEILCSVNILQFIFIALKLDRIIHWPWLVVFVPLWILMSFLCLVVLYYIVWSLLFLRSLDVVAEQRRTHVTMAISWITIVVPLLTFEVLLVHRLDGHNTFSYVSIFVPLWLSLLTLMATTFRRKGGNHWWFGIRRDFCQFLLEIFPFLREYGNISYDLHHEDSEDAEETSVPEAPKIAPIFGKKARVVITQSPGKYVPPPPKLNIDMPD

SEQ ID NO: 16916 - protein, 441 aa, Homo sapiens
MIIPSLEELDSLKYSDLQNLAKSLGLRANLRATKLLKALKGYIKHEARKGNENQDESQTSASSCDETEIQISNQEEAERQPLGHVTKTRRRCKTVRVDPDSQQNHSEIKISNPTEFQNHEKQESQDLRATAKVPSPPDEHQEAENAVSSGNRDSKVPSEGKKSLYTDESSKPGKNKRTAITTPNFKKLHEAHFKEMESIDQYIERKKKHFEEHNSMNELKQQPINKGGVRTPVPPRGRLSVASTPISQRRSQGRSCGPASQSTLGLKGSLKRSAISAAKTGVRFSAATKDNEHKRSLTKTPARKSAHVTVSGGTPKGEAVLGTHKLKTITGNSAAVITPFKLTTEATQTPVSNKKPVFDLKASLSRPLNYEPHKGKLKPWGQSKENNYLNQHVNRINFYKKTYKQPHLQTKEEQRKKREQERKEKKAKVLGMRRGLILAED

SEQ ID NO: 16917 - protein, 160 aa, Homo sapiens
MAAGSRTSLLLAFALLCLPWLQEADSIPTPSNMEETQQKSNLELLRISLLLIESWLEPVRFLRSMFANNLVYDTSDSDDYHLLKDLEEGIQTLMGRLEDGSRRTGQILKQTYSKFDTNSHNHDALLKNYGLLYCFRKDMDKVETFLRMVQCRSVEGSCGF

SEQ ID NO: 16918 - protein, 110 aa, Homo sapiens
MIPGNRMLMVVLLCQVLLGGASHASLIPETGKKKVAEIQGHAGGRRSGQSHELLRDFEATLLQMFGLRRRPQPSKSAVIPDYMRDLYRLQSGEEEEEQIHSTGLEYPERP

SEQ ID NO: 16919 - protein, 2492 aa, Homo sapiens
MTTLLWVFVTLRVITAAVTVETSDHDNSLSVSIPQPSPLRVLLGTSLTIPCYFIDPMHPVTTAPSTAPLAPRIKWSRVSKEKEVVLLVATEGRVRVNSAYQDKVSLPNYPAIPSDATLEVQSLRSNDSGVYRCEVMHGIEDSEATLEVVVKGIVFHYRAISTRYTLDFDRAQRACLQNSAIIATPEQLQAAYEDGFHQCDAGWLADQTVRYPIHTPREGCYGDKDEFPGVRTYGIRDTNETYDVYCFAEEMEGEVFYATSPEKFTFQEAANECRRLGARLATTGQLYLAWQAGMDMCSAGWLADRSVRYPISKARPNCGGNLLGVRTVYVHANQTGYPDPSSRYDAICYTGEDFVDIPENFFGVGGEEDITVQTVTWPDMELPLPRNITEGEARGSVILTVKPIFEVSPSPLEPEEPFTFAPEIGATAFAEVENETGEATRPWGFPTPGLGPATAFTSEDLVVQVTAVPGQPHLPGGVVFHYRPGPTRYSLTFEEAQQACLRTGAVIASPEQLQAAYEAGYEQCDAGWLRDQTVRYPIVSPRTPCVGDKDSSPGVRTYGVRPSTETYDVYCFVDRLEGEVFFATRLEQFTFQEALEFCESHNATLATTGQLYAAWSRGLDKCYAGWLADGSLRYPIVTPRPACGGDKPGVRTVYLYPNQTGLPDPLSRHHAFCFRGISAVPSPGEEEGGTPTSPSGVEEWIVTQVVPGVAAVPVEEETTAVPSGETTAILEFTTEPENQTEWEPAYTPVGTSPLPGILPTWPPTGAATEESTEGPSATEVPSASEEPSPSEVPFPSEEPSPSEEPFPSVRPFPSVELFPSEEPFPSKEPSPSEEPSASEEPYTPSPPVPSWTELPSSGEESGAPDVSGDFTGSGDVSGHLDFSGQLSGDRASGLPSGDLDSSGLTSTVGSGLPVESGLPSGDEERIEWPSTPTVGELPSGAEILEGSASGVGDLSGLPSGEVLETSASGVGDLSGLPSGEVLETTAPGVEDISGLPSGEVLETTAPGVEDISGLPSGEVLETTAPGVEDISGLPSGEVLETTAPGVEDISGLPSGEVLETTAPGVEDISGLPSGEVLETTAPGVEDISGLPSGEVLETAAPGVEDISGLPSGEVLETAAPGVEDISGLPSGEVLETAAPGVEDISGLPSGEVLETAAPGVEDISGLPSGEVLETAAPGVEDISGLPSGEVLETAAPGVEDISGLPSGEVLETAAPGVEDISGLPSGEVLETAAPGVEDISGLPSGEVLETAAPGVEDISGLPSGEVLETAAPGVEDISGLPSGEVLETAAPGVEDISGLPSGEVLETAAPGVEDISGLPSGEVLETAAPGVEDISGLPSGEVLETAAPGVEDISGLPSGEVLETAAPGVEDISGLPSGEVLETAAPGVEDISGLPSGEVLETTAPGVEEISGLPSGEVLETTAPGVDEISGLPSGEVLETTAPGVEEISGLPSGEVLETSTSAVGDLSGLPSGGEVLEISVSGVEDISGLPSGEVVETSASGIEDVSELPSGEGLETSASGVEDLSRLPSGEEVLEISASGFGDLSGLPSGGEGLETSASEVGTDLSGLPSGREGLETSASGAEDLSGLPSGKEDLVGSASGDLDLGKLPSGTLGSGQAPETSGLPSGFSGEYSGVDLGSGPPSGLPDFSGLPSGFPTVSLVDSTLVEVVTASTASELEGRGTIGISGAGEISGLPSSELDISGRASGLPSGTELSGQASGSPDVSGEIPGLFGVSGQPSGFPDTSGETSGVTELSGLSSGQPGISGEASGVLYGTSQPFGITDLSGETSGVPDLSGQPSGLPGFSGATSGVPDLVSGTTSGSGESSGITFVDTSLVEVAPTTFKEEEGLGSVELSGLPSGEADLSGKSGMVDVSGQFSGTVDSSGFTSQTPEFSGLPSGIAEVSGESSRAEIGSSLPSGAYYGSGTPSSFPTVSLVDRTLVESVTQAPTAQEAGEGPSGILELSGAHSGAPDMSGEHSGFLDLSGLQSGLIEPSGEPPGTPYFSGDFASTTNVSGESSVAMGTSGEASGLPEVTLITSEFVEGVTEPTISQELGQRPPVTHTPQLFESSGKVSTAGDISGATPVLPGSGVEVSSVPESSSETSAYPEAGFGASAAPEASREDSGSPDLSETTSAFHEANLERSSGLGVSGSTLTFQEGEASAAPEVSGESTTTSDVGTEAPGLPSATPTASGDRTEISGDLSGHTSQLGVVISTSIPESEWTQQTQRPAETHLEIESSSLLYSGEETHTVETATSPTDASIPASPEWKRESESTAADQEVCEEGWNKYQGHCYRHFPDRETWVDAERRCREQQSHLSSIVTPEEQEFVNNNAQDYQWIGLNDRTIEGDFRWSDGHPMQFENWRPNQPDNFFAAGEDCVVMIWHEKGEWNDVPCNYHLPFTCKKGTVACGEPPVVEHARTFGQKKDRYEINSLVRYQCTEGFVQRHMPTIRCQPSGHWEEPQITCTDPTTYKRRLQKRSSRHPRRSRPSTAH

SEQ ID NO: 16920 - protein, 42 aa, Homo sapiens
MAGGVLPLRGLRALCRVLLFLSQFCILSGGGESKAGFSAGWG

SEQ ID NO: 16921 - protein, 2542 aa, Homo sapiens
MVALSLKICVRHCNVVKTMQFEPSTAVYDACRVIRERVPEAQTGQASDYGLFLSDEDPRKGIWLEAGRTLDYYMLRNGDILEYKKKQRPQKIRMLDGSVKTVMVDDSKTVGELLVTICSRIGITNYEEYSLIQETIEEKKEEGTGTLKKDRTLLRDERKMEKLKAKLHTDDDLNWLDHSRTFREQGVDENETLLLRRKFFYSDQNVDSRDPVQLNLLYVQARDDILNGSHPVSFEKACEFGGFQAQIQFGPHVEHKHKPGFLDLKEFLPKEYIKQRGAEKRIFQEHKNCGEMSEIEAKVKYVKLARSLRTYGVSFFLVKEKMKGKNKLVPRLLGITKDSVMRVDEKTKEVLQEWPLTTVKRWAASPKSFTLDFGEYQESYYSVQTTEGEQISQLIAGYIDIILKKKQSKDRFGLEGDEESTMLEESVSPKKSTILQQQFNRTGKAEHGSVALPAVMRSGSSGPETFNVGSMPSPQQQVMVGQMHRGHMPPLTSAQQALMGTINTSMHAVQQAQDDLSELDSLPPLGQDMASRVWVQNKVDESKHEIHSQVDAITAGTASVVNLTAGDPADTDYTAVGCAITTISSNLTEMSKGVKLLAALMDDEVGSGEDLLRAARTLAGAVSDLLKAVQPTSGEPRQTVLTAAGSIGQASGDLLRQIGENETDERFQDVLMSLAKAVANAAAMLVLKAKNVAQVAEDTVLQNRVIAAATQCALSTSQLVACAKVVSPTISSPVCQEQLIEAGKLVDRSVENCVRACQAATTDSELLKQVSAAASVVSQALHDLLQHVRQFASRGEPIGRYDQATDTIMCVTESIFSSMGDAGEMVRQARVLAQATSDLVNAMRSDAEAEIDMENSKKLLAAAKLLADSTARMVEAAKGAAANPENEDQQQRLREAAEGLRVATNAAAQNAIKKKIVNRLEVAAKQAAAAATQTIAASQNAAVSNKNPAAQQQLVQSCKAVADHIPQLVQGVRGSQAQAEDLSAQLALIISSQNFLQPGSKMVSSAKAAVPTVSDQAAAMQLSQCAKNLATSLAELRTASQKAHEACGPMEIDSALNTVQTLKNELQDAKMAAVESQLKPLPGETLEKCAQDLGSTSKAVGSSMAQLLTCAAQGNEHYTGVAARETAQALKTLAQAARGVAASTTDPAAAHAMLDSARDVMEGSAMLIQEAKQALIAPGDAERQQRLAQVAKAVSHSLNNCVNCLPGQKDVDVALKSIGESSKKLLVDSLPPSTKPFQEAQSELNQAAADLNQSAGEVVHATRGQSGELAAASGKFSDDFDEFLDAGIEMAGQAQTKEDQIQVIGNLKNISMASSKLLLAAKSLSVDPGAPNAKNLLAAAARAVTESINQLITLCTQQAPGQKECDNALRELETVKGMLDNPNEPVSDLSYFDCIESVMENSKVLGESMAGISQNAKTGDLPAFGECVGIASKALCGLTEAAAQAAYLVGISDPNSQAGHQGLVDPIQFARANQAIQMACQNLVDPGSSPSQVLSAATIVAKHTSALCNACRIASSKTANPVAKRHFVQSAKEVANSTANLVKTIKALDGDFSEDNRNKCRIATAPLIEAVENLTAFASNPEFVSIPAQISSEGSQAQEPILVSAKTMLESSSYLIRTARSLAINPKDPPTWSVLAGHSHTVSDSIKSLITSIRDKAPGQRECDYSIDGINRCIRDIEQASLAAVSQSLATRDDISVEALQEQLTSVVQEIGHLIDPIATAARGEAAQLGHKVTQLASYFEPLILAAVGVASKILDHQQQMTVLDQTKTLAESALQMLYAAKEGGGNPKAQHTHDAITEAAQLMKEAVDDIMVTLNEAASEVGLVGGMVDAIAEAMSKLDEGTPPEPKGTFVDYQTTVVKYSKAIAVTAQEMMTKSVTNPEELGGLASQMTSDYGHLAFQGQMAAATAEPEEIGFQIRTRVQDLGHGCIFLVQKAGALQVCPTDSYTKRELIECARAVTEKVSLVLSALQAGNKGTQACITAATAVSGIIADLDTTIMFATAGTLNAENSETFADHRENILKTAKALVEDTKLLVSGAASTPDKLAQAAQSSAATITQLAEVVKLGAASLGSDDPETQVVLINAIKDVAKALSDLISATKGAASKPVDDPSMYQLKGAAKVMVTNVTSLLKTVKAVEDEATRGTRALEATIECIKQELTVFQSKDVPEKTSSPEESIRMTKGITMATAKAVAAGNSCRQEDVIATANLSRKAVSDMLTACKQASFHPDVSDEVRTRALRFGTECTLGYLDLLEHVLVILQKPTPEFKQQLAAFSKRVAGAVTELIQAAEAMKGTEWVDPEDPTVIAETELLGAAASIEAAAKKLEQLKPRAKPKQADETLDFEEQILEAAKSIAAATSALVKSASAAQRELVAQGKVGSIPANAADDGQWSQGLISAARMVAAATSSLCEAANASVQGHASEEKLISSAKQVAASTAQLLVACKVKADQDSEAMRRLQAAGNAVKRASDNLVRAAQKAAFGKADDDDVVVKTKFVGGIAQIIAAQEEMLKKERELEEARKKLAQIRQQQYKFLPTELREDEG

SEQ ID NO: 16922 - protein, 705 aa, Homo sapiens
MDVSLCPAKCSFWRIFLLGSVWLDYVGSVLACPANCVCSKTEINCRRPDDGNLFPLLEGQDSGNSNGNASINITDISRNITSIHIENWRSLHTLNAVDMELYTGLQKLTIKNSGLRSIQPRAFAKNPHLRYINLSSNRLTTLSWQLFQTLSLRELQLEQNFFNCSCDIRWMQLWQEQGEAKLNSQNLYCINADGSQLPLFRMNISQCDLPEISVSHVNLTVREGDNAVITCNGSGSPLPDVDWIVTGLQSINTHQTNLNWTNVHAINLTLVNVTSEDNGFTLTCIAENVVGMSNASVALTVYYPPRVVSLEEPELRLEHCIEFVVRGNPPPTLHWLHNGQPLRESKIIHVEYYQEGEISEGCLLFNKPTHYNNGNYTLIAKNPLGTANQTINGHFLKEPFPVDEVSPTPPITVTHKPEEDTFGVSIAVGLAAFACVLLVVLFVMINKYGRRSKFGMKGPVAVISGEEDSASPLHHINHGITTPSSLDAGPDTVVIGMTRIPVIENPQYFRQGHNCHKPDTYVQHIKRRDIVLKRELGEGAFGKVFLAECYNLSPTKDKMLVAVKALKDPTLAARKDFQREAELLTNLQHEHIVKFYGVCGDGDPLIMVFEYMKHGDLNKFLRAHGPDAMILVDGQPRQAKGELGLSQMLHIASQIASGMVYLASQHFVHRDLATRNCLVGANLLVKIGDFGMSRDVYSTDYYRVK

SEQ ID NO: 16923 - protein, 160 aa, Homo sapiens
MAARGSGPRALRLLLLVQLVAGRCGLAGAAGGAQRGLSEPSSIAKHEDSLLKDLFQDYERWVRPVEHLNDKIKIKFGLAISQLVDVDEKNQLMTTNVWLKQEWIDVKLRWNPDDYGGIKVIRVPSDSVWTPDIVLFDNADGRFEGTSTKTVIRLLKIGNS

SEQ ID NO: 16924 - protein, 148 aa, Homo sapiens
MRVFLLCAYILLLMVSQLRAVSFPEDDEPLNTVDYHYSRQYPVFRGRPSGNESQHRLDFQLMLKIRDTLYIAGRDQVYTVNLNEMPKTEVIPNKKLTWRSRQQDRENCAMKGKHKDECHNFIKVFVPRNDEMVFVCGTNAFNPMCRYY

SEQ ID NO: 16925 - protein, 353 aa, Homo sapiens
MDVAEPYKVYQLLPPGIVSGQPGTQKVPSKRQHSSVSSERKEEEDAMQNCTLSPSVLQDSLNNEEEGASGGAVHSDIGSSSSSSSPEPQEVTDTTEAPFQGDQRSLEFLLPPEPDYSLLLTFIYNGRVVGEAQVQSLDCRLVAEPSGSESSMEQVLFPKPGPLEPTQRLLSQLERGILVASNPRGLFVQRLCPIPISWNAPQAPPGPGPHLLPSNECVELFRTAYFCRDPPCSLCMALLRLCVAYPVWPYAQPGSYLAALLQPRQWKRWFRLGQVLSGPGPPTEVPGNTEFLGREPWLQPYSTESYHSEDGAGLCPILAGADSRAAGSHSVPGVEPGGPIFHLTSLFFLSPLK

SEQ ID NO: 16926 - protein, 121 aa, Homo sapiens
MASILDEYENSLSRSAVLQPGCPSVGIPHSGYVNAQLEKEVPIFTKQRIDFTPSERITSLVVSSNQLCMSLGKDTLLRIDLGKANEPNHVELGRKDDAKVHKMFLDHTGGCGPGQAVCRPA

SEQ ID NO: 16927 - protein, 948 aa, Homo sapiens
MGPWGWKLRWTVALLLAAAGTAVGDRCERNEFQCQDGKCISYKWVCDGSAECQDGSDESQETCLSVTCKSGDFSCGGRVNRCIPQFWRCDGQVDCDNGSDEQGCPPKTCSQDEFRCHDGKCISRQFVCDSDRDCLDGSDEASCPVLTCGPASFQCNSSTCIPQLWACDNDPDCEDGSDEWPQRCRGLYVFQGDSSPCSAFEFHCLSGECIHSSWRCDGGPDCKDKSDEENCAVATCRPDEFQCSDGNCIHGSRQCDREYDCKDMSDEVGCVNVTLCEGPNKFKCHSGECITLDKVCNMARDCRDWSDEPIKECGTNECLDNNGGCSHVCNDLKIGYECLCPDGFQLVAQRRCEDIDECQDPDTCSQLCVNLEGGYKCQCEEGFQLDPHTKACKAVGSIAYLFFTNRHEVRKMTLDRSEYTSLIPNLRNVVALDTEVASNRIYWSDLSQRMICSTQLDRAHGVSSYDTVISRDIQAPDGLAVDWIHSNIYWTDSVLGTVSVADTKGVKRKTLFRENGSKPRAIVVDPVHGFMYWTDWGTPAKIKKGGLNGVDIYSLVTENIQWPNGITLDLLSGRLYWVDSKLHSISSIDVNGGNRKTILEDEKRLAHPFSLAVFEDKVFWTDIINEAIFSANRLTGSDVNLLAENLLSPEDMVLFHNLTQPRGVNWCERTTLSNGGCQYLCLPAPQINPHSPKFTCACPDGMLLARDMRSCLTEAEAAVATQETSTVRLKVSSTAVRTQHTTTRPVPDTSRLPGATPGLTTVEIVTMSHQALGDVAGRGNEKKPSSVRALSIVLPIATELGLWSRGQLCDRACLSLQCSSSSFAWGSSFYGRTGGLRTSTASTLTTPSIRRPQRMRSTFATTRTATATPRDRWSVWRMTWREHLPGVPSLPRTLPETSPALFYSKTEKTKALPARALFYIFIHLGGRTGFGQCPCNGLGWDFGFFLSS

SEQ ID NO: 16928 - protein, 2568 aa, Homo sapiens
MTTLLWVFVTLRVITAAVTVETSDHDNSLSVSIPQPSPLRVLLGTSLTIPCYFIDPMHPVTTAPSTAPLAPRIKWSRVSKEKEVVLLVATEGRVRVNSAYQDKVSLPNYPAIPSDATLEVQSLRSNDSGVYRCEVMHGIEDSEATLEVVVKGIVFHYRAISTRYTLDFDRAQRACLQNSAIIATPEQLQAAYEDGFHQCDAGWLADQTVRYPIHTPREGCYGDKDEFPGVRTYGIRDTNETYDVYCFAEEMEGEVFYATSPEKFTFQEAANECRRLGARLATTGQLYLAWQAGMDMCSAGWLADRSVRYPISKARPNCGGNLLGVRTVYVHANQTGYPDPSSRYDAICYTGEDFVDIPENFFGVGGEEDITVQTVTWPDMELPLPRNITEGEARGSVILTVKPIFEVSPSPLEPEEPFTFAPEIGATAFAEVENETGEATRPWGFPTPGLGPATAFTSEDLVVQVTAVPGQPHLPGGVVFHYRPGPTRYSLTFEEAQQACLRTGAVIASPEQLQAAYEAGYEQCDAGWLRDQTVRYPIVSPRTPCVGDKDSSPGVRTYGVRPSTETYDVYCFVDRLEGEVFFATRLEQFTFQEALEFCESHNATLATTGQLYAAWSRGLDKCYAGWLADGSLRYPIVTPRPACGGDKPGVRTVYLYPNQTGLPDPLSRHHAFCFRGISAVPSPGEEEGGTPTSPSGVEEWIVTQVVPGVAAVPVEEETTAVPSGETTAILEFTTEPENQTEWEPAYTPVGTSPLPGILPTWPPTGAATEESTEGPSATEVPSASEEPSPSEVPFPSEEPSPSEEPFPSVRPFPSVELFPSEEPFPSKEPSPSEEPSASEEPYTPSPPVPSWTELPSSGEESGAPDVSGDFTGSGDVSGHLDFSGQLSGDRASGLPSGDLDSSGLTSTVGSGLPVESGLPSGDEERIEWPSTPTVGELPSGAEILEGSASGVGDLSGLPSGEVLETSASGVGDLSGLPSGEVLETTAPGVEDISGLPSGEVLETTAPGVEDISGLPSGEVLETTAPGVEDISGLPSGEVLETTAPGVEDISGLPSGEVLETTAPGVEDISGLPSGEVLETTAPGVEDISGLPSGEVLETAAPGVEDISGLPSGEVLETAAPGVEDISGLPSGEVLETAAPGVEDISGLPSGEVLETAAPGVEDISGLPSGEVLETAAPGVEDISGLPSGEVLETAAPGVEDISGLPSGEVLETAAPGVEDISGLPSGEVLETAAPGVEDISGLPSGEVLETAAPGVEDISGLPSGEVLETAAPGVEDISGLPSGEVLETAAPGVEDISGLPSGEVLETAAPGVEDISGLPSGEVLETAAPGVEDISGLPSGEVLETAAPGVEDISGLPSGEVLETAAPGVEDISGLPSGEVLETAAPGVEDISGLPSGEVLETTAPGVEEISGLPSGEVLETTAPGVDEISGLPSGEVLETTAPGVEEISGLPSGEVLETSTSAVGDLSGLPSGGEVLEISVSGVEDISGLPSGEVVETSASGIEDVSELPSGEGLETSASGVEDLSRLPSGEEVLEISASGFGDLSGLPSGGEGLETSASEVGTDLSGLPSGREGLETSASGAEDLSGLPSGKEDLVGSASGDLDLGKLPSGTLGSGQAPETSGLPSGFSGEYSGVDLGSGPPSGLPDFSGLPSGFPTVSLVDSTLVEVVTASTASELEGRGTIGISGAGEISGLPSSELDISGRASGLPSGTELSGQASGSPDVSGEIPGLFGVSGQPSGFPDTSGETSGVTELSGLSSGQPGISGEASGVLYGTSQPFGITDLSGETSGVPDLSGQPSGLPGFSGATSGVPDLVSGTTSGSGESSGITFVDTSLVEVAPTTFKEEEGLGSVELSGLPSGEADLSGKSGMVDVSGQFSGTVDSSGFTSQTPEFSGLPSGIAEVSGESSRAEIGSSLPSGAYYGSGTPSSFPTVSLVDRTLVESVTQAPTAQEAGEGPSGILELSGAHSGAPDMSGEHSGFLDLSGLQSGLIEPSGEPPGTPYFSGDFASTTNVSGESSVAMGTSGEASGLPEVTLITSEFVEGVTEPTISQELGQRPPVTHTPQLFESSGKVSTAGDISGATPVLPGSGVEVSSVPESSSETSAYPEAGFGASAAPEASREDSGSPDLSETTSAFHEANLERSSGLGVSGSTLTFQEGEASAAPEVSGESTTTSDVGTEAPGLPSATPTASGDRTEISGDLSGHTSQLGVVISTSIPESEWTQQTQRPAETHLEIESSSLLYSGEETHTVETATSPTDASIPASPEWKRESESTAAAPARSCAEEPCGAGTCKETEGHVICLCPPGYTGEHCNIDIDECLSSPCLNGATCVDAIDSFTCLCLPSYEGDLCEIDQEVCEEGWNKYQGHCYRHFPDRETWVDAERRCREQQSHLSSIVTPEEQEFVNNNAQDYQWIGLNDRTIEGDFRWSDGHPMQFENWRPNQPDNFFAAGEDCVVMIWHEKGEWNDVPCNYHLPFTCKKGTVACGEPPVVEHARTFGQKKDRYEINSLVRYQCTEGFVQRHMPTIRCQPSGHWEEPQITCTDPTTYKRRLQKRSSRHPRRSRPSTAH

SEQ ID NO: 16929 - protein, 68 aa, Homo sapiens
MCDGALLPPLVLPVLLLLVWGLDPGTGWPHSAWAGAGANPAPQQLPGPIQWTRTSDQAQMVLDPQPFC

SEQ ID NO: 16930 - protein, 503 aa, Homo sapiens
MMQLVYCVFFFLLVCRSNKSPWVCLTCSSVHCGRYVNGHAKKHYEDAQVPLTNHKKSEKQDKVQHTVCMDCSSYSTYCYRCDDFVVNDTKLGLVQKVREHLQNLENSAFTADRHKKRKLLENSTLNSKLLKVNGSTTAICATGLRNLGNTCFMNAILQSLSNIEQFCCYFKELPAVELRNGKTAGRRTYHTRSQGDNNVSLVEEFRKTLCALWQGSQTAFSPESLFYVVWKIMPNFRGYQQQDAHEFMRYLLDHLHLELQGGFNGVSRSAILQENSTLSASNKCCINGASTVVTAIFGGILQNEVNCLICGTESRKFDPFLDLSLDIPSQFRSKRSKNQENGPVCSLRDCLRSFTDLEELDETELYMCHKCKKKQKSTKKFWIQKLPKVLCLHLKRFHWTAYLRNKVDTYVEFPLRGLDMKCYLLEPENSGPESCLYDLAAVVVHHGSGVGSGHYTAYATHEGRWFHFNDSTVTLTDEETVVKAKAYILFYVEHQAKAGSDKL

SEQ ID NO: 16931 - protein, 592 aa, Homo sapiens
MGDNPFQPKSNSKMAELFMECEEEELEPWQKKVKEVEDDDDDEPIFVGEISSSKPAISNILNRVNPSSYSRGLKNGALSRGITAAFKPTSQHYTNPTSNPVPASPINFHPESRSSDSSVIVQPFSKPGYITNSSRVVSNKSSELLFDLTQDTGLSHYQGGPTLSMAGMSESSFLSKRPSTSEVNNVNPKKPKPSESVSGANSSAVLPSVKSPSVTSSQAMLAKGTNTSSNQSKNGTPFPRACPKCNIHFNLLDPLKNHMKYCCPDMINNFLGLAKTEFSSTVNKNTTIDSEKGKLIMLVNDFYYGKHEGDVQEEQKTHTTFKCFSCLKILKNNIRFMNHMKHHLELEKQSSESWENHTTCQHCYRQFPTPFQLQCHIESTHTPHEFSTICKICELSFETEHVLLQHMKDNHKPGEMPYVCQVCNYRSSSFSDVETHFRTSHENTKNLLCPFCLKVIKIATPYMHHYMKHQKKGIHRCTKCRLQFLTCKEKMDHKTQHHRTFIKPKQLEGLPPGTKVTIRASVGPLQSGASPTPSISASASTLQLSPPRTKNITAKNPAKSNTSKPNTVKSNASKPNTSIVGAFTNALSVVPK

SEQ ID NO: 16932 - protein, 474 aa, Homo sapiens
MSPADFQRAVDERFPGCMQGRTMYVLPFSMGPVGSPLSRIGVQLTDSAYVVASMRIMTRLGTPVLQALGDGDFVKCLHSVGQPLTGQGEPVSQWPCNPEKTLIGHVPDQREIISFGSGYGGNSLLGKKCFALRIASRLARDEGWLAEHMLILGITSPAGKKRYVAAAFPSACGKTNLAMMRPALPGWKVECVGDDIAWMRFDSEGRLRAINPENGFFGVAPGTSATTNPNAMATIQSNTIFTNVAETSDGGVYWEGIDQPLPPGVTVTSWLGKPWKPGDKEPCAHPNSRFCAPARQCPIMDPAWEAPEGVPIDAIIFGGRRPKGKIIMHDPFAMRPFFGYNFGHYLEHWLSMEGRKGAQLPRIFHVNWFRRDEAGHFLWPGFGENARVLDWICRRLEGEDSARETPIGLVPKEGALDLSGLRAIDTTQLFSLPKDFWEQEVRDIRSYLTEQVNQDLPKEVLAELEALERRVHKM

SEQ ID NO: 16933 - protein, 158 aa, Homo sapiens
MGDNPFQPKSNSKMAELFMECEEEELEPWQKKVKEVEDDDDDEPIFVGEISSSKPAISNILNRVNPSSYSRGLKNGALSRGITAAFKPTSQHYTNPTSNPVPASPINFHPESRSSDSSVIVQPFSKPVSVSKTIRPAQGSIGCCLSISTVPSYNSGLS

SEQ ID NO: 16934 - protein, 245 aa, Homo sapiens
MRGLGLWLLGAMMLPAIAPSRPWALMEQYEVVLPWRLPGPRVRRALPSHLGGQFRPQPCPYLSIRGTYYRPARCPGLIQPVAQLRLSQSSAGRAPACTWGLEMQWSSRRLCRHHQGLHPERVSYVLGATGHNFTLHLRKNRDLLGSGYTETYTAANGSEVTEQPRGQDHCFYQGHVEGYPDSAASLSTCAGLRGFFQVGSDLHLIEPLDEGGEGGRHAVYQAEHLLQTAGTCGVSDDSLGSLLGP

SEQ ID NO: 16935 - protein, 219 aa, Homo sapiens
MRVFLLCAYILLLMVSQLRAVSFPEDDEPLNTVDYHYSRQYPVFRGRPSGNESQHRLDFQLMLKIRDTLYIAGRDQVYTVNLNEMPKTEVIPNKKLTWRSRQQDRENCAMKGKHKDECHNFIKVFVPRNDEMVFVCGTNAFNPMCRYYRLSTLEYDGEEISGLARCPFDARQTNVALFADGKLYSATVADFLASDAVIYRSMGDGSALRTIKYDSKWIK

SEQ ID NO: 16936 - protein, 772 aa, Homo sapiens
MPPPPPLSCLRGLQAPHQPGQPGFKFTVAESCDRIKDEFQFLQAQYHSLKVEYDKLANEKTEMQRHYVMYYEMSYGLNIEMHKQTEIAKRLNTILAQIMPFLSQEHQQQVAQAVERAKQVTMTELNAIIGQQLQAQHLSHATHGPPVQLPPHPSGLQPPGIPPVTGSSSGLLALGALGSQAHLTVKDEKNHHELDHRERESSANNSVSPSESLRASEKHRGSADYSMEAKKRKAEEKDSLSRYDSDGDKSDDLVVDVSNEDPATPRVSPAHSPPENGLDKARSLKKDAPTSPASVASSSSTPSSKTKDLGHNDKSSTPGLKSNTPTPRNDAPTPGTSTTPGLRSMPGKPPGMDPIGIMASALRTPISITSSYAAPFAMMSHHEMNGSLTSPGAYAGLHNIPPQMSAAAAAAAAAYGRSPMVGFDPHPPMRATGLPSSLASIPGGKPAYSFHVSADGQMQPVPFPHDALAGPGIPRHARQINTLSHGEVVCAVTISNPTRHVYTGGKGCVKIWDISQPGSKSPISQLDCLNRDNYIRSCKLLPDGRTLIVGGEASTLTIWDLASPTPRIKAELTSSAPACYALAISPDAKVCFSCCSDGNIAVWDLHNQTLVRQFQGHTDGASCIDISHDGTKLWTGGLDNTVRSWDLREGRQLQQHDFTSQIFSLGYCPTGEWLAVGMESSNVEVLHHTKPDKYQLHLHESCVLSLKFAYCGKWFVSTGKDNLLNAWRTPYGASIFQSKESSSVLSCDISADDKYIVTGSGDKKATVYEVIY

SEQ ID NO: 16937 - protein, 522 aa, Homo sapiens
MASGGGGCSASERLPPPFPGLEPESEGAAGGSEPEAGDSDTEGEDIFTGAAVVSKHQSPKITTSLLPINNGSKENGIHEEQDQEPQDLFADATVELSLDSTQNNQKKVLAKTLISLPPQEATNSSKPQPTYEELEEEEQEDQFDLTVGITDPEKIGDGMNAYVAYKVTTQTSLPLFRSKQFAVKRRFSDFLGLYEKLSEKHSQNGFIVPPPPEKSLIGMTKVKVGKEDSSSAEFLEKRRAALERYLQRIVNHPTMLQDPDVREFLEKEELPRAVGTQTLSGAGLLKMFNKATDAVSKMTIKMNESDIWFEEKLQEVECEEQRLRKLHAVVETLVNHRKELALNTAQFAKSLAMLGSSEDNTALSRALSQLAEVEEKIEQLHQEQANNDFFLLAELLSDYIRLLAIVRAAFDQRMKTWQRWQDAQATLQKKREAEARLLWANKPDKLQQAKDEILEWESRVTQYERDFERISTVVRKEVIRFEKEKSKDFKNHVIKYLETLLYSQQQLAKYWEAFLPEAKAIS

SEQ ID NO: 16938 - protein, 82 aa, Homo sapiens
MRSAARRGRAAPAARDSLPVLLFLCLLLKTCEPKTANAFKPNILLIMADDLGTGDLGCYGNNTLRDRFSLCCQGLSRTPGLK

SEQ ID NO: 16939 - protein, 614 aa, Homo sapiens
MLAGGVRSMPSPLLACWQPILLLVLGSVLSGSATGCPPRCECSAQDRAVLCHRKRFVAVPEGIPTETRLLDLGKNRIKTLNQDEFASFPHLEELELNENIVSAVEPGAFNNLFNLRTLGLRSNRLKLIPLGVFTGLSNLTKLDISENKIVILLDYMFQDLYNLKSLEVGDNDLVYISHRAFSGLNSLEQLTLEKCNLTSIPTEALSHLHGLIVLRLRHLNINAIRDYSFKRLYRLKVLEISHWPYLDTMTPNCLYGLNLTSLSITHCNLTAVPYLAVRHLVYLRFLNLSYNPISTIEGSMLHELLRLQEIQLVGGQLAVVEPYAFRGLNYLRVLNVSGNQLTTLEESVFHSVGNLETLILDSNPLACDCRLLWVFRRRWRLNFNRQQPTCATPEFVQGKEFKDFPDVLLPNYFTCRRARIRDRKAQQVFVDEGHTVQFVCRADGDPPPAILWLSPRKHLVSAKSNGRLTVFPDGTLEVRYAQVQDNGTYLCIAANAGGNDSMPAHLHVRSYSPDWPHQPNKTFAFISNQPGEGEANSTRATVPFPFDIKTLIIATTMGFISFLGVVLFCLVLLFLWSRGKGNTKHNIEIEYVPRKSDAGISSADAPRKFNMKMI

SEQ ID NO: 16940 - protein, 1101 aa, Homo sapiens
MDRAPTEQNVKLSAEVEPFIPQKKSPDTFMIPMALPNDNGSVSGVEPTPIPSYLITCYPFVQENQSNRQFPLYNNDIRWQQPNPNPTGPYFAYPIISAQPPVSTEYTYYQLMPAPCAQVMGFYHPFPTPYSNTFQAANTVNAITTECTERPSQLGQVFPLSSHRSRNSNRGSVVPKQQLLQQHIKSKRPLVKNVATQKETNAAGPDSRSKIVLLVDASQQTDFPSDIANKSLSETTATMLWKSKGRRRRASHPTAESSSEQGASEADIDSDSGYCSPKHSNNQPAAGALRNPDSGTMNHVESSMCAGGVNWSNVTCQATQKKPWMEKNQTFSRGGRQTEQRNNSQVGFRCRGHSTSSERRQNLQKRPDNKHLSSSQSHRSDPNSESLYFEDEDGFQELNENGNAKDENIQQKLSSKVLDDLPENSPINIVQTPIPITTSVPKRAKSQKKKALAAALATAQEYSEISMEQKKLQEALSKAAGKKNKTPVQLDLGDMLAALEKQQQAMKARQITNTRPLSYTVVTAASFHTKDSTNRKPLTKSQPCLTSFNSVDIASSKAKKGKEKEIAKLKRPTALKKVILKEREEKKGRLTVDHNLLGSEEPTEMHLDFIDDLPQEIVSQEDTGLSMPSDTSLSPASQNSPYCMTPVSQGSPASSGIGSPMASSTITKIHSKRFREYCNQVLCKEIDECVTLLLQELVSFQERIYQKDPVRAKARRRLVMGLREVTKHMKLNKIKCVIISPNCEKIQSKGGLDEALYNVIAMAREQEIPFVFALGRKALGRCVNKLVPVSVVGIFNYFGAESLFNKLVELTEEARKAYKDMVAAMEQEQAEEALKNVKKVPHHMGHSRNPSAASAISFCSVISEPISEVNEKEYETNWRNMVETSDGLEASENEKEVSCKHSTSEKPSKLPFDTPPIGKQPSLVATGSTTSATSAGKSTASDKEEVKPDDLEWASQQSTETGSLDGSCRDLLNSSITSTTSTLVPGMLEEEEDEDEEEEEDYTHEPISVEVQLNSRIESWVSETQRTMETLQLGKTLNGSEEDNVEQSGEEEAEAPEVLEPGMDSEAWTADQQASPGQQKSSNCSSLNKEHSDSNYTTQTT

SEQ ID NO: 16941 - protein, 742 aa, Homo sapiens
MRGLGLWLLGAMMLPAIAPSRPWALMEQYEVVLPWRLPGPRVRRALPSHLGLHPERVSYVLGATGHNFTLHLRKNRDLLGSGYTETYTAANGSEVTEQPRGQDHCFYQGHVEGYPDSAASLSTCAGLRGFFQVGSDLHLIEPLDEGGEGGRHAVYQAEHLLQTAGTCGVSDDSLGSLLGPRTAAVFRPRPGDSLPSRETRYVELYVVVDNAEFQMLGSEAAVRHRVLEVVNHVDKLYQKLNFRVVLVGLEIWNSQDRFHVSPDPSVTLENLLTWQARQRTRRHLHDNVQLITGVDFTGTTVGFARVSAMCSHSSGAVNQDHSKNPVGVACTMAHEMGHNLGMDHDENVQGCRCQERFEAGRCIMAGSIGSSFPRMFSDCSQAYLESFLERPQSVCLANAPDLSHLVGGPVCGNLFVERGEQCDCGPPEDCRNRCCNSTTCQLAEGAQCAHGTCCQECKVKPAGELCRPKKDMCDLEEFCDGRHPECPEDAFQENGTPCSGGYCYNGACPTLAQQCQAFWGPGGQAAEESCFSYDILPGCKASRYRADMCGVLQCKGGQQPLGRAICIVDVCHALTTEDGTAYEPVPEGTRCGPEKVCWKGRCQDLHVYRSSNCSAQCHNHGVCNHKQECHCHAGWAPPHCAKLLTEVHAGCQPRAGQGRGSSPIQGPPRAGPHHPPGPARPTPGLLGGSEEAAPCSSGHCVQPTLPSSCLHPAGTKAGHQANVRTPSAPSQTRGWCGQPWSS

SEQ ID NO: 16942 - protein, 147 aa, Homo sapiens
MQELHLLWWALLLGLAQACPEPCDCGEKYGFQIADCAYRDLESVPPGFPANVTTLSLSANRLPGLPEGAFREVPLLQSLWLAHNEIRTVAAGALASLSHLKSLDLSHNLISDFAWSDLHNLSALQLLKMDSNELTFIPRDAFRSLRA

SEQ ID NO: 16943 - protein, 356 aa, Homo sapiens
MADEGKSYSEHDDERVNFPQRKKKGRGPFRWKYGEGNRRSGRGGSGIRSSRLEEDDGDVAMSDAQDGPRVRYNPYTTRPNRRGDTWHDRDRIHVTVRRDRAPPERGGAGTSQDGTSKNWFKITIPYGRKYDKAWLLSMIQSKCSVPFTPIEFHYENTRAQFFVEDASTASALKAVNYKILDRENRRISIIINSSAPPHTILNELKPEQVEQLKLIMSKRYDGSQQALDLKGLRSDPDLVAQNIDVVLNRRSCMAATLRIIEENIPELLSLNLSNNRLYRLDDMSSIVQKAPNLKILNLSGNELKSERELDKIKGLKLEELWLDGNSLCDTFRDQSTYIRSVVACVSPPGDLHPLGG

SEQ ID NO: 16944 - protein, 55 aa, Homo sapiens
MRRGRLLEIALGFTVLLASYTSHGADANLEAGNVKETRASRAKRRGGGGHDALKG

SEQ ID NO: 16945 - protein, 136 aa, Homo sapiens
MLRRRGSPGMGVHVGAALGALWFCLTGALEVQVPEDPVVALVGTDATLCCSFSPEPGFSLAQLNLIWQLTDTKQLVHSFAEGQDQGSAYANRTALFPDLLAQGNASLRLQRVRVADEGSFTCFVSIRDFGSAAVSL

SEQ ID NO: 16946 - protein, 284 aa, Homo sapiens
MDAIKKKMQMLKLDKENALDRAEQAEADKKAAEDRSKQLEDELVSLQKKLKGTEDELDKYSEALKDAQEKLELAEKKATDAEADVASLNRRIQLVEEELDRAQERLATALQKLEEAEKAADESERGMKVIESRAQKDEEKMEIQEIQLKEAKHIAEDADRKYEEVARKLVIIESDLERAEERAELSEGKCAELEEELKTVTNNLKSLEAQAEKYSQKEDRYEEEIKVLSDKLKEAETRAEFAERSVTKLEKSIDDLEEKVAHAKEENLSMHQMLDQTLLELNNM

SEQ ID NO: 16947 - protein, 148 aa, Homo sapiens
MVLLRVLILLLSWAAGMGDRDFDDGVLGLAWVGAPSGSSGGICEKSKLYSDGKKKSLNTGIITVQNYGSHVPPKVSHITFAHEVGHNFGSPHDSGTECTPGESKNLGQKENGNYIMYARATSGDKLNNNKFSLCSIRNISQVLEKKRN

SEQ ID NO: 16948 - protein, 284 aa, Homo sapiens
MDAIKKKMQMLKLDKENALDRAEQAEADKKAAEDRSKQLEEDIAAKEKLLRVSEDERDRVLEELHKAEDSLLAAEEAAAKAEADVASLNRRIQLVEEELDRAQERLATALQKLEEAEKAADESERGMKVIESRAQKDEEKMEIQEIQLKEAKHIAEDADRKYEEVARKLVIIESDLERAEERAELSEGKCAELEEELKTVTNNLKSLEAQAEKYSQKEDRYEEEIKVLSDKLKEAETRAEFAERSVTKLEKSIDDLEDELYAQKLKYKAISEELDHALNDMTSI

SEQ ID NO: 16949 - protein, 50 aa, Homo sapiens
MASGRARCTRKLRNWVVEQVESGQFPGVCWDDTAKTMFRIPWKHAGLGNI

SEQ ID NO: 16950 - protein, 424 aa, Homo sapiens
MRRVLRLLLGCFLTELCARVCRAQERAGHGQLAQLGGVLLLAGGNRSGAASGEASEGAEASDAPPTRAPTPDFCRGYFDVMGQWDPPFNCSSGDFIFCCGTCGFRFCCTFKKRRLNQSTCTNYDTPLWLNTGKPPARKDDPLHDPTKDKTNLIVYIICGVVAVMVLVGIFTKLGLEKAHRPQREHMSRALADVMRPQGHCNTDHMERDLNIVVHVQHYENMDTRTPINNLHATQMNNAVPTSPLLQQMGHPHSYPNLGQISNPYEQQPPGKELNKYASLKAVGSSDGDWAVSTLKSPKADKVNDDFYTKRRHLAELAAKGNLPLHPVRVEDEPRAFSPEHGPAKQNGQKSRTNKMPPHPLAYTSTTNFKGWDPNEQSLRRQAYSNKGKLGTAETGSSDPLGTRPQHYPPPQPYFITNSKTEVTV

SEQ ID NO: 16951 - protein, 155 aa, Homo sapiens
MSDSDLGEDEGLLSLAGKRKRRGNLPKESVKILRDWLYLHRYNAYPSEQEKLSLSGQTNLSVLQDEFLDVIYWFRQIIAVVLGVIWGVLPLRGFLGIAGFCLINAGVLYLYFSNYLQIDEEEYGGTWELTKEGFMTSFALFMVIWIIFYTAIHYD

SEQ ID NO: 16952 - protein, 427 aa, Homo sapiens
MTSCLPALRFIATPRLSAMPHIDNDVKLDFKDVLLRPKRSTLKSRSEVDLTRSFSFRNSKQTYSGVPIIAANMDTVGTFEMAKVLCKFSLFTAVHKHYSLVQWQEFAGQNPDCLEHLAASSGTGSSDFEQLEQILEAIPQVKYICLDVANGYSEHFVEFVKDVRKRFPQHTIMAGNVVTGEMVEELILSGADIIKVGIGPGSVCTTRKKTGVGYPQLSAVMECADAAHGLKGHIISDGGCSCPGDVAKAFGAGADFVMLGGMLAGHSESGGELIERDGKKYKLFYGMSSEMAMKKYAGGVAEYRYVWRPRSLVIVWRQNSWLLRGGWYSSQRSMVNRGSMLGSVEKSLGLRNPEGEDNKVFPTLRASEGKTVEVPFKGDVEHTIRDILGGIRSTCTYVGAAKLKELSRRTTFIRVTQQVNPIFSEAC

SEQ ID NO: 16953 - protein, 213 aa, Homo sapiens
MHNLITNTKFCNIMGSSNGVDQEHFSNVVKGEKILPVFDEPPNPTNVEESLKRTKENDAHLVEVNLNNIKNIPIPTLKDFAKALETNTHVKCFSLAATRSNDPVATAFAEMLKVNKTLKSLNVESNFITGVGILALIDALRDNETLAELKIDNQRQQLGTAVELEMAKMLEENTNILKFGYQFTQQGPRTRAANAITKNNDLVRKRRVEGDHQ

SEQ ID NO: 16954 - protein, 55 aa, Homo sapiens
MLAGGVRSMPSPLLACWQPILLLVLGSVLSGSATGCPPRCECSAQDRAVLCHRKR

SEQ ID NO: 16955 - protein, 860 aa, Homo sapiens [sequence omitted]

SEQ ID NO: 16956 - protein, 439 aa, Homo sapiens
MIIPSLEELDSLKYSDLQNLAKSLGLRANLRATKLLKALKGYIKHEARKGNENQDESQTSASSCDETEIQISNQEEAERQPLGHVTKTRRRCKTVRVDPDSQNHSEIKISNPTEFQNHEKQESQDLRATAKVPSPPDEHQEAENAVSSGNRDSKVPSEGKKSLYTDESSKPGKNKRTAITTPNFKKLHEAHFKEMESIDQYIERKKKHFEEHNSMNELKQPINKGGVRTPVPPRGRLSVASTPISQRRSQGRSCGPASQSTLGLKGSLKRSAISAAKTGVRFSAATKDNEHKRSLTKTPARKSAHVTVSGGTPKGEAVLGTHKLKTITGNSAAVITPFKLTTEATQTPVSNKKPVFDLKASLSRPLNYEPHKGKLKPWGQSKENNYLNQHVNRINFYKKTYKQPHLQTKEEQRKKREQERKEKKAKVLGMRRGLILAED

SEQ ID NO: 16957 - protein, 777 aa, Homo sapiens
MTHTRRKSLPMLSSGLTGRREPLQMEDSNMEQGVEGVEPGMPESPGHLTGRRKNYPLRKRPLVPEKPKACKVLLTRLENVAGPRSADEADELPPDLPKPPSPAPSSEDPGLAQPRKRRLASLNAEALNNLLLEREDTSSLAGTRRSRAGDPHRSRDRDRATGGWSSSKKRPRLGDLGGGSRDLSPEPAPDEGPRRDGDPAPKRLASLNAAAFLKLSQERELPLRLPRAHAEVDGRSTEPPAPKAPRPKWPKVNGKNYPKAWQGASSGEAAGPPGWQGCPDEPWPSATPCGPSVQPSHQPLSKALESPLGLRPHLPLLMGGQAALKPEPGRPGEESPAPKQELHQPSFPTPQLSPLPMPGNPADYNGLCVGPELTALGSFYLYCGQEGLQCGGYSPCPMLPEGKLSPVAAPHEEGLLLAPSSVPSGTPFQHPPWGSSRYCSSEDTGVNGYSICGVLPLSVTHAGTTCGGCPYKMPFAAEGCRSLGQLEFPLPEAGHPASPAHPLLGCPVPSVPPAAEPVPHLQTPTSEPQTVARACPQSAKPPSGSKSGLRTGSSCRHTARSKAARRPSHPKQPRVQRPRPRRRRRRRTNGWVPVGAACEKAVYVLDEPEPAIRKSYQAVERHGETIRVRDTVLLKSGPRKTSTPYVAKISALWENPESGELMMSLLWYYRPEHLQGGRSPSMHENEVFASRHQDQNSVACIEEKCYVLTFAEYCRFCAMAKRRGEGLPSRKTALVPPSADYSTPPHRTVPEDTDPELVFLCRHVYDFRHGRILKNPQ

SEQ ID NO: 16958 - protein, 43 aa, Homo sapiens
MGFCLALAWTLLVGAWTPLGAQNPISWEVQRFDGWYNNLMEHR

SEQ ID NO: 16959 - protein, 107 aa, Homo sapiens
MLTCNKAGSRMVVDAANSNGPFQPVVLLHIRVEAVKLGRVSAELRLEVPDLQLWPPTEQQGEQTHGEPRGPQSMDGAASLLPCPSSSTPDLPAFSPALLPLLPTCQP

SEQ ID NO: 16960 - protein, 163 aa, Homo sapiens
MLARALLLCAVLALSHTANPCCSHPCQNRGVCMSVGFDQYKCDCTRTGFYGENCSTPEFLTRIKLFLKPTPNTVHYILTHFKGFWNVVNNIPFLRNAIMSYVLTSRSHLIDSPPTYNADYGYKSWEAFSNLSYYTRALPPVPDDCPTPLGVKALHASVFQDRS

SEQ ID NO: 16961 - protein, 209 aa, Homo sapiens
MAGGVLPLRGLRALCRVLLFLSQFCILSGGEQSQALAQSIKDPGPTRTFTVVPRAAESTEIPPYVMKCPSNGLCSRLPADCIDCTTNFSCTYGKPVTFDCAVKPSVTCVDQDFKSQKNFIINMTCRFCWQLPETDYECTNSTSCMTVSCPRQRYPANCTVRDHVHCLGNRTFPKMLYCNWTGGYKWSTALALSLQAQVGLHVQLTVGLH

SEQ ID NO: 16962 - protein, 779 aa, Homo sapiens
MTHTRRKSLPMLSSGLTGRREPLQMEDSNMEQGVEGVEPGMPESPGHLTGRRKNYPLRKRPLVPEKPKACKVLLTRLENVAGPRSADEADELPPDLPKPPSPAPSSEDPGLAQPRKRRLASLNAEALNNLLLEREDTSSLAGTRRSRAGDPHRSRDRDRATGGWSSSKKRPRLGDLGGGSRDLSPEPAPDEGPRRDGDPAPKRLASLNAAAFLKLSQERELPLRLPRAHAEVDGRSTEPPAPKAPRPKWPKVNGKNYPKAWQGASSGEAAGPPGWQGCPDEPWPSATPCGPSVQPSHQPLSKALESPLGLRPHLPLLMGGQAALKPEPGRPGEESPAPKQELHQPSFPTPQLSPLPMPGNPADYNGLCVGPELTALGSFYLYCGQEGLQCGGYSPCPMLPEGKLSPVAAPHEEGLLLAPSSVPSGTPFQHPPWGSSRYCSSEDTGVNGYSICGVLPLSVTHAGTTCGGCPYKMPFAAGCRSLGQLEFPLPEAGHPASPAHPLLGCPVPSVPPAAEPVPHLQTPTSEPQTVARACPQSAKPPSGSKSGLRTGSSCRHTARSKAARRPSHPKQPRVQRPRPRRRRRRRTNGWVPVGAACEKAVYVLDEPEPAIRKSYQAVERHGETIRVRDTVLLKSGPRKTSTPYVAKISALWENPESGELMMSLLWYYRPEHLQGGRSPSMHEPLQNEVFASRHQDQNSVACIEEKCYVLTFAEYCRFCAMAKRRGEGLPSRKTALVPPSADYSTPPHRTVPEDTDPELVFLCRHVYDFRHGRILKNPQ

SEQ ID NO: 16963 - protein, 196 aa, Homo sapiens
MAQETNHSQVPMLCSTGCGFYGNPRTNGMCSVCYKEHLQRQNSSNGRISPPVQCTDGSVPEAQSALDSTSSSMQPSPVSNQSLLSESVASSQLDSTSVDKAVPETEDVQASVSDTAQQPSEEQSKSLEKPKQKKNRCFMCRKKVGLTGFECRCGNVYCGVHRYSDVHNCSYNYKADAAEKIRKENPVVVGEKIQKI

SEQ ID NO: 16964 - protein, 106 aa, Homo sapiens
MIVSSALMIWKGLMVITGSESPIVVVLSGSMEPAFHRGDLLFLTNRVEDPIRVGEIVVFRIEGREIPIVHRVLKIHEKQNGHIKFLTKGDNNAVDDRGLYKQGQHW

SEQ ID NO: 16965 - protein, 436 aa, Homo sapiens
MKVFCEVLEELYKKVLLGATLENDSHDYIFYLNPAVSDQDCSTATSLEWANTCGIQGRHQPISVGVAPIAVAPVCLKTNSQMSGSREVMLLQLTVIKVMTTRILSVKTEFHAKEQYRDVIKILLESAKVDSKLICMFQNSDKLLSHMAAQCLALLLYFQLREKITLSNSWIAFCQKNLSEYSESNKAIYCLWTLTAIIKEIFKDSCSQKTEILKQFLTHFDTIFEVFYNSLFSQHFENCRDTSKIVNILMCFLDLLELLIASRIHLKLHFTCQRILFLKPSCMLEVITWPIQAFVKRKVIIFLKKCLLCKVGEDLCRGSVPALMPPDHHVAVDMLALANAVLQAVNSGLLKTLSVYEKHSFFGGDEVQPECELITSPDHVILRAASLVIMKSLEIKFQNYSSASEVKGNSPNSFCMQCVIIYLSTVIHNYQISGLV

SEQ ID NO: 16966 - protein, 97 aa, Homo sapiens
MHKWILTWILPTLLYRSCFHIICLVGTISLACNDMTPEQMATNVNCSSPERHTRSYDYMEGGDIRVRRLFCRTQWYLRIDKRGKVKGTQEMKNNYSK

SEQ ID NO: 16967 - protein, 370 aa, Homo sapiens
MAQRYDDLPHYGGMDGVGIPSTMYGDPHAARSMQPVHHLNHGPPLHSHQYPHTAHTNAMAPSMGSSVNDALKRDKDAIYGHPLFPLLALIFEKCELATCTPREPGVAGGDVCSSESFNEDIAVFAKQIRAEKPLFSSNPELDNLMIQAIQVLRFHLLELEKVHELCDNFCHRYISCLKGKMPIDLVIDDREGGSKSDSEDITRSANLTDQPSWNRDHDDTASTRSGGTPGPSSGGHTSHSGDNSSEQGDGLDNSVASPSTGDDDDPDKDKKRHKKRGIFPKVATNIMRAWLFQHLTHPYPSEEQKKQLAQDTGLTILQVNNWFINARRRIVQPMIDQSNRAGKSPIVTVFKSRKRKPSSSHSPGGPLPGK

SEQ ID NO: 16968 - protein, 698 aa, Homo sapiens
MAACGRVRRMFRLSAALHLLLLFAAGAEKLPGQGVHSQGQGPGANFVSFVGQAGGGGPAGQQLPQLPQSSQLQQQQQQQQQQQQPQPPQPPFPAGGPPARRGGAGAGGGWKLAEEESCREDVTRVCPKHTWSNNLAVLECLQDVREPENEISSDCNHLLWNYKLNLTTDPKFESVAREVCKSTITEIKECADEPVGKGYMVSCLVDHRGNITEYQCHQYITKMTAIIFSDYRLICGFMDDCKNDINILKCGSIRLGEKDAHSQGEVVSCLEKGLVKEAEEREPKIQVSELCKKAILRVAELSSDDFHLDRHLYFACRDDRERFCENTQAGEGRVYKCLFNHKFEESMSEKCREALTTRQKLIAQDYKVSYSLAKSCKSDLKKYRCNVENLPRSREARLSYLLMCLESAVHRGRQVSSECQGEMLDYRRMLMEDFSLSPEIILSCRGEIEHHCSGLHRKGRTLHCLMKVVRGEKGNLGMNCQQALQTLIQETDPGADYRIDRALNEACESVIQTACKHIRSGDPMILSCLMEHLYTEKMVEDCEHRLLELQYFISRDWKLDPVLYRKCQGDASRLCHTHGWNETSEFMPQGAVFSCLYRHAYRTEEQGRRLSRECRAEVQRILHQRAMDVKLDPALQDKCLIDLGKWCSEKTETGQELECLQDHLDDLVVECRDIVGNLTELESEAEREYVFKNLPFKV

SEQ ID NO: 16969 - protein, 94 aa, Homo sapiens
MTPQSLLQTTLFLLSLLFLVQGAHGRGHREDFRFCSQRNQTHRSSLHYKPTPDLRISIENSEEALTVHAPFPAAHPASRSFPDPRGLYHFCLYW

SEQ ID NO: 16970 - protein, 96 aa, Homo sapiens
MEDKVTSPEKAEEAKLKARYPHLGQKPGGSDFLRKRLQKGQKYFDSGDYNMAKAKMKNKQLPTAAPDKTEVTGDHIPTPQDLPQRKPSLVASKLAG

SEQ ID NO: 16971 - protein, 55 aa, Homo sapiens
MHPDLSPHLHTEECNVLINLLKECHKNYVENRTKSREHGIAMRKKLFNPPEESEK

SEQ ID NO: 16972 - protein, 114 aa, Homo sapiens
MFPLRALWLVWALLGVAGSCPEPCACVDKYAHQFADCAYKELREVPEGLPANVTTLSLSANKITVLRRGAFADVTQVTSLWLAHNEVRTVEPGALAVLSQLKNLDLSHNFISSF

SEQ ID NO: 16973 - protein, 125 aa, Homo sapiens
MTPQSLLQTTLFLLSLLFLVQASASSGAHGRGHREDFRFCSQRNQTHRSSLHYKPTPDLRISIENSEEALTVHAPFPAAHPASRSFPDPRGLYHFCLYWNRHAGRLHLLYGKRDFLLSDKASSLL

SEQ ID NO: 16974 - protein, 333 aa, Homo sapiens
MCRGGRMFAPTKTWRRWHRRVNTTQKRYAICSALAASALPALVMSKGHRIEEVPELPLVVEDKVEGYKKTKEAVLLLKKLKAWNDIKKVYASQRMRAGKGKMRNRRRIQRRGPCIIYNEDNGIIKAFRNIPGITLLNVSKLNILKLAPGGHVGRFCIWTESAFRKLDELYGTWRKAASLKSNYNLPMHKMINTDLSRILKSPEIQRALRAPRKKIHRRVLKKNPLKNLRIMLKLNPYAKTMRRNTILRQARNHKLRVDKAAAAAAALQAKSDEKAAVAGKKPVVGKKGKKAAVGVKKQKKPLVGKKAAATKKPAPEKKPAEKKPTTEEKKPAA

SEQ ID NO: 16975 - protein, 89 aa, Homo sapiens
MFPLRALWLVWALLGVAGSCPEPCACVDKYAHQFADCAYKELREVPEGLPANVTTLSLSANKITVLRRGAFADVTQVTSLWLAHNEVRT

SEQ ID NO: 16976 - protein, 131 aa, Homo sapiens
MTPQSLLQTTLFLLSLLFLVQGAHGRGHREDFRFCSQRNQTHRSSLHYKPTPDLRISIENSEEALTVHAPFPAAHPASRSFPDPRGLYHFCLYWNRHAGRLHLLYGKRDFLLSDKASSLLCFQHQEESLAQ

SEQ ID NO: 16977 - protein, 878 aa, Homo sapiens
MGPLSRDAWAQRLGAFRASPSAFMAGPEGEDLGRDLLSDLRSEKLSEQTKVSLLALSMEYPAQLWPDASAAEVAATSLLDTLVLLPPRPSALRRPLLLAATTALAAGGALGPTSGASCRLLPLLLGLAAGSDLGRGFVPASEQRPLQATACECLRELESCKPGLLGGSLGLLRGLLGQEGPVQPLSLLLALALRNTLVLQSRVGAGLGGLLTDKVSPTGGGPWDWTLVEEGDGRLQPQAPSWPAAEEGEGERSLTAREHSPEEARELRAAVIQLLDTSYLLTPVAQAQLLWLLGWALRGLQGQPPALFKPQLVRLLGTAQLTLLHAMLALKAAFGEALFTAQDEALLLRRLTLAAQHPALPPPTHLFYLHCVLSFPENWPLGPEGEEAAPLLLGPQLCRGLLPSLLHDPMALLARLHLLCLLCAEEEEEEKGQLPSPRHYLEELLAGLRQRAALDGGPRALATLCFQASYLVACCLAGQPTVLTPLIHGLAQLYQARPMLAPHFVDLLDQVDSELREPLKVVLRQVVVSRPGRDEALCWHLQMLAKVADGDAQSATLNFLQAAAAHCTNWDLQQGLLRVCRALLRAGVRGGLVDLLQVLARQLEDPDGRDHARLYYILLAHLAAPKLGVALGPSLAAPALASSLVAENQGFVAALMVQEAPALVRLSLGSHRVKGPLPVLKLQPEALEPIYSLELRFRVEGQLYAPLEAVHVPCLCPGRPARPLLLPLQPRCPAPARLDVHALYTTSTGLTCHAHLPPLFVNFADLFLPFPQPPEGAGLGFFEELWDSCLPEGAESRVWCPLGPQGLEGLVSRHLEPFVVVAQPPTSYCVAIHLPPDSKLLLRLEAALADGVPVALRTDDWAVLPLAGDYLRGLAAAV

SEQ ID NO: 16978 - protein, 81 aa, Homo sapiens
MTPQSLLQTTLFLLSLLFLVQGRCPRQGPQGRLSLLQPAEPDTQEQPPLQTHTRPAHLHRELRRGPHSPCPFPCSPPCFPI

SEQ ID NO: 16979 - protein, 131 aa, Homo sapiens
MSAEVPEAASAEEQKSEHNMLPWSLQPSIPNSLEEMEDKVTSPEKAEEAKLKARYPHLGQKPGGSDFLRKRLQKGQKYFDSGDYNMAKAKMKNKQLPTAAPDKTEVTGDHIPTPQDLPQRKPSLVASKLAG

SEQ ID NO: 16980 - protein, 162 aa, Homo sapiens
MKDSCITVMAMALLSGFFFFAPASSYNLDVRGARSFSPPRAGRHFGYRVLQVGNGVIVGAPGEGNSTGSLYQCQSGTGHCLPVTLRGSNYTSKYLGMTLATDPTDGSILACDPGLSRTCDQNTYLSGLCYLFRQNLQGPMLQGRPGFQVCCCSVFHKLQNRI

SEQ ID NO: 16981 - protein, 123 aa, Homo sapiens
SKRLEKIPQVPLLFPFIFIILTNYSKMEGAVESQPSFFKTSQDIVTCTWVENCYSSFSRRPLEQMFCKHQSKNIISWTGMVAHTCNPSTLGGQDVFTSCEQWEKWTNFFGKWTFYWLKCRRQK

SEQ ID NO: 16982 - protein, 234 aa, Homo sapiens
MAPASRLLALWALAAVALPGSGAEGDGGWYAFVRPVILQGLTDNSRFRALCSRDRLLASFGDRVVRLSTANTYSYHKVDLPFQEYVEQLLHPQDPTSLGNDTLYFFGDNNFTEWASLFRHYSPPPFGLLGTAPAYSFGIAGAGSGVPFHWHGPGYSEVIYGRKRWFLYPPEKTPEFHPNKTTLAWLRDTYPALPPSARPLECTIRAGEVLYFPDRWWHATLNLDTSVFISTFLG

SEQ ID NO: 16983 - protein, 200 aa, Homo sapiens
MHVFFVFLSLLETLRRLPVADVSVPHTGENCSPRMEAALTKNTVDIAEGLEQVQMGSLPGTISENSPSPSERNRRVNSDLVTNGLINKPQSLESRERQKSSDILEELIVQGIIQSHSKVFRNGESYDVTLTTTEKPLRKPPSRLKKLKIKKQVKDFTMKDIEEKMEAAEERRKTKEEEIRKRLRSDRLLPSANHSDSAEL

SEQ ID NO: 16984 - protein, 119 aa, Homo sapiens
MTPQSLLQTTLFLLSLLFLVQGAHGRGHREDFRFCSQRNQTHRSSLHYKPTPDLRISIENSEEALTVHAPFPAAHPASRSFPDPRGLYHFCLYWNRHAGRLHLLYGKRDFLLSDKASSL

SEQ ID NO: 16985 - protein, 607 aa, Homo sapiens
MHHQQRMAALGTDKELSDLLDFSAMFSPPVSSGKNGPTSLASGHFTGSNVEDRSSSGSWGNGGHPSPSRNYGDGTPYDHMTSRDLGSHDNLSPPFVNSRIQSKTERGSYSSYGRESNLQGCHQVYAPSASTADYNRDSPGYPSSKPATSTFPSSFFMQDGHHSSDPWSSSSGMNQPGYAGMLGNSSHIPQSSSYCSLHPHERLSYPSHSSADINSSLPPMSTFHRSGTNHYSTSSCTPPANGTDSIMANRGSGAAGSSQTGDALGKALASIYSPDHTNNSFSSNPSTPVGSPPSLSAGTAVWSRNGGQASSSPNYEGPLHSLQSRIEDRLERLDDAIHVLRNHAVGPSTAMPGGHGDMHGIIGPSHNGAMGGLGSGYGTGLLSANRHSLMVGTHREDGVALRGSHSLLPNQVPVPQLPVQSATSPDLNPPQDPYRGMPPGLQGQSVSSGSSEIKSDDEGDENLQDTKSSEDKKLDDDKKDIKSITSNNDDEDLTPEQKAEREKERRMANNARERLRVRDINEAFKELGRMVQLHLKSDKPQTKLLILHQAVAVILSLEQQVRERNLNPKAACLKRREEEKVSSEPPPLSLAGPHPGMGDASNHMGQM

SEQ ID NO: 16986 - protein, 74 aa, Homo sapiens
MHPDLSPHLHTEECNVLINLLKECHKNHNILKFFGYCNDVDRELRKCLKNEVLALSPKLECSRVIVTHGSLKLK

SEQ ID NO: 16987 - protein, 37 aa, Homo sapiens
MITDVQLAIFANMLGVSLFLLVVLYHYVAVNNPKKQE

SEQ ID NO: 16988 - protein, 61 aa, Homo sapiens
MLVGQGAGLLGPAVVTAAVVLLLSGVGPAHGSEDIVVGCGGFVKSDVEINYSLIEQVLNMH

SEQ ID NO: 16989 - protein, 92 aa, Homo sapiens
MSALGAVIALLLWGQLFAVDSGNDVTDIADDGCPKPPEIAHGYVEHSVRYQCKNYYKLRTEGDGVYTLNNEKQWINKAVGDKLPECEAAHTE

SEQ ID NO: 16990 - protein, 177 aa, Homo sapiens
MPVPASWPHPPCPFLLLTLLLGLTGVAGEDELQVIQPEKSVSVAAGESATLRCAMTSLIPVGPIMWFRGAGAGRELIYNQKEGHFPRVTTVSELTKRNNLDFSISISNITPADAGTYYCVKFRKGSPDDVEFKSGAGTELSVRGVTHVFHVQQTEMSQTVSTGESIILSCSVPNTLP

SEQ ID NO: 16991 - protein, 161 aa, Homo sapiens
MASMQKRLQKELLALQNDPPPGMTLNEKSVQNSITQWIVDMEGAPGTLYEGEKFQLLFKFSSRYPFDSPQVMFTGENIPVHPHVYSNGHICLSILTEDWSPALSVQSVCLSIISMLSSCKEKRRPPDNSFYVRTCNKNPKKTKWWYHEAAYHKDFSLLFKD

SEQ ID NO: 16992 - protein, 125 aa, Homo sapiens
MLAGGVRSMPSPLLACWQPILLLVLGSVLSGSATGCPPRCECSAQDRAVLCHRKRFVAVPEGIPTETRLLDLGKNRIKTLNQDEFASFPHLEELELNENIVSAVEPGAFNNLFNLRTLGLRSNRL

SEQ ID NO: 16993 - protein, 238 aa, Homo sapiens
MAVLLLLLRALRRGPGPGPRPLWGPGPAWSPGFPARPGRGRPYMASRPPGDLAEAGGRALQSLQLRLLTPTFEGINGLLLKQHLVQNPVRLWQLLGGTFYFNTSRLKQKNKEKDKSKGKAPEEDEEERRRRERDDQMYRERLRTLLVIAVVMSLLNALSTSGGSISWNDFVHEMLAKGEVQRVQVVPESDVVEVYLHPGAVVFGRPNQLKMARFTIVDGKMGKGVSFKDVAGMHEAKL

SEQ ID NO: 16994 - protein, 1062 aa, Homo sapiens
MLKPQPLQQPSQPQQPPPTQQAVARRPPGGTSPPNGGLPGPLATSAAPPGPPAAASPCLGPVAAAGSGLRRGAEGILAPQPPPPQQHQERPGAAAIGSARGQSTGKGPPQSPVFEGVYNNSRMLHFLTAVVGSTCDVKVKNGTTYEGIFKTLSSKFELAVDAVHRKASEPAGGPRREDIVDTMVFKPSDVMLVHFRNVDFNYATKDKFTDSAIAMNSKVNGEHKEKVLQRWEGGDSNSDDYDLESDMSNGWDPNEMFKFNEENYGVKTTYDSSLSSYTVPLEKDNSEEFRQRELRAAQLAREIESSPQYRLRIAMENDDGRTEEEKHSAVQRQGSGRESPSLASREGKYIPLPQRVREGPRGGVRCSSSRGGRPGLSSLPPRGPHHLDNSSPGPGSEARGINGGPSRMSPKAQRPLRGAKTLSSPSNRPSGETSVPPPPAVGRMYPPRSPKSAAPAPISASCPEPPIGSAVPTSSASIPVTSSVSDPGVGSISPASPKISLAPTDVKELSTKEPGRTLEPQELARIAGKVPGLQNEQKRFQLEELRKFGAQFKLQPSSSPENSLDPFPPRILKEEPKGKEKEVDGLLTSEPMGSPVSSKTESVSDKEDKPPLAPSGGTEGPEQPPPPCPSQTGSPPVGLIKGEDKDEGPVAEQVKKSTLNPNAKEFNPTKPLLSVNKSTSTPTSPGPRTHSTPSIPVLTAGQSGLYSPQYISYIPQIHMGPAVQAPQMYPYPVSNSVPGQQGKYRGAKGSLPPQRSDQHQPASAPPMMQAAAAAGPPLVAATPYSSYIPYNPQQFPGQPAMMQPMAHYPSQPVFAPMLQSNPRMLTSGSHPQAIVSSSTPQYPSAEQPTPQALYATVHQSYPHHATQLHAHQPQPATTPTGSQPQSQHAAPSPVQHQAGQAPHLGSGQPQQNLYHPGALTGTPPSLPPGPSAQSPQSSFPQPAAVYAIHHQQLPHGFTNMAHVTQAHVQTGITAAPPPHPGAPHPPQVMLLHPPQSHGGPPQGAVPQSGVPALSASTPSPYPYIGHPQGEQPGQAPGFPGGADDRILQSHPSQQLPFHPPGN

SEQ ID NO: 16995 - protein, 1358 aa, Homo sapiens
MGEVEPGPAGPLEPPEPPEAPASRRPGGIRVLKRNMKRNGSRNCLNRRSRFGSRERDWLREDVKRGCVYLYGADTTTATTTTTTSSSSSSSSSSSDLHLVLCTVETPASEICAGEGRESLYLQLHGDLVRRLEPTERPLQIVYDYLSRLGFDDPVRIQEEATNPDLGCMIRFYGEKPCHMDRLDRILLSGIYNVRKGKTQLHKWAERLVVLCGTCLIVSSVKDCQTGKMHILPLVGGKIEEVKRRQYSLAFSSAGAQAQTYHVSFETLAEYQRWQRQASKVVSQRISTVDLSCYSLEEVPEHLFYSQDITYLNLRHNFMQLERPGGLDTLYKFSQLKGLNLSHNKLGLFPILLCEISTLTELNLSCNGFHDLPSQIGNLLNLQTLCLDGNFLTTLPEELGNLQQLSSLGISFNNFSQIPEVYEKLTMLDRVVMAGNCLEVLNLGVLNRMNHIKHVDLRMNHLKTMVIENLEGNKHITHVDLRDNRLTDLDLSSLCSLEQLHCGRNQLRELTLSGFSLRTLYASSNRLTAVNVYPVPSLLTFLDLSRNLLECVPDWACEAKKIEVLDVSYNLLTEVPVRILSSLSLRKLMLGHNHVQNLPTLVEHIPLEVLDLQHNALTRLPDTLFSKALNLRYLNASANSLESLPSACTGEESLSMLQLLYLTNNLLTDQCIPVLVGHLHLRILHLANNQLQTFPASKLNKLEQLEELNLSGNKLKTIPTTIANCKRLHTLVAHSNNISIFPEILQLPQIQFVDLSCNDLTEILIPEALPATLQDLDLTGNTNLVLEHKTLDIFSHITTLKIDQKPLPTTDSTVTSTFWSHGLAEMAGQRNKLCVSALAMDSFAEGVGAVYGMFDGDRNEELPRLLQCTMADVLLEEVQQSTNDTVFMANTFLVSHRKLGMAGQKLGSSALLCYIRPDTADPASSFSLTVANVGTCQAVLCRGGKPVPLSKVFSLEQDPEEAQRVKDQKAIITEDNKVNGVTCCTRMLGCTYLYPWILPKPHISSTPLTIQDELLILGNKALWEHLSYTEAVNAVRHVQDPLAAAKKLCTLAQSYGCQDNVGAMVVYLNIGEEGCTCEMNGLTLPGPVGFASTTTIKDAPKPATPSSSSGIASEFSSEMSTSEVSSEVGSTASDEHNAGGLDTALLPRPERRCSLHPTPTSGLFQRQPSSATFSSNQSDNGLDSDDDQPVEGVITNGSKVEVEVDIHCCRGRDLENSPPLIESSPTLCSEEHARGSCFGIRRQNSVNSGMLLPMSKDRMELQKSPSTSCLYGKKLSNGSIVPLEDSLNLIEVATEVPKRKTGYFAAPTQMEPEDQFVVPHDLEEEVKEQMKQHQDSRLEPEPHEEDRTEPPEEFDTAL

SEQ ID NO: 16996 - protein, 46 aa, Homo sapiens
MLDINALKRALKLQQKRQKEELEREQQREKEFEREKQLTARPAKRM

SEQ ID NO: 16997 - protein, 38 aa, Homo sapiens
MDKLTIISGCLFLAADIFAIASIANPDWINTGESAVSP

SEQ ID NO: 16998 - protein, 890 aa, Homo sapiens
MKRQSERDSSPSGRGSSSSAKRPREREREAEAGGRRAAHKASGGAKHPVPARARDKPRGSGSGGGGHRDGRGTGDANHRASSGRSSGSGAGGGGRGGKASGDPGASGMSPRASPLPPPPPPPGAEPACPGSSAAAPEYKTLLISSLSPALPAEHLEDRLFHQFKRFGEISLRLSHTPELGRVAYVNFRHPQDAREARQHALARQLLLYDRPLKVEPVYLRGGGGSSRRSSSSSAAASTPPPGPPAPADPLGYLPLHGGYQYKQRSLSPVAAPPLREPRARHAAAAFALDAAAAAAVGLSRERALDYYGLYDDRGRPYGYPAVCEEDLMPEDDQRATRNLFIGNLDHSVSEVELRRAFEKYGIIEEVVIKRPARGQGGAYAFLKFQNLDMAHRAKVAMSGRVIGRNPIKIGYGKANPTTRLWVGGLGPNTSLAALAREFDRFGSIRTIDHVKGDSFAYIQYESLDAAQAACAKMRGFPLGGPDRRLRVDFAKAEETRYPQQYQPSPLPVHYELLTDGYTRHRNLDADLVRDRTPPHLLYSDRDRTFLEGDWTSPSKSSDRRNSLEGYSRSVRSRSGERWGADGDRGLPKPWEERRKRRSLSSDRGRTTHSPYEERSRTKGSGQQSERGSDRTPERSRKENHSSEGTKESSSNSLSNSRHGAEERGHHHHHHEAADSSHGKKARDSERNHRTTEAEPKPLEEPKHETKKLKNLSEYAQTLQLGWNGLLVLKNSCFPTSMHILEGDQGVISSLLKDHTSGSKLTQLKIAQRLRLDQPKLDEVTRRIKQGSPNGYAVLLATQATPSGLGTEGMPTVEPGLQRRLLRNLVSYLKQKQAAGVISLPVGGSKGRDGTGMLYAFPPCDFSQQYLQSALRTLGKLEEEHMVIVIVRDTA

SEQ ID NO: 16999 - protein, 97 aa, Homo sapiens
MTPQSLLQTTLFLLSLLFLVQASGTRHTGAASTTNPHQTCASPSRTPKRPSQSMPLSLQPTLLPDPSLTPGASTTSASTGTDMLGDYIFSMASVTSC

SEQ ID NO: 17000 - protein, 146 aa, Homo sapiens
MTPQSLLQTTLFLLSLLFLVQASASSGAHGRGHREDFRFCSQRNQTHRSSLHYKPTPDLRISIENSEEALTVHAPFPAAHPASRSFPDPRGLYHFCLYWNRHAGRLHLLYGKRDFLLSDKASSLLCFQHQEESLAQGPPLLATSVT

SEQ ID NO: 17001 - protein, 264 aa, Homo sapiens
MAAPRVFPLSCAVQQYAWGKMGSNSEVARLLASSDPLAQIAEDKPYAELWMGTHPRGDAKILDNRISQKTLSQWIAENQDSLGSKVKDTFNGNLPFLFKVLSVETPLSIQAHPNKELAEKLHLQAPQHYPDANHKPEMAIALTPFQGLCGFRPVEEIVTFLKKVPEFQFLIGDEAATHLKQTMSHDSQAVASSLQSCFSHLMKSEKKVVVEQLNLLVKRISQQGGHSYIPGWVQCSGLGFPADTRLWGQFSTPLPKWNTKRGPT

SEQ ID NO: 17002 - protein, 1169 aa, Homo sapiens
MTRTRAALLLFTALATSLGFNLDTEELTAFRVDSAGFGDSVVQYANSWVVVGAPQKITAANQTGGLYQCGYSTGACEPIGLQVPPEAVNMSLGLSLASTTSPSQLLACGPTVHHECGRNMYLTGLCFLLGPTQLTQRLPVSRQECPRQEQDIVFLIDGSGSISSRNFATMMNFVRAVISQFQRPSTQFSLMQFSNKFQTHFTFEEFRRSSNPLSLLASVHQLQGFTYTATAIQNVVHRLFHASYGARRDAAKILIVITDGKKEGDSLDYKDVIPMADAAGIIRYAIGVGLAFQNRNSWKELNDIASKPSQEHIFKVEDFDALKDIQNQLKEKIFAIEGTETTSSSSFELEMAQEGFSAVFTPDGPVLGAVGSFTWSGGAFLYPPNMSPTFINMSQENVDMRDSYLGYSTELALWKGVQSLVLGAPRYQHTGKAVIFTQVSRQWRMKAEVTGTQIGSYFGASLCSVDVDSDGSTDLVLIGAPHYYEQTRGGQVSVCPLPRGWRRWWCDAVLYGEQGHPWGRFGAALTVLGDVNGDKLTDVVIGAPGEEENRGAVYLFHGVLGPSISPSHSQRIAGSQLSSRLQYFGQALSGGQDLTQDGLVDLAVGARGQVLLLRTRPVLWVGVSMQFIPAEIPRSAFECREQVVSEQTLVQSNICLYIDKRSKNLLGSRDLQSSVTLDLALDPGRLSPRATFQETKNRSLSRVRVLGLKAHCENFNLLLPSCVEDSVTPITLRLNFTLVGKPLLAFRNLRPMLAADAQRYFTASLPFEKNCGADHICQDNLGISFSFPGLKSLLVGSNLELNAEVMVWNDGEDSYGTTITFSHPAGLSYRYVAEGQKQGQLRSLHLTCDSAPVGSQGTWSTSCRINHLIFRGGAQITFLATFDVSPKAVLGDRLLLTANVSSENNTPRTSKTTFQLELPVKYAVYTVVSSHEQFTKYLNFSESEEKESHVAMHRYQVNNLGQRDLPVSINFWVPVELNQEAVWMDVEVSHPQNPSLRCSSEKIAPPASDFLAHIQKNPVLDCSIAGCLRFRCDVPSFSVQEELDFTLKGNLSFGWVRQILQKKVSVVSVAEITFDTSVYSQLPGQEAFMRAQTTTVLEKYKVHNPTPLIVGSSIGGLLLLALITAVLYKVGFFKRQYKEMMEEANGQIAPENGTQTPSPPTPHYPQDNV

SEQ ID NO: 17003 - protein, 40 aa, Homo sapiens
MNPEKDFAPLTPNIVRALNDKLYEKRKVAALEIEKTQGST

SEQ ID NO: 17004 - protein, 598 aa, Homo sapiens
MELTGIKQAQVDEGVPLKICLSQFCKWIHKIQQQKNIIFATGISEPSASEVKLCAFVTWSDWDLGVCLEYECKRKQLLKPVFLNSWIDLRATYKLFYRRKPKGLSGALQEVGIEFSGREHSGLDDSRNTALLAWKMIRDGCVMKITRSLNKVPTKKNFSILARNLNTIQVEEMSACNISIQGPSIYNKEPKNIINPHEKVQMKSICANSPIKAQQDQLQVKNNIKASLHNVKSSLPLFNTKSSTSVGQLQSPTLNSPIYMQKQGKNEHLAFNTKSKASTVGSELVLVSTTVPTVHHVSDLEMSSTLDCLPVLADWEDVVLLPASQPEENVDCTVPISDSDLEISFNSGERLMVLKELEMSSHENFGDIEETPQKSETSKSIVYKSPHTTIYNVKEAKDPGSDISAFKLPEHKSSTFNRVNANMSHPLVLGKHPLLSGGTKRNPCSPQAFPPAKKQPFTIHEEKPTSSDCSPVRSSSWRRLPSILTSTVNLQEPWKSGKMTPPLCKCGRRSKRLVVSNNGPNHGKVFYCCPIGKYQENRKCCGYFKWEQTLQKERANSMVPSHSTGGLTFSSPETSHICDRNLSISTKNSLRLRPSMRN

SEQ ID NO: 17005 - protein, 137 aa, Homo sapiens
MNGPADGEVDYKKKYRNLKRKLKFLIYEHECFQEELRKAQRKLLKVSRDKSFLLDRLLQYENVDEDSSDSDATASSDNSETEGTPKLSDTPAPKRKRSPPLGGAPSPSSLSLPPSTGFPLQASGVPSPYLSSERGQA

SEQ ID NO: 17006 - protein, 66 aa, Homo sapiens
MGWLCSGLLFPVSCLVLLQVASSGLFRMPCGERKRVEARRSGGRSGVEEMRGSGSLWEVDLRTDWN

SEQ ID NO: 17007 - protein, 72 aa, Homo sapiens
MLAGGVRSMPSPLLACWQPILLLVLGSVLSGSATGCPPRCECSAQDRAVLCHRKRFVAVPEGIPTETRLLDL

SEQ ID NO: 17008 - protein, 891 aa, Homo sapiens
MTVSTDNLLVNKAISKSGQLPTSSNLEANISCSLNELTYNNLPANENQNLKEQNQTEKSLKSPSDTLDGRNENLQESEILSQPKSLSLEATSPLSAEKHSCTVPEGLLFPAEYYVRTTRSMSNCQRKVAVEAVIQSHLDVKKKGFKNKNKDASKNLNLSNEETDQSEIRMSGTCTGQPSSRTSQKLLSLTKVSSPAGPTEDNDLSRKAVAQAPGRRYTGKRKSACTPASDHCEPLLPTSSLSIVNRSKEEVTSHKYQHEKLFIQVKGKKSRHQKEDSLSWSNSAYLSLDDDAFTAPFHRDGMLSLKQLLSFLSITDFQLPDEDFGPLKLEKVKSCSEKPVEPFESKMFGERHLKEGSCIFPEELSPKRMDTEMEDLEEDLIVLPGKSHPKRPNSQSQHTKTGLSSSILLYTPLNTVAPDDNDRPTTDMCSPAFPILGTTPAFGPQGSYEKASTEVAGRTCCTPQLAHLKDSVCLASDTKQFDSSGSPAKPHTTLQVSGRQGQPTCDCDSVPPGTPPPIESFTFKENQLCRNTCQELHKHSVEQTETAELPASDSINPGNLQLVSELKNPSGSCSVDVSAMFWERAGCKEPCIITACEDVVSLWKALDAWQWEKLYTWHFAEVPVLQIVPVPDVYNLVCVALGNLEIREIRALFCSSDDESEKQVLLKSGNIKAVLGLTKRRLVSSSGTLSDQQVEVMTFAEDGGGKENQFLMPPEETILTFAEVQGMQEALLGTTIMNNIVIWNLKTGQLLKKMHIDDSYQASVCHKAYSEMGLLFIVLSHPCAKESESLRSPVFQLIVINPKTTLSVGVMLYCLPPGQAGRFLEGDVKDHCAAAILTSGTIAIWDLLLGQCTALLPPVSDQHWSFVKWSGTDSHLLAGQKDGNIFVYHYS

SEQ ID NO: 17009 - protein, 10 aa, Homo sapiens
MGWLCSGLLF

SEQ ID NO: 17010 - protein, 850 aa, Homo sapiens
MARHLLLPLVMLVISPIPGAFQDSALSPTQEEPEDLDCGRPEPSARIVGGSNAQPGTWPWQVSLHHGGGHICGGSLIAPSWVLSAAHCFMTNGTLEPAAEWSVLLGVHSQDGPLDGAHTRAVAAIVVPANYSQVELGADLALLRLASPASLGPAVWPVCLPRASHRFVHGTACWATGWGDVQEADPLPLPWVLQEVELRLLGEATCQCLYSQPGPFNLTLQILPGMLCAGYPEGRRDTCQGDSGGPLVCEEGGRWFQAGITSFGFGCGRRNRPGVFTAVATYEAWIREQVMGSEPGPAFPTQPQKTQSDPQEPREENCTIALPECGKAPRPGAWPWEAQVMVPGSRPCHGALVSESWVLAPASCFLDPNSSDSPPRDLDAWRVLLPSRPRAERVARLVQHENASWDNASDLALLQLRTPVNLSAASRPVCLPHPEHYFLPGSRCRLARWGRGEPALGPGALLEAELLGGWWCHCLYGRQGAAVPLPGDPPHALCPAYQEKEENDSRWSLLCQEEGTWFLAGIRDFPSGCLRPRAFFPLQTHGPWISHVTRGAYLEDQLAWDWGPDGEETETQTCPPHTEHGACGLRLEAAPVGVLWPWLAEVHVAGDRVCTGILLAPGWVLAATHCVLRPGSTTVPYIEVYLGRAGASSLPQGHQVSRLVISIRLPQHLGLRPPLALLELSSRVEPSPSALPICLHPAGIPPGASCWVLGWKEPQDRVPVAAAVSILTQRICDCLYQGILPPGTLCVLYAEGQENRCEMTSAPPLLCQMTEGSWILVGMAVQGSRELFAAIGPEEAWISQTVGEANFLPPSGSPHWPTGGSNLCPPELAKASGSPHAVYFLLLLTLLIQS

SEQ ID NO: 17011 - protein, 97 aa, Homo sapiens
MTPQSLLQTTLFLLSLLFLVQGSGTRHTGAASTTNPHQTCASPSRTPKRPSQSMPLSLQPTLLPDPSLTPGASTTSASTGTDMLGDYIFSMASVTSC

SEQ ID NO: 17012 - protein, 79 aa, Homo sapiens
TGYMLRCSLSHAITLVCTAYGVSYLEKRSPCGCQERLTSQEYCKRRNFIRMEMGVRMWGFITSPKESTDSACPSLVCTK

SEQ ID NO: 17013 - protein, 537 aa, Homo sapiens
MGPWSRSLSALLLLLQVSSWLCQEPEPCHPGFDAESYTFTVPRRHLERGRVLGRVNFEDCTGRQRTAYFSLDTRFKVGTDGVITVKRPLRFHNPQIHFLVYAWDSTYRKFSTKVTLNTVGHHHRPPPHQASVSGIQAELLTFPNSSPGLRRQKRDWVIPPISCPENEKGPFPKNLVQIKSNKDKEGKVFYSITGQGADTPPVGVFIIERETGWLKVTEPLDRERIATYTLFSHAVSSNGNAVEDPMEILITVTDQNDNKPEFTQEVFKGSVMEGALPGTSVMEVTATDADDDVNTYNAAIAYTILSQDPELPDKNMFTINRNTGVISVVTTGLDRESFPTYTLVVQAADLQGEGLSTTATAVITVTDTNDNPPIFNPTTYKGQVPENEANVVITTLKVTDADAPNTPAWEAVYTILNDDGGQFVVTTNPVNNDGILKTAKGLDFEAKQQYILHVAVTNVVPFEVSLTTSTATVTVDVLDVNEAPIFVPPEKRVEVSEDFGVGQEITSYTAQEPDTFMEQKITFSSCYWNRDTSADPV

SEQ ID NO: 17014 - protein, 790 aa, Homo sapiens
MVPAWLWLLCVSVPQALPKAQPAELSVEVPENYGGNFPLYLTKLPLPREGAEGQIVLSGDSGKATEGPFAMDPDSGFLLVTRALDREEQAEYQLQVTLEMQDGHVLWGPQPVLVHVKDENDQVPHFSQAIYRARLSRGTRPGIPFLFLEASDRDEPGTANSDLRFHILSQAPAQPSPDMFQLEPRLGALALSPKGSTSLDHALERTYQLLVQVKDMGDQASGHQATATVEVSIIESTWVSLEPIHLAENLKVLYPHHMAQVHWSGGDVHYHLESHPPGPFEVNAEGNLYVTRELDREAQAEYLLQVRAQNSHGEDYAAPLELHVLVMDENDNVPICPPRDPTVSIPELSPPGTEVTRLSAEDADAPGSPNSHVVYQLLSPEPEDGVEGRAFQVDPTSGSVTLGVLPLRAGQNILLLVLAMDLAGAEGGFSSTCEVEVAVTDINDHAPEFITSQIGPISLPEDVEPGTLVAMLTAIDADLEPAFRLMDFAIERGDTEGTFGLDWEPDSGHVRLRLCKNLSYEAAPSHEVVVVVQSVAKLVGPGPGPGATATVTVLVERVMPPPKLDQESYEASVPISAPAGSFLLTIQPSDPISRTLRFSLVNDSEGWLCIEKFSGEVHTAQSLQGAQPGDTYTVLVEAQDTDHGLIVSGPSKDPDLASGHGPYSFTLGPNPTVQRDWRLQTLNGSHAYLTLALHWVEPREHIIPVVVSHNAQMWQLLVRVIVCRCNVEGQCMRKVGRMKGMPTKLSAVGILVGTLVAIGIFLILIFTHWTMSRKKDPDQPADSVPLKATV

SEQ ID NO: 17015 - protein, 251 aa, Homo sapiens [sequence omitted]

SEQ ID NO: 17016 - protein, 808 aa, Homo sapiens
MAETAAGVGRFKTNYAVERKIEPFYKGGKAQLDQTGQHLFCVCGTRVNILEVASGAVLRSLEQEDQEDITAFDLSPDNEVLVTASRALLLAQWAWQEGSVTRLWKAIHTAPVATMAFDPTSTLLATGGCDGAVRVWDIVRHYGTHHFRGSPGVVHLVAFHPDPTRLLLFSSATDAAIRVWSLQDRSCLAVLTAHYSAVTSLAFSADGHTMLSSGRDKICIIWDLQSCQATRTVPVFESVEAAVLLPEEPVSQLGVKSPGLYFLTAGDQGTLRVWEAASGQCVYTQAQPPGPGQELTHCTLAHTAGVVLTATADHNLLLYEARSLRLQKQFAGYSEEVLDVRFLGPEDSHVVVASNSPCLKVFELQTSACQILHGHTDIVLALDVFRKGWLFASCAKDQSVRIWRMNKAGQVMCVAQGSGHTHSVGTVCCSRLKESFLVTGSQDCTVKLWPLPKALLSKNTAPDNGPILLQAQTTQRCHDKDINSVAIAPNDKLLATGSQDRTAKLWALPQCQLLGVFSGHRRGLWCVQFSPMDQVLATASADGTIKLWALQDFSCLKTFEGHDASVLKVAFVSRGTQLLSSGSDGLVKLWTIKNNECVRTLDAHEDKVWGLHCSRLDDHALTGASDSRVILWKDVTEAEQAEEQARQEEQVVRQQELDNLLHEKRYLRALGLAISLDRPHTVLTVIQAIRRDPEACEKLEATMLRLRRDQKEALLRFCVTWNTNSRHCHEAQAVLGVLLRREAPEELLAYEGVRAALEALLPYTERHFQRLSRTLQAAAFLDFLWHNMKLPVPAAAPTPWETHKGALP

SEQ ID NO: 17017 - protein, 198 aa, Homo sapiens
MTPQSLLQTTLFLLSLLFLVQASASSGAHGRGHREDFRFCSQRNQTHRSSLHYKPTPDLRISIENSEEALTVHAPFPAAHPASRSFPDPRGLYHFCLYWNRHAGRLHLLYGKRDFLLSDKASSLLCFQHQEESLAQGPPLLATSVTSWWSPQNISLPSAASFTFSFHSPPHTAAHNASVDMCELKRDLQLLSQFLKHP

SEQ ID NO: 17018 - protein, 120 aa, Homo sapiens
MSCVLGGVIPLGLLFLVCGSQGYLLPNVTLLEELLSKYQHNESHSRVRRAIPREDKEEILMLHNKLRGQVQPQASNMEYMTWDDELEKSAAAWASQCIWEHGPTSLLVSIGQNLGAHWGR

SEQ ID NO: 17019 - protein, 112 aa, Homo sapiens
MSVMRPEQIMKSIIPVVMAGIIAIYGLVVAVLIANSLNDDISLYKSFLQLGAGLSVGLSGLAAGFAIGIVGDAGVRGTAQQPRLFVGMILILIFAEVLGLYGLIVALILSTK

SEQ ID NO: 17020 - protein, 55 aa, Homo sapiens
MKDSCITVMAMALLSGFFFFAPASSYNLDVRGARSFSPPRAGRHFGYRVLQVGNG

SEQ ID NO: 17021 - protein, 120 aa, Homo sapiens
MGTASRSNIARHLQTNLILFCVGAVGACTLSVTQPWYLEVDYTHEAVTIKCTFSATGCPSEQPTCLWFRYGAHQPENLCLDGCKKIKLLSKELRSFLTALVSLLSVYVTGVCVAFILLSK

SEQ ID NO: 17022 - protein, 75 aa, Homo sapiens
MAVCIAVIAKENYPLYIRSTPTENELKFHYMVHTSLDVVDEKISAMGKALVDQRELYLGLLYPTEDYKLTFRARH

SEQ ID NO: 17023 - protein, 347 aa, Homo sapiens
MSALGAVIALLLWGQLFAVDSGNDVTDIADDGCPKPPEIAHGYVEHSVRYQCKNYYKLRTEGDGVYTLNDKKQWINKAVGDKLPECEAVCGKPKNPANPVQRILGGHLDAKGSFPWQAKMVSHHNLTTGATLINEQWLLTTAKNLFLNHSENATAKDIAPTLTLYVGKKQLVEIEKVVLHPNYSQVDIGLIKLKQKVSVNERVMPICLPSKDYAEVGRVGYVSGWGRNANFKFTDHLKYVMLPVADQDQCIRHYEGSTVPEKKTPKSPVGVQPILNEHTFCAGMSKYQEDTCYGDAGSAFAVHDLEEDTWYATGILSFDKSCAVAEYGVYVKVTSIQDWVQKTIAEN

SEQ ID NO: 17024 - protein, 142 aa, Homo sapiens
MQRGLDSETKKQLEEEEKKIISEEHWYLDLPELKEKESFIIEEQSFLLCEDLLYGRMSFRGFNPEVEKLMLQMNAKHKAEEVEDETVELDVSDEEMARRYETLVGTIGKKFARKRDHANYEEDENGDITPIKAKKMFLKPQD

SEQ ID NO: 17025 - protein, 1281 aa, Homo sapiens
MGRVGYWTLLVLPALLVWRGPAPSAAAEKGPPALNIAVMLGHSHDVTERELRTLWGPEQAAGLPLDVNVVALLMNRTDPKSLITHVCDLMSGARIHGLVFGDDTDQEAVAQMLDFISSHTFVPILGIHGGASMIMADKDPTSTFFQFGASIQQQATVMLKIMQDYDWHVFSLVTTIFPGYREFISFVKTTVDNSFVGWDMQNVITLDTSFEDAKTQVQLKKIHSSVILLYCSKDEAVLILSEARSLGLTGYDFFWIVPSLVSGNTELIPKEFPSGLISVSYDDWDYSLEARVRDGIGILTTAASSMLEKFSYIPEAKASCYGQMERPEVPMHTLHPFMVNVTWDGKDLSFTEEGYQVHPRLVVIVLNKDREWEKVGKWENHTLSLRHAVWPRYKSFSDCEPDDNHLSIVTLEEAPFVIVEDIDPLTETCVRNTVPCRKFVKINNSTNEGMNVKKCCKGFCIDILKKLSRTVKFTYDLYLVTNGKHGKKVNNVWNGMIGEVVYQRAVMAVGSLTINEERSEVVDFSVPFVETGISVMVSRSNGTVSPSAFLEPFSASVWVMMFVMLLIVSAIAVFVFEYFSPVGYNRNLAKGKAPHGPSFTIGKAIWLLWGLVFNNSVPVQNPKGTTSKIMVSVWAFFAVIFLASYTANLAAFMIQEEFVDQVTGLSDKKFQRPHDYSPPFRFGTVPNGSTERNIRNNYPYMHQYMTKFNQKGVEDALVSLKTGKLDAFIYDAAVLNYKAGRDEGCKLVTIGSGYIFATTGYGIALQKGSPWKRQIDLALLQFVGDGEMEELETLWLTGICHNEKNEVMSSQLDIDNMAGVFYMLAAAMALSLITFIWEHLFYWKLRFCFTGVCSDRPGLLFSISRGIYSCIHGVHIEEKKKSPDFNLTGSQSNMLKLLRSAKNISSMSNMNSSRMDSPKRAADFIQRGSLIMDMVSDKGNLMYSDNRSFQGKESIFGDNMNELQTFVANRQKDNLNNYVFQGQHPLTLNESNPNTVEVAVSTESKANSRPRQLWKKSVDSIRQDSLSQNPVSQRDEATAENRTHSLKSPRYLPEEMAHSDISETSNRATCHREPDNSKNHKTKDNFKRSVASKYPKDCSEVERTYLKTKSSSPRDKIYTIDGEKEPGFHLDPPQFVENVTLPENVDFPDPYQDPSENFRKGDSTLPMNRNPLHNEEGLSNNDQYKLYSKHFTLKDKGSPHSETSERYRQNSTHCRSCLSNMPTYSGHFTMRSPFKCDACLRMGNLYDIDEDQMLQETGMTNAWLLGDAPRTLTNTRCHPRR

SEQ ID NO: 17026 - protein, 844 aa, Homo sapiens
MVTVMPLEMEKTISKLMFDFQRNSTSDDDSGCALEEYAWVPPGLKPEQVHQYYSCLPEEKVPYVNSPGEKLRIKQLLHQLPPHDNEVRYCNSLDEEEKRELKLFSSQRKRENLGRGNVRPFPVTMTGAICEQCGGQINGGDIAVFASRAGHGVCWHPPCFVCTVCNELLVDLIYFYQDGKIYCGRHHAECLKPRCAACDEIIFADECTEAEGRHWHMKHFCCFECETVLGGQRYIMKEGRPYCCHCFESLYAEYCDTCAQHIGIDQGQMTYDGQHWHATETCFCCAHCKKSLLGRPFLPKQGQIFCSRACSAGEDPNGSDSSDSAFQNARAKESRRSAKIGKNKGKTEEPMLNQHSQLQVSSNRLSADVDPLSLQMDMLSLSSQTPSLNRDPIWRSREEPYHYGNKMEQNQTQSPLQLLSQCNIRTSYSPGGQGAGAQPEMWGKHFSNPKRSSSLAMTGHAGSFIKECREDYYPGRLRSQESYSDMSSQSFSETRGSIQVPKYEEEEEEEGGLSTQQCRTRHPISSLKYTEDMTPTEQTPRGSMESLALSNATGLSADGGAKRQEHLSRFSMPDLSKDSGMNVSEKLSNMGTLNSSMQFRSAESVRSLLSAQQYQEMEGNLHQLSNPIGYRDLQSHGRMHQSFDFDGGMAGSKLPGQEGVRIQPMSERTRRRATSRDDNRRFRPHRSRRSRRSRSDNALHLASEREAISRLKDRPPLRAREDYDQFMRQRSFQESMGHGSRRDLYGQCPRTVSDLALQNAFGDRWGPYFAEYDWCSTCSSSSESDNEGYFLGEPIPQPARLRYVTSDELLHKYSSYGLPKSSTLGGRGQLHSRKRQKSKNCIIS

SEQ ID NO: 17027 - protein, 116 aa, Homo sapiens
MAAVVAATRWWQLLLVLSAAGMGASGAPQPPNILLLLMDDESLPPPRAAGSPRWAPVLPDGCLCPLENAERSDCFPEHALQRPGVRVLTAVAGPFSALSGISLLKILCFRISSFHF

SEQ ID NO: 17028 - protein, 124 aa, Homo sapiens
MPKGGCPKAPQQEELPLSSDMVEKQTGKKDKDKVSLTKTPKLERGDGGKEVRERASKRKLPFTAGANGEQKDSDTGPPGSCLSWGSHEGALVRSAMGRSCLPSARGCFFGTRGKIMIFLFCFDL

SEQ ID NO: 17029 - protein, 253 aa, Homo sapiens
MKEAAAAALKKKGWEVVESDLYAMNFNPIISRKDITGKLKDPANFQYPAESVLAYKEGHLSPDIVAEQKKLEAADLVIFQFPLQWFGVPAILKGWFERVFIGEFAYTYAAMYDKGPFRSKKAVLSITTGGSGSMYSLQGIHGDMNVILWPIQSGILHFCGFQVLEPQLTYSIGHTPADARIQILEGWKKRLENIWDETPLYFAPSSLFDLNFQAGFLMKKEVQDEEKNKKFGLSVGHHLGKSIPTDNQIKARK

SEQ ID NO: 17030 - protein, 153 aa, Homo sapiens
MLGAALRRCAVAATTRADPRGLLHSARTPGPAVAIQSVRCYSHGSQETDEEFDARWVTYFNKPDIDAWELRKGINTLVTYDMVPEPKIIDAALRACRRLNDFASTVRILEVVKMGFPKDLLTLLLECEQLPGNTDDNILPYLNKFSFIEYQAM

SEQ ID NO: 17031 - protein, 293 aa, Homo sapiens
MGFPAAALLCALCCGLLAPAARAGYSEERCSWRGSGLTQEPGSVGQLALACAEGAVEWLYPAGALRLTLGGPDPRARPGIACLRPVRPFAGAQVFAERAGGALELLLAEGPGPAGGRCVRWGPRERRALFLQATPHQDISRRVAAFRFELREDGRPELPPQAHGLGVDGACRPCSDAELLLAACTSDFVIHGIIHGVTHDVELQESVITVVAARVLRQTPPLFQAGRSGDQGLTSIRTPLRCGVHPGPGTFLFMGWSRFGEARLGCAPRFQEFRRAYEAARAAHLHPCEVALH

SEQ ID NO: 17032 - protein, 116 aa, Homo sapiens
MTPQSLLQTTLFLLSLLFLVQGAHGRGHREDFRFCSQRNQTHRSSLHYKPTPDLRISIENSEEALTVHAPFPAAHPASRSFPDPRGLYHFCLYWNRHAGRLHLLYGKRDFLLSDKA

SEQ ID NO: 17033 - protein, 138 aa, Homo sapiens
MFPLRALWLVWALLGVAGSCPEPCACVDKYAHQFADCAYKELREVPEGLPANVTTLSLSANKITVLRRGAFADVTQVTSLWLAHNEVRTVEPGALAVLSQLKNLDLSHNFISSFPWSDLRNLSALQLLKMNHNRLGSL

SEQ ID NO: 17034 - protein, 301 aa, Homo sapiens
MLGLCGQRLPAAWVLLLLPFLPLLLLAAPAPHRASYKPVIVVHGLFDSSYSFRHLLEYINETHPGTVVTVLDLFDGRESLRPLWEQVQGFREAVVPIMAKAPQGVHLICYSQGGLVCRALLSVMDDHNVDSFISLSSPQMGQYGDTDYLKWLFPTSMRSNLYRICYSPWGQEFSICNYWHDPHHDDLYLNASSFLALINGERDHPNATVWRKNFLRVGHLVLIGGPDDGVITPWQSSFFGFYDANETVLEMEEQLPARPTHQSELLLLRLVCLKPPRRKKPACRVQRQSESWGPGLSCALS

SEQ ID NO: 17035 - protein, 124 aa, Homo sapiens
MAAANPWDPASAPNGAGLVLGHFIASGMVNQEMLNMSKKTVSCFVNFTRLQQITNIQAEIYQKNLEIELLKLEKDTADVVHPFFLEMKSCYVAQAGLELMASILPFQSPKTLRLQLRSVILCKA

SEQ ID NO: 17036 - protein, 746 aa, Homo sapiens
MAGSRGAGRTAAPSVRPEKRRSEPELEPEPEPEPPLLCTSPLSHSTGSDSGVSDSEESVFSGLEDSGSDSSEDDDEGDEEGEDGALDDEGHSGIKKTTEEQVQASTPCPRTEMASARIGDEYAEDSSDEEDIRNTVGNVPLEWYDDFPHVGYDLDGRRIYKPLRTRDELDQFLDKMDDPDYWRTVQDPMTGRDLRLTDEQVALVRRLQSGQFGDVGFNPYEPAVDFFSGDVMIHPVTNRPADKRSFIPSLVEKEKVSRMVHAIKMGWIQPRRPRDPTPSFYDLWAQEDPNAVLGRHKMHVPAPKLALPGHAESYNPPPEYLLSEEERLAWEQQEPGERKLSFLPRKFPSLRAVPAYGRFIQERFERCLDLYLCPRQRKMRVNVDPEDLIPKLPRPRDLQPFPTCQALVYRGHSDLVRCLSVSPGGQWLVSGSDDGSLRLWEVATARCVRTVPVGGVVKSVAWNPSPAVCLVAAAVEDSVLLLNPALGDRLVAGSTDQLLSAFVPPEEPPLQPARWLEASEEERQVGLRLRICHGKPVTQVTWHGRGDYLAVVLATQGHTQVLIHQLSRRRSQSPFRRSHGQVQRVAFHPARPFLLVASQRSVRLYHLLRQELTKKLMPNCKWVSSLAVHPAGDNVICGSYDSKLVWFDLDLSTKPYRMLRHHKKALRAVAFHPRYPLFASGSDDGSVIVCHGMVYNDLLQNPLLVPVKVLKGHVLTRDLGVLDVIFHPTQPWVFSSGADGTVRLFT

SEQ ID NO: 17037 - protein, 540 aa, Homo sapiens
MTSSRLWFSLLLAAAFAGRATALWPWPQNFQTSDQRYVLYPNNFQFQYDVSSAAQPGCSVLDEAFQRYRDLLFGSGSWPRPYLTGWPHQAYPVFLGKRHTLEKNVLVVSVVTPGCNQLPTLESVENYTLTINDDQCLLLSETVWGALRGLETFSQLVWKSAEGTFFINKTEIEDFPRFPHRGLLLDTSRHYLPLSSILDTLDVMAYNKLNVFHWHLVDDPSFPYESFTFPELMRKGSYNPVTHIYTAQDVKEVIEYARLRGIRVLAEFDTPGHTLSWGPGIPGLLTPCYSGSEPSGTFGPVNPSLNNTYEFMSTFFLEVSSVFPDFYLHLGGDEVDFTCWKSNPEIQDFMRKKGFGEDFKQLESFYIQTLLDIVSSYGKGYVVWQEVFDNKVKIQPDTIIQVWREDIPVNYMKELELVTKAGFRALLSAPWYLNRISYGPDWKDFYIVEPLAFEGTPEQKALVIGGEACMWGEYVDNTNLVPRLWPRAGAVAERLWSNKLTSDLTFAYERLSHFRCELLRRGVQAQPLNVGFCEQEFEQT

SEQ ID NO: 17038 - protein, 53 aa, Homo sapiens
MKENYCLQAALVCLGMLCHSHAFAPERRGHLRPSFHGHHEKGKEGQVLQRSKR

SEQ ID NO: 17039 - protein, 111 aa, Homo sapiens
MWSGWWLWPLVAVCTADFFRDEAERIMRDSPVIDGHNDLPWQLLDMFNNRLQDERANLTTLAGTHTNIPKLRAGFVGGQFWSVYTPCDTQNKDAVRRTLEQMDVVHRMCRM

SEQ ID NO: 17040 - protein, 39 aa, Homo sapiens
LTIISGCLFLAADIFAIASIANPDWINTGESAGSLCMLN

SEQ ID NO: 17041 - protein, 525 aa, Homo sapiens
MALERLCSVLKVLLITVLVVEGIAVAQKTQDGQNIGIKHIPATQCGIWVRTSNGGHFASPNYPDSYPPNKECIYILEAAPRQRIELTFDEHYYIEPSFECRFDHLEVRDGPFGFSPLIDRYCGVKSPPLIRSTGRFMWIKFSSDEELEGLGFRAKYSFIPDPDFTYLGGILNPIPDCQFELSGADGIVRSSQVEQEEKTKPGQAVDCIWTIKATPKAKIYLRFLDYQMEHSNECKRNFVAVYDGSSSIENLKAKFCSTVANDVMLKTGIGVIRMWADEGSRLSRFRMLFTSFVEPPCTSSTFFCHSNMCINNSLVCNGVQNCAYPWDENHCKEKKKAGVFEQITKTHGTIIGITSGIVLVLLIISILVQVKQPRKKVMACKTAFNKTGFQEVFDPPHYELFSLRDKEISADLADLSEELDNYQKMRRSSTASRCIHDHHCGSQASSVKQSRTNLSSMELPFRNDFAQPQPMKTFNSTFKKSSYTFKQGHECPEQALEDRVMEEIPCEIYVRGREDSAQASISIDF

SEQ ID NO: 17042 - protein, 168 aa, Homo sapiens
MTPQSLLQTTLFLLSLLFLVQASASSGAHGRGHREDFRFCSQRNQTHRSSLHYKPTPDLRISIENSEEALTVHAPFPAAHPASRSFPDPRGLYHFCLYWNRHAGRLHLLYGKRDFLLSDKASSLLCFQHQEESLAQGPPLLATSVTSWWSPQNISLPSAASFTFSFHS

SEQ ID NO: 17043 - protein, 78 aa, Homo sapiens
MTPQSLLQTTLFLLSLLFLVQGRCPRQGPQGRLSLLQPAEPDTQEQPPLQTHTRPAHLHRELRRGPHSPCPFPCSPPC

SEQ ID NO: 17044 - protein, 693 aa, Homo sapiens
MTPQSLLQTTLFLLSLLFLVQGAHGRGHREDFRFCSQRNQTHRSSLHYKPTPDLRISIENSEEALTVHAPFPAAHPASRSFPDPRGLYHFCLYWNRHAGRLHLLYGKRDFLLSDKASSLLCFQHQEESLAQGPPLLATSVTSWWSPQNISLPSAASFTFSFHSPPHTAAHNASVDMCELKRDLQLLSQFLKHPQKASRRPSAAPASQQLQSLESKLTSVRFMGDMVSFEEDRINATVWKLQPTAGLQDLHIHSRQEEEQSEIMEYSVLLPRTLFQRTKGRSGEAEKRLLLVDFSSQALFQDKNSSQVLGEKVLGIVVQNTKVANLTEPVVLTFQHQLQPKNVTLQCVFWVEDPTLSSPGHWSSAGCETVRRETQTSCFCNHLTYFAVLMVSSVEVDAVHKHYLSLLSYVGCVVSALACLVTIAAYLCSRVPLPCRRKPRDYTIKVHMNLLLAVFLLDTSFLLSEPVALTGSEAGCRASAIFLHFSLLTCLSWMGLEGYNLYRLVVEVFGTYVPGYLLKLSAMGWGFPIFLVTLVALVDVDNYGPIILAVHRTPEGVIYPSMCWIRDSLVSYITNLGLFSLVFLFNMAMLATMVVQILRLRPHTQKWSHVLTLLGLSLVLGLPWALIFFSFASGTFQLVVLYLFSIITSFQGFLIFIWYWSMRLQARGGPSPLKSNSDSARLPISSGSTSSSRI

SEQ ID NO: 17045 - protein, 98 aa, Homo sapiens
MTPQSLLQTTLFLLSLLFLVQASASSGAHGRGHREDFRFCSQRNQTHRSSLHYKPTPDLRISIENSEEALTVHAPFPAAHPASRSFPDPRGLYHFCLY

SEQ ID NO: 17046 - protein, 128 aa, Homo sapiens
MAAWKSWTALRLCATVVVLDMVVCKGFVEDLDESFKENRNDDIWLVDFYAPWCGHCKKLEPIWNEVGLEMKSIGSPVKVGKMDATSYSSIASEFGVRGYPTIKLRFPGGLKIGVWPFFIGEIKRGLGI

SEQ ID NO: 17047 - protein, 70 aa, Homo sapiens
MQGSTRRMGVMTDVHRRFLQLLMTHGVLEEWDVKRLQTHCYKVHDRMSFISLTSEKEKQRSFLARLCIGC

SEQ ID NO: 17048 - protein, 54 aa, Homo sapiens
MPRGFTWLRYLGIFLGVALGNEPLEMWPLTQNEECTVTGFLRDKLQYRSRLQYM

SEQ ID NO: 17049 - protein, 403 aa, Homo sapiens
MGSNSEVARLLASSDPLAQIAEDKPYAELWMGTHPRGDAKILDNRISQKTLSQWIAENQDSLGSKVKDTFNGNLPFLFKVLSVETPLSIQAHPNKELAEKLHLQAPQHYPDANHKPEMAIALTPFQGLCGFRPVEEIVTFLKKVPEFQFLIGDEAATHLKQTMSHDSQAVASSLQSCFSHLMKSEKKVVVEQLNLLVKRISQQAAAGNNMEDIFGELLLQLHQQYPGDIGCFAIYFLNLLTLKPGEAMFLEANVPHAYLKGDCVECMACSDNTVRAGLTPKFIDVPTLCEMLSYTPSSSKDRLFLPTRSQEDPYLSIYDPPVPDFTIMKTEVPGSVTEYKVLALDSASILLMVQGTVIASTPTTQTPIPLQRGGVLFIGANESVSLKLTEPKDLLIFRACCLL

SEQ ID NO: 17050 - protein, 112 aa, Homo sapiens
MLGASPNRPDSSGKRSVKFNKGYTALSQSPDENLVSLDSDSDGELGSRYSSGYSSAEQVNQDVSRQLLQDGYHLDEIPDDEDLDLIPPKPMASSTCSCCWCCLGDSSSCTLQ

SEQ ID NO: 17051 - protein, 596 aa, Homo sapiens
MKDIFFQFIIARVRKCYSLSCLHTLPVVPTLRKTERGSYSSYGRESNLQGCHQSLLGGDMDMGNPGTLSPTKPGSQYYQYSSNNPRRRPLHSSAMEVQTKKVRKVPPGLPSSVYAPSASTADYNRDSPGYPSSKPATSTFPSSFFMQDGHHSSDPWSSSSGMNQPGYAGMLGNSSHIPQSSSYCSLHPHERLSYPSHSSADINSSLPPMSTFHRSGTNHYSTSSCTPPANGTDSIMANRGSGAAGSSQTGDALGKALASIYSPDHTNNSFSSNPSTPVGSPPSLSAGTAVWSRNGGQASSSPNYEGPLHSLQSRIEDRLERLDDAIHVLRNHAVGPSTAMPGGHGDMHGIIGPSHNGAMGGLGSGYGTGLLSANRHSLMVGTHREDGVALRGSHSLLPNQVPVPQLPVQSATSPDLNPPQDPYRGMPPGLQGQSVSSGSSEIKSDDEGDENLQDTKSSEDKKLDDDKKDIKSITSNNDDEDLTPEQKAEREKERRMANNARERLRVRDINEAFKELGRMVQLHLKSDKPQTKLLILHQAVAVILSLEQQVRERNLNPKAACLKRREEEKVSSEPPPLSLAGPHPGMGDASNHMGQM

SEQ ID NO: 17052 - protein, 732 aa, Homo sapiens
MVPAWLWLLCVSVPQALPKAQPAELSVEVPENYGGNFPLYLTKLPLPREGAEGQIVLSGDSGKATEGPFAMDPDSGFLLVTRALDREEQAEYQLQVTLEMQDGHVLWGPQPVLVHVKDENDQASGHQATATVEVSIIESTWVSLEPIHLAENLKVLYPHHMAQVHWSGGDVHYHLESHPPGPFEVNAEGNLYVTRELDREAQAEYLLQVRAQNSHGEDYAAPLELHVLVMDENDNVPICPPRDPTVSIPELSPPGTEVTRLSAEDADAPGSPNSHVVYQLLSPEPEDGVEGRAFQVDPTSGSVTLGVLPLRAGQNILLLVLAMDLAGAEGGFSSTCEVEVAVTDINDHAPEFITSQIGPISLPEDVEPGTLVAMLTAIDADLEPAFRLMDFAIERGDTEGTFGLDWEPDSGHVRLRLCKNLSYEAAPSHEVVVVVQSVAKLVGPGPGPGATATVTVLVERVMPPPKLDQESYEASVPISAPAGSFLLTIQPSDPISRTLRFSLVNDSEGWLCIEKFSGEVHTAQSLQGAQPGDTYTVLVEAQDTDEPRLSASAPLVIHFLKAPPAPALTLAPVPSQYLCTPRQDHGLIVSGPSKDPDLASGHGPYSFTLGPNPTVQRDWRLQTLNGSHAYLTLALHWVEPREHIIPVVVSHNAQMWQLLVRVIVCRCNVEGQCMRKVGRMKGMPTKLSAVGILVGTLVAIGIFLILIFTHWTMSRKKDPDQPADSVPLKATV

SEQ ID NO: 17053 - protein, 7555 aa, Homo sapiens
MPLLDSSYLPPTIFILTHVLGVAGVLYWKRHARGRADERDRVQKKTFTKWVNKHLMKVRKHINDLYEDLRDGHNLISLLEVLSGIKLEPAGLKTLRLVSMPSWCHTNNEEQAEEDDDDVPREKGRMRFHRLQNVQIALDFLKQRQVKLVNIRNDDITDGNPKLTLGLIWTIILHFQISDIYISGESGDMSAKEKLLLWTQKVTAGYTGIKCTNFSSCWSDGKMFNALIHRYRPDLVDMERVQIQSNRENLEQAFEVAERLGVTRLLDAEDVDVPSPDEKSVITYVSSIYDAFPKVPEGGEGISATEVDSRWQEYQSRVDSLIPWIKQHTILMSDKTFPQNPVELKALYNQYIHFKETEILAKEREKGRIEELYKLLEVWIEFGRIKLPQGYHPNDVEEEWGKLIIEMLEREKSLRPAVERLELLLQIANKIQNGALNCEEKLTLAKNTLQADAAHLESGQPVQCESDVIMYIQECEGLIRQLQVDLQILRDENYYQLEELAFRVMRLQDELVTLRLECTNLYRKGHFTSLELVPPSTLTTTHLKAEPLTKATHSSSTSWFRKPMTRAELVAISSSEDEGNLRFVYELLSWVEEMQMKLERAEWGNDLPSVELQLETQQHIHTSVEELGSSVKEARLYEGKMSQNFHTSYAETLGKLETQYCKLKETSSFRMRHLQSLHKFVSRATAELIWLNEKEEEELAYDWSDNNSNISAKRNYFSELTMELEEKQDVFRSLQDTAELLSLENHPAKQTVEAYSAAVQSQLQWMKQLCLCVEQHVKENTAYFQFFSDARELESFLRNLQDSIKRKYSCDHNTSLSRLEDLLQDSMDEKEQLIQSKSSVASLVGRSKTIVQLKPRSPDHVLKNTISVKAVCDYRQIEITICKNDECVLEDNSQRTKWKVISPTGNEAMVPSVCFLIPPPNKDAIEMASRVEQSYQKVMALWHQLHVNTKSLISWNYLRKDLDLVQTWNLEKLRSSAPGECHQIMKNLQAHYEDFLQDSRDSVLFSVADRLRLEEEVEACKARFQHLMKSMENEDKEETVAKMYISELKNIRLRLEEYEQRVVKRIQSLASSRTDRDAWQDNALRIAEQEHTQEDLQQLRSDLDAVSMKCDSFLHQSPSSSSVPTLRSELNLLVEKMDHVYGLSTVYLNKLKTVDVIVRSIQDAELLVKGYEIKLSQEEVVLADLSALEAHWSTLRHWLSDVKDKNSVFSVLDEEIAKAKVVAEQMSRLTPERNLDLERYQEKGSQLQERWHRVIAQLEIRQSELESIQEVLGDYRACHGTLIKWIEETTAQQEMMKPGQAEDSRVLSEQLSQQTALFAEIERNQTKLDQCQKFSQQYSTIVKDYELQLMTYKAFVESQQKSPGKRRRMLSSSDAITQEFMDLRTRYTALVTLTTQHVKYISDALRRLEEEEKVVEEEKQEHVEKVKELLGWVSTLARNTQGKATSSETKESTDIEKAILEQQVLSEELTTKKEQVSEAIKTSQIFLAKHGHKLSEKEKKQISEQLNALNKAYHDLCDGSANQLQQLQSQLAHQTEQKECRAVAGVIDLGTVEIFPIFKAMQKGLLDQDTGLVLLESQVIMSGLIAPETGENLSLEEGIARNLINPQMYQQLRELQDALALISRLTESRGPLSVVEAIEKRIISETVGLKILEAHLATGGFSLSPSENCINLEEAFHQGLISAWLHSVLESYLRTSKNLIDPNTAEKIGLLDLMQRCIVHQESGFKLLPVKQLAGGMVSLKSGRKVSIFRAVQEGLIDRQVTVRLLEAQLFAGGIVDPRTGHRLTVEEAVRHNLIDQDMACAILIRQLQTGGIIDTVTGQRLTIDEAVSNDLVAAKIALVILESLWSFMGLLWPESGEILPITDALEQGIVSTELAHKILSNRQHIKALFLPATTEILSWKKAIESGILDRDLANNLKSICIPDVMPHMQLADSAEQNINPGAAVLPCSKSHPKATASQSENLLFQLMTHSYINVQNGQRLLLLDKELMETLTSRDEYQTSPPKVVEIGHQRQKTPEGLQESANVKISGTFSSGWTVRLPEFQFSSQNKEYPDREDCTTEKGKKTTVETEDSSVENPEQDLFVEQKERNPNIDALKVINKVKLEVQRQLIGTQREDQTAVSVRENASRGHLLTIPPAEAEGVPLVVDKDVFSVETPKKEHQPLRNTSFTCQNEQAHTLETEYIHDETGGSHIKPQSKKLQVQVKKTLGIKLELKSETDGNVHPLDKKEMLKKTFLAKDDHKESQEAQNIAGGSMMMSEKTDEEDSGREIFLSCSHPLELLEEATLNVLSAQLLDGGIFHEQTGQKLLLNEAISRGIVPSHTAVKLMEKLNMFQGFFDSQTCESLTTEEVINEGLMDEKLLHNVLMADKAISGVLDPRTQTLCSVKDAVTVGLLDKETATRILERQVVTGGIIDLKRGKKVSVTLASTLGLVDVADQPELINLEKASKGRDAEKTVRERLISLQMETTGLIDPDSKAPLTVVQSIDRGLLEREEAVRLLTKQVVDGGIIHHISGMRLSVDNAFRHGLIGEDLAEKLKRVENLNIHQIFNPETKENISLPKAIKLDLITSDLKREIQEVQAFTGNFVDLISGQRLTLAEAKKEGLLTNEAVLSPGMMHGIVDPENCRIVPYSELVKKCKIDIESGQRYLEVIPFSDIKDGVSDKVLTLSQAIQLGKVDFASTLKVLEAQANTGGIIDTATGKRLTLASALEEKLVDENMVRIIASHQVLNGGIVDIFSDQRVTLVEAIEKRLISPELANMIQIDSSEFSDHRAQIEKQEGIEVCALQNEFLGKDMLIACNQTAEMSCNKVEESERLFQVENQSAQEKVKVRVSDGEQAKKSREISLKEFGCKDQRKPRMSSDAKEFISIINPHNLKGKSLGQVSLTHPYSECDFKLKEVARNNMGNDTNEEQEKAVTKIEIISHMKQSTSCLDSEEIRENQGEVILEVQETYCETSGKLPSEQVLQQPMNARVKSKREKREVIVEESIRTCKPAFLSEEKLYQETAIRDEHDSHIKSQPREMTSSEKGKEADTEMGFSITFKIEESSSQVVPQGISVKHLDALTLFSSKQANEGKVNNLSLCLTLKPEENLSREIACGAQSEPFPCMTPRPEGLHYQESDGKAQVTGPSQISKTDKSFQGTTRQETNYQDSWVTSKTKETKHQISSSNECKEKSYQEVSFDPARGLKLEEITVSRPDSKEVRYLEFSDRKDLHHQGSKSDDKLCGTLKSEIATQELTGEKFLEMANPNVAGLEAGSIEDIVTQRGSRVLGSFLPEKLFKGVSQKENTGQQNAIISPTVLETSEEKTVSLTVCSAVKTEKTPQEKLRESPGSEQTPFMTAPEGKGNGGVNPEPFRATQNVFTRQLCLEHDEKLVSYLSLLRNIEMRTKQIQPLELNLAELQDLLCQAKVLERELKDLTTLVSQELECVNQIIISQPQEVPAQLLKALEKDAKNLQKSLSSVSDTWNSRLLHFQNAVEIEKTKVLNQHTQLEGRLQDLRAWVGNKNLILNSKGSNSEIDVDSLNLCLQQYEDLKQPMAERKAQLDALAFDIQFFISEHAQDLSPQQNRQMLRLLNELQRSFQDILEQTAAQVDALQGHLQQMEQEALVKTLQKQQNTCHQQLEDLCSWVGQAERALAGHQGRTTQQDLSALQKNQSDLKDLQDDIQNRATSFATVVKDIEGFMEENQTKLSPRELTALREKLHQAKEQYEALQEETRVAQKELEEAVTSALQQETEKSKAAKELAENKKKIDALLDWVTSVGSSGGQLLTNLPGMEQLSGASLEKGALDTTDGYMGVNQAPEKLDKQCEMMKARHQELLSQQQNFILATQSAQAFLDQHGHNLTPEEQQMLQQKLGELKEQYSTSLAQSEAELKQVQTLQDELQKFLQDHKEFESWLERSEKELENMHKGGSSPETLPSLLKRQGSFSEDVISHKGDLRFVTISGQKVLDMENSFKEGKEPSEIGNLVKDKLKDATERYTALHSKCTRLGSHLNMLLGQYHQFQNSADSLQAWMQACEANVEKLLSDTVASDPGVLQEQLATTKQLQEELAEHQVPVEKLQKVARDIMEIEGEPAPDHRHVQETTDSILSHFQSLSYSLAERSSLLQKAIAQSQSVQESLESLLQSIGEVEQNLEGKQVSSLSSGVIQEALATNMKLKQDIARQKSSLEATREMVTRFMETADSTTAAVLQGKLAEVSQRFEQLCLQQQEKESSLKKLLPQAEMFEHLSGKLQQFMENKSRMLASGNQPDQDITHFFQQIQELNLEMEDQQENLDTLEHLVTELSSCGFALDLCQHQDRVQNLRKDFTELQKTVKEREKDASSCQEQLDEFRKLVRTFQKWLKETEGSIPPTETSMSAKELEKQIEHLKSLLDDWASKGTLVEEINCKGTSLENLIMEITAPDSQGKTGSILPSVGSSVGSVNGYHTCKDLTEIQCDMSDVNLKYEKLGGVLHERQESLQAILNRMEEVHKEANSVLQWLESKEEVLKSMDAMSSPTKTETVKAQAESNKAFLAELEQNSPKIQKVKEALAGLLVTYPNSQEAENWKKIQEELNSRWERATEVTVARQRQLEESASHLACFQAAESQLRPWLMEKELMMGVLGPLSIDPNMLNAQKQQVQFMLKEFEARRQQHEQLNEAAQGILTGPGDVSLSTSQVQKELQSINQKWVELTDKLNSRSSQIDQAIVKSTQYQELLQDLSEKVRAVGQRLSVQSAISTQPEAVKQQLEETSEIRSDLEQLDHEVKEAQTLCDELSVLIGEQYLKDELKKRLETVALPLQGLEDLAADRINRLQAALASTQQFQQMFDELRTWLDDKQSQQAKNCPISAKLERLQSQLQENEEFQKSLNQHSGSYEVIVAEGESLLLSVPPGEEKRTLQNQLVELKNHWEELSKKTADRQSRLKDCMQKAQKYQWHVEDLVPWIEDCKAKMSELRVTLDPVQLESSLLRSKAMLNEVEKRRSLLEILNSAADILINSSEADEDGIRDEKAGINQNMDAVTEELQAKTGSLEEMTQRLREFQESFKNIEKKVEGAKHQLEIFDALGSQACSNKNLEKLRAQQEVLQALEPQVDYLRNFTQGLVEDAPDGSDASQLLHQAEVAQQEFLEVKQRVNSGCVMMENKLEGIGQFHCRVREMFSQLADLDDELDGMGAIGRDTDSLQSQIEDVRLFLNKIHVLKLDIEASEAECRHMLEEEGTLDLLGLKRELEALNKQCGKLTERGKARQEQLELTLGRVEDFYRKLKGLNDATTAAEEAEALQWVVGTEVEIINQQLADFKMFQKEQVDPLQMKLQQVNGLGQGLIQSAGKDCDVQGLEHDMEEINARWNTLNKKVAQRIAQLQEALLHCGKFQDALEPLLSWLADTEELIANQKPPSAEYKVVKAQIQEQKLLQRLLDDRKATVDMLQAEGGRIAQSAELADREKITGQLESLESRWTELLSKAAARQKQLEDILVLAKQFHETAEPISDFLSVTEKKLANSEPVGTQTAKIQQQIIRHKALEEDIENHATDVHQAVKIGQSLSSLTSPAEQGVLSEKIDSLQARYSEIQDRCCRKAALLDQALSNARLFGEDEVEVLNWLAEVEDKLSSVFVKDFKQDVLHRQHADHLALNEEIVNRKKNVDQAIKNGQALLKQTTGEEVLLIQEKLDGIKTRYADITVTSSKALRTLEQARQLATKFQSTYEELTGWLREVEEELATSGGQSPTGEQIPQFQQRQKELKKEVMEHRLVLDTVNEVSRALLELVPWRAREGLDKLVSDANEQYKLVSDTIGQRVDEIDAAIQRSQQYEQAADAELAWVAETKRKLMALGPIRLEQDQTTAQLQVQKAFSIDIIRHKDSMDELFSHRSEIFGTCGEEQKTVLQEKTESLIQQYEAISLLNSERYARLERAQVLVNQFWETYEELSPWIEETRALIAQLPSPAIDHEQLRQQQEEMRQLRESIAEHKPHIDKLLKIGPQLKELNPEEGEMVEEKYQKAENMYAQIKEEVRQRALALDEAVSQSTQFHDKIEPMLETLENLSSRLRMPPLIPAEVDKIRECISDNKSATVELEKLQPSFEALKRRGEELIGRSQGADKDLAAKEIQDKLDQMVFFWEDIKARAEEREIKFLDVLELAEKFWYDMAALLTTIKDTQDIVHDLESPGIDPSIIKQQVEAAETIKEETDGLHEELEFIRILGADLIFACGETEKPEVRKSIDEMNNAWENLNKTWKERLEKLEDAMQAAVQYQDTLQAMFDWLDNTVIKLCTMPPVGTDLNTVKDQLNEMKEFKVEVYQQQIEMEKLNHQGELMLKKATDETDRDIIREPLTELKHLWENLGEKIAHRQHKLEGALLALGQFQHALEELMSWLTHTEELLDAQRPISGDPKVIEVELAKHHVLKNDVLAHQATVETVNKAGNELLESSAGDDASSLRSRLEAMNQCWESVLQKTEEREQQLQSTLQQAQGFHSEIEDFLLELTRMESQLSASKPTGGLPETAREQLDTHMELYSQLKAKEETYNQLLDKGRLMLLSRDDSGSGSKTEQSVALLEQKWHVVSSKMEERKSKLEEALNLATEFQNSLQEFINWLTLAEQSLNIASPPSLILNTVLSQIEEHKVFANEVNAHRDQIIELDQTGNQLKFLSQKQDVVLIKNLLVSVQSRWEKVVQRSIERGRSLDDARKRAKQFHEAWKKLIDWLEDAESHLDSELEISNDPDKIKLQLSKHKEFQKTLGGKQPVYDTTIRTGRALKEKTLLPEDSQKLDNFLGEVRDKWDTVCGKSVERQHKLEEALLFSGQFMDALQALVDWLYKVEPQLAEDQPVHGDLDLVMNLMDAHKVFQKELGKRTGTVQVLKRSGRELIENSRDDTTWVKGQLQELSTRWDTVCKLSVSKQSRLEQALKQAEVFRDTVHMLLEWLSEAEQTLRFRGALPDDTEALQSLIDTHKEFMKKVEEKRVDVNSAVAMGEVILAVCHPDCITTIKHWITIIRARFEEVLTWAKQHQQRLETALSELVANAELLEELLAWIQWAETTLIQRDQEPIPQNIDRVKALIAEHQTFMEEMTRKQPDVDRVTKTYKRKNIEPTHAPFIEKSRSGGRKSLSQPTPPPMPILSQSEAKNPRINQLSARWQQVWLLALERQRKLNDALDRLEELKEFANFDFDVWRKKYMRWMNHKKSRVMDFFRRIDKDQDGKITRQEFIDGILASKFPTTKLEMTAVADIFDRDGDGYIDYYEFVAALHPNKDAYRPTTDADKIEDEVTRQVAQCKCAKRFQVEQIGENKYRFFLGNQFGDSQQLRLVRILRSTVMVRVGGGWMALDEFLVKNDPCRVHHPGSKIKRSDSSSSISSQSPIARGRTNIELREKFILPEGASQGMTPFRSRGRRSKPSSRAASPTRSSSSASQSNHSCTSMPSSPATPASGTKTSLQFSRCYDKPWLVNSKAGTPIRDSHSPDLQLPTPEVIPSSGSKLKRPTPTFHSSRTSLAGDTSNSSSPASTGAKTNRADPKKSASRPGSRAGSRAGSRASSRRGSDASDFDLLETQSACSDTSESSAAGGQGNSRRGLNKPSKIPTMSKKTTTASPRTPGPKR

SEQ ID NO: 17054 - protein, 50 aa, Homo sapiens
MALRVVRSVRALLCTLRAVPSPAAPCPPRPWQLGVGAVRTLRTGPALLSG

SEQ ID NO: 17055 - protein, 131 aa, Homo sapiens
MQRLMMLLATSGACLGLLAVAAVAAAGANPAQRDTHSLLPTHRRQKRDWIWNQMHIDEEKNTSLPHHVGKIKSSVSRKNAKYLLKGEYVGKVFRVDAETGDVFAIERLDRENISEYHLTAVIVDKDTGENL

SEQ ID NO: 17056 - protein, 2881 aa, Homo sapiens
MTDPMMDFFDDANLFGETLEGLSDDAFVQPGPVSLVDELNLGAEFEPLHIDSLNHVQGTPTHQKMTDFEQLNQFDSIKFHHVNQSFGSPAEHVLSPHSQFNCSPIHPQNQPNGLFPDVSDGSPMWGHQTATTISNQNGSPFHQQGHSHSMHQNKSFVAHHDFALFQANEQQTQCTSLRSQQNRNNLNPGQNSLSQSKNFMNVSGPHRVNVNHPPQMTNASNSQQSISMQQFSQTSNPSAHFHKCSSHQEGNFNGPSPNMTSCSVSNSQQFSSHYSFSSNHISPNSLLQSSAVLASNHTNQTLSDFTGSNSFSPHRGIKQESTQHILNPNTSLNSNNFQILHSSHPQGNYSNSKLSPVHMNFPDPVDSGTQMGHFNDHVETNGFSSLEENLLHQVESQTEPFTGLDPEDLLQEGLLPHFDESTFGQDNSSHILDHDLDRQFTSHLVTRPSDMAQTQLQSQARSWHSSFSNHQHLHDRNHLCLQRQPPSSKKSDGSGTYTKLQNTQVRVMSEKKQRKKVESESKQEKANRIISEAIAKAKERGERNIPRVMSPENFPTASVEGKEEKKGRRMKSKPKDKDSKKTKTCSKLKEKTKIGKLIITLGKKQKRKNESSDEISDAEQMPQHTLKDQDSQKRRSNRQIKRKKYAEDIEGKQSEEEVKGSMKIKKNSAPLPGEQPLQLFVENPSEEDAAIVDKILSSRTVKKEISPGVMIDTEEFFVKYKNYSYLHCEWATEEQLLKDKRIQQKIKRFKLRQAQRAHFFADMEEEPFNPDYVEVDRVLEVSFCEDKDTGEPVIYYLVKWCSLPYEDSTWELKEDVDLAKIEEFEQLQASRPDTRRLDRPPSNIWKKIDQSRDYKNGNQLREYQLEGLNWLLFNWYNRRNCILADEMGLGKTIQSITFLYEILLTGIRGPFLIIAPLSTIANWEREFRTWTDINVVVYHGSLISRQMIQQYEMYFRDSQGRIIRGAYRFQAIITTFEMILGGCGELNAIEWRCVIIDEAHRLKNKNCKLLEGLKLMNLEHKVLLTGTPLQNTVEELFSLLHFLEPLRFPSESTFMQEFGDLKTEEQVQKLQAILKPMMLRRLKEDVEKKLAPKEETIIEVELTNIQKKYYRAILEKNFSFLSKGAGQTNVPNLVNTMMELRKCCNHPYLIKGAEEKILGEFRDTYNPAASDFHLQAMIQSAGKLVLIDKLLPKMKAGGHKVLIFSQMVRCLDILEDYLIHKRYLYERIDGRVRGNLRQAAIDRFSKPDSDRFVFLLCTRAGGLGINLTAADTCIIFDSDWNPQNDLQAQARCHRIGQNKAVKVYRLVTRNSYEREMFDRASLKLGLDKAVLQSMSGRESNVGGIQQLSKKEIEDLLRRGAYGAIMEEEDEGSKFCEEDIDQILLRRTKTITIESEGRGSTFAKASFVASGNRTDISLDDPNFWQKWAKKAEIDIEAISGRNSLVIDTPRIRKQTRPFSATKDELAELSEAESEGDEKPKLRRPCDRSNGYGRTECFRVEKNLLVYGWGRWREILSHGRFKRQLNEHDVEIICRALLAYCLVHYRGDEKIKGFIWDLITPTEDGQTRELQNHLGLSAPVPRGRKGKKVKTQTSSFDIQKAEWLRKYNPEQLLQDEGYKKHIKHHCNKVLLRVRMLYYLKQEVIGNECQKVFDGVDASDIDVWVPEPDHSEVPAEWWDFDADKSLLIGVFKHGYEKYNTIRADPALCFLERVGKPDEKAVAAEQRANDYMDGDVEDPEYKPAPAIFKDDIEDDVSSPGDLVIADGDGQLMEGDKVYWPTQSALTTRLRRLITAYQRTNKNRQIQQIQPTFSVPTSVMQPIYEEATLNPKMAAKIERQQRWTRREEADFYRVVSTFGVVFDPDRGQFDWTKFRAMARLHKKTDDSLEKYLYAFMSMCRRVCRLPSKEELVDPNIFIQPITEERASRTLYRIELLRKVREQALRHPQLFERLKLCHPNPDLPVWWECGPHDRDLLIGAAKHGVSRTDYHILRDPELSFMAAQRNYSQSKMAHSRTSTPLLQQYQVALSASPLTSLPRLLDAKGIILEEMKVKSENLKEEPQSSEEESMSSVETRTLIKSEPVSPKNGVLPQATGDQKSGGKCETDRRMVAARTEPLTPNPASKKPRVHKRGSESSSDSDSDSERSSCSSRSSSSSSSSSCSHSRSGSSSSSSSSCSSASSSSSSSTSSSSSSSSSSSEESDSDEEEAQKRESTTHMKAYDEESVASLSTTQDETQDSFQMNNGTPESAYILQGGYMLAASYWPKDRVMINRLDSICQTVLKGKWPSARRSYDANTVASFYTTKLLDSPGAATEYSDPSVPTPPGAGVKEEHDQSTQMSKEGGLKLTFQKQGLAQKRPFDGEDGALGQQQYLTRLRELQSASETSLVNFPKSIPVSGTSIQPTLGANGVILDNQPIVKKRRGRRKNVEGVDIFFFNRNKPPNHVSLGLTSSQISTGINPALSYTQPQGIPDTESPVPVINLKDGTRLAGDDAPKRKDLEKWLKEHPGYVEDLGAFIPRMQLHEGRPKQKRHRCRNPNKLDVNSLTGEERVQLINRRNARKVGGAFAPPLKDLCRFLKENSEYGVAPEWGDVVKQSGFLPESMYERILTGPVVREEVSRRGRRPKSGIAKATAAAAAASATSVSGNPLLANGLLPGVDLTTLQALQQNLQNLQSLQVTAGLMGMPTGLPSGGEAKNMAAMFPMLLSGMAGLPNLLGMGGLLTKPTESGTEDKKGSDSKESEGKTERTESQSSENGGENSVSSSPSTSSTAALNTAAAANPLALNPLLLSNILYPGMLLTPGLNLHIPTLSQSNTFDVQNKNSDLGSSKSVEVKEEDSRIKDQEDKGGTEPSPLNENSTDEGSEKADASSGSDSTSSSSEDSDSSNED

SEQ ID NO: 17057 - protein, 161 aa, Homo sapiens
MPDSWDKDVYPEPPRRTPVQPNPIVYMMKAFDLIVDRPVTLVREFIERQHAKNRYYYYHRQYRRVPDITECKEEDIMCIKVDQEIINIMQDRLKACQQREGQNYQQNCIKEVEQFTQVAKAYQDRYQDLGAYSSARKCLAKQRQRMLQERKAAKEAAAATS

SEQ ID NO: 17058 - protein, 373 aa, Homo sapiens
MGMLVFIISGLVILAYCSQASNERTYQEVVWAVCGKLTGVLCEVAIAVYTFGTCIAFLIIIGDQQDKIIAVMAKEPEGASGPWYTDRKFTISLTAFLFILPLSIPREIGFQKYASFLSVVGTWYVTAIVIIKYIWPDKEMTPGNILTRPASWMAVFNAMPTICFGFQCHVSSVPVFNSMQQPEVKTWGGVVTAAMVIALAVYMGTGICGFLTFGAAVDPDVLLSYPSEDMAVAVARAFIILSVLTSYPILHFCGRAVVEGLWLRYQGVPVEEDVGRERRRRVLQTLVWFLLTLLLALFIPDIGKVISVIGGLAACFIFVFPGLCLIQAKLSEMEEVKPASWWVLVSYGVLLVTLGAFIFGQTTANAIFVDLLA

SEQ ID NO: 17059 - protein, 172 aa, Homo sapiens
MIVFGWAVFLASRSLGQGLLLTLEEHIAHFLGTGGAATTMGNSCICRDDSGTDDSVDTQQQQAENSAVPTADTRSQPRDPVRPPRRGRGPHEPRRKKQNVDGLVLDTLAVIRTLVDKRKLQNEDAYIGPCFHKSSTGIVVSLPGISLSDQEPPYSMITLHEMAETDEGWLDV

SEQ ID NO: 17060 - protein, 650 aa, Homo sapiens
MVALPMVLVLLLVLSRGESELDAKIPSTGDATEWRNPHLSMLGSCQPAPSCQKCILSHPSCAWCKQLNFTASGEAEARRCARREELLARGCPLEELEEPRGQQEVLQDQPLSQGARGEGATQLAPQRVRVTLRPGEPQQLQVRFLRAEGYPVDLYYLMDLSYSMKDDLERVRQLGHALLVRLQEVTHSVRIGFGSFVDKTVLPFVSTVPSKLRHPCPTRLERCQSPFSFHHVLSLTGDAQAFEREVGRQSVSGNLDSPEGGFDAILQAALCQEQIGWRNVSRLLVFTSDDTFHTAGDGKLGGIFMPSDGHCHLDSNGLYSRSTEFDYPSVGQVAQALSAANIQPIFAVTSAALPVYQELSKLIPKSAVGELSEDSSNVVQLIMDAYNSLSSTVTLEHSSLPPGVHISYESQCEGPEKREGKAEDRGQCNHVRINQTVTFWVSLQATHCLPEPHLLRLRALGFSEELIVELHTLCDCNCSDTQPQAPHCSDGQGHLQCGVCRDCAECGAFRTGPLATNCSTACAHTNVTLALAPILDDGWCKERTLDNQLFFFLVEDDARGTVVLRVRPQEKGADHTQAIVLGCVGGIVAVGLGLVLAYRLSVEIYDRREYSRFEKEQQQLNWKQDSNPLYKSAITTTINPRFQEADSPTL

SEQ ID NO: 17061 - protein, 49 aa, Homo sapiens
MDINRRRYPAHLARSSSRKYTELPHGAISEDQAVGPADIPCDSTGQTST

SEQ ID NO: 17062 - protein, 287 aa, Homo sapiens
MAAPRVFPLSCAVQQYAWGKMGSNSEVARLLASSDPLAQIAEDKPYAELWMGTHPRGDAKILDNRISQKTLSQWIAENQDSLGSKVKDTFNGNLPFLFKVLSVETPLSIQAHPNKELAEKLHLQAPQHYPDANHKPEMAIALTPFQGLCGFRPVEEIVTFLKKVPEFQFLIGDEAATHLKQTMSHDSQAVASSLQSCFSHLMKSEKKVVVEQLNLLVKRISQQAAAGNNMEDIFGELLLQLHQQYPGDIGCFAIYFLNLLTLKPGEAMFLEANVPHAYLKGGPWLCH

SEQ ID NO: 17063 - protein, 62 aa, Homo sapiens
MAAVLALRVVAGLAAAALVAMLLEHYGLAGQPSPLPRPAPPRRPHPAPGPGDSNIFWGLQET

SEQ ID NO: 17064 - protein, 2084 aa, Homo sapiens
MDALESLLDEVALEGLDGLCLPALWSRLETRVPPFPLPLEPCTQEFLWRALATHPGISFYEEPRERPDLQLQDRYEEIDLETGILESRRDPVALEDVYPIHMILENKDGIQGSCRYFKERKNITNDIRTKSLQPRCTMVEAFDRWGKKLIIVASQAMRYRALIGQEGDPDLKLPDFSYCILERLGRSRWQGELQRDLHTTAFKVDAGKLHYHRKILNKNGLITMQSHVIRLPTGAQQHSILLLLNRFHVDRRSKYDILMEKLSVMLSTRTNHIETLGKLREELGLCERTFKRLYQYMLNAGLAKVVSLRLQEIHPECGPCKTKKGTDVMVRCLKLLKEFKRNDHDDDEDEEVISKTVPPVDIVFERDMLTQTYDLIERRGTKGISQAEIRVAMNVGKLEARMLCRLLQRFKVVKGFMEDEGRQRTTKYISCVFAEESDLSRQYQREKARSELLTTVSLASMQEESLLPEGEDTFLSESDSEEERSSSKRRGRGSQKDTRASANLRPKTQPHHSTPTKGGWKVVNLHPLKKQPPSFPGAAEERACQSLASRDSLLDTSSVSEPNVSFVSHCADSNSGDIAVIEEVRMENPKESSSSLKTGRHSSGQDKPHETYRLLKRRNLIIEAVTNLRLIESLFTIQKMIMDQEKQEGVSTKCCKKSIVRLVRNLSEEGLLRLYRTTVIQDGIKKKVDLVVHPSMDQNDPLVRSAIEQVRFRISNSSTANRVKTSQPPVPQGEAEEDSQGKEGPSGSGDSQLSASSRSESGRMKKSDNKMGITPLRNYHPIVVPGLGRSLGFLPKMPRLRVVHMFLWYLIYGHPASNTVEKPSFISERRTIKQESGRAGVRPSSSGSAWEACSEAPSKGSQDGVTWEAEVELATETVYVDDASWMRYIPPIPVHRDFGFGWALVSDILLCLPLSIFIQIVQVSYKVDNLEEFLNDPLKKHTLIRFLPRPIRQQLLYKRRYIFSVVENLQRLCYMGLLQFGPTEKFQDKDQVFIFLKKNAVIVDTTICDPHYNLARSSRPFERRLYVLNSMQDVENYWFDLQCVCLNTPLGVVRCPRVRKNSSTDQGSDEEGSLQKEQESAMDKHNLERKCAMLEYTTGSREVVDEGLIPGDGLGAAGLDSSFYGHLKRNWIWTSYIINQAKKENTAAENGLTVRLQTFLSKRPMPLSARGNSRLNIWGEARVGSELCAGWEEQFEVDREPSLDRNRRVRGGKSQKRKRLKKDPGKKIKRKKKGEFPGEKSKRLRYHDEADQSALQRMTRLRVTWSMQEDGLLVLCRIASNVLNTKVKGPFVTWQVVRDILHATFEESLDKTSHSVGRRARYIVKNPQAYLNYKVCLAEVYQDKALVGDFMNRRGDYDDPKVCANEFKEFVEKLKEKFSSALRNSNLEIPDTLQELFARYRVLAIGDEKDQTRKEDELNSVDDIHFLVLQNLIQSTLALSDSQMKSYQSFQTFRLYREYKDHVLVKAFMECQKRSLVNRRRVNHTLGPKKNRALPFVPMSYQLSQTYYRIFTWRFPSTICTESFQFLDRMRAAGKLDQPDRFSFKDQDNNEPTNDMVAFSLDGPGGNCVAVLTLFSLGLISVDVRIPEQIIVVDSSMVENEVIKSLGKDGSLEDDEDEEDDLDEGVGGKRRSMEVKPAQASHTNYLLMRGYYSPGIVSTRNLNPNDSIVVNSCQMKFQLRCTPVPARLRPAAAPLEELTMGTSCLPDTFTKLINPQENTCSLEEFVLQLELSGYSPEDLTAALEILEAIIATGCFGIDKEELRRRFSALEKAGGGRTRTFADCIQALLEQHQVLEVGGNTARLVAMGSAWPWLLHSVRLKDREDADIQREDPQARPLEGSSSEDSPPEGQAPPSHSPRGTKRRASWASENGETDAEGTQMTPAKRPALQDSNLAPSLGPGAEDGAEAQAPSPPPALEDTAAAGAAQEDQEGVGFTESFGAANISQAARERDCESVCFIGRPWRVVDGHLNLPVCKGMMEAMLYHIMTRPGIPESSLLRHYQGVLQPVAVLELLQGLESLGCIRKRWLRKPRPVSLFSTPVVEEVEVPSSLDESPMAFYEPTLDCTLRLGRVFPHEVNWNKWIHL

SEQ ID NO: 17065 - protein, 70 aa, Homo sapiens
MKENYCLQAALVCLGMLCHSHAFAPERRGHLRPSFHGHHEKGKEGQVLQRSKRGWVWNQFFVIEEYTGPD

SEQ ID NO: 17066 - protein, 42 aa, Homo sapiens
MLATRVFSLVGKRAISTSVCVRAHVETGFHHVSQDGLDLLTS

SEQ ID NO: 17067 - protein, 175 aa, Homo sapiens
MVPAWLWLLCVSVPQALPKAQPAELSVEVPENYGGNFPLYLTKLPLPREGAEGQIVLSGDSGKATEGPFAMDPDSGFLLVTRALDREEQAEYQLQVTLEMQDGHVLWGPQPVLVHVKDENDQVPHFSQAIYRARLSRGTRPVCPPTVNQASPSSSLRLQTGMSQAQPTRIFDSTS

SEQ ID NO: 17068 - protein, 143 aa, Homo sapiens
MTSSRLWFSLLLAAAFAGRATALWPWPQNFQTSDQRYVLYPNNFQFQYDVSSAAQPGCSVLDEAFQRYRDLLFGSGSWPRPYLTGKRHTLEKNVLVVSVVTPGCNQLPTLESVENYTLTINDDQCLLLSETVWGALRVLYQQD

SEQ ID NO: 17069 - protein, 95 aa, Homo sapiens
MTPQSLLQTTLFLLSLLFLVQAHPASRSFPDPRGLYHFCLYWNRHAGRLHLLYGKRDFLLSDKASSLLCFQHQEESLAQGPPLLATSVTSWWSPQ

SEQ ID NO: 17070 - protein, 365 aa, Homo sapiens
MATNFSDIVKQGYVKMKSRKLGIYRRCWLVFRKSSSKGPQRLEKYPDEKSVCLRGCPKVTEISNVKCVTRLPKETKRQAVAIIFTDDSARTFTCDSELEAEEWYKTLSVECLGSRLNDISLGEPDLLAPGVQCEQTDRFNVFLLPCPNLDVYGECKLQITHENIYLWDIHNPRVKLVSWPLCSLRRYGRDATRFTFEAGRMCDAGEGLYTFQTQEGEQIYQRVHSATLAIAEQHKRVLLEMEKNVRLLNKGTEHYSYPCTPTTMLPRSAYWHHITGSQNIAEASSYAGESLPCPTPTCQEALWRMRPIGQGSFDLALSSEPASVPTGEGYGAAQASSETDLLNRFILLKPKPSQGDSSEAKTPSQ

SEQ ID NO: 17071 - protein, 167 aa, Homo sapiens
MTPQSLLQTTLFLLSLLFLVQGAHGRGHREDFRFCSQRNQTHRSSLHYKPTPDLRISIENSEEALTVHAPFPAAHPASRSFPDPRGLYHFCLYWNRHAGRLHLLYGKRDFLLSDKASSLLCFQHQEESLAQGPPLLATSVTSWWSPQNISLPSAASFTFSFHSPPHT

SEQ ID NO: 17072 - protein, 178 aa, Homo sapiens
MLAGGVRSMPSPLLACWQPILLLVLGSVLSGSATGCPPRCECSAQDRAVLCHRKRFVAVPEGIPTETRLLDLGKNRIKTLNQDEFASFPHLEELELNENIVSAVEPGAFNNLFNLRTLGLRSNRLKLIPLGVFTGLSNLTKLDISENKIVILLDYMFQDLYNLKSLEVGDNDLVYISH

SEQ ID NO: 17073 - protein, 406 aa, Homo sapiens
MTLDVGPEDELPDWAAAKEFYQKYDPKDVIGRGVSSVVRRCVHRATGHEFAVKIMEVTAERLSPEQLEEVREATRRETHILRQVAGHPHIITLIDSYESSSFMFLVFDLMRKGELFDYLTEKVALSEKETRSIMRSLLEAVSFLHANNIVHRDLKPENILLDDNMQIRLSDFGFSCHLEPGEKLRELCGTPGYLAPEILKCSMDETHPGYGKEVDLWACGVILFTLLAGSPPFWHRRQILMLRMIMEGQYQFSSPEWDDRSSTVKDLISRLLQVDPEARLTAEQALQHPFFERCEGSQPWNLTPRQRFRVAVWTVLAAGRVALSTHRVRPLTKNALLRDPYALRSVRHLIDNCAFRLYGHWVKKGEQQNRAALFQHRPPGPFPIMGPEEEGDSAAITEDEAVLVLG

SEQ ID NO: 17074 - protein, 120 aa, Homo sapiens
MGWLCSGLLFPVSCLVLLQVASSGNMKVLQEPTCVSDYMSISTCEWKMNGPTNCSTELRLLYQLVFLLSEAHTCIPENNGGAGCVCHLLMDDVVSADNYTLDLWAGQQLLWKGSFKPSEH

SEQ ID NO: 17075 - protein, 2371 aa, Homo sapiens
MNLDSLSLALSQISYLVDNLTKKNYRASQQEIQHIVNRHGPEADRHLLRCLFSHVDFSGDGKSSGKDFHQTQFLIQECALLITKPNFISTLSYAIDNPLHYQKSLKPAPHLFAQLSKVLKLSKVQEVIFGLALLNSSSSDLRGFAAQFIKQKLPDLLRSYIDADVSGNQEGGFQDIAIEVLHLLLSHLLFGQKGAFGVGQEQIDAFLKTLRRDFPQERCPVVLAPLLYPEKRDILMDRILPDSGGVAKTMMESSLADFMQEVGYGFCASIEECRNIIVQFGVREVTAAQVARVLGMMARTHSGLTDGIPLQSISAPGSGIWSDGKDKSDGAQAHTWNVEVLIDVLKELNPSLNFKEVTYELDHPGFQIRDSKGLHNVVYGIQRGLGMEVFPVDLIYRPWKHAEGQLSFIQHSLINPEIFCFADYPCHTVATDILKAPPEDDNREIATWKSLDLIESLLRLAEVGQYEQVKQLFSFPIKHCPDMLVLALLQINTSWHTLRHELISTLMPIFLGNHPNSAIILHYAWHGQGQSPSIRQLIMHAMAEWYMRGEQYDQAKLSRILDVAQDLKALSMLLNGTPFAFVIDLAALASRREYLKLDKWLTDKIREHGEPFIQACMTFLKRRCPSILGGLAPEKDQPKSAQLPPETLATMLACLQACAGSVSQELSETILTMVANCSNVMNKARQPPPGVMPKGRPPSASSLDAISPVQIDPLAGMTSLSIGGSAAPHTQSMQGFPPNLGSAFSTPQSPAKAFPPLSTPNQTTAFSGIGGLSSQLPVGGLGTGSLTGIGTGALGLPAVNNDPFVQRKLGTSGLNQPTFQQTDLSQVWPEANQHFSKEIDDEANSYFQRIYNHPPHPTMSVDEVLEMLQRFKDSTIKREREVFNCMLRNLFEEYRFFPQYPDKELHITACLFGGIIEKGLVTYMALGLALRYVLEALRKPFGSKMYYFGIAALDRFKNRLKDYPQYCQHLASISHFMQFPHHLQEYIEYGQQSRDPPVKMQGSITTPGSIALAQAQAQAQVPAKAPLAGQVSTMVTTSTTTTVAKTVTVTRPTGVSFKKDVPPSINTTNIDTLLVATDQTERIVEPPENIQEKIAFIFNNLSQSNMTQKVEELKETVKEEFMPWVSQYLVMKRVSIEPNFHSLYSNFLDTLKNPEFNKMVLNETYRNIKVLLTSDKAAANFSDRSLLKNLGHWLGMITLAKNKPILHTDLDVKSLLLEAYVKGQQELLYVVPFVAKVLESSIRSVVFRPPNPWTMAIMNVLAELHQEHDLKLNLKFEIEVLCKNLALDINELKPGNLLKDKDRLKNLDEQLSAPKKDVKQPEELPPITTTTTSTTPATNTTCTATVPPQPQYSYHDINVYSLAGLAPHITLNPTIPLFQAHPQLKQCVRQAIERAVQELVHPVVDRSIKIAMTTCEQIVRKDFALDSEESRMRIAAHHMMRNLTAGMAMITCREPLLMSISTNLKNSFASALRTASPQQREMMDQAAAQLAQDNCELACCFIQKTAVEKAGPEMDKRLATEFELRKHARQEGRRYCDPVVLTYQAERMPEQIRLKVGGVDPKQLAVYEEFARNVPGFLPTNDLSQPTGFLAQPMKQAWATDDVAQIYDKCITELEQHLHAIPPTLAMNPQAQALRSLLEVVVLSRNSRDAIAALGLLQKAVEGLLDATSGADADLLLRYRECHLLVLKALQDGRAYGSPWCNKQITRCLIECRDEYKYNVEAVELLIRNHLVNMQQYDLHLAQSMENGLNYMAVAFAMQLVKILLVDERSVAHVTEADLFHTIETLMRINAHSRGNAPEGLPQLMEVVRSNYEAMIDRAHGGPNFMMHSGISQASEYDDPPGLREKAEYLLREWVNLYHSAAAGRDSTKAFSAFVGQMHQQGILKTDDLITRFFRLCTEMCVEISYRAQAEQQHNPAANPTMIRAKCYHNLDAFVRLIALLVKHSGEATNTVTKINLLNKVLGIVVGVLLQDHDVRQSEFQQLPYHRIFIMLLLELNAPEHVLETINFQTLTAFCNTFHILRPTKAPGFVYAWLELISHRIFIARMLAHTPQQKGWPMYAQLLIDLFKYLAPFLRNVELTKPMQILYKGTLRVLLVLLHDFPEFLCDYHYGFCDVIPPNCIQLRNLILSAFPRNMRLPDPFTPNLKVDMLSEINIAPRILTNFTGVMPPQFKKDLDSYLKTRSPVTFLSDLRSNLQVSNEPGNRYNLQLINALVLYVGTQAIAHIHNKGSTPSMSTITHSAHMDIFQNLAVDLDTEGRYLFLNAIANQLRYPNSHTHYFSCTMLYLFAEANTEAIQEQITRVLLERLIVNRPHPWGLLITFIELIKNPAFKFWNHEFVHCAPEIEKLFQSVAQCCMGQKQAQQVMEGTGAS

SEQ ID NO: 17076 - protein, 40 aa, Homo sapiens
MRRPAAVPLLLLLCFGSQRAKAATAPLRRPCTRSCWGQGS

SEQ ID NO: 17077 - protein, 17 aa, Homo sapiens
MQRLMMLLATSGACLGL

SEQ ID NO: 17078 - protein, 74 aa, Homo sapiens
MLEPQENGVIDLPDYEHVEDETFPPFPPPASPERQDGEGTEPDEESGNGAPVRVPPKRTVKRNIPKLDAQRLKT

SEQ ID NO: 17079 - protein, 230 aa, Homo sapiens
MQPRWAQGATMWLGVLLTLLLCSSLEGQENSFTINSVDMKSLPDWTVQNGKNLTLQCFADVSTTSHVKPQHQMLFYKDDVLFYNISSMKSTESYFIPEVRIYDSGTYKCTVIVNNKEKTTAEYQVLVEGVPSPRVTLDKKEAIQGGIVRVNCSVPEEKAPIHFTIEKLELNEKMVKLKREKNSRDQNFVILEFPVEEQDRVLSFRCQARIISGIHMQTSESTKSELVTVT

SEQ ID NO: 17080 - protein, 34 aa, Homo sapiens
MKENYCLQAALVCLGMLCHSHAFAPERRGHLRPS

SEQ ID NO: 17081 - protein, 33 aa, Homo sapiens
MKIFCSRANPTTGSVEWLEEDEHYDYHQEIARM

SEQ ID NO: 17082 - protein, 140 aa, Homo sapiens
MLGVLELLLLGAAWLAGPARGQNETEPIVLEGKCLVVCDSNPTSDPTGTALGISVRSGSAKVAFSAIRSTNHEPSEMSNRTMIIYFDQVSVPSSRGVQIGLVKEGWMEDRCPVLSKGSAEARGRQSGTDSCPLPFVPVSL

SEQ ID NO: 17083 - protein, 507 aa, Homo sapiens
MYCAYTIPGMGGNSLMYYYNGKAVYAPSASTADYNRDSPGYPSSKPATSTFPSSFFMQDGHHSSDPWSSSSGMNQPGYAGMLGNSSHIPQSSSYCSLHPHERLSYPSHSSADINSSLPPMSTFHRSGTNHYSTSSCTPPANGTDSIMANRGSGAAGSSQTGDALGKALASIYSPDHTNNSFSSNPSTPVGSPPSLSAGTAVWSRNGGQASSSPNYEGPLHSLQSRIEDRLERLDDAIHVLRNHAVGPSTAMPGGHGDMHGIIGPSHNGAMGGLGSGYGTGLLSANRHSLMVGTHREDGVALRGSHSLLPNQVPVPQLPVQSATSPDLNPPQDPYRGMPPGLQGQSVSSGSSEIKSDDEGDENLQDTKSSEDKKLDDDKKDIKSITSNNDDEDLTPEQKAEREKERRMANNARERLRVRDINEAFKELGRMVQLHLKSDKPQTKLLILHQAVAVILSLEQQVRERNLNPKAACLKRREEEKVSSEPPPLSLAGPHPGMGDASNHMGQM

SEQ ID NO: 17084 - protein, 222 aa, Homo sapiens
MKENYCLQAALVCLGMLCHSHAFAPERRGHLRPSFHGHHEKGKEGQVLQRSKRGWVWNQFFVIEEYTGPDPVLVGRLHSDIDSGDGNIKYILSGEGAGTIFVIDDKSGNIHATKTLDREERAQYTLMAQAVDRDTNRPLEPPSEFIVKVQDINDNPPEFLHETYHANVPERSNVGTSVIQVTASDADDPTYGNSAKLVYSILEGQPYFSVEAQTGIIRTALP

SEQ ID NO: 17085 - protein, 327 aa, Homo sapiens
MPECWDGEHDIETPYGLLHVVIRGSPKGNRPAILTYHDVGLNHKLCFNTFFNFEDMQEITKHFVVCHVDAPGQQVGASQFPQGYQFPSMEQLAAMLPSVVQHFGFKYVIGIGVGAGAYVLAKFALIFPDLVEGLVLVNIDPNGKGWIDWAATKLSGLTSTLPDTVLSHLFSQEELVNNTELVQSYRQQIGNVVNQANLQLFWNMYNSRRDLDINRPGTVPNAKTLRCPVMLVVGDNAPAEDGVVECNSKLDPTTTTFLKPGKLTEAFKYFLQGMGYMPSASMTRLARSRTASLTSASSVDGSRPQACTHSESSEGLGQVNHTMEVSC

SEQ ID NO: 17086 - protein, 138 aa, Homo sapiens
MERLVLTLCTLPLAVASAGCATTPARNLSCYQCFKVSSWTECPPTWCSPLDQVCISNEVVVSFKWSVRVLLSKRCAPRCPNDNMKFEWSPAPMVQGVITRRCCSWALCNRALTPQEGRWALRGGLLLQVGLSLLRALL

SEQ ID NO: 17087 - protein, 90 aa, Homo sapiens
MTPQSLLQTTLFLLSLLFLVQASASSGAHGRGHREDFRFCSQRNQTHRSSLHYKPTPDLRISIENSEEALTVHAPFPAAHPASRSFPDPR

SEQ ID NO: 17088 - protein, 834 aa, Homo sapiens
MEPAPARSPRPQQDPARPQEPTMPPPETPSEGRQPSPSPSPTERAPASEEEFQFLRCQQCQAEAKCPKLLPCLHTLCSGCLEASGMQCPICQAPWPLGADTPALDNVFFESLQRRLSVYRQIVDAQAVCTRCKESADFWCFECEQLLCAKCFEAHQWFLKHEARPLAELRNQSVREFLDGTRKTNNIFCSNPNHRTPTLTSIYCRGCSKPLCCSCALLDSSHSELKCDISAEIQQRQEELDAMTQALQEQDSAFGAVHAQMHAAVGQLGRARAETEELIRERVRQVVAHVRAQERELLEAVDARYQRDYEEMASRLGRLDAVLQRIRTGSALVQRMKCYASDQEVLDMHGFLRQALCRLRQEEPQSLQAAVRTDGFDEFKVRLQDLSSCITQGKDAAVSKKASPEAASTPRDPIDVDLDVSNTTTAQKRKCSQTQCPRKVIKMESEEGKEARLARSSPEQPRPSTSKAVSPPHLDGPPSPRSPVIGSEVFLPNSNHVASGAGEAEERVVVISSSEDSDAENSSSRELDDSSSESSDLQLEGPSTLRVLDENLADPQAEDRPLVFFDLKIDNETQKISQLAAVNRESKFRVVIQPEAFFSIYSKAVSLEVGLQHFLSFLSSMRRPILACYKLWGPGLPNFFRALEDINRLWEFQEAISGFLAALPLIRERVPGASSFKLKNLAQTYLARNMSERSAMAAVLAMRDLCRLLEVSPGPQLAQHVYPFSSLQCFASLQPLVQAAVLPRAEARLLALHNVSFMELLSAHRRDRQGGLKKYSRYLSLQTTTLPPAQPAFNLQALGTYFEGLLEGPALARAEGVSTPLAGRGLAERASQQS

SEQ ID NO: 17089 - protein, 89 aa, Homo sapiens
MTLGSPRKGLLMLLMALVTQGDPVKPSRGPLVTCTCESPHCKGPTCRGAWCTVVLVREEGRHPQEHRGCGNLHRELCRGRPTEFVNHYC

SEQ ID NO: 17090 - protein, 361 aa, Homo sapiens
MPYQYPALTPEQKKELSDIAHRIVAPGKGILAADESTGSIAKRLQSIGTENTEENRRFYRQLLLTADDRVNPCIGGVILFHETLYQKADDGRPFPQVIKSKGGVVGIKVDKGVVPLAGTNGETTTQGLDGLSERCAQYKKDGADFAKWRCVLKIGEHTPSALAIMENANVLARYASICQQNGIVPIVEPEILPDGDHDLKRCQYVTEKVLAAVYKALSDHHIYLEGTLLKPNMVTPGHACTQKFSHEEIAMATVTALRRTVPPAVTGITFLSGGQSEEEASINLNAINKCPLLKPWALTFSYGRALQASALKAWGGKKENLKAAQEEYVKRALVRIGRRWAGCLGGWDSEKSPSHSTPLPA

SEQ ID NO: 17091 - protein, 849 aa, Homo sapiens
MRVLCEQRYCAVCREELRQVVFGKKLPAFATIPIHQLQHEKKYDIYFADGKVYALYRQLLQHECPRCPELPPFSLFGDLEQHMRRQHELFCCRLCLQHLQIFTYERKWYSRKDLARHRMQGDPDDTSHRGHPLCKFCDERYLDNDELLKHLRRDHYFCHFCDSDGAQDYYSDYAYLREHFREKHFLCEEGRCSTEQFTHAFRTEIDLKAHRTACHSRSRAEARQNRHIDLQFSYAPRHSRRNEGVVGGEDYEEVDRYSRQGRVARAGTRGAQQSRRGSWRYKREEEDREVAAAVRASVAAQQQEEARRSEDQEEGGRPKKEEAAARGPEDPRGPRRSPRTQGEGPGPKETSTNGPVSQEAFSVTGPAAPGCVGVPGALPPPSPKLKDEDFPSLSASTSSSCSTAATPGPVGLALPYAIPARGRSAFQEEDFPALVSSVPKPGTAPTSLVSAWNSSSSSKKVAQPPLSAQATGSGQPTRKAGKGSRGGRKGGPPFTQEEEEDGGPALQELLSTRPTGSVSSTLGLASIQPSKVGKKKKVGSEKPGTTLPQPPPATCPPGALQAPEAPASRAEGPVAVVVNGHMEGPAPARSAPKEPPGLPRPLGSFPCPTPQEDFPALGGPCPPRMPPPPGFSAVVLLKGTPPPPPPGLVPPISKPPPGFSGLLPSPHPACVPSPATTTTTKAPRLLPAPRAYLVPENFRERNLQLIQSIRDFLQSDEARFSEFKSHSGEFRQGLISAAQYYKSCRDLLGENFQKVFNELLVLLPDTAKQQELLSAHTDFCNREKPLSTKSKKNKKSAWQATTQQAGLDCRVCPTCQQVLAHGDASSHQALHAARDDDFPSLQAIARIIT

SEQ ID NO: 17092 - protein, 130 aa, Homo sapiens
MNSLSVGLLPQRDTKFREDCPPDREELGRHSWAVLHTLAAYYPDLPTPEQQQDMAQFIHLFSKFYPCEECAEDLRKRLCRNHPDTRTRACFTQWLCHLHNEVNRKLGKPDFDCSKVDERWRDGWKDGSCD

SEQ ID NO: 17093 - protein, 121 aa, Homo sapiens
MIVFGWAVFLASRSLGQGLLLTLEEHIAHFLGTGGAATTMGNSCICRDDSGTDDSVDTQQQQAENSAVPTADTRSQPRDPVRPPRRGRGPHEPRRKKQNVDGLVLDTLAVIRTLVDNDQEP

SEQ ID NO: 17094 - protein, 1456 aa, Homo sapiens [sequence omitted]

SEQ ID NO: 17095 - protein, 309 aa, Homo sapiens
MATSTGRWLLLRLALFGFLWEASGGLDSGASRDDDLLLPYPRARARLPRDCTRVRAGNREHESWPPPPATPGAGGLAVRTFVSHFRDRAVAGHLTRAVEPLRTFSVLEPGGPGGCAARRRATVEETARAADCRVAQNGGFFRMNSGECLGNVVSDERRVSSSGGLQNAQFGIRRDGTLVTGYLSEEEVLDTENPFVQLLSGVVWLIRNGSIYINESQATECDETQETGSFSKFVNVISARTAIGHDRKGQLVLFHADGQTEQRGINLWEMAEFLLKQDVVNAINLDGGGSATFVLNGTLASYPSDHWQA

SEQ ID NO: 17096 - protein, 1773 aa, Homo sapiens
MRRGNISPAFWFLWLLLFGLLGPSSENTTAFTKGSDTTTASITGSETTMASTMASTSALTTGSKITTDSTTGSETTSASTMASTAAFTTGSETNTASTTDSGTTIASTRTFTTGSDTTTGSTAGSETIVASTTVSGTTTTFTIASTTVPETTMASSTTSTAGSEKTMASSIISETTMASTTGSETATVSTTGSETTTTSTASSEATKVSTTGSETTTASTAGSETTTTSTSMAGSEATTTSTADSKVITASSMSSETTVAPAAGSNTTTASTTGSETTTILIKASETTTASTAGSETTTPSPTGSQTTIVSISGSEITTTSTAGSENTTVSSAGSGTTTASMAGSETTVSTAGSETTTVSITGTETTMVSAMGSETTTNSTTSSETTVTSTAGSETTTVSTVGSETTTAYTADSETTAASTTGSEMTTVFTAGSETITPSTAGSETTTVSTAGSETTTVSTTGSETTTASTAHSETTAASTMGSETTKVSTAGSETTVSTAGSETTAASTEDSETNTAFTEDSKTTTASTTGFETTAASTTGSEPTMASTMGSETTMASTIGPETTKVSTASSEVTTVFAAGSETIRASTVGSETTTVSTTGSETTTASIMGSETSTDSTTGSETTTASTEGSETTTASTEGSEATTVSTTGSETTTVSITDSETTTTCTEGSEMTAVSTTVFETTTASTEGSEITIASTSDSETTTASTEGSETTTVTTAGSETKTAYTTGSETTTASNTGLETTTVFTIGSDTTTASTEGSETTAVSATGSEMTTVSTEGSENTTVSTTGSETTTVSTTGLETTTTSTEGSEMTTVSTTGAETTTDSTEGSGTTAASTAGSETTTVSTADSENTTASTADSETTSASTTGSETTTASTTSSETTTASTEGSETTTVSTTDSETTMVSTTGSERTITSTEGSETTTVSATGSETTVSTEGSGTTTVSITGSETTKVSTTGSETTTTSTEGSEITTASITGSETTTASTEGSETTTASTEGSETTSASTTGSETTTASTTSSETTMASIMGSETTMASTIGSETTKVSTASSKMTTVFTENSETTIASTTASETTTVSTAGSETIPASTAGSETTTTTSTEGSETTTASTEGSETTTASTESSETTTATTIGSETTTASTEGSETTTTSTEGSETTTASTEGSEITTVSTTGSETTTASTEGSETTTASTEGSELTTVSTTGSETITVSAEGSETTTVTTMGSETTTASTAGSETTTVSTAGSETTTASIEGSETTTVSSTGSETTTVSTTGTETTITSTEGSETTTVTTAGSETTAVYTTGSETTTTSTEGSETTTVSTTGSETTTASTADLETTTVSTSGSGTTTASTAGSETTTVYITGSKTTTASTEGSEATTVSTTSSETTTASTTGSEMTTVFTTVSETTTVSTIGSEATTSSAAGSEATTTSTEGSETTTASTAGSETTTASTAGSETTTASTSGSETNTACTTGSETSTPSSAGSETNTAFIIGSESTIASTASLEPTATSLTGSETTTVSITASGATAASTTVSSTTFVLTKATDVSIQPITNTPMSGTRTTGTRLTASSSVTMAPGMDFTASAASHTVPGIVLNTSGLGTSTMGASSTTSAHGVRTTTGSTREPTSSTFQETGPVSMGTNTVSMSHTPTNVIKPSGYLQPWAIILISLAAVVAAVGLSVGLSFCLRNLFFPLRYCGIYYPHGHSHSLGLDLNLGLGSGTFHSLGNALVHGGELEMGHGGTHGFGYGVGHGLSHIHGDGYGVNHGGHYGHGGGH

SEQ ID NO: 17097 - protein, 107 aa, Homo sapiens
MWSGWWLWPLVAVCTADFFRDEAERIMRDSPVIDGHNDLPWQLLDMFNNRLQDERANLTTLAGTHTNIPKLRAGFVGGQFWSVYTPCDTQNKDAVRRTLEQMDVVHR

SEQ ID NO: 17098 - protein, 136 aa, Homo sapiens
MQRWTLWAAAFLTLHSAQAFPQTDISISPALPELPLPSLCPLFWMEFKGHCYRFFPLNKTWAEADLYCSEFSVGRKSAKLASIHSWEENVFVYDLVNSCVPGIPADVWTGLHDHRQVRKQWPLGPLGSSSQDSILI

SEQ ID NO: 17099 - protein, 305 aa, Homo sapiens
MAACGRVRRMFRLSAALHLLLLFAAGAEKLPGQGVHSQGQGPGANFVSFVGQAGGGGPAGQQLPQLPQSSQLQQQQQQQQQQQQPQPPQPPFPAGGPPARRGGAGAGGGWKLAEEESCREDVTRVCPKHTWSNNLAVLECLQDVREPENEISSDCNHLLWNYKLNLTTDPKFESVAREVCKSTITEIKECADEPVGKGYMVSCLVDHRGNITEYQCHQYITKMTAIIFSDYRLICGFMDDCKNDINILKCGSIRLGEKDAHSQDTPTALRNREGGSHGSAELKSKGSYTSVPWMSSWILPSRISA

SEQ ID NO: 17100 - protein, 534 aa, Homo sapiens
MATAATIPSVATATAAALGEVEDEGLLASLFRDRFPEAQWRERPDVGRYLRELSGSGLERLRREPERLAEERAQLLQQTRDLAFANYKTFIRGAECTERIHRLFGDVEASLGRLLDRLPSFQQSCRNFVKEAEEISSNRRMNSLTLNRHTEILEILEIPQLMDTCVRNSYYEEALELAAYVRRLERKYSSIPVIQGIVNEVRQSMQLMLSQLIQQLRTNIQLPACLRVIGYLRRMDVFTEAELRVKFLQARDAWLRSILTAIPNDDPYFHITKTIEASRVHLFDIITQYRAIFSDEDPLLPPAMGEHTVNESAIFHGWVLQKVSQFLQVLETDLYRGIGGHLDSLLGQCMYFGLSFSRVGADFRGQLAPVFQRVAISTFQKAIQETVEKFQEEMNSYMLISAPAILGTSNMPAAVPATQPGTLQPPMVLLDFPPLACFLNNILVAFNDLRLCCPVALAQDVTGALEDALAKVTKIILAFHRAEEAAFSSGEQELFVQFCTVFLEDLVPYLNRCLQVLFPPAQIAQTLGKRMKIL

SEQ ID NO: 17101 - protein, 65 aa, Homo sapiens
MQRWTLWAAAFLTLHSAQAFPQTDISISPVCFLSAPSPARAAPAFPVPPVLDGVQRPLLSILPSQ

SEQ ID NO: 17102 - protein, 54 aa, Homo sapiens
MTPQSLLQTTLFLLSLLFLVQGAHGRGHREDFRFCSQRNQTHRSSLHYKPTPDL

SEQ ID NO: 17103 - protein, 86 aa, Homo sapiens
MQRWTLWAAAFLTLHSAQAFPQTDISISPALPELPLPSLCPLFWMEFKGHCYRFFPLNKTWAEADLYCSEFSVGRKSAKLASIHSL

SEQ ID NO: 17104 - protein, 159 aa, Homo sapiens
MTPQSLLQTTLFLLSLLFLVQGAHGRGHREDFRFCSQRNQTHRSSLHYKPTPDLRISIENSEEALTVHAPFPAAHPASRSFPDPRGLYHFCLYWNRHAGRLHLLYGKRDFLLSDKASSLLCFQHQEESLAQGPPLLATSVTSWWSPQNISLPSAASFTF

SEQ ID NO: 17105 - protein, 746 aa, Homo sapiens
MEVKRLKVTELRSELQRRGLDSRGLKVDLAQRLQEALDAEMLEDEAGGGGAGPGGACKAEPRPVAASGGGPGGDEEEDEEEEEEDEEALLEDEDEEPPPAQALGQAAQPPPEPPEAAAMEAAAEPDASEKPAEATAGSGGVNGGEEQGLGKREEDEPEERSGDETPGSEVPGDKAAEEQGDDQDSEKSKPAGSDGERRGVKRQRDEKDEHGRAYYEFREEAYHSRSKSPLPPEEEAKDEEEDQTLVNLDTYTSDLHFQVSKDRYGGQPLFSEKFPTLWSGARSTYGVTKGKVCFEAKVTQNLPMKEGCTEVSLLRVGWSVDFSRPQLGEDEFSYGFDGRGLKAENGQFEEFGQTFGENDVIGCFANFETEEVELSFSKNGEDLGVAFWISKDSLADRALLPHVLCKNCVVELNFGQKEEPFFPPPEEFVFIHAVPVEERVRTAVPPKTIEECEVILMVGLPGSGKTQWALKYAKENPEKRYNVLGAETVLNQMRMKGLEEPEMDPKSRDLLVQQASQCLSKLVQIASRTKRNFILDQCNVYNSGQRRKLLLFKTFSRKVVVVVPNEEDWKKRLELRKEVEGDDVPESIMLEMKANFSLPEKCDYMDEVTYGELEKEEAQPIVTKYKEEARKLLPPSEKRTNRRNNRNKRNRQNRSRGQGYVGGQRRGYDNRAYGQQYWGQPGNRGGYRNFYDRYRGDYDRFYGRDYEYNRYRDYYRQYNRDGPSIFHIQENVMRHRYQRLDRHFTF

SEQ ID NO: 17106 - protein, 110 aa, Homo sapiens
MQRLMMLLATSGACLGLLAVAAVAAAGANPAQRDTHSLLPTHRRQKRDWIWNQMHIDEEKNTSLPHHVGKIKSSVSRKNAKYLLKGEYVGKVFRVDAETGDVTQMSPRTG

SEQ ID NO: 17107 - protein, 141 aa, Homo sapiens
MKGGFTGGDEYQKHFLPRDYLATYYSFDGSPSPEAEMLKFNLECLHKTFGPGLQGDTLIDIGSGPTIYQVLAACDSFQDITLSDFTDRNREELEKWLKKEPGAYDWTPAVKFACELEGNRDMELINNTTLVNSRHPAITGP

SEQ ID NO: 17108 - protein, 470 aa, Homo sapiens
MAGPGWGPPRLDGFILTERLGSGTYATVYKAYAKKDTREVVAIKCVAKKSLNKASVENLLTEIEILKGIRHPHIVQLKDFQWDSDNIYLIMEFCAGGDLSRFIHTRRILPEKVARVFMQQLASALQFLHERNISHLDLKPQNILLSSLEKPHLKLADFGFAQHMSPWDEKHVLRGSPLYMAPEMVCQRQYDARVDLWSMGVILYEALFGQPPFASRSFSELEEKIRSNRVIELPLRPLLSRDCRDLLQRLLERDPSRRISFQDFFAHPWVDLEHMPSGESLGRATALVVQAVKKDQEGDSAAALSLYCKALDFFVPALHYEVDAQRKEAIKAKVGQYVSRAEELKAIVSSSNQALLRQGTSARDLLREMARDKPRLLAALEVASAAMAKEEAAGGEQDALDLYQHSLGELLLLLAAEPPGRRRELLHTEVQNLMARAEYLKEQMRESRWEADTLDKEGLSESVRSSCTLQ

SEQ ID NO: 17109 - protein, 71 aa, Homo sapiens
MAAANPWDPASAPNGAGLVLGHFIASGMVNQEMLNMSKKTVSCFVNFTRLQQITNIQAEIYQLRSVILCKA

SEQ ID NO: 17110 - protein, 128 aa, Homo sapiens
MGQIEWAMWANEQALASGLILITGGIVATAGRFTQWYFGAYSIVAGVFVCLLEYPRGKRKKGSTMERWGQKYMTAVVKLFGPFTRNYYVRAVLHLLLSVPAGFLLATILGTACLAIASGIYLLVSGAL

SEQ ID NO: 17111 - protein, 21 aa, Homo sapiens
MLLILLSVALLALSSAQNLNE

SEQ ID NO: 17112 - protein, 76 aa, Homo sapiens
MQRLMMLLATSGACLGLLAVAAVAAAGANPAQRDTHSLLPTHRRQKRDWIWNQMHIDEEKNTSLPHHVGKIKSSVS

SEQ ID NO: 17113 - protein, 391 aa, Homo sapiens
MDLGLSEDHFSRPVGLFLASDVQQLRQAIEECKQVILELPEQSEKQKDAVVRLIHLRLKLQELKDPNEDEPNIRVLLEHRFYKEKSKSVKQTCDKCNTIIWGLIQTWYTCTGCYYRCHSKCLNLISKPCVSSKVSHQAEYELNICPETGLDSQDYRCAECRAPISLRGVPSEARQCDYTGQYYCSHCHWNDLAVIPARVVHNWDFEPRKVSRCSMRYLALMVSRPVLRLREINPLLFSYVEELVEIRKLRQDILLMKPYFITCREAMEARLLLQLQDRQHFVENDEMYSVQDLLDVHAGRLGCSLTEIHTLFAKHIKLDCERCQAKGFVCELCREGDVLFPFDSHTSVCADCSAVFHRDCYYDNSTTCPKCARLSLRKQSLFQEPGPDVEA

SEQ ID NO: 17114 - protein, 366 aa, Homo sapiens
MSKPHSEAGTAFIQTQQLHAAMADTFLEHMCRLDIDSPPIKKGVNLPGAAVDLPAVSEKDIQDLKFGVEQDVDMVFASFIRKASDVHEVRKVLGEKGKNIKIISKIENHEGVRRFDEILEASDGIMVARGDLGIEIPAEKVFLAQKMMIGRCNRAGKPVICATQMLESMIKKPRPTRAEGSDVANAVLDGADCIMLSGETAKGDYPLEAVRMQHLIAREAEAAMFHRKLFEELVRASSHSTDLMEAMAMGSVEASYKCLAAALIVLTESGRSAHQVARYRPRAPIIAVTRNPQTARQAHLYRGIFPVLCKDPVQEAWAEDVDLRVNFAMNVGKARGFFKKGDVVIVLTGWRPGSGFTNTMRVVPVP

SEQ ID NO: 17115 - protein, 299 aa, Homo sapiens
MADFGISAGQFVAVVWDKSSPVEALKGLVDKLQALTGNEGRVSVENIKQLLQCLVPGSTTLHSAEILAEIARILRPGGCLFLKEPVETAVDNNSKVKTASKLCSALTLSGLVEVKELQREPLTPEEVQSVREHLGHESDNLLFVQITGKKPNFEVGSSRQLKLSITKKSSPSVKPAVDPAAAKLWTLSANDMEDDSMDLIDSDELLDPEDLKKPDPASLRAASCGEGKKRKACKNCTCGLAEELEKEKSREQMSSQPKSACGNCYLGDAFRCASCPYLGMPAFKPGEKVLLSDSNLHDA

SEQ ID NO: 17116 - protein, 78 aa, Homo sapiens
MAGQFRSYVWDPLLILSQIVLMQTVYYGSLGLWLALVDGLVRSSPSLDQMFDAEILGFSTPPGRLSMMSFILNALTWS

SEQ ID NO: 17117 - protein, 611 aa, Homo sapiens
MHHQQRMAALGTDKELSDLLDFSAMFSPPVSSGKNGPTSLASGHFTGSNVEDRSSSGSWGNGGHPSPSRNYGDGTPYDHMTSRDLGSHDNLSPPFVNSRIQSKTERGSYSSYGRESNLQGCHQVYAPSASTADYNRDSPGYPSSKPATSTFPSSFFMQDGHHSSDPWSSSSGMNQPGYAGMLGNSSHIPQSSSYCSLHPHERLSYPSHSSADINSSLPPMSTFHRSGTNHYSTSSCTPPANGTDSIMANRGSGAAGSSQTGDALGKALASIYSPDHTNNSFSSNPSTPVGSPPSLSAGTAVWSRNGGQASSSPNYEGPLHSLQSRIEDRLERLDDAIHVLRNHAVGPSTAMPGGHGDMHGIIGPSHNGAMGGLGSGYGTGLLSANRHSLMVGTHREDGVALRGSHSLLPNQVPVPQLPVQSATSPDLNPPQDPYRGMPPGLQGQSVSSGSSEIKSDDEGDENLQDTKSSEDKKLDDDKKDIKSITRSRSSNNDDEDLTPEQKAEREKERRMANNARERLRVRDINEAFKELGRMVQLHLKSDKPQTKLLILHQAVAVILSLEQQVRERNLNPKAACLKRREEEKVSSEPPPLSLAGPHPGMGDASNHMGQM

SEQ ID NO: 17118 - protein, 111 aa, Homo sapiens
MTPQSLLQTTLFLLSLLFLVQGAHGRGHREDFRFCSQRNQTHRSSLHYKPTPDLRISIENSEEALTVHAPFPAAHPASRSFPDPRGLYHFCLYWNRHAGRLHLLYGKRDFL

SEQ ID NO: 17119 - protein, 525 aa, Homo sapiens
MAAVDSDVESLPRGGFRCCLCHVTTANRPSLDAHLGGRKHRHLVELRAARKAQGLRSVFVSGFPRDVDSAQLSEYFLAFGPVASVVMDKDKGVFAIVEMGDVGAREAVLSQSQHSLGGHRLRVRPREQKEFQSPASKSPKGAAPDSHQLAKALAEAADVGAQMIKLVGLRELSEAERQLRSLVVALMQEVFTEFFPGCVVHPFGSSINSFDVHGCDLDLFLDLGDLEEPQPVPKAPESPSLDSALASPLDPQALACTPASPPDSQPPASPQDSEALDFETPSSSLAPQTPDSALASETLASPQSLPPASPLLEDREEGDLGKASELAETPKEEKAEGAAMLELVGSILRGCVPGVYRVQTVPSARRPVVKFCHRPSGLHGDVSLSNRLALHNSRFLSLCSELDGRVRPLVYTLRCWAQGRGLSGSGPLLSNYALTLLVIYFLQTRDPPVLPTVSQLTQKAGEGEQVEVDGWDCSFPRDASRLEPSINVEPLIRTARGECGGSTARGTWHPRRVPEWQSGGWLQQY

SEQ ID NO: 17120 - protein, 70 aa, Homo sapiens
MTPQSLLQTTLFLLSLLFLVQGAHGRGHREDFRFCSQRNQTHRSSLHYKPTPDLRISIENSEEALTVHAP

SEQ ID NO: 17121 - protein, 58 aa, Homo sapiens
MRLHRLRARLSAVACGLLLLLVRGQGEAPSEGRQGPGSDLPNAAEAEPDSAGGQAPGR

SEQ ID NO: 17122 - protein, 152 aa, Homo sapiens
MAACGRVRRMFRLSAALHLLLLFAAGAEKLPGQGVHSQGQGPGANFVSFVGQPPFPAGGPPARRGGAGAGGGWKLAEEESCREDVTRVCPKHTWSNNLAVLECLQDVREPENEISSDCNHLLWNYKLNLTTDPKFESVAREVCKSTITEIKE

SEQ ID NO: 17123 - protein, 40 aa, Homo sapiens
MERAVRVESGVLVGVVCLLLACPATATGYQDAVWARSCSA

SEQ ID NO: 17124 - protein, 57 aa, Homo sapiens
MAAAAWLQVLPVILLLLGAHPSPLSFFSAGPATVAAADRSKWHIPIPSLMENLVTCL

SEQ ID NO: 17125 - protein, 412 aa, Homo sapiens
MKLLTRAGSFSRFYSLKVAPKVKATAAPAGAPPQPQDLEFTKLPNGLVIASLENYSPVSRIGLFIKAGSRYEDFSNLGTTHLLRLTSSLTTKGASSFKITRGIEAVGGKLSVTATRENMAYTVECLRGDVDILMEFLLNVTTAPEFRRWEVADLQPQLKIDKAVAFQNPQTHVIENLHAAAYRNALANPLYCPDYRIGKVTSEELHYFVQNHFTSARMALIGLGVSHPVLKQVAEQFLNMRGGLGLSGAKANYRGGEIREQNGDSLVHAAFVAESAVAGSAEANAFSVLQHVLGAGPHVKRGSNTTSHLHQAVAKATQQPFDVSAFNASYSDSGLFGIYTISQATAAGDVIKAAYNQVKTIAQGNLSNTDVQAAKRQRSLFLARSQWQQVEIWDIHLLLMSCNTDAHITGES

SEQ ID NO: 17126 - protein, 256 aa, Homo sapiens
MTPQSLLQTTLFLLSLLFLVQGAHGRGHREDFRFCSQRNQTHRSSLHYKPTPDLRISIENSEEALTVHAPFPAAHPASRSFPDPRGLYHFCLYWNRHAGRLHLLYGKRDFLLSDKASSLLCFQHQEESLAQGPPLLATSVTSWWSPQNISLPSAASFTFSFHSPPHTAAHNASVDMCELKRDLQLLSQFLKHPQKASRRPSAAPASQQLQSLESKLTSVRFMGDMVSFEEDRINATVWKLQPTAGLQDLHIHSRQE

SEQ ID NO: 17127 - protein, 355 aa, Homo sapiens
MIEAEEQQPCKTDFYSELPKVELHAHLNGSISSHTMKKLIAQKPDLKIHDQMTVIDKGKKRTLEECFQMFQTIHQLTSSPEDILMVTKDVIKEFADDGVKYLELRSTPRRENATGMTKKTYVESILEGIKQSKQENLDIDVRYLIAVDRRGGPLVAKETVKLAEEFFLSTEGTVLGLDLSGDPTVGQAKDFLEPLLEAKKAGLKLALHLSEIPNQKKETQILLDLLPDRIGHGTFLNSGEGGSLDLVDFVRQHRIPLELCLTSNVKSQTVPSYDQHHFGFWYSIAHPSVICTDDKGVFATHLSQEYQLAAETFNLTQSQVWDLSYESINYIFASDSTRSELRKKWNHLKPRVLHI

SEQ ID NO: 17128 - protein, 124 aa, Homo sapiens
MGWLCSGLLFPVSCLVLLQVASSGNMKVLQEPTCVSDYMSISTCEWKMNGPTNCSTELRLLYQLVFLLSEAHTCIPENNGGAGCVCHLLMDDVVSADNYTLDLWAGQQLLWKGSFKPSEHVQNL

SEQ ID NO: 17129 - protein, 118 aa, Homo sapiens
MTPQSLLQTTLFLLSLLFLVQASASSGAHGRGHREDFRFCSQRNQTHRSSLHYKPTPDLRISIENSEEALTVHAPFPAAHPASRSFPDPRGLYHFCLYWNRHAGRLHLLYGKRDFLLS

SEQ ID NO: 17130 - protein, 154 aa, Homo sapiens
MTPQSLLQTTLFLLSLLFLVQGAHGRGHREDFRFCSQRNQTHRSSLHYKPTPDLRISIENSEEALTVHAPFPAAHPASRSFPDPRGLYHFCLYWNRHAGRLHLLYGKRDFLLSDKASSLLCFQHQEESLAQGPPLLATSVTSWWSPQNISLPSA

SEQ ID NO: 17131 - protein, 288 aa, Homo sapiens
WLSMASLVIFMQLRYLFHEVQRRIRRHKNYLRVVGNMEARFAVATPEELAVNNDDCAICWDSMQAARKLPCGHLFHNSCLRSWLEQDTSCPTCRMSLNIADNNRVREEHQGENLDENLVPVAAAEGRPRLNQHNHFFHFDGDDSSMRVTAPEDVPVGQEVEVVDSDTDAPDLWSRIASWLPSFSVEVMHTTNILGITQASNSQLNAMAHQIQEMFPQVPYHLVLQDLQLTRSVEITTDNILEGRIQVPFPTQRSDSIRPALNSPVERPSSDQEEGETSAQTERVPLDL

SEQ ID NO: 17132 - protein, 300 aa, Homo sapiens
MEEPGMDTEAETVATEAPARPVNCLEAEAAAGAAAEDSGAARGSLQPAPAQPPGDPAAQASVSNGEDAGGGAGRELVDLKIIWNKTKHDVKFPLDSTGSELKQKIHSITGLPPAMQKVMYKGLVPEDKTLREIKVTSGAKIMVVGSTINDVLAVNTPKDAAQQDAKAEENKKEPLCRQKQHRKVLDKGKPEDVMPSVKGAQERLPTVPLSGMYNKSGGKVRLTFKLEQDQLWIGTKERTEKLPMGSIKNVVSEPIEGHEDYHMMAFQLGPTEASYYWVYWVPTQYVDAIKDTVLGKWQYF

SEQ ID NO: 17133 - protein, 67 aa, Homo sapiens
MQPRTPLVLCVLLSQVLLLTSAEDLDCTPGFQQKVFHINQPAEFIEDQSILNCKQCHSKMLLDSSHI

SEQ ID NO: 17134 - protein, 93 aa, Homo sapiens
MVALPMVLVLLLVLSRGESELDAKIPSTGDATEWRNPHLSMLGSCQPAPSCQKCILSHPSCAWCKQLNFTASGEAEARRCARREELLARGCPL

SEQ ID NO: 17135 - protein, 1682 aa, Homo sapiens
MASWTSPWWVLIGMVFMHSPLPQTTAEKSPGAYFLPEFALSPQGSFLEDTTGEQFLTYRYDDQTSRNTRSDEDKDGNWDAWGDWSDCSRTCGGGASYSLRRCLTGRNCEGQNIRYKTCSNHDCPPDAEDFRAQQCSAYNDVQYQGHYYEWLPRYNDPAAPCALKCHAQGQNLVVELAPKVLDGTRCNTDSLDMCISGICQAVGCDRQLGSNAKEDNCGVCAGDGSTCRLVRGQSKSHVSPEKREENVIAVPLGSRSVRITVKGPAHLFIESKTLQGSKGEHSFNSPGVFLVENTTVEFQRGSERQTFKIPGPLMADFIFKTRYTAAKDSVVQFFFYQPISHQWRQTDFFPCTVTCGGGYQLNSAECVDIRLKRVVPDHYCHYYPENVKPKPKLKECSMDPCPSSDGFKEIMPYDHFQPLPRWEHNPWTACSVSCGGGIQRRSFVCVEESMHGEILQVEEWKCMYAPKPKVMQTCNLFDCPKWIAMEWSQCTVTCGRGLRYRVVLCINHRGEHVGGCNPQLKLHIKEECVIPIPCYKPKEKSPVEAKLPWLKQAQELEETRIATEEPTFIPEPWSACSTTCGPGVQVREVKCRVLLTFTQTETELPEEECEGPKLPTERPCLLEACDESPASRELDIPLPEDSETTYDWEYAGFTPCTATCVGGHQEAIAVCLHIQTQQTVNDSLCDMVHRPPAMSQACNTEPCPPRWHVGSWGPCSATCGVGIQTRDVYCLHPGETPAPPEECRDEKPHALQACNQFDCPPGWHIEEWQQCSRTCGGGTQNRRVTCRQLLTDGSFLNLSDELCQGPKASSHKSCARTDCPPHLAVGDWSKCSVSCGVGIQRRKQVCQRLAAKGRRIPLSEMMCRDLPGLPLVRSCQMPECSKIKSEMKTKLGEQGPQILSVQRVYIQTREEKRINLTIGSRAYLLPNTSVIIKCPVRRFQKSLIQWEKDGRCLQNSKRLGITKSGSLKIHGLAAPDIGVYRCIAGSAQETVVLKLIGTDNRLIARPALREPMREYPGMDHSEANSLGVTWHKMRQMWNNKNDLYLDDDHISNQPFLRALLGHCSNSAGSTNSWELKNKQFEAAVKQGAYSMDTAQFDELIRNMSQLMETGEVSDDLASQLIYQLVAELAKAQPTHMQWRGIQEETPPAAQLRGETGSVSQSSHAKNSGKLTFKPKGPVLMRQSQPPSISFNKTINSRIGNTVYITKRTEVINILCDLITPSEATYTWTKDGTLLQPSVKIILDGTGKIQIQNPTRKEQGIYECSVANHLGSDVESSSVLYAEAPVILSVERNITKPEHNHLSVVVGGIVEAALGANVTIRCPVKGVPQPNITWLKRGGSLSGNVSLLFNGSLLLQNVSLENEGTYVCIATNALGKAVATSVLHLLERRWPESRIVFLQGHKKYILQATNTRTNSNDPTGEPPPQEPFWEPGNWSHCSATCGHLGARIQRPQCVMANGQEVSEALCDHLQKPLAGFEPCNIRDCPARWFTSVWSQCSVSCGEGYHSRQVTCKRTKANGTVQVVSPRACAPKDRPLGRKPCFGHPCVQWEPGNRCPGRCMGRAVRMQQRHTACQHNSSDSNCDDRKRPTLRRNCTSGACDVCWHTGPWKPCTAACGRGFQSRKVDCIHTRSCKPVAKRHCVQKKKPISWRHCLGPSCDSTYTSQTATNKGAASHVKRDKPLEGS

SEQ ID NO: 17136 - protein, 69 aa, Homo sapiens
MVPEPKIIDAALRACRRLNDFASTVRILEVVKDKAGPHKEIYPYVIQELRPTLNELGISTPEELGLDKV

SEQ ID NO: 17137 - protein, 340 aa, Homo sapiens
MSVSGLKAELKFLASIFDKNHERFRIVSWKLDELHCQFLVPQQGSPHSLPPPLTLHCNITESYPSSSPIWFVDSEDPNLTSVLERLEDTKNNNLNGTTEEVTSEEEEEEEEMAEDIEDLDHYEMKEEEPISGKKSEDEGIEKENLAILEKIRKTQRQDHLNGAVSGSVQASDRLMKELRDIYRSQSYKTGIYSVELINDSLYDWHVKLQKVDPDSPLHSDLQILKEKEGIEYILLNFSFKDNFPFDPPFVRVVLPVLSGGYVLGGGALCMELLTKQGWSSAYSIESVIMQINATLVKGKARVQFGANKNQYNLARAQQSYNSIVQIHEKNGWYTPPKEDG

SEQ ID NO: 17138 - protein, 903 aa, Homo sapiens
MATSADSPSSPLGAEDLLSDSSEPPGLNQVSSEVTSQLYASLRLSRQAEATARAQLYLPSTSPPHEGLDGFAQELSRSLSVGLEKNLKKKDGSKHIFEMESVRGQLQTMLQTSRDTAYRDPLIPGAGSERREEDSFDSDSTATLLNTRPLQDLSPSSSAQALEELFPRYTSLRPGPPLNPPDFQGLRDALDSEHTRRKHCERHIQSLQTRVLELQQQLAVAVAADRKKDTMIEQLDKTLARVVEGWNRHEAERTEVLRGLQEEHQAAELTRSKQQETVTRLEQSLSEAMEALNREQESARLQQRERETLEEERQALTLRLEAEQQRCCVLQEERDAARAGQLSEHRELETLRAALEEERQTWAQQEHQLKEHYQALQEESQAQLEREKEKSQREAQAAWETQHQLALVQSEVRRLEGELDTARRERDALQLEMSLVQARYESQRIQLESELAVQLEQRVTERLAQAQESSLRQAASLREHHRKQLQDLSGQHQQELASQLAQFKVEMAEREERQQQVAEDYELRLAREQARVCELQSGNQQLEEQRVELVERLQAMLQAHWDEANQLLSTTLPPPNPPAPPAGPSSPGPQEPEKEERRVWTMPPMAVALKPVLQQSREARDELPGAPPVLCSSSSDLSLLLGPSFQSQHSFQPLEPKPDLTSSTAGAFSALGAFHPDHRAERPFPEEDPGPDGEGLLKQGLPPAQLEGLKNFLHQLLETVPQNNENPSVDLLPPKSGPLTVPSWEEAPQVPRIPPPVHKTKVPLAMASSLFRVPEPPSSHSQGSGPSSGSPERGGDGLTFPRQLMEVSQLLRLYQARGWGALPAEDLLLYLKRLEHSGTDGRGDNVPRRNTDSRLGEIPRKEIPSQAVPRRLATAPKTEKPPARKKSGHPAPSSMRSRGGVWR

SEQ ID NO: 17139 - protein, 121 aa, Homo sapiens
MTDRNRDKKSTSPSNSDTEMKSEQLPPCVNPGNPVFSCMLDPKTLQTATSLSKPQMIMYKTNSSHYGEFLPIPQFFPCNYTPKEQVFSSHIRATGFYQNNTLNTAPDRTRTLDFPNIQHTL

SEQ ID NO: 17140 - protein, 347 aa, Homo sapiens
MLGRSGYRALPLGDFDRFQQSSFGFLGSQKGCLSPERGGVGTGADVPQSWPSCLCHGLISFLGFLLLLVTFPISGWFALKLASKDGAVLSVGADVQFRIWDPVLSVMTVKDLNTATRMTAQNAMTKALLKRPLREIQMEKLKISDQLLLEINDVTRAWGLEVDRVELAVEAVLQPPQDSPAGPNLDSTLQQLALHFLGGSMNSMAGGAPSPGPDTVEMVSEVEPPAPQVGARSSPKQPLAEGLLTALQPFLSEALVSQVGACYQFNVVLPSGTQSAYFLDLTTGRGRVGHGVPDGIPDVVVEMAEADLRALLCRELRPLGAYMSGRLKVKGDLAMAMKLEAVLRALK

SEQ ID NO: 17141 - protein, 61 aa, Homo sapiens
MRLLAGWLCLSLASVWLARRMWTLRSPLTRSLGMCATERNYANHSRLSLFRVTLIKEHRSS

SEQ ID NO: 17142 - protein, 88 aa, Homo sapiens
MTSSRLWFSLLLAAAFAGRATALWPWPQNFQTSDQRYVLYPNNFQFQYDVSSAAQPGCSVLDEAFQRYRDLLFGSGSWPRPYLTANMY

SEQ ID NO: 17143 - protein, 278 aa, Homo sapiens
MSGSSLPSALALSLLLVSGSLLPGPGAAQNEPRIVTSEEVIIRDSPVLPVTLQCNLTSSSHTLTYSYWTKNGVELSATRKNASNMEYRINKPRAEDSGEYHCVYHFVSAPKANATIEVKAAPDITGHKRSENKNEGQDATMYCKSVGYPHPDWIWRKKENGMPMDIVNTSGRFFIINKENYTELNIVNLQITEDPGEYECNATNAIGSASVVTVLRVRSHLAPLWPFLGILAEIIILVVIIVVYEKRKRPDEVPDAGPMKTNSTNNHKDKNLRQRNTN

SEQ ID NO: 17144 - protein, 156 aa, Homo sapiens
MPVPASWPHPPCPFLLLTLLLGLTGVAGEDELQVIQPEKSVSVAAGESATLRCAMTSLIPVGPIMWFRGAGAGRELIYNQKEGHFPRVTTVSELTKRNNLDFSISISNITPADAGTYYCVKFRKGSPDDVEFKSGAGTELSVREAALAPTAPLLVA

SEQ ID NO: 17145 - protein, 282 aa, Homo sapiens
MAPSPTKRKDRSDEKSKDRSKDKGATKESSEKDRGRDKTRKRRSASSGSSSTRSRSSSTSSSGSSTSTGSSSGSSSSSASSRSGSSSTSRSSSSSSSSGSPSPSRRRHDNRRRSRSKSKPPKRDEKERKRRSPSPKPTKVHIGRLTRNVTKDHIMEIFSTYGKIKMIDMPVERMHPHLSKGYAYVEFENPDEAEKALKHMDGGQIDGQEITATAVLAPWPRPPPRRFSPPRRMLPPPPMWRRSPPRMRRRSRSPRRRSPVRRRSRSPGRRRHRSRSSSNSSR

SEQ ID NO: 17146 - protein, 315 aa, Homo sapiens
MATPRGLGALLLLLLLPTSGQEKPTEGPRNTCLGSNNMYDIFNLNDKALCFTKCRQSGSDSCNVENLQRYWLNYEAHLMKEGLTQKVNTPFLKALVQNLSTNTAEDFYFSLEPSQVPRQVMKDEDKPPDRVRLPKSLFRSLPGNRSVVRLAVTILDIGPGTLFKGPRLGLGDGSGVLNNRLVGLSVGQMHVTKLAEPLEIVFSHQRPPPNMTLTCVFWDVTKGTTGDWSSEGCSTEVRPEGTVCCCDHLTFFALLLRPTLDQSTVHILTRISQAGCGVSMIFLAFTIILYAFLRPARPDGHRHWECQQLRPLHHP

SEQ ID NO: 17147 - protein, 130 aa, Homo sapiens
MGPLPVCLPIMLLLLLPSLLLLLLLPGPGSGEASRILRVHRRGILELAGTVGCVGPRTPIAYMKYGCFCGLGGHGQPRDAIDWCCHGHDCCYTRAEEAGCSPKTERYSWQCVNQSVLCVLLCHPGWSAVV

SEQ ID NO: 17148 - protein, 330 aa, Homo sapiens
MSSTQFNKGPSYGLSAEVKNRLLSKYDPQKEAELRTWIEGLTGLSIGPDFQKGLKDGTILCTLMNKLQPGSVPKINRSMQNWHQLENLSNFIKAMVSYGMNPVDLFEANDLFESGNMTQVQVSLLALAGKGLDLGSLAALCWYSRPLSLTQAKTKGLQSGVDIGVKYSEKQERNFDDATMKAGQCVIGLQMGTNKCASQSGMTAYGTRRHLYDPKNHILPPMDHSTISLQMGTNKCASQVGMTAPGTRRHIYDTKLGTDKCDNSSMSLQMGYTQGANQSGQVFGLGRQIYDPKYCPQGTVADGAPSGTGDCPDPGEVPEYPPYYQEEAGY

SEQ ID NO: 17149 - protein, 83 aa, Homo sapiens
MLATRVFSLVGKRAISTSVCVRAHESVVKSEDFSLPAYMDRRDHPLPEVAHVKHLSASQKALKEKEKASWSSLSMDEKVECGY

SEQ ID NO: 17150 - protein, 63 aa, Homo sapiens
MAAWKSWTALRLCATVVVLDMVVCKGFVEDLDESFKENRNDDIWLVDALLQSLEFEVIQQLSY

SEQ ID NO: 17151 - protein, 62 aa, Homo sapiens
MPGEQQAEEEEEEEMQEEMVLLVKGEEDEGEEKYEVVKLKIPMDNKERHDLALSPRLECSGT

SEQ ID NO: 17152 - protein, 186 aa, Homo sapiens
MGLLLLVPLLLLPGSYGLPFYNGFYYSNSANDQNLGNGHGKDLLNGVKLVVETPEETLFTYQGASVILPCRYRYEPALVSPRRVRVKWWKLSENGAPEKDVLVAIGLRHRSFGDYQGRVHLRQDKEHDVSLEIQDLRLEDYGRYRCEVIDGLEDESGLVELELRGWGCVSSHLSHMLGRQFGDRGR

SEQ ID NO: 17153 - protein, 140 aa, Homo sapiens
MTPQSLLQTTLFLLSLLFLVQGAHGRGHREDFRFCSQRNQTHRSSLHYKPTPDLRISIENSEEALTVHAPFPAAHPASRSFPDPRGLYHFCLYWNRHAGRLHLLYGKRDFLLSDKASSLLCFQHQEESLAQGPPLLATSV

SEQ ID NO: 17154 - protein, 509 aa, Homo sapiens
MTSSRLWFSLLLAAAFAGRATALWPWPQNFQTSDQRYVLYPNNFQFQYDVSSAAQPGCSVLDEAFQRYRDLLFGSGSWPRPYLTGKRHTLEKNVLVVSVVTPGCNQLPTLESVENYTLTINDDQCLLLSETVWGALRGLETFSQLVWKSAEGTFFINKTEIEDFPRFPHRGLLLDTSRHYLPLSSILDTLDVMAYNKLNVFHWHLVDDPSFPYESFTFPELMRKGSYNPVTHIYTAQDVKEVIEYARLRGIRVLAEFDTPGHTLSWGPGIPGLLTPCYSGSEPSGTFGPVNPSLNNTYEFMSTFFLEVSSVFPDFYLHLGGDEVDFTCWKSNPEIQDFMRKKGFGEDFKQLESFYIQTLLDIVSSYGKGYVVWQEVFDNKVKIQPDTIIQVWREDIPVNYMKELELVTKAGFRALLSAPWYLNRISYGPDWKDFYIVEPLAFEGTPEQKALVIGGEACMWGEYVDNTNLVPRLWPRAGAVAERLWSNKLTSDLTFAYERLSHFRCELLR

SEQ ID NO: 17155 - protein, 175 aa, Homo sapiens
MQPRTPLVLCVLLSQVLLLTSAEDLDCTPGFQQKVFHINQPAEFIEDQSILNLTFSDCKGNDKLRYEVSSPYFKVNSDGGLVALRNITAVGKTLFVHARTPHAEDMAELVIVGGKDIQGSLQDIFKFARTSPVPRQKRSIVVSPILIPENQRQPFPRDVGKMKIWQVLCLARWLT

SEQ ID NO: 17156 - protein, 42 aa, Homo sapiens
MTPQSLLQTTLFLLSLLFLVQGAHGRGHREDFRFCSQRNQTH

SEQ ID NO: 17157 - protein, 222 aa, Homo sapiens
MSALGAVIALLLWGQLFAVDSGNDVTDIADDGCPKPPEIAHGYVEHSVRYQCKNYYKLRTEGDGVYTLNNEKQWINKAVGDKLPECEAGATLINEQWLLTTAKNLFLNHSENATAKDIAPTLTLYVGKKQLVEIEKVVLHPNYSQVDIGLIKLKQKVSVNERVMPICLPSKDYAEVGRVGYVSGWGRNANFKFTDHLKYVMLPVADQDQCIRHYEGSTVPEK

SEQ ID NO: 17158 - protein, 509 aa, Homo sapiens
MSENEEEEISQQEGSGDYEVEEIPFGLEPQSPGFEPQSPEFEPQSPRFEPESPGFESRSPGLVPPSPEFAPRSPESDSQSPEFESQSPRYEPQSPGYEPRSPGYEPRSPGYESESSRYESQNTELKTQSPEFEAQSSKFQEGAEMLLNPEEKSPLNISVGVHPLDSFTQGFGEQPTGDLPIGPPFEMPTGALLSTPQFEMLQNPLGLTGALRGPGRRGGRARGGQGPRPNICGICGKSFGRGSTLIQHQRIHTGEKPYKCEVCSKAFSQSSDLIKHQRTHTGERPYKCPRCGKAFADSSYLLRHQRTHSGQKPYKCPHCGKAFGDSSYLLRHQRTHSHERPYSCTECGKCYSQNSSLRSHQRVHTGQRPFSCGICGKSFSQRSALIPHARSHAREKPFKCPECGKRFGQSSVLAIHARTHLPGRTYSCPDCGKTFNRSSTLIQHQRSHTGERPYRCAVCGKGFCRSSTLLQHHRVHSGERPYKCDDCGKAFSQSSDLIRHQRTHAAGRR

SEQ ID NO: 17159 - protein, 1253 aa, Homo sapiens
MSGPTDETAGDLPVKDTGLNLFGMGGLQETSTTRTMKSRQAVSRVSREELEDRFLRLHDENILLKQHARKQEDKIKRMATKLIRLVNDKKRYERVGGGPKRLGRDVEMEEMIEQLQEKVHELEKQNETLKNRLISAKQQLQTQGYRQTPYNNVQSRINTGRRKANENAGLQECPRKGIKFQDADVAETPHPMFTKYGNSLLEEARGEIRNLENVIQSQRGQIEELEHLAEILKTQLRRKENEIELSLLQLREQQATDQRSNIRDNVEMIKLHKQLVEKSNALSAMEGKFIQLQEKQRTLRISHDALMANGDELNMQLKEQRLKCCSLEKQLHSMKFSERRIEELQDRINDLEKERELLKENYDKLYDSAFSAAHEEQWKLKEQQLKVQIAQLETALKSDLTDKTEILDRLKTERDQNEKLVQENRELQLQYLEQKQQLDELKKRIKLYNQENDINADELSEALLLIKAQKEQKNGDLSFLVKVDSEINKDLERSMRELQATHAETVQELEKTRNMLIMQHKINKDYQMEVEAVTRKMENLQQDYELKVEQYVHLLDIRAARIHKLEAQLKDIAYGTKQYKFKPEIMPDDSVDEFDETIHLERGENLFEIHINKVTFSSEVLQASGDKEPVTFCTYAFYDFELQTTPVVRGLHPEYNFTSQYLVHVNDLFLQYIQKNTITLEVHQAYSTEYETIAACQLKFHEILEKSGRIFCTASLIGTKGDIPNFGTVEYWFRLRVPMDQAIRLYRERAKALGYITSNFKGPEHMQSLSQQAPKTAQLSSTDSTDGNLNELHITIRCCNHLQSRASHLQPHPYVVYKFFDFADHDTAIIPSSNDPQFDDHMYFPVPMNMDLDRYLKSESLSFYVFDDSDTQENIYIGKVNVPLISLAHDRCISGIFELTDHQKHPAGTIHVILKWKFAYLPPSGSITTEDLGNFIRSEEPEVVQRLPPASSVSTLVLAPRPKPRQRLTPVDKKVSFVDIMPHQSDETSPPPEDRKEISPEVEHIPEIEINMLTVPHVPKVSQEGSVDEVKENTEKMQQGKDDVSLLSEGQLAEQSLASSEDETEITEDLEPEVEEDMSASDSDDCIIPGPISKNIKQPSEKIRIEIIALSLNDSQVTMDDTIQRLFVECRFYSLPAEETPVSLPKPKSGQWVYYNYSNVIYVDKENNKAKRDILKAILQKQEMPNRSLRFTVVSDPPEDEQDLECEDIGVAHVDLADMFQEGRDLIEQNIDGMGESVAQFVQPTIAELQTLY

SEQ ID NO: 17160 - protein, 118 aa, Homo sapiens
MTPQSLLQTTLFLLSLLFLVQAPATGSHLQPLPPQVPTAGATGKTFASAASGTRHTGAASTTNPHQTCASPSRTPKRPSQSMPLSLQPTLLPDPSLTPGASTTSASTGTDMLGDYIFS

SEQ ID NO: 17161 - protein, 828 aa, Homo sapiens
MAGRGWGALWVCVAAATLLHAGGLARADCWLIEGDKGFVWLAICSQNQPPYEAIPQQINSTIVDLRLNENRIRSVQYASLSRFGNLTYLNLTKNEIGYIEDGAFSGQFNLQVLQLGYNRLRNLTEGMLRGLGKLEYLYLQANLIEVVMASSFWECPNIVNIDLSMNRIQQLNSGTFAGLAKLSVCELYSNPFYCSCELLGFLRWLAAFTNATQTYDRMQCESPPVYSGYYLLGQGRRGHRSILSKLQSVCTEDSYAAEVVGPPRPASGRSQPGRSPPPPPPPEPSDMPCADDECFSGDGTTPLVALPTLATQAEARPLIKVKQLTQNSATITVQLPSPFHRMYTLEHFNNSKASTVSRLTKAQEEIRLTNLFTLTNYTYCVVSTSAGLRHNHTCLTICLPRLPSPPGPVPSPSTATHYIMTILGCLFGMVLVLGAVYYCLRRRRRQEEKHKKAASAAAAGSLKKTIIELKYGPELEAPGLAPLSQGPLLGPEAVTRIPYLPAAGEVEQYKLVESADTPKASKGSYMEVRTGDPPERRDCELGRPGPDSQSSVAEISTIAKEVDKVNQIINNCIDALKSESTSFQGVKSGPVSVAEPPLVLLSEPLAAKHGFLAPGYKDAFGHSLQRHHSVEAAGPPRASTSSSGSVRSPRAFRAEAVGVHKAAAAEAKYIEKGSPAADAILTVTPAAAVLRAEAEKGRQYGEHRHSYPGSHPAEPPAPPGPPPPPPHEGLGRKASILEPLTRPRPRDLAYSQLSPQYHSLSYSSSPEYTCRASQSIWERFRLSRRRHKEEEEFMAAGHALRKKVQFAKDEDLHDILDYWKGVSAQHKS

SEQ ID NO: 17162 - protein, 16 aa, Homo sapiens
MKLVNIWLLLLVVLLC

SEQ ID NO: 17163 - protein, 400 aa, Homo sapiens
MENQVLTPHVYWAQRHRELYLRVELSDVQGLTLLPRLECSSVIIAHRSLELLGLSSPPGSAYQVGLQNPAISITENVLHFKAQGHGAKGDNVYEFHLEFLDLVKPEPVYKLTQRQVNITVQKKVSQWWERLTKQEKRPLFLAPDFDRWLDESDAEMELRAKEEERLNKLRLESEGSPETLTNLRKGYLFMYNLVQFLGFSWIFVNLTVRFCILGKESFYDTFHTVADMMYFCQMLAVVETINAAIGVTTSPVLPSLIQLLGRNFILFIIFGTMEEMQNKAVVFFVFYLWSAIEIFRYSFYMLTCIDMDWKVLTWLRYTLWIPLYPLGCLAEAVSVIQSIPIFNETGRFSFTLPYPVKIKVRFSFFLQIYLIMIFLGLYINFRHLYKQRRRRYGQKKKKIH

SEQ ID NO: 17164 - protein, 69 aa, Homo sapiens
MATPRGLGALLLLLLLPTSGQEKPTEGPRNTCLGSNNMYDIFNLNDKALCFTKCRQSGSDSCNVENLQR

SEQ ID NO: 17165 - protein, 204 aa, Homo sapiens
MAAANPWDPASAPNGAGLVLGHFIASGMVNQKNLEIELLKLEKDTADVVHPFFLAQKCHTLQSMNNHLEAVLKEKRSLRQRLLKPMCQENLPIEAVYHRYMVHLLELAVTFIERLETHLETIRNIPHLAANLKKMNQALAKMDILVTETEELAENILKWRKQQNEVSSCIPKILAEESYLYKHDIIMPPLPFTSKVHVQTINAK

SEQ ID NO: 17166 - protein, 89 aa, Homo sapiens
MAAWKSWTALRLCATVVVLDMVVCKGFVEDLDESFKENRNDDIWLVDFYAPWCGHCKKLEPIWNEVGLEMKSIGSPVKVGKMDATSYSN

SEQ ID NO: 17167 - protein, 294 aa, Homo sapiens
MAAGRLLLYTGLSLALCALGMLAVAICSDHWYETDARKHRDRCKAFNTRRVDPGFIYNNNNNLPLRASRSRLDRWEGKLLRARNRRQLFAMSPADECSRQYNSTNMGLWRKCHRQGFDPEIAALIRKGEIERCTYIKYHYSSATIPRNLTFNITKTIRQDEWHALHLRRMTAGFMGMAVAIILFGWIIGVLGCCWDRGLMQYVAGLLFLMGGTFCIISLCTCVAGINFELSRYPRYLYGLPDDISHGYGWSMFCAWGGLGLTLISGFFCTLAPSVQPVPRTNYPKSRPENGTVC

SEQ ID NO: 17168 - protein, 90 aa, Homo sapiens
MTPQSLLQTTLFLLSLLFLVQAPATGSHLQPLPPQVPTAGATGKTFASAASGTRHTGAASTTNPHQTCASPSRTPKRPSQSMPLSLQPTL

SEQ ID NO: 17169 - protein, 80 aa, Homo sapiens
MSVPGPSSPDGALTRPPYCLEAGEPTPGLSDTSPDEGLIEDLTIEDKAVEQLAEGLLSHYLPDLQRSKQALQELTTKLYC

SEQ ID NO: 17170 - protein, 146 aa, Homo sapiens
MIVFGWAVFLASRSLGQGLLLTLEEHIAHFLGTGGAATTMGNSCICRDDSGTDDSVDTQQQQAENSAVPTADTRSQPRDPVRPPRRGRGPHEPRRKKQNVDGLVLDTLAVIRTLVDNDQEPPYSMITLHEMAETDEGWLDVVQSLI

SEQ ID NO: 17171 - protein, 69 aa, Homo sapiens
MGFPAAALLCALCCGLLAPAARAGYSEERCSWRGRPRRTRTSAAAWPPSALSCARTGAPSCPRRPTVSA

SEQ ID NO: 17172 - protein, 666 aa, Homo sapiens
MIHELLLALSGYPGSIFTWNKRSGLQVSQDFPFLHPSETSVLNRLCRLGTDYIRFTEFIEQYTGHVQQQDHHPSQQGQGGLHGIYLRAFCTGLDSVLQPYRQALLDLEQEFLGDPHLSISHVNYFLDQFQLLFPSVMVVVEQIKSQKIHGCQILETVYKHSCGGLPPVRSALEKILAVCHGVMYKQLSAWMLHGLLLDQHEEFFIKQGPSSGNVSAQPEEDEEDLGIGGLTGKQLRELQDLRLIEEENMLAPSLKQFSLRVEILPSYIPVRVAEKILFVGESVQMFENQNVNLTRKGSILKNQEDTFAAELHRLKQQPLFSLVDFEQVVDRIRSTVAEHLWKLMVEESDLLGQLKIIKDFYLLGRGELFQAFIDTAQHMLKTPPTAVTEHDVNVAFQQSAHKVLLDDDNLLPLLHLTIEYHGKEHKDATQAREGPSRETSPREAPASGWAALGLSYKVQWPLHILFTPAVLEKYNVVFKYLLSVRRVQAELQHCWALQMQRKHLKSNQTDAIKWRLRNHMAFLVDNLQYYLQVDVLESQFSQLLHQINSTRDFESIRLAHDHFLSNLLAQSFILLKPVFHCLNEILDLCHSFCSLVSQNLGPLDERGAAQLSILVKGFSRQSSLLFKILSSVRNHQINSDLAQLLLRLDYNKYYTQAGGTLGSFGM

SEQ ID NO: 17173 - protein, 134 aa, Homo sapiens
MLHPETSPGRGHLLAVLLALLGTAWAEVWPPQLQEQAPMAGALNRKESFLLLSLHNRLRSWVQPPAADMRRLLVWATSSQLGCGRHLCSAGQAAIEAFVCAYSPRGNWEVNGKTIVPYKKGAWCSLCTASVSGC

SEQ ID NO: 17174 - protein, 125 aa, Homo sapiens
MTPQSLLQTTLFLLSLLFLVQAHPASRSFPDPRGLYHFCLYWNRHAGRLHLLYGKRDFLLSDKASSLLCFQHQEESLAQGPPLLATSVTSWWSPQNISLPSAASFTFSFHSPPHTAAHNASVDMC

SEQ ID NO: 17175 - protein, 749 aa, Homo sapiens
MVPAWLWLLCVSVPQVTLEMQDGHVLWGPQPVLVHVKDENDQVPHFSQAIYRARLSRGTRPGIPFLFLEASDRDEPGTANSDLRFHILSQAPAQPSPDMFQLEPRLGALALSPKGSTSLDHALERTYQLLVQVKDMGDQASGHQATATVEVSIIESTWVSLEPIHLAENLKVLYPHHMAQVHWSGGDVHYHLESHPPGPFEVNAEGNLYVTRELDREAQAEYLLQVRAQNSHGEDYAAPLELHVLVMDENDNVPICPPRDPTVSIPELSPPGTEVTRLSAEDADAPGSPNSHVVYQLLSPEPEDGVEGRAFQVDPTSGSVTLGVLPLRAGQNILLLVLAMDLAGAEGGFSSTCEVEVAVTDINDHAPEFITSQIGPISLPEDVEPGTLVAMLTAIDADLEPAFRLMDFAIERGDTEGTFGLDWEPDSGHVRLRLCKNLSYEAAPSHEVVVVVQSVAKLVGPGPGPGATATVTVLVERVMPPPKLDQESYEASVPISAPAGSFLLTIQPSDPISRTLRFSLVNDSEGWLCIEKFSGEVHTAQSLQGAQPGDTYTVLVEAQDTDEPRLSASAPLVIHFLKAPPAPALTLAPVPSQYLCTPRQDHGLIVSGPSKDPDLASGHGPYSFTLGPNPTVQRDWRLQTLNGSHAYLTLALHWVEPREHIIPVVVSHNAQMWQLLVRVIVCRCNVEGQCMRKVGRMKGMPTKLSAVGILVGTLVAIGIFLILIFTHWTMSRKKDPDQPADSVPLKATV

SEQ ID NO: 17176 - protein, 987 aa, Homo sapiens
MRCRNMFFSFKASLCGCGAATAPSLTAISCTLNCSCQSFKPGKINHRQCDQCKHGWVAHALSKLRIPPMYPTSQVEIVQSNVVFDISSLMLYGTQAIPVRLKILLDRLFSVLKQDEVLQILHALDWTLQDYIRGYVLQDASGKVLDHWSIMTSEEEVATLQQFLRFGETKSIVELMAIQEKEEQSIIIPPSTANVDIRAFIESCSHRSSSLPTPVDKGNPSSIHPFENLISNMTFMLPFQFFNPLPPALIGSLPEQYMLEQGHDQSQDPKQEVHGPFPDSSFLTSSSTPFQVEKDQCLNCPDAITKKEDSTHLSDSSSYNIVTKFERTQLSPEAKVKPERNSLGTKKGRVFCTACEKTFYDKGTLKIHYNAVHLKIKHKCTIEGCNMVFSSLRSRNRHSANPNPRLHMPMNRNNRDKDLRNSLNLASSENYKCPGFTVTSPDCRPPPSYPGSGEDSKGQPAFPNIGQNGVLFPNLKTVQPVLPFYRSPATPAEVANTPGILPSLPLLSSSIPEQLISNEMPFDALPKKKSRKSSMPIKIEKEAVEIANEKRHNLSSDEDMPLQVVSEDEQEACSPQSHRVSEEQHVQSGGLGKPFPEGERPCHRESVIESSGAISQTPEQATHNSERETEQTPALIMVPREVEDGGHEHYFTPGMEPQVPFSDYMELQQRLLAGGLFSALSNRGMAFPCLEDSKELEHVGQHALARQIEENRFQCDICKKTFKNACSVKIHHKNMHVKEMHTCTVEGCNATFPSRRSRDRHSSNLNLHQKALSQEALESSEDHFRAAYLLKDVAKEAYQDVAFTQQASQTSVIFKGTSRMGSLVYPITQVHSASLESYNSGPLSEGTILDLSTTSSMKSESSSHSSWDSDGVSEEGTVLMEDSDGNCEGSSLVPGEDEYPICVLMEKADQSLASLPSGLPITCHLCQKTYSNKGTFRAHYKTVHLRQLHKCKVPGCNTMFSSVRSRNRHSQNPNLHKSLASSPSHLQ

SEQ ID NO: 17177 - protein, 1086 aa, Homo sapiens
MACSPDAVVSPSSAFLRSGSVYEPLKSINLPRPDNETLWDKLDHYYRIVKSTLLLYQSPTTGLFPTKTCGGDQKAKIQDSLYCAAGAWALALAYRRIDDDKGRTHELEHSAIKCMRGILYCYMRQADKVQQFKQDPRPTTCLHSVFNVHTGDELLSYEEYGHLQINAVSLYLLYLVEMISSGLQIIYNTDEVSFIQNLVFCVERVYRVPDFGVWERGSKYNNGSTELHSSSVGLAKAALEAINGFNLFGNQGCSWSVIFVDLDAHNRNRQTLCSLLPRESRSHNTDAALLPCISYPAFALDDEVLFSQTLDKVVRKLKGKYGFKRFLRDGYRTSLEDPNRCYYKPAEIKLFDGIECEFPIFFLYMMIDGVFRGNPKQVQEYQDLLTPVLHHTTEGYPVVPKYYYVPADFVEYEKNNPGSQKRFPSNCGRDGKLFLWGQALYIIAKLLADELISPKDIDPVQRYVPLKDQRNVSMRFSNQGPLENDLVVHVALIAESQRLQVFLNTYGIQTQTPQQVEPIQIWPQQELVKAYLQLGINEKLGLSGRPDRPIGCLGTSKIYRILGKTVVCYPIIFDLSDFYMSQDVFLLIDDIKNALQFIKQYWKMHGRPLFLVLIREDNIRGSRFNPILDMLAALKKGIIGGVKVHVDRLQTLISGAVVEQLDFLRISDTEELPEFKSFEELEPPKHSKVKRQSSTPSAPELGQQPDVNISEWKDKPTHEILQKLNDCSCLASQAILLGILLKREGPNFITKEGTVSDHIERVYRRAGSQKLWSVVRRAASLLSKVVDSLAPSITNVLVQGKQVTLGAFGHEEEVISNPLSPRVIQNIIYYKCNTHDEREAVIQQELVIHIGWIISNNPELFSGMLKIRIGWIIHAMEYELQIRGGDKPALDLYQLSPSEVKQLLLDILQPQQNGRCWLNRRQIDGSLNRTPTGFYDRVWQILERTPNGIIVAGKHLPQQPTLSDMTMYEMNFSLLVEDTLGNIDQPQYRQIVVELLMVVSIVLERNPELEFQDKVDLDRLVKEAFNEFQKDQSRLKEIEKQDDMTSFYNTPPLGKRGTCSYLTKAVMNLLLEGEVKPNNDDPCLIS

SEQ ID NO: 17178 - protein, 65 aa, Homo sapiens
MKENYCLQAALVCLGMLCHSHAFAPERRGHLRPSFHGHHEKGKEGQVLQRSKRGWVWNQFFVIEE

SEQ ID NO: 17179 - protein, 49 aa, Homo sapiens
MTPQSLLQTTLFLLSLLFLVQGAHGRGHREDFRFCSQRNQTHRSSLHYK

SEQ ID NO: 17180 - protein, 107 aa, Homo sapiens
MTPQSLLQTTLFLLSLLFLVQGAHGRGHREDFRFCSQRNQTHRSSLHYKPTPDLRISIENSEEALTVHAPFPAAHPASRSFPDPRGLYHFCLYWNRHAGRLHLLYGK

SEQ ID NO: 17181 - protein, 103 aa, Homo sapiens
MTPQSLLQTTLFLLSLLFLVQASASSGAHGRGHREDFRFCSQRNQTHRSSLHYKPTPDLRISIENSEEALTVHAPFPAAHPASRSFPDPRGLYHFCLYWNRHA

SEQ ID NO: 17182 - protein, 192 aa, Homo sapiens
MGCSWRKTLSFFLVFVPIYLHGASSQEAAPVGPRKPFFERLRRLEEQFRRFQEVTWTHLQNIASNYNVSYNVDVRFRSLAEESQAVAQAVNRSQASVQGELAQLKAWVRKLQRRGRKFAAWAPPSFSQTPPPGTWSSSALVSSLPCEPCPSAAGSARPPAAWAPSCPTPPRTMTTSWCCTAETPCCPDPSTS

SEQ ID NO: 17183 - protein, 77 aa, Homo sapiens
MTPQSLLQTTLFLLSLLFLVQGAHGRGHREDFRFCSQRNQTHRSSLHYKPTPDLRISIENSEEALTVHAPFPAAHPA

SEQ ID NO: 17184 - protein, 403 aa, Homo sapiens
MAPISLSWLLRLATFCHLTVLLAGTSLNSGQHHGVTKCNITCSKMTSKIPVALLIHYQQNQASCGKRAIILETRQHRLFCADPKEQWVKDAMQHLDRQAAALTRNGGTFEKQIGEVKPRTTPAAGGMDESVVLEPEATGESSSLEPTPSSQEAQRALGTSPELPTGVTGSSGTRLPPTPKAQDGGPVGTELFRVPPVSTAATWQSSAPHQPGPSLWAEAKTSEAPSTQDPSTQASTASSPAPEENAPSEGQRVWGQGQSPRPENSLEREEMGPVPAHTDAFQDWGPGSMAHVSVVPVSSEGTPSREPVASGSWTPKAEEPIHATMDPQRLGVLITPVPDAQAATRRQAVGLLAFLGLLFCLGVAMFTYQSLQGCPRKMAGEMAEGLRYIPRSCGSNSYVLVPV

SEQ ID NO: 17185 - protein, 1906 aa, Homo sapiens
MVRERKCILCHIVYSSKKEMDEHMRSMLHHRELENLKGRDISHECRVCGVTEVGLSAYAKHISGQLHKDNVDAQEREDDGKGEEEEEDYFDKELIQLIKQRKEQSRQDEPSNSNQEINSDDRRPQWRREDRIPYQDRESYSQPAWHHRGPPQRDWKWEKDGFNNTRKNSFPHSLRNGGGPRGRSGWHKGVAGGSSTWFHNHSNSGGGWLSNSGAVDWNHNGTGRNSSWLSEGTGGFSSWHMNNSNGNWKSSVRSTNNWNYSGPGDKFQPGRNRNSNCQMEDMTMLWNKKSNKSNKYSHDRYNWQRQENDKLGTVATYRGPSEGFTSDKFPSEGLLDFNFEQLESQTTKQADTATSKVSGKNGSAAREKPRRWTPYPSQKTLDLQSGLKDITGNKSEMIEKPLFDFSLITTGIQEPQTDETRNSPTQKTQKEIHTGSLNHKASSDSAASFEVVRQCPTAEKPEQEHTPNKMPSLKSPLLPCPATKSLSQKQDPKNISKNTKTNFFSPGEHSNPSNKPTVEDNHGPYISKLRSSCPHVLKGNKSTFGSQKQSGDNLNDTLRKAKEVLQCHESLQNPLLSTSKSTRNYAKASRNVEESEKGSLKIEFQVHALEDESDGETSDTEKHGTKIGTLGSATTELLSGSTRTADEKEEDDRILKTSRELSTSPCNPIVRQKESELQMTSAASPHPGLLLDLKTSLEDAQVDDSIKSHVSYETEGFESASLDAELQKSDISQPSGPLLPELSKLGFPASLQRDLTRHISLKSKTGVHLPEPNLNSARRIRNISGHRKSETEKESGLKPTLRQILNASRRNVNWEQVIQQVTKKKQELGKGLPRFGIEMVPLVQNEQEALDLDGEPDLSSLEGFQWEGVSISSSPGLARKRSLSESSVIMDRAPSVYSFFSEEGTGKENEPQQMVSPSNSLRAGQSQKATMHLKQEVTPRAASLRTGERAENVATQRRHSAQLSSDHIIPLMHLAKDLNSQERSIPPSENQNSQESNGEGNCLSSSASSALAISSLADAATDSSCTSGAEQNDGQSIRKKRRATGDGSSPELPSLERKNKRRKIKGKKERSQVDQLLNISLREEELSKSLQCMDNNLLQARAALQTAYVEVQRLLMLKQQITMEMSALRTHRIQILQGLQETYEPSEHPDQVPCSLTRERRNSRSQTSIDAALLPTPFFPLFLEPPSSHVSPSPTGASLQITTSPTFQTHGSVPAPDSSVQIKQEPMSPEQDENVNAVPPSSACNVSKELLEANREISDSCPVYPVITARLSLPESTESFHEPSQELKFSVEQRNTRNRENSPSSQSAGLSSINKEGEEPTKGNSGSEACTSSFLRLSFASETPLEKEPHSPADQPEQQAESTLTSAETRGSKKKKKLRKKKSLRAAHVPENSDTEQDVLTVKPVRKVKAGKLIKGGKVTTSTWEDSRTGREQESVRDEPDSDSSLEVLEIPNPQLEVVAIDSSESGEEKPDSPSKKDIWNSTEQNPLETSRSGCDEVSSTSEIGTRYKDGIPVSVAETQTVISSIKGSKNSSEISSEPGDDDEPTEGSFEGHQAAVNAIQIFGNLLYTCSADKTVRVYNLVSRKCIGVFEGHTSKVNCLLVTQTSGKNAALYTGSSDHTIRCYNVKSRECVEQLQLEDRVLCLHSRWRILYAGLANGTVVTFNIKNNKRLEIFECHGPRAVSCLATAQEGARKLLVVGSYDCTISVRDARNGLLLRTLEGHSKTILCMKVVNDLVFSGSSDQSVHAHNIHTGELVRIYKGHNHAVTVVNILGKVMVTACLDKFVRVYELQSHDRLQVYGGHKDMIMCMTIHKSMIYTGCYDGSIQAVRLNLMQNYRCWWHGCSLIFGVVDHLKQHLLTDHTNPNFQTLKCRWKNCDAFFTARKGSKQDAAGHIERHAEDDSKIDS

SEQ ID NO: 17186 - protein, 310 aa, Homo sapiens
MIVFRLGRIRTPQGPGMVLLLPFIDSFQRVDLRTRAFNVPPCKLASKDGAVLSVGADVQFRIWDPVLSVMTVKDLNTATRMTAQNAMTKALLKRPLREIQMEKLKISDQLLLEINDVTRAWGLEVDRVELAVEAVLQPPQDSPAGPNLDSTLQQLALHFLGGSMNSMAGGAPSPGPDTVEMVSEVEPPAPQVGARSSPKQPLAEGLLTALQPFLSEALVSQVGACYQFNVVLPSGTQSAYFLDLTTGRGRVGHGVPDGIPDVVVEMAEADLRALLCRELRPLGAYMSGRLKVKGDLAMAMKLEAVLRALK

SEQ ID NO: 17187 - protein, 231 aa, Homo sapiens
MQQHEQALADCRRALELDGQSVKAHFFLGQCQLEMESYDEAIANLQRAYSLAKEQRLNFGDDIPSALRIAKKKRWNSIEERRIHQESELHSYLSRLIAAERERELEECQRNHEGDEDDSHVRAQQACIEAKHDKYMADMDELFSQVDEKRKKRDIPDYLCGKISFELMREPCITPSGITYDRKDIEEHLQRVGHFDPVTRSPLTQEQLIPNLAMKEVIDAFISENGWVEDY

SEQ ID NO: 17188 - protein, 78 aa, Homo sapiens
MAAVVAATRWWQLLLVLSAAGMGASGAPQPPNILLLLMDDESLPPPRAAGSPRWAPVLPDGCLCPLENAERRSGVPKV

SEQ ID NO: 17189 - protein, 203 aa, Homo sapiens
MKDSCITVMAMALLSGFFFFAPASSYNLDVRGARSFSPPRAGRHFGYRVLQVGNGVIVGAPGEGNSTGSLYQCQSGTGHCLPVTLRGSNYTSKYLGMTLATDPTDGSILFAAVQFSTSYKTEFDFSDYVKRKDPDALLKHVKHMLLLTNTFGAINYVATEVFREELGARPDATKVLIIITDGEATDSGNIDAAKDIIRYIIGV

SEQ ID NO: 17190 - protein, 248 aa, Homo sapiens
MVPAWLWLLCVSVPQALPKAQPAELSVEVPENYGGNFPLYLTKLPLPREGAEGQIVLSGDSGKATEGPFAMDPDSGFLLVTRALDREEQAEYQLQVTLEMQDGHVLWGPQPVLVHVKDENDQVPHFSQAIYRARLSRGTRPGIPFLFLEASDRDEPGTANSDLRFHILSQAPAQPSPDMFQLEPRLGALALSPKGSTSLDHALERTYQLLVQVKDMGDQASGHQATATVEGRHRRDFWPGLGARLWAC

SEQ ID NO: 17191 - protein, 226 aa, Homo sapiens
MGLLLLVPLLLLPGSYGLPFYNGFYYSNSANDQNLGNGHGKDLLNGVKLVVETPEETLFTYQGASVILPCRYRYEPALVSPRRVRVKWWKLSENGAPEKDVLVAIGLRHRSFGDYQGRVHLRQDKEHDVSLEIQDLRLEDYGRYRCEVIDGLEDESGLVELELRAESQERGGNGQEVWSFLTSPPTGATSSTSTRASRSVQSRLRWWPPLSSSSGPGRRAWTGATR

SEQ ID NO: 17192 - protein, 244 aa, Homo sapiens
MNGPADGEVDYKKKYRNLKRKLKFLIYEHECFQEELRKAQRKLLKVSRDKSFLLDRLLQYENVDEDSSDSDATASSDNSETEGTPKLSDTPAPKRKRSPPLGGAPSPSSLSLPPSTGFPLQASGVPSPYLSSLASSRYPPFPSDYLALQLPEPSPLRPKREKRPRLPRKLKMAVGPPDCPVGGPLTFPGRGSGAGVGTTLTPLPPPKMPPPTILSTVPRQMFSDAGSGDDALDGDDDLVIDIPE

SEQ ID NO: 17193 - protein, 319 aa, Homo sapiens
MGSNSEVARLLASSDPLAQIAEDKPYAELWMGTHPRGDAKILDNRISQKTLSQWIAENQDSLGSKVKDTFNGNLPFLFKVLSVETPLSIQAHPNKELAEKLHLQAPQHYPDANHKPEMAIALTPFQGLCGFRPVEEIVTFLKKVPEFQFLIGDEAATHLKQTMSHDSQAVASSLQSCFSHLMKSEKKVVVEQLNLLVKRISQQAAAGNNMEDIFGELLLQLHQQYPGDIGCFAIYFLNLLTLKPGEAMFLEANVPHAYLKGGEPHFSSEPHCHPCWALFPYLDKGRRRVVKETPKDLAALTSEGSWAQQATAGRDDECI

SEQ ID NO: 17194 - protein, 585 aa, Homo sapiens
MEPAPARSPRPQQDPARPQEPTMPPPETPSEGRQPSPSPSPTERAPASEEEFQFLRCQQCQAEAKCPKLLPCLHTLCSGCLEASGMQCPICQAPWPLGADTPALDNVFFESLQRRLSVYRQIVDAQAVCTRCKESADFWCFECEQLLCAKCFEAHQWFLKHEARPLAELRNQSVREFLDGTRKTNNIFCSNPNHRTPTLTSIYCRGCSKPLCCSCALLDSSHSELKCDISAEIQQRQEELDAMTQALQEQDSAFGAVHAQMHAAVGQLGRARAETEELIRERVRQVVAHVRAQERELLEAVDARYQRDYEEMASRLGRLDAVLQRIRTGSALVQRMKCYASDQEVLDMHGFLRQALCRLRQEEPQSLQAAVRTDGFDEFKVRLQDLSSCITQGKDAAVSKKASPEAASTPRDPIDVDLDVSNTTTAQKRKCSQTQCPRKVIKMESEEGKEARLARSSPEQPRPSTSKAVSPPHLDGPPSPRSPVIGSEVFLPNSNHVASGAGEAEERVVVISSSEDSDAENSSSRELDDSSSESSDLQLEGPSTLRVLDENLADPQAEDRPLVFFDLKIDNESGFSWGYPHPFLI

SEQ ID NO: 17195 - protein, 394 aa, Homo sapiens
MSGSSLPSALALSLLLVSGSLLPGPGAAQNAGFVKSPMSETKLTGDAFELYCDVVGSPTPEIQWWYAEVNRAESFRQLWDGARKRRVTVNTAYGSNGVSVLRITRLTLEDSGTYECRASNDPKRNDLRQNPSITWIRAQATISVLQKPRIVTSEEVIIRDSPVLPVTLQCNLTSSSHTLTYSYWTKNGVELSATRKNASNMEYRINKPRAEDSGEYHCVYHFVSAPKANATIEVKAAPDITGHKRSENKNEGQDATMYCKSVGYPHPDWIWRKKENGMPMDIVNTSGRFFIINKENYTELNIVNLQITEDPGEYECNATNAIGSASVVTVLRVRSHLAPLWPFLGILAEIIILVVIIVVYEKRKRPDEVPDAGPMKTNSTNNHKDKNLRQRNTN

SEQ ID NO: 17196 - protein, 143 aa, Homo sapiens
MTSSRLWFSLLLAAAFAGRATALWPWPQNFQTSDQRYVLYPNNFQFQYDVSSAAQPGCSVLDEAFQRYRDLLFGSGSWPRPYLTGKRHTLEKNVLVVSVVTPGCNQLPTLESVENYTLTINDDQCLLLSETVWGALRGCHGVQ

SEQ ID NO: 17197 - protein, 47 aa, Homo sapiens
MAKSFPVFSLLSFILIHLVLSSVSGPRHWWPPRGIIKEISWKNQVLP

SEQ ID NO: 17198 - protein, 86 aa, Homo sapiens
MGLHLRPYRVGLLPDGLLFLLLLLMLLADPALPAGRHPPVVLVEMGFHHIGQAGLELLTASDPLTSASQSAGITGMSPCALPRSPW

SEQ ID NO: 17199 - protein, 113 aa, Homo sapiens
MTPQSLLQTTLFLLSLLFLVQGAHGRGHREDFRFCSQRNQTHRSSLHYKPTPDLRISIENSEEALTVHAPFPAAHPASRSFPDPRGLYHFCLYWNRHAGRLHLLYGKRDFLLS

SEQ ID NO: 17200 - protein, 513 aa, Homo sapiens
MAPARTMARARLAPAGIPAVALWLLCTLGLQGTQAGPPPAPPGLPAGADCLNSFTAGVPGFVLDTNASVSNGATFLESPTVRRGWDCVRACCTTQNCNLALVELQPDRGEDAIAACFLINCLYEQNFVCKFAPREGFINYLTREVYRSYRQLRTQGFGGSGIPKAWAGIDLKVQPQEPLVLKDVENTDWRLLRGDTDVRVERKDPNQVELWGLKEGTYLFQLTVTSSDHPEDTANVTVTVLSTKQTEDYCLASNKVGRCRGSFPRWYYDPTEQICKSFVYGGCLGNKNNYLREEECILACRGVQGPSMERRHPVCSGTCQPTQFRCSNGCCIDSFLECDDTPNCPDASDEAACEKYTSGFDELQRIHFPSDKGHCVDLPDTGLCKESIPRWYYNPFSEHCARFTYGGCYGNKNNFEEEQQCLESCRGISKKDVFGLRREIPIPSTGSVEMAVAVFLVICIVVVVAILGYCFFKNQRKDFHGHHHHPPPTPASSTVSTTEDTEHLVYNHTTRPL

SEQ ID NO: 17201 - protein, 168 aa, Homo sapiens
MFSKRLEKIPQVPLLFPFIFIILTNYSKMEGAVESQPSFFKTSQDIVTCTWVENCYSSFSRRPLEMESHSVIQTGVQWHHLSSLQPPPPRFKLSSCLSLLSTRDRRLCDFAKMHHQQRMAALGTDKELSDLLDFSAMFSPPVSSGKNGPTSLASGHFTGSNVEDRSSS

SEQ ID NO: 17202 - protein, 56 aa, Homo sapiens
MTPQSLLQTTLFLLSLLFLVQGAHGRGHREDFRFCSQRNQTHRSSLHYKPTPDLRI

SEQ ID NO: 17203 - protein, 373 aa, Homo sapiens
MTSSRLWFSLLLAAAFAGRATALWPWPQNFQTSDQRYVLYPNNFQFQYDVSSAAQPGCSVLDEAFQRYRDLLFGSGSWPRPYLTGKRHTLEKNVLVVSVVTPGCNQLPTLESVENYTLTINDDQCLLLSETVWGALRGLETFSQLVWKSAEGTFFINKTEIEDFPRFPHRGLLLDTSRHYLPLSSILDTLDVMAYNKLNVFHWHLVDDPSFPYESFTFPELMRKGSYNPVTHIYTAQDVKEVIEYARLRGIRVLAEFDTPGHTLSWGPGIPGLLTPCYSGSEPSGTFGPVNPSLNNTYEFMSTFFLEVSSVFPDFYLHLGGDEVDFTCWKSNPEIQDFMRKKGFGEDFKQLESFYIQTFSQTQSYRCGERIFQ

SEQ ID NO: 17204 - protein, 63 aa, Homo sapiens
MGWLCSGLLFPVSCLVLLQVASSGNMKVLQEPTCVSDYMSISTCEWKMNGPTNCSTELRLLYQ

SEQ ID NO: 17205 - protein, 84 aa, Homo sapiens
MTPQSLLQTTLFLLSLLFLVQGAHGRGHREDFRFCSQRNQTHRSSLHYKPTPDLRISIENSEEALTVHAPFPAAHPASRSFPDP

SEQ ID NO: 17206 - protein, 3375 aa, Homo sapiens
MASERPEPEVEEAGQVFLLMKKDYRISRNVRLAWFLSHLHQTVQATPQEMLLQSEQELEVLSVLPPGWQPDEPVVPRPFLLVPSTRVTFLAWQYRFVIELDLSPSTGIVDDSTGEILFDEVFHALSRCLGGLLRPFRVPGSCIDFQPEIYVTIQAYSSIIGLQSHQVLVQGCLLDPSQREVFLQQIYEQLCLFEDKVATMLQQQYDPQSQAEDQSPDSGDLLGRKVGVSMVTADLGLVSMIRQGILALQLLPSNSSAGIIVITDGVTSVPDVAVCETLLNQLRSGTVACSFVQVGGVYSYDCSFGHVPNVELMKFIAMATFGSYLSTCPEPEPGNLGLTVYHRAFLLYSFLRSGEALNPEYYCGSQHRLFNEHLVSASSNPALALRRKKHTEKEVPADLVSTVSVRLREGYSVREVTLAKGGSQLEVKLVLLWKHNMRIEYVAMAPWPLEPEGPRVTRVEVTMEGGYDILHDVSCALRQPIRSLYRTHVIRRFWNTLQSINQTDQMLAHLQSFSSVPEHFTLPDSTKSGVPLFYIPPGSTTPVLSLQPSGSDSSHAQFAAYWKPVLSMDANSWQRWLHMHRLVLILEHDTPIPKHLHTPGSNGRYSTIQCRISHSSLTSLLRDWSSFVLVEGYSYVKLLSSAPDQPPNSFYMVRIISKAPCMVLRLGFPIGTPAPARHKIVSGLREEILRLRFPHRVQSKEPTPKVKRKGLGGAGGGSSPSKSPPVLGPQQALSDRPCLVVLHKPLDKLLIRYEKLPLDYRAPFLLTLEPPGPLPLVSGRSASSSLASLSRYLYHQRWLWSVPSGLAPALPLSAIAQLLSILTEVRLSEGFHFACSGEGIINMVLELPIQNEPPGQAAAEEKHTCVVQYILFPPHSTSTKDSFSTDDDNDVEVEALEGDSELNLVTEVWVEPQYGRVGPGPGIWKHLQDLTYSEIPQALHPRDAACIGSMLSFEYLIQLCQSKEWGPLPPEPRVSDGLDQGGDTCVHEIPFHFDLMGLLPQCQQLQMFFLLLARGAEGPLLGVHGIPKEQAVGSTQATGDSAFTSLSVGLPETLKPLISAQPPQWRCYARLVNPQHVFLTFLPATFSDVQRLAACGLEGPPQEETKPKFGDWSGAPSLKDLGGTGIKATKSHVPVLSVTLASDNAQNQGELSPPFRRDLQAYAGRQASQTESADGPRTRCPVYIYSCSLEALREQMVGMQPPQAPRDLIFRTQFLDHPSPSSAWMEPRYKEAANHCALLQEHAQRCYVRGLFRSLQQAQSVTSQDLLTAVDACEELLQEIDITPFLLALCGHTWGLPHAPPSPGPLSPGPFSSSMEEGAEPRERAILASESSIETEDLSEPEFQSTRVPGIPDPGPEISLTDVCQLRGEAHGALHSVIQEKFLEISRLHFRTVPSNPHYFFYCPPSSRREDEGPRDTVDRKISDLEFSEAELMGEEGDTSACCVVTESDPELEVEYRESRESDLGPAGLDSASLSDVDTVNPDEDSFSILGGDSPTGPESFLHDLPPLFLHLTCSVRLRGQHSSVPVCSLPTCLGQVLSSLEGPPVGGRVPLRDLSVTLDVFMLTLPLEVELPTASDPQHHRSTSESSASFPRSPGQPSSLRSDDGLGPPLPPPEEERHPGLSNLATPHRLAIETTMNEIRWLLEDEMVGALRRGGIPQSPALHRAAAHIHSSPGRSTCLRQTLPLSFVFGPERSLTQFKEEFRRLHLPGHVLLEDPDSGFFFVAAGQQPGGSHGEPSSAAWAWHSHEDRAEGIEGETLTASPQAPGSPEDSEGVPLISLPRVPQGGSQPGPSRGLSLMSSQGSVDSDHLGYDGGSSGSDSEGPNDTLGEKAPFTLRTPPGPAPPQPSLSGLPGPCLPDFWLIVRVLQDRVEVYAHARSLIREDGGPGTECRHLQQLLVRRVGEICREVNQRLLLQDLHDSHVCNSLLVAESEEDLWRSETPFHSRQRAPLPSDDYAADESCAPRGYLAATMQFVPGHFSCDVVWGTVIRVHSRLKMGPSMGVSRAIQALRSVLNAFSVVNRKNMFVYQERATKAVYYLRLLETSCSDRPWKGDALPPSLALSRSQEPIYSEEASGPRSPLDMVSSRSSDAARPVGQVDRHIQLLVHGVGQAGPEITDELVRVLCRRLDEATLDVITVMLVRNCKLTPADVEFIQPPGSLPSEVLHLALPTSCRPWLPALAWYLRQNLLIFLHSPKYTDSNSRNHFQHPLPPQGGLPDLDIYLYNKPGGQGTGGKGVACITLAFVDEGGAPLSLALWPPSSPGPPDPLREEEFEQLTQVIRCPVVVDSSSAQNGAPRLRLDVWEKGNISIVQLEEKLRGAARQALADAIIELQLLPASLCTEDTPTGSLRNGSLETKSSAGRASTFPPAPVPGEPVTPPSKAGRRSFWDMLSKTECGDLGSPKTTDDIVLDRPEDTRGRRRHKTESVRTPGGAERAPGSDSGAQRQKRRTTQLEEGEVGTLHPVFARVAQRWMEFMVQIGCASVSRSSAHMVSRFLLPSILSEFTALVTSMAGDTSVRIFEQHLGSEPEIFGPCSPGQLGPSPRPAAERHLLLLGRNFLQWRRPTQQAAKAMQRFEPGGDGSSGRNAPRQRLLLLEVVDKKLQLLTYNWAPDLGAALGRALVRLVQWQNARAHLIFCLLSQKLGLFHHYGQLDFPVRDEKEPNPFLLPTMEVETLIRSASPPLSREQGRLSGSSRGGGPLPLDTFPFDEALRDITAARPSSVLGPVPRPPDPVTYHGQQFLEIKMAERRELERQMKMENLFVTWQQRSTPATMPISAGELETLKQSSRLVHYCATAMLFDPAAWLHGPPETSGPPDGQRRHRPESGSGSREAPTSCESLDVSPPGAREEPWLKELSLAFLQQYVQYLQSIGFVLVPLRPPSPARSTSRPRAMAILGTEGRGSFSCPKTKTDGSPKSTSSPVTTYHLQRALPGGIILMELAFQGCYFCVKQFALECSRIPMGQAVNSQLSMLFTEECDKVRDLMHVHSFSYDFHLRLVHQHVLGAHLVLRHGYHLTTFLRHFLAHHPDGPHFGRNHIYQGTLELPTPLIAAHQLYNYVADHASSYHMKPLRMARPGGPEHNEYALVSAWHSSGSYLDSEGLRHQDDFDVSLLVCHCAAPFEEQGEAERHVLRLQFFVVLTSQRELFPRLTADMRRFRKPPRLPPEPEAPGSSAGSPGEASGLILAPGPAPLFPPLAAEVGMARARLAQLVRLAGGHCRRDTLWKRLFLLEPPGPDRLRLGGRLALAELEELLEAVHAKSIGDIDPQLDCFLSMTVSWYQSLIKVLLSRFPQSCRHFQSPDLGTQYLVVLNQKFTDCFVLVFLDSHLGKTSLTVVFREPFPVQPQDSESPPAQLVSTYHHLESVINTACFTLWTRLL

SEQ ID NO: 17207 - protein, 153 aa, Homo sapiens
MTPQSLLQTTLFLLSLLFLVQGAHGRGHREDFRFCSQRNQTHRSSLHYKPTPDLRISIENSEEALTVHAPFPAAHPASRSFPDPRGLYHFCLYWNRHAGRLHLLYGKRDFLLSDKASSLLCFQHQEESLAQGPPLLATSVTSWWSPQNISLPS

SEQ ID NO: 17208 - protein, 496 aa, Homo sapiens
MSCVLGGVIPLGLLFLVCGSQGYLLPNVTLLEELLSKYQHNESHSRVRRAIPREDKEEILMLHNKLRGQVQPQASNMEYMTWDDELEKSAAAWASQCIWEHGPTSLLVSIGQNLGAHWGRYRSPGFHVQSWYDEVKDYTYPYPSECNPWCPERCSGPMCTHYTQIVWATTNKIGCAVNTCRKMTVWGEVWENAVYFVCNYSPKGNWIGEAPYKNGRPCSECPPSYGGSCRNNLCYRETYTPKPETDEMNEVETAPIPEENHVWLQPRVMRPTKPKKTSAVNYMTQVVRCDTKMKDRCKGSTCNRYQCPAGCLNHKAKIFGTLFYESSSSICRAAIHYGILDDKGGLVDITRNGKVPFFVKSERHGVQSLSKYKPSSSFMVSKVKVQDLDCYTTVAQLCPFEKPATHCPRIHCPAHCKDEPSYWAPVFGTNIYADTSSICKTAVHAGVISNESGGDVDVMPVDKKKTYVGSLRNGVQSESLGTPRDGKAFRIFAVRQ

SEQ ID NO: 17209 - protein, 41 aa, Homo sapiens
MPDENIFLFVPNLIAACWTLSMDTLLALLIKEPGLGPCWTC

SEQ ID NO: 17210 - protein, 41 aa, Homo sapiens
MAKNGLVICILVITLLLDQTTSHTSRLKARKHSKRRVRGIC

SEQ ID NO: 17211 - protein, 134 aa, Homo sapiens
MQPRWAQGATMWLGVLLTLLLCSSLEGQENSFTINSVDMKSLPDWTVQNGKNLTLQCFADVSTTSHVKPQHQMLFYKDDVLFYNISSMKSTESYFIPEVRIYDSGTYKCTVIVNNKEKTTAEYQVLVEGVPSPR

SEQ ID NO: 17212 - protein, 100 aa, Homo sapiens
MTPQSLLQTTLFLLSLLFLVQGAHGRGHREDFRFCSQRNQTHRSSLHYKPTPDLRISIENSEEALTVHAPFPAAHPASRSFPDPRGLYHFCLYWNRHAGR

SEQ ID NO: 17213 - protein, 414 aa, Homo sapiens
MAALRYAGLDDTDSEDELPPGWEERTTKDGWVYYANHTEEKTQWEHPKTGKRKRVAGDLPYGWEQETDENGQVFFVDHINKRTTYLDPRLAFTVDDNPTKPTTRQRYDGSTTAMEILQGRDFTGKVVVVTGANSGIGFETAKSFALHGAHVILACRNMARASEAVSRILEEWHKAKVEAMTLDLALLRSVQHFAEAFKAKNVPLHVLVCNAATFALPWSLTKDGLETTFQVNHLGHFYLVQLLQDVLCRSAPARVIVVSSESHRFTDINDSLGKLDFSRLSPTKNDYWAMLAYNRSKLCNILFSNELHRRLSPRGVTSNAVHPGNMMYSNIHRSWWVYTLLFTLARPFTKSMQQGAATTVYCAAVPELEGLGGMYFNNCCRCMPSPEAQSEETARTLWALSERLIQERLGSQSG

SEQ ID NO: 17214 - protein, 542 aa, Homo sapiens
MNGKRPAEPGPARVGKKGKKEVMAEFSDAVTEETLKKQVAEAWSRRTPFSHEVIVMDMDPFLHCVIPNFIQSQDFLEGLQKELMNLDFHEKYNDLYKFQQSDDLKKRREPHISTLRKILFEDFRSWLSDISKIDLESTIDMSCAKYEFTDALLCHDDELEGRRIAFILYLVPPWDRSMGGTLDLYSIDEHFQPKQIVKSLIPSWNKLVFFEVSPVSFHQVSEVLSEEKSRLSISGWFHGPSLTRPPNYFEPPIPRSPHIPQDHEILYDWINPTYLDMDYQVQIQEEFEESSEILLKEFLKPEKFTKVCEALEHGHVEWSSRGPPNKRFYEKAEESKLPEILKECMKLFRSEALFLLLSNFTGLKLHFLAPSEEDEMNDKKEAETTDITEEGTSHSPPEPENNQMAISNNSQQSNEQTDPEPEENETKKESSVPMCQGELRHWKTGHYTLIHDHSKAEFALDLILYCGCEGWEPEYGGFTSYIAKGEDEELLTVNPESNSLALVYRDRETLKFVKHINHRSLEQKKTFPNRTGFWDFSFIYYE

SEQ ID NO: 17215 - protein, 195 aa, Homo sapiens
MAAWKSWTALRLCATVVVLDMVVCKGFVEDLDESFKENRNDDIWLVDFYAPWCGHCKKLEPIWNEVGLEMKSIGSPVKVGKMDATSYSSIASEFGVRGYPTIKLLKGDLAYNYRGPRTKDDIIEFAHRVSGALIRPLPSQQMFEHMQKRHRVFFVYVGGESPLKEKYIDAASELIVYTYFFSASEEVVPEVIFKI

SEQ ID NO: 17216 - protein, 301 aa, Homo sapiens
MAPARTMARARLAPAGIPAVALWLLCTLGLQGTQAGPPPAPPGLPAGADCLNSFTAGVPGFVLDTNASVSNGATFLESPTVRRGWDCVRACCTTQNCNLALVELQPDRGEDAIAACFLINCLYEQNFVCKFAPREGFINYLTREVYRSYRQLRTQGFGGSGIPKAWAGIDLKVQPQEPLVLKDVENTDWRLLRGDTDVRVERKDPNQVELWGLKEGTYLFQLTVTSSDHPEDTANVTVTVLSTKQTEDYCLASNKVGRCRGSFPRWYYDPTEQICKSFVYGGCLGNKNNYLREEECILACR

SEQ ID NO: 17217 - protein, 118 aa, Homo sapiens
MTPQSLLQTTLFLLSLLFLVQGAHGRGHREDFRFCSQRNQTHRSSLHYKPTPDLRISIENSEEALTVHAPFPAAHPASRSFPDPRGLYHFCLYWNRHAGRLHLLYGKRDFLLSDKASS

SEQ ID NO: 17218 - protein, 74 aa, Homo sapiens
MRLLAGWLCLSLASVWLARRMWTLRSPLTRSLYVNMTSGPGGPAAAAGGRKENHQVARKRLNVCVFTRSVSETA

SEQ ID NO: 17219 - protein, 138 aa, Homo sapiens
MLVGQGAGLLGPAVVTAAVVLLLSGVGPAHGSEDIVVGCGGFVKSDVEINYSLIEIKLYTKHGTLKYQTDCAPNNGYFMIPLYDKGDFILKIEPPLGWSFEPTTVELHVDGVSDICTKGGDINFVFTGFSVNGKVCIF

SEQ ID NO: 17220 - protein, 127 aa, Homo sapiens
GAIYYFKIAVALAVAAIPEGLPAVITTCLALGTRRMAKKNAIVRSLPSVETLGCTSVICSDKTGTLTTNQMSVCKMFIIDKVDGDICLLNEFSITGSTYAPEGEVPKVSMRRSARPPRQHSPPWWRR

SEQ ID NO: 17221 - protein, 129 aa, Homo sapiens
MASAVRGSRPWPRLGLQLQFAALLLGTLSPQVHTLRPENLLLVSTLDGSLHALSKQTGDLKWTLRDDPVIEGPMYVTEMAFLSDPADGSLYILGTQKQQGLMAGVQWYDHKAHCSLELLASSNPRTSVS

SEQ ID NO: 17222 - protein, 498 aa, Homo sapiens
MWNFRELSENSQQAANILSGACGLQRGDRVAVMLPRVPEWWLVILGCIRAGLIFMPGTIQMKSTDILYRLQMSKAKAIVAGDEVIQEVDTVASECPSLRIKLLVSEKSCDGWLNFKKLLNEASTTHHCVETGSQEASAIYFTSGTSGLPKMAEHSYSSLGLKAKMDAGWTGLQASDIMWTISDTGWILNILGSLLESWTLGACTFVHLLPKFDPLVILKTLSSYPIKSMMGAPIVYRMLLQQDLSSYKFPHLQNCLAGGESLLPETLENWRAQTGLDIREFYGQTETGLTCMVSKTMKIKPGYMGTAASCYDVQVIDDKGNVLPPGTEGDIGIRVKPIRPIGIFSGYVENPDKTAANIRGDFWLLGDRGIKDEDGYFQFMGRADDIINSSGYRIGPSEVENALMKHPAVVETAVISSPDPVRGEVVKAFVILASQFLSHDPEQLTKELQQHVKSVTAPYKYPRKIEFVLNLPKTVTGKIQRTKLRDKEWKMSGKARAQ

SEQ ID NO: 17223 - protein, 734 aa, Homo sapiens
MPAKGRYFLNEGEEGPDQDALYEKYQLTSQHGPLLLTLLLVAATACVALIIIAFSQGDPSRHQAILGMAFLVLAVFAALSVLMYVECLLRRWLRALALLTWACLVALGYVLVFDAWTKAACAWEQVPFFLFIVFVVYTLLPFSMRGAVAVGAVSTASHLLVLGSLMGGFTTPSVRVGLQLLANAVIFLCGNLTGAFHKHQMQDASRDLFTYTVKCIQIRRKLRIEKRQQENLLLSVLPAHISMGMKLAIIERLKEHGDRRCMPDNNFHSLYVKRHQNVSILYADIVGFTQLASDCSPKELVVVLNELFGKFDQIAKANECMRIKILGDCYYCVSGLPVSLPTHARNCVKMGLDMCQAIKQVREATGVDINMRVGIHSGNVLCGVIGLRKWQYDVWSHDVSLANRMEAAGVPGRVHITEATLKHLDKAYEVEDGHGQQRDPYLKEMNIRTYLVIDPRSQQPPPPSQHLPRPKGDAALKMRASVRMTRYLESWGAARPFAHLNHRESVSSGETHVPNGRRPKSVPQRHRRTPDRSMSPKGRSEDDSYDDEMLSAIEGLSSTRPCCSKSDDFYTFGSIFLEKGFEREYRLAPIPRARHDFACASLIFVCILLVHVLLMPRTAALGVSFGLVACVLGLVLGLCFATKFSRCCPARGTLCTISERVETQPLLRLTLAVLTIGSLLTVAIINLPLMPFQVPELPVGNETGLLAASSKTRALCEPLPHLHTVFSRLNELTS

SEQ ID NO: 17224 - protein, 738 aa, Homo sapiens
MQPRWAQGATMWLGVLLTLLLCSSLEGQENSFTINSVDMKSLPDWTVQNGKNLTLQCFADVSTTSHVKPQHQMLFYKDDVLFYNISSMKSTESYFIPEVRIYDSGTYKCTVIVNNKEKTTAEYQVLVEGVPSPRVTLDKKEAIQGGIVRVNCSVPEEKAPIHFTIEKLELNEKMVKLKREKNSRDQNFVILEFPVEEQDRVLSFRCQARIISGIHMQTSESTKSELVTVTESFSTPKFHISPTGMIMEGAQLHIKCTIQVTHLAQEFPEIIIQKDKAIVAHNRHGNKAVYSVMAMVEHSGNYTCKVESSRISKVSSIVVNITELFSKPELESSFTHLDQGERLNLSCSIPGAPPANFTIQKEDTIVSQTQDFTKIASKSDSGTYICTAGIDKVVKKSNTVQIVVCEMLSQPRISYDAQFEVIKGQTIEVRCESISGTLPISYQLLKTSKVLENSTKNSNDPAVFKDNPTEDVEYQCVADNCHSHAKMLSEVLRVKVIAPVDEVQISILSSKVVESGEDIVLQCAVNEGSGPITYKFYREKEGKPFYQMTSNATQAFWTKQKASKEQEGEYYCTAFNRANHASSVPRSKILTVRVILAPWKKGLIAVVIIGVIIALLIIAAKCYFLRKAKAKQMPVEMSRPAVPLLNSNNEKMSDPNMEANSHYGHNDDVRNHAMKPINDNKEPLNSDVQYTEVQVSSAESHKDLGKKDTETVYSEVRKAVPDAVESRYSRTEGSLDGT

SEQ ID NO: 17225 - protein, 184 aa, Homo sapiens
MSGSSLPSALALSLLLVSGSLLPGPGAAQNAAPDITGHKRSENKNEGQDATMYCKSVGYPHPDWIWRKKENGMPMDIVNTSGRFFIINKENYTELNIVNLQITEDPGEYECNATNAIGSASVVTVLRVRSHLAPLWPFLGILAEIIILVVIIVVYEKRKRPDEVPDDDEPAGPMKTNSTNNHKD

SEQ ID NO: 17226 - protein, 179 aa, Homo sapiens
NFQPKMGELYMLLAAELSSCSAFFVAVALTNLEDIENAKRAYAEAVHLDKCNPLVNLNYAVLLYNQGEKKNALAQYQEMEKKVSLLKDNSSLEFDSEMVEMAQKLGAALQVGEALVWTKPVKDPKSKHQTTSTSKPASFQQPLGSNQALGQAMSSAAAYRTLPSGAGGTSQFTKPPSLP

SEQ ID NO: 17227 - protein, 382 aa, Homo sapiens
MATRRLTDAFLLLRNNSIQNRQLLAEQVSSHITSSPLHSRSIAAELDELADDRMALVSGISLDPEAAIGVTKRPPPKWVDGVDEIQYDVGRIKQKMKELASLHDKHLNRPTLDDSSEEEHAIEITTQEITQLFHRCQRAVQALPSRARACSEQEGRLLGNVVASLAQALQELSTSFRHAQSGYLKRMKNREERSQHFFDTSVPLMDDGDDNTLYHRGFTEDQLVLVEQNTLMVEEREREIRQIVQSISDLNEIFRDLGAMIVEQGTVLDRIDYNVEQSCIKTEDGLKQLHKDFSHVEGLLSQSLRLWKSYYICQGMALVSHPLGRSSSCLSPLECRVPVCNVFANRKKSERSSYTLACSVPGTGGKKNNKKSKRPAFRMLKL

SEQ ID NO: 17228 - protein, 46 aa, Homo sapiens
MEPVGCCGECRGSSVDPRSTFVLSNLAEVVERVLTFLPAKALLRVA

SEQ ID NO: 17229 - protein, 177 aa, Homo sapiens
MVRGLDEDETNFLDEVSRQQELIEKQRREEELKELKEYRNNLKKVGISQENKKEVEKKLTVKPIETKNKFSQAKLLAGAVKHKSSESGNSVKRLKPDPEPDDKNQEPSSCKSLGNTSLSGPSIHCPSAAVCIGILPGLGAYSGSSDSESSSDSEGTINATGKIVSSIFRTNTFLEAP

SEQ ID NO: 17230 - protein, 379 aa, Homo sapiens
MERAVRVESGVLVGVVCLLLACPATATGPEVAQPEVDTTLGRVRGRQVGVKGTDRLVNVFLGIPFAQPPLGPDRFSAPHPAQPWEGVRDASTAPPMCLQDVESMNSSRFVLNGKQQIFSVSEDCLVLNVYSPAEVPAGSGRPVMVWVHGGALITGAATSYDGSALAAYGDVVVVTVQYRLGVLGFFSTGDEHAPGNQGFLDVVAALRWVQENIAPFGGDLNCVTVFGGSAGGSIISGLVLSPVAAGLFHRAITQSGVITTPGIIDSHPWPLAQKIANTLACSSSSPAEMVQCLQQKEGEELVLSKKLKNTIYPLTVDGTVFPKSPKELLKEKPFHSVPFLMGVNNHEFSWLIPRILEALSFSMSSSIDPVLLRRSNLPG

SEQ ID NO: 17231 - protein, 226 aa, Homo sapiens
MSNYVNDMWPGSPQEKDSPSTSRSGGSSRLSSRSRSRSFSRSSRSHSRVSSRFSSRSRRSKSRSRSRRRHQRKYRRYSRSYSRSRSRSRSRRYRERRYGFTRRYYRSPSRYRSRSRSRSRSRGRSYCGRAYAIARGQRYYGFGRTVYPEEHSRWRDRSRTRSRSRTPFRLSEKDRMELLEIAKTNAAKALGTTNIDLPASLRTVPSAKETSRGIGVSSNGAKPEKS

SEQ ID NO: 17232 - protein, 119 aa, Homo sapiens
MLHPETSPGRGHLLAVLLALLGTAWAEVWPPQLQEQAPMAGALNRKESFLLLSLHNRLRSWVQPPAADMRRLDWSDSLAQLAQARAALCGIPTPSLASGLWRTLQVGWNMQLLPAGLAS

SEQ ID NO: 17233 - protein, 148 aa, Homo sapiens
MATAEPSGRALRLSTPGPRPSGARDRAPGAAGPPSGQIGNRALRLGERTPAAVEKRGPYMVTRAPSIQAKLQKHRDLAKAVLRRKGMLGASPNRPDSSGKRSVKFNKGYTALSQSPDENLVSLDSDRPFMYIPGPFSSEQYPFPGWLG

SEQ ID NO: 17234 - protein, 1068 aa, Homo sapiens
MLKPQPLQQPSQPQQPPPTQQAVARRPPGGTSPPNGGLPGPLATSAAPPGPPAAASPCLGPVAAAGSGLRRGAEGILAPQPPPPQQHQERPGAAAIGSARGQSTGKGPPQSPVFEGVYNNSRMLHFLTAVVGSTCDVKVKNGTTYEGIFKTLSSKFELAVDAVHRKASEPAGGPRREDIVDTMVFKPSDVMLVHFRNVDFNYATKDKFTDSAIAMNSKVNGEHKEKVLQRWEGGDSNSDDYDLESDMSNGWDPNEMFKFNEENYGVKTTYDSSLSSYTVPLEKDNSEEFRQRELRAAQLAREIESSPQYRLRIAMENDDGRTEEEKHSAVQRQGSGRESPSLASREGKYIPLPQRVREGPRGGVRCSSSRGGRPGLSSLPPRGPHHLDNSSPGPGSEARGINGGPSRMSPKAQRPLRGAKTLSSPSNRPSGETSVPPPPAAPPFLPVGRMYPPRSPKSAAPAPISASCPEPPIGSAVPTSSASIPVTSSVSDPGVGSISPASPKISLAPTDVKELSTKEPGRTLEPQELARIAGKVPGLQNEQKRFQLEELRKFGAQFKLQPSSSPENSLDPFPPRILKEEPKGKEKEVDGLLTSEPMGSPVSSKTESVSDKEDKPPLAPSGGTEGPEQPPPPCPSQTGSPPVGLIKGEDKDEGPVAEQVKKSTLNPNAKEFNPTKPLLSVNKSTSTPTSPGPRTHSTPSIPVLTAGQSGLYSPQYISYIPQIHMGPAVQAPQMYPYPVSNSVPGQQGKYRGAKGSLPPQRSDQHQPASAPPMMQAAAAAGPPLVAATPYSSYIPYNPQQFPGQPAMMQPMAHYPSQPVFAPMLQSNPRMLTSGSHPQAIVSSSTPQYPSAEQPTPQALYATVHQSYPHHATQLHAHQPQPATTPTGSQPQSQHAAPSPVQHQAGQAPHLGSGQPQQNLYHPGALTGTPPSLPPGPSAQSPQSSFPQPAAVYAIHHQQLPHGFTNMAHVTQAHVQTGITAAPPPHPGAPHPPQVMLLHPPQSHGGPPQGAVPQSGVPALSASTPSPYPYIGHPQGEQPGQAPGFPGGADDRILQSHPSQQLPFHPPGN

SEQ ID NO: 17235 - protein, 296 aa, Homo sapiens
MIAERLARLRQENKPKLVPSQAEIEARLAALKDERQGSIPSTQEMEARLAALQGRVLPSQTPQPAHHTPDTRTQAQQTQDLLTQLAAEVAIDESWKGGGPAASLQNDLNQGGPGSTNSKRQANWSLEEEKSRLLAEAALELREENTRQERILALAKRLAMLRGQDPERVTLQDYRLPDSDDDEDEETAIQRVLQQLTEEASLDEASGFNIPAEQASRPWTQPRGAEPEAQDVDPRPEAEEEELPWCCICNEDATLRCAGCDGDLFCARCFREGHDAFELKEHQTSAYSPPRAGQEH

SEQ ID NO: 17236 - protein, 347 aa, Homo sapiens; identical to SEQ ID NO: 11565

SEQ ID NO: 17237 - protein, 122 aa, Homo sapiens
MTPQSLLQTTLFLLSLLFLVQGAHGRGHREDFRFCSQRNQTHRSSLHYKPTPDLRISIENSEEALTVHAPFPAAHPASRSFPDPRGLYHFCLYWNRHAGRLHLLYGKRDFLLSDKASSLLCF

SEQ ID NO: 17238 - protein, 449 aa, Homo sapiens
MSCVLGGVIPLGLLFLVCGSQGYLLPNVTLLEELLSKYQHNESHSRVRRAIPREDKEEILMLHNKLRGQVQPQASNMEYMTWDDELEKSAAAWASQCIWEHGPTSLLVSIGQNLGAHWGRYRSPGFHVQSWYDEVKDYTYPYPSECNPWCPERCSGPMCTHYTQIVWATTNKIGCAVNTCRKMTVWGEVWENAVYFVCNYSPKGNWIGEAPYKNGRPCSECPPSYGGSCRNNLCYREETYTPKPETDEMNEVETAPIPEENHVWLQPRVMRPTKPKKTSAVNYMTQVVRCDTKMKDRCKGSTCNRYQCPAGCLNHKAKIFGTLFYESSSSICRAAIHYGILDDKGGLVDITRNGKVPFFVKSERHGVQSLSKYKPSSSFMVSKVKVQDLDCYTTVAQLCPFEKPATHCPRIHCPAHCKDEPSYWAPVFGTNIYADVSRMHFQQLSRKAC

SEQ ID NO: 17239 - protein, 114 aa, Homo sapiens
MTPQSLLQTTLFLLSLLFLVQASASSGAHGRGHREDFRFCSQRNQTHRSSLHYKPTPDLRISIENSEEALTVHAPFPAAHPASRSFPDPRGLYHFCLYWNRHAGRLHLLYGKRD

SEQ ID NO: 17240 - protein, 195 aa, Homo sapiens
MAQKGVLGPGQLGAVAILLYLGLLRSGTGAEGAEAPCGVAPQARITGGSSAVAGQWPWQVSITYEGVHVCGGSLVSEQWVLSAAHCFPSYLQEGSQGDIALLQLSRPITFSRYIRPICLPAANASFPNGLHCTVTGWGHVAPSVSLLTPKPLQQLEVPLISRETCNCLYNIDAKPEEPHFVQEDMVCAGYVEGGK

SEQ ID NO: 17241 - protein, 109 aa, Homo sapiens
MVHTSLDVVDEKISAMGKALVDQRELYLGLLYPTEDYKVYGYVTNSKVKFVMVVDSSNTALRDNEIRSMFRKLHNSYTDVMCNPFYNPGDRIQSRAFDNMVTSMMIQVC

SEQ ID NO: 17242 - protein, 218 aa, Homo sapiens
MFQVPDSEGGRAGSRKWQLLTGSLASTSPSLLSGQGPWAPLQRAMKPPGGESSNLFGSPEEATPSSRPNRMASNIFGPTEEPQNIPKRTNPPGGKGSGIFDESTPVQTRQHLNPPGGKTSDIFGSPVTATSRLAHPNKPKDHVFLCEGEEPKSDLKAARSIPAGAEPGEKGSARKAGPAKEQEPMPTVDSHEPRLGPRPRSHNKVLNPPGGKSSISFY

SEQ ID NO: 17243 - protein, 358 aa, Homo sapiens
MDAKSLTAWSRTLVTFKDVFVDFTREEWKLLDTAQQIVYRNVMLENYKNLVSLGYQLTKPDVILRLEKGEEPWLVEREIHQETHPDSETAFEIKSSVSSRSIFKDKQSCDIKMEGMARNDLWYLSLEEVWKCRDQLDKYQENPERHLSIPRVLSLPARHTKLTVGMATRVRTASIWVPPLQERNSSWDRIRKLQGQESILGQGTPGLQPLPGTPRQKQKSRRIEKVLEWLFISQEQPKITKSWGPLSFMDVFVDFTWEEWQLLDPAQKCLYRSVMLENYSNLVSLGYQHTKPDIIFKLEQGEELCMVQAQVPNQTCPILKAGKSKAKVLAGLVSGEGLLCASKMTPCCCILWRHSLEN

SEQ ID NO: 17244 - protein, 42 aa, Homo sapiens
MTLLFAVGCVFFPLCFTALRWGLQNHTNLQMERQEAVLVASK

SEQ ID NO: 17245 - protein, 1059 aa, Homo sapiens
MEANPAGSGAGGGGSSGIGGEDGVHFQSYPFDFLEFLNHQRFEPMELYGEHAKAVAALPCAPGPPPQPPPQPPPPQYDYPPQSTFKPKAEVPSSSSSSSSSSSSSSSSSSSSSSSSSQAKKPDPPLPPAFGAPPPPLFDAAFPTPQWGIVDLSGHQHLFGNLKRGGPASGPGVTPGLGAPAGAPGPLPAPSQTPPGPPAAAACDPTKDDKGYFRRLKYLMERRFPCGVCQKSFKQSSHLVQHMLVHSGERPYECGVCGRTYNHVSSLIRHRRCHKDVPPAAGGPPQPGPHLPPLGLPAPAASAATAAAPSTVSSGPPATPVAPAPSADGSAAPAGVGVPPPATGGGDGPFACPLCWKVFKKPSHLHQHQIIHTGEKPFSCSVCSKSFNRRESLKRHVKTHSADLLRLPCGICGKAFRDASYLLKHQAAHAGAGAGGPRPVYPCDLCGKSYSAPQSLLRHKAAHAPPAAAAEAPKDGAASAPQPPPTFPPGPYLLPPDPPTTDSEKAAAAAAAVVYGAVPVPLLGAHPLLLGGAGTSGAGGSGASVPGKTFCCGICGRGFGRRETLKRHERIHTGEKPHQCPVCGKRFRESFHLSKHHVVHTRERPYKCELCGKVFGYPQSLTRHRQVHRLQLPCALAGAAGLPSTQGTPGACGPGASGTSAGPTDGLSYACSDCGEHFPDLFHVMSHKEVHMAEKPYGCDACGKTFGFIENLMWHKLVHQAAPERLLPPAPGGLQPPDGSSGTDAASVLDNGLAGEVGAAVAALAGVSGGEDAGGAAVAGAGGGASSGPERFSCATCGQSFKHFLGLVTHKYVHLVRRTLGCGLCGQSFAGAYDLLLHRRSHRQKRGFRCPVCGKRFWEAALLMRHQRCHTEQRPYRCGVCGRGFLRSWYLRQHRVVHTGERAFKCGVCAKRFAQSSSLAEHRRLHAVARPQRCSACGKTFRYRSNLLEHQRLHLGERAYRCEHCGKGFFYLSSVLRHQRAHEPPRPELRCPACLKAFKDPGYFRKHLAAHQGGRPFRCSSCGEGFANTYGLKKHRLAHKAENLGGPGAGAGTLAGKDA

SEQ ID NO: 17246 - protein, 477 aa, Homo sapiens
MLRWLRDFVLPTAACQDAEQPTRYETLFQALDRNGDGVVDIGELQEGLRNLGIPLGQDAEEKIFTTGDVNKDGKLDFEEFMKYLKDHEKKMKLAFKSLDKNNDGKIEASEIVQSLQTLGLTISEQQAELILQSIDVDGTMTVDWNEWRDYFLFNPVTDIEEIIRFWKHSTGIDIGDSLTIPDEFTEDEKKSGQWWRQLLAGGIAGAVSRTSTAPLDRLKIMMQVHGSKSDKMNIFGGFRQMVKEGGIRSLWRGNGTNVIKIAPETAVKFWAYEQYKKLLTEEGQKIGTFERFISGSMAGATAQTFIYPMEVMKTRLAVGKTGQYSGIYDCAKKILKHEGLGAFYKGYVPNLLGIIPYAGIDLAVYELLKSYWLDNFAKDSVNPGVMVLLGCGALSSTCGQLASYPLALVRTRMQAQAMLEGSPQLNMVGLFRRIISKEGIPGLYRGITPNFMKVLPAVGISYVVYENMKQTLGVTQK

SEQ ID NO: 17247 - protein, 289 aa, Homo sapiens
MAQKGVLGPGQLGAVAILLYLGLLRSGTGAEGAEAPCGVAPQARITGGSSAVAGQWPWQVSTLKDIIPHPSYLQEGSQGDIALLQLSRPITFSRYIRPICLPAANASFPNGLHCTVTGWGHVAPSVSLLTPKPLQQLEVPLISRETCNCLYNIDAKPEEPHFVQEDMVCAGYVEGGKDACQGDSGGPLSCPVEGLWYLTGIVSWGDACGARNRPGVYTLASSYASWIQSKVTELQPRVVPQTQESQPDSNLCGSHLAFSSAPAQGLLRPILFLPLGLALGLLSPWLSEH

SEQ ID NO: 17248 - protein, 419 aa, Homo sapiens
MSAEQEKDPISLKRVRGGDSGLDGLGGPGVQLGSPDKKKRKANTQGPSFPPLSEYAPPPNPNSDHLVAANPFDDNYNTISYKPLPSSNPYLGPGYPGFGGYSTFRMPPHVPPRMSSPYCGPYSLRNQPHPFPQNPLGMGFNRPHAFNFGPHDNSSFGNPSYNNALSQNVNMPNQHFRQNPAENFSQIPPQNASQVSNPDLASNFVPGNNSNFTSPLESNHSFIPPPNTFGQAKAPPPKQDFTQGATKNTNQNSSAHPPHLNMDDTVNQSNIELKNVNRNNAVNQENSRSSSTEATNNNPANGTQNKPRQPRGAADACTTEKSNKSSLHPNRHGHSSSDPVYPCGICTNEVNDDQDAILCEASCQKWFHRICTGMTETAYGLLTAEASAVWGCDTCMADKDVQLMRTRETFGPSAVGSDA

SEQ ID NO: 17249 - protein, 190 aa, Homo sapiens
MFSLKPPKPTFRSYLLPPPQTDDKINSEPKIKKLEPVLLPGEIVVNEVNFVRKCIATDTSQYDLWGKLICSNFKISFITDDPMPLQKFHYRNLLLGEHDVPLTCIEQIVTVNDHKRKQKVLGPNQKLKFNPTELIIYCKDFRIVRFRFDESGPESAKKVCLAIAHYSQPTDLQLLFAFEYVGKKYHNSEA

SEQ ID NO: 17250 - protein, 164 aa, Homo sapiens
MTPQSLLQTTLFLLSLLFLVQASASSGAHGRGHREDFRFCSQRNQTHRSSLHYKPTPDLRISIENSEEALTVHAPFPAAHPASRSFPDPRGLYHFCLYWNRHAGRLHLLYGKRDFLLSDKASSLLCFQHQEESLAQGPPLLATSVTSWWSPQNISLPSAASFTF

SEQ ID NO: 17251 - protein, 431 aa, Homo sapiens
MALARGSRQLGALVWGACLCVLVHGQQAQPGQGSDPARWRQLIQWENNGQVYSLLNSGSEYVPAGPQRSESSSRVLLAGAPQAQQRRSHGSPRRRQAPSLPLPGRVGSDTVRGQARHPFGFGQVPDNWREVAVGDSTGMARARTSVSQQRHGGSASSVSASAFASTYRQQPSYPQQFPYPQAPFVSQYENYDPASRTYDQGFVYYRPAGGGVGAGAAAVASAGVIYPYQPRARYEEYGGGEELPEYPPQGFYPAPERPYVPPPPPPPDGLDRRYSHSLYSEGTPGFEQAYPDPGPEAAQAHGGDPRLGWYPPYANPPPEAYGPPRALEPPYLPVRSSDTPPPGGERNGAQQGRLSVGSVYRPNQNGRVTPAQTPACPGRKVEGQEQDGQAPGSGTSWGTRDHKDGGSLQTSPGRLTPGLAGERARASLRSP

SEQ ID NO: 17252 - protein, 64 aa, Homo sapiens
EDVISSIRNFLIYVALLRVSECLPGCDCETSGELTDGHPLTLRGHRGLRTELNAPFILKKLDSI

SEQ ID NO: 17253 - protein, 339 aa, Homo sapiens
MAAPRVFPLSCAVQQYAWGKMGSNSEVARLLASSDPLAQIAEDKPYAELWMGTHPRGDAKILDNRISQKTLSQWIAENQDSLGSKVKDTFNGNLPFLFKVLSVETPLSIQAHPNKELAEKLHLQAPQHYPDANHKPEMAIALTPFQGLCGFRPVEEIVTFLKKVPEFQFLIGDEAATHLKQTMSHDSQAVASSLQSCFSHLMKSEKKVVVEQLNLLVKRISQQAAAGNNMEDIFGELLLQLHQQYPGDIGCFAIYFLNLLTLKPGEAMFLEANVPHAYLKGGEPHFSSEPHCHPCWALFPYLDKGRRRVVKETPKDLAALTSEGSWAQQATAGRDDECI

SEQ ID NO: 17254 - protein, 56 aa, Homo sapiens
ILLGATCGLKTILTLTGVSTLGDVKNNQESDCVSKKKMVPDFYVDSIADLLPALQG

SEQ ID NO: 17255 - protein, 56 aa, Homo sapiens
MQPRTPLVLCVLLSQVLLLTSAEDLDCTPGFQQKVFHINQPAEFIEDQSILNYVFY

SEQ ID NO: 17256 - protein, 96 aa, Homo sapiens
MQLNDKWQGLCWPMMDFLRCVTAALIYFAISITAIAKYSDGASKAAGVFGFFATIVFATDFYLIFNDVAKFLKQGDSADETTAHKTEEENSDSDSD

SEQ ID NO: 17257 - protein, 172 aa, Homo sapiens
MPVPASWPHLPSPFLLMTLLLGRLTGVAGEDELQVIQPEKSVSVAAGESATLRCAMTSLIPVGPIMWFRGAGAGRELIYNQKEGHFPRVTTVSELTKRNNLDFSISISNITPADAGTYYCVKFRKGSPDDVEFKSGAGTELSVRAFFQESHMCSMCNKRRCHRLYQLGSQSS

SEQ ID NO: 17258 - protein, 199 aa, Homo sapiens
MTPQSLLQTTLFLLSLLFLVQGAHGRGHREDFRFCSQRNQTHRSSLHYKPTPDLRISIENSEEALTVHAPFPAAHPASRSFPDPRGLYHFCLYWNRHAGRLHLLYGKRDFLLSDKASSLLCFQHQEESLAQGPPLLATSVTSWWSPQNISLPSAASFTFSFHSPPHTAAHNASVDMCELKRDLQLLSQFLKHPQKASRR

SEQ ID NO: 17259 - protein, 219 aa, Homo sapiens
MDDFLQKLRQKIKIGVVGGSDFEKVQEQLGNDVVEKYDYVFPENGLVAYKDGKLLCRQNIQSHLGEALIQDLINYCLSYIAKIKLPKKRGTFIEFRNGMLNVSPIGRSCSQEERIEFYELDKKENIRQKFVADLRKEFAGKGLTFSIGGQISFDVFPDGWDKRYCLRHVENDGYKTIYFFGDKTMPGGNDHEIFTDPRTMGYSVTAPEDTRRICELLFS

SEQ ID NO: 17260 - protein, 111 aa, Homo sapiens
MLGAALRRCAVAATTRADPRGLLHSARTPGPAVGINTLVTYDMVPEPKIIDAALRACRRLNDFASTVRILEVVKDKAGPHKEIYPYVIQELRPTLNELGISTPEELGLDKV

SEQ ID NO: 17261 - protein, 110 aa, Homo sapiens
MTPQSLLQTTLFLLSLLFLVQGAHGRGHREDFRFCSQRNQTHRSSLHYKPTPDLRISIENSEEALTVHAPFPAAHPASRSFPDPRGLYHFCLYWNRHAGRLHLLYGKRDF

SEQ ID NO: 17262 - protein, 1323 aa, Homo sapiens
MKRNGSRNCLNRRSRFGSRERDWLREDVKRGCVYLYGADTTTATTTTTTSSSSSSSSSSSDLHLVLCTVETPASEICAGEGRESLYLQLHGDLVRRLEPTERPLQIVYDYLSRLGFDDPVRIQEEATNPDLGCMIRFYGEKPCHMDRLDRILLSGIYNVRKGKTQLHKWAERLVVLCGTCLIVSSVKDCQTGKMHILPLVGGKIEEVKRRQYSLAFSSAGAQAQTYHVSFETLAEYQRWQRQASKVVSQRISTVDLSCYSLEEVPEHLFYSQDITYLNLRHNFMQLERPGGLDTLYKFSQLKGLNLSHNKLGLFPILLCEISTLTELNLSCNGFHDLPSQIGNLLNLQTLCLDGNFLTTLPEELGNLQQLSSLGISFNNFSQIPEVYEKLTMLDRVVMAGNCLEVLNLGVLNRMNHIKHVDLRMNHLKTMVIENLEGNKHITHVDLRDNRLTDLDLSSLCSLEQLHCGRNQLRELTLSGFSLRTLYASSNRLTAVNVYPVPSLLTFLDLSRNLLECVPDWACEAKKIEVLDVSYNLLTEVPVRILSSLSLRKLMLGHNHVQNLPTLVEHIPLEVLDLQHNALTRLPDTLFSKALNLRYLNASANSLESLPSACTGEESLSMLQLLYLTNNLLTDQCIPVLVGHLHLRILHLANNQLQTFPASKLNKLEQLEELNLSGNKLKTIPTTIANCKRLHTLVAHSNNISIFPEILQLPQIQFVDLSCNDLTEILIPEALPATLQDLDLTGNTNLVLEHKTLDIFSHITTLKIDQKPLPTTDSTVTSTFWSHGLAEMAGQRNKLCVSALAMDSFAEGVGAVYGMFDGDRNEELPRLLQCTMADVLLEEVQQSTNDTVFMANTFLVSHRKLGMAGQKLGSSALLCYIRPDTADPASSFSLTVANVGTCQAVLCRGGKPVPLSKVFSLEQDPEEAQRVKDQKAIITEDNKVNGVTCCTRMLGCTYLYPWILPKPHISSTPLTIQDELLILGNKALWEHLSYTEAVNAVRHVQDPLAAAKKLCTLAQSYGCQDNVGAMVVYLNIGEEGCTCEMNGLTLPGPVGFASTTTIKDAPKPATPSSSSGIASEFSSEMSTSEVSSEVGSTASDEHNAGGLDTALLPRPERRCSLHPTPTSGLFQRQPSSATFSSNQSDNGLDSDDDQPVEGVITNGSKVEVEVDIHCCRGRDLENSPPLIESSPTLCSEEHARGSCFGIRRQNSVNSGMLLPMSKDRMELQKSPSTSCLYGKKLSNGSIVPLEDSLNLIEVATEVPKRKTGYFAAPTQMEPEDQFVVPHDLEEEVKEQMKQHQDSRLEPEPHEEDRTEPPEEFDTAL

SEQ ID NO: 17263 - protein, 68 aa, Homo sapiens
MTPQSLLQTTLFLLSLLFLVQASSLLCFQHQEESLAQGPPLLATSVTSWWSPQNISLPSAASFTFSFH

SEQ ID NO: 17264 - protein, 55 aa, Homo sapiens
MAPISLSWLLRLATFCHLTVLLAAWRRDSTGCSVPTRRSNGSRTRCSIWTARLLP

SEQ ID NO: 17265 - protein, 144 aa, Homo sapiens
MTPQSLLQTTLFLLSLLFLVQASASSGAHGRGHREDFRFCSQRNQTHRSSLHYKPTPDLRISIENSEEALTVHAPFPAAHPASRSFPDPRGLYHFCLYWNRHAGRLHLLYGKRDFLLSDKASSLLCFQHQEESLAQGPPLLATS

SEQ ID NO: 17266 - protein, 938 aa, Homo sapiens
MAEKRPLRTLGPVMYGKLPRLETDSGLEHSLPHSVGNQDPCTYKGSYFSCPMAGTPKAESEQLASWTPYPPLYSTGMAGPPLQADNLLTNCLFYRSPAEGPEKMQDSSPVELLPFSPQAHSYPGPPLAAPKPVYRNPLCYGLSTCLGEGAVKRPLDVDWTLATGPLLPSADPPCSLAPAPSKGQTLDGTFLRGVPAEGSSKDSSGSFSPCQPFLEKYQTIHSTGFLASRYTGPYPRNSKQAMSEGPSSPWTQLAQPLGPPCQDTGPTHYPPPHHPPPHPPQALPCPPACRHPEKQGSYSPALPLQPLGGHKGTGYQAGGLGSPYLRQQAAQAPYIPPLGLDAYPYPSAPLPAPSPGLKLEPPLTPRCPLDFAPQTLSFPYARDDLSLYGASPGLGGTPPSQNNVRAVPQPGAFQRACQPLPASQPCSEPVRPAQEAEEKTWLPSCRKEKLQPRLSEHSGPPIVIRDSPVPCTPPALPPCARECQSLPQKEGARPPSSPPMPVIDNVFSLAPYRDYLDVPAPEATTEPDSATAEPDSAPATSEGQDKGCRGTLPAQEGPSGSKPLRGSLKEEVALDLSVRKPTAEASPVKASRSVEHAKPTAAMDVPDVGNMVSDLPGLKKIDTEAPGLPGVPVTTDAMPRTNFHSSVAFMFRKFKILRPAPLPAAVVPSTPTSAPAPTQPAPTPTSGPIGLRILAQQPLSVTCFSLALPSPPAVAVASPAPAPAPSPAPARAQAPASARDPAPAPAPVAGPAPASTSAPGDSLEQHFTGLHASLCDAISGSVAHSPPEKLREWLETAGPWGQAAWQDCQGVQGLLAKLLSQLQRFDRTHRCPFPHVVRAGAIFVPIHLVKERLFPRLPPASVDHVLQEHRVELRPTTLSEERALRELALPGCTSRMLKLLALRQLPDIYPDLLGLQWRDCVRRQLGEHGAAPVATGAV

SEQ ID NO: 17267 - protein, 107 aa, Homo sapiens
MAQKGVLGPGQLGAVAILLYLGLLRSGTAPCGVAPQARITGGSSAVAGQWPWQVSITYEGVHVCGGSLVSEQWVLSAAHCFPSEHHKEAYEVKLGAHQLDSYSEDAK

SEQ ID NO: 17268 - protein, 162 aa, Homo sapiens
MTPQSLLQTTLFLLSLLFLVQGAHGRGHREDFRFCSQRNQTHRSSLHYKPTPDLRISIENSEEALTVHAPFPAAHPASRSFPDPRGLYHFCLYWNRHAGRLHLLYGKRDFLLSDKASSLLCFQHQEESLAQGPPLLATSVTSWWSPQNISLPSAASFTFSFH

SEQ ID NO: 17269 - protein, 219 aa, Homo sapiens
MAPASRLLALWALAAVALPGSGAEGDGGWRPGGPGAVAEEERCTVERRADLTYAEFVQQYAFVRPVILQGLTDNSRFRALCSRDRLLASFGDRVVRLSTANTYSYHKVDLPFQEYVEQLLHPQDPTSLGNDTLYFFGDNNFTEWASLFRHYSPPPFGLLGTAPAYSFGIAGAGSGVPFHWHGPGYSEVIYGRKVLYFPDRWWHATLNLDTSVFISTFLG

SEQ ID NO: 17270 - protein, 127 aa, Homo sapiens
FSLLLAAAFAGRATALWPWPQNFQTSDQRYVLYPNNFQFQYDVSSAAQPGCSVLDEAFQRYRDLLFGSGSWPRPYLTGKRHTLEKNVLVVSVVTPGCNQLPTLESVENCIPVPFARRRLLSSFCCGN

SEQ ID NO: 17271 - protein, 261 aa, Homo sapiens
MSSTQFNKGPSYGLSAEVKNRLLSKYDPQKEAELRTWIEGLTGLSIGPDFQKGLKDGTILCTLMNKLQPGSVPKINRSMQNWHQLENLSNFIKAMVSYGMNPVDLFEANDLFESGNMTQVQVSLLALAGKAKTKGLQSGVDIGVKYSEKQERNFDDATMKAGQCVIGLQMGTNKCASQSGMTAYGTRRHLYDPKNHILPPMDHSTISLQMGTNKCASQDLTLLSRLECSGTISAHCNLCLPGSRDSPSCLSLPSSWDYRWA

SEQ ID NO: 17272 - protein, 414 aa, Homo sapiens
MGPWSRSLSALLLLLQVSSWLCQEPEPCHPGFDAESYTFTVPRRHLERGRVLGRVNFEDCTGRQRTAYFSLDTRFKVGTDGVITVKRPLRFHNPQIHFLVYAWDSTYRKFSTKVTLNTVGHHHRPPPHQASVSGIQAELLTFPNSSPGLRRQKRDWVIPPISCPENEKGPFPKNLVQLFSHAVSSNGNAVEDPMEILITVTDQNDNKPEFTQEVFKGSVMEGALPGTSVMEVTATDADDDVNTYNAAIAYTILSQDPELPDKNMFTINRNTGVISVVTTGLDRESFPTYTLVVQAADLQGEGLSTTATAVITVTDTNDNPPIFNPTTYKGQVPENEANVVITTLKVTDADAPNTPAWEAVYTILNDDGGQFVVTTNPVNNDGILKTAKVCMVPGKMQKLASSQLFIPLSPGLGF

SEQ ID NO: 17273 - protein, 375 aa, Homo sapiens
MEEEIAALVIDNGSGMCKAGFAGDDAPRAVFPSIVGRPRHQGVMVGMGQKDSYVGDEAQSKRGILTLKYPIEHGIVTNWDDMEKIWHHTFYNELRVAPEEHPVLLTEAPLNPKANREKMTQIMFETFNTPAMYVAIQAVLSLYASGRTTGIVMDSGDGVTHTVPIYEGYALPHAILRLDLAGRDLTDYLMKILTERGYSFTTTAEREIVRDIKEKLCYVALDFEQEMATAASSSSLEKSYELPDGQVITIGNERFRCPEALFQPSFLGMESCGIHETTFNSIMKCDVDIRKDLYANTVLSGGTTMYPGIADRMQKEITALAPSTMKIKIIAPPERKYSVWIGGSILASLSTFQQMWISKQEYDESGPSIVHRKCF

SEQ ID NO: 17274 - protein, 569 aa, Homo sapiens
MGLGLLLPLLLLWTRGTQGSELDPKGQHVCVASSPSAELQCCAGWRQKDQECTIPICEGPDACQKDEVCVKPGLCRCKPGFFGAHCSSRCPGQYWGPDCRESCPCHPHGQCEPATGACQCQADRWGARCEFPCACGPHGRCDPATGVCHCEPGWWSSTCRRPCQCNTAAARCEQATGACVCKPGWWGRRCSFRCNCHGSPCEQDSGRCACRPGWWGPECQQQCECVRGRCSAASGECTCPPGFRGARCELPCPAGSHGVQCAHSCGRCKHNEPCSPDTGSCESCEPGWNGTQCQQPCLPGTFGESCEQQCPHCRHGEACEPDTGHCQRCDPGWLGPRCEDPCPTGTFGEDCGSTCPTCVQGSCDTVTGDCVCSAGYWGPSCNASCPAGFHGNNCSVPCECPEGLCHPVSGSCQPGSGSRDTALIAGSLVPLLLLFLGLACCACCCWAPRSDLKDRPARDGATVSRMKLQVWGTLTSLGSTLPCRSLSSHKLPWVTASSSRPLPAGPLMTPSHPILSLERQMRFLPTVCHPKKGWSLWPRQGRQRPAWLQVLSRPLRTPPRHSPSRAPPA

SEQ ID NO: 17275 - protein, 315 aa, Homo sapiens
MDFADLPALFGATLSQEGLQGFLVEAHPDNACSPIAPPPPAPVNGSVFIALLRRFDCNFDLKVLNAQKAGYGAAVVHNVNSNELLNMVWNSEEIQQQIWIPSVFIGERSSEYLRALFVYEKGARVLLVPDNTFPLGYYLIPFTGIVGLLVLAMGAVMIARCIQHRKRLQRNRLTKEQLKQIPTHDYQKGDQYDVCAICLDEYEDGDKLRVLPCAHAYHSRCVDPWLTQTRKTCPICKQPVHRGPGDEDQEEETQGQEEGDEGEPRDHPASERTPLLGSSPTLPTSFGSLAPAPLVFPGPSTDPPLSPPSSPVILV

SEQ ID NO: 17276 - protein, 181 aa, Homo sapiens
MESRGPLATSRLLLLLLLLLLRHTRQGWALRPVLPTQSAHDPPAVHLSNGPGQEPIAVMTFDLTKITKTSSSFEVRTWDPEGVIFYGDTNPKDDWFMLGLRDGRPEIQLHNHWAQLTVGAAPETGLWAPDQQTPSHHEDCAWGAALPRFQPSVAAGSCPGWLPAPGFLAGQTGRDLSICPH

SEQ ID NO: 17277 - protein, 149 aa, Homo sapiens
MLLTLAGGALFFPGLFALCTWALRRSQPGWSRTDCVMISTRYRRRRDAPRGPGRCPPHPTRPRGPGRKRGAAGSPGAAPSASRRPEFPKPLRVLPWRERGRGGREWPMSLRSPLPTSACGWGESGRRAGPGSLRSSDRTERARCSLRPR

SEQ ID NO: 17278 - protein, 138 aa, Homo sapiens
MLVGQGAGPLGPAVVTAAVVLLLSGVGPAHGSEDIVVGCGGFVKSDVEINYSLIEIKLYTKHGTLKYQTDCAPNNGYFMIPLYDKGDFILKIEPPLGWSFEPTTVELHVDGVSDICTKGGDINFVFTGFSVNGKVCIF

SEQ ID NO: 17279 - protein, 472 aa, Homo sapiens
MSVVHQLSAGWLLDHLSFINKINYQLHQHHEPCCRKKEFTTSVHFESLQMDSVSSSGVCAAFIASDSSTKPENDDGGNYEMFTRKFVFRPELFDVTKPYITPAVHKECQQSNEKEDLMNGVKKEISISIIGKKRKRCVVFNQGELDAMEYHTKIRELILDGSLQLIQEGLKSGFLYPLFEKQDKGSKPITLPLDACSLSELCEMAKHLPSLNEMEHQTLQLVEEDTSVTEQDLFLRVVENNSSFTKVITLMGQKYLLPPKSSFLLSDISCMQPLLNYRKTFDVIVIDPPWQNKSVKRSNRYSYLSPLQIQQIPIPKLAAPNCLLVTWVTNRQKHLRFIKEELYPSWSVEVVAEWHWVKITNSGEFVFPLDSPHKKPYEGLILGRVQEKTALPLRNADVNVLPIPDHKLIVSVPCTLHSHKPPLAEVLKDYIKPDGEYLELFARNLQPGWTSWGNEVLKFQHVDYFIAVESGS

SEQ ID NO: 17280 - protein, 317 aa, Homo sapiens
MTIFSQSVSPCGKFLAAGNNYGQIAIFSLSSALSSEAKEESKKPVVTFQAHDGPVYSMVSTDRHLLSAGDGEVKAWLWAEMLKKGCKELWRRQPPYRTSLEVPEINALLLVPKENSLILAGGDCQLHTMDLETGTFTRVLRGHTDYIHCLALRERSPEVLSGGEDGAVRLWDLRTAKEVQTIEVYKHEECSRPHNGRWIGCLATDSDWMVCGGGPALTLWHLRSSTPTTIFPIRAPQKHVTFYQDLILSAGQGRCVNQWQLSGELKAQVPGSSPGLLSLSLNQQPAAPECKVLTAAGNSCRVDVFTNLGYRAFSLSF

SEQ ID NO: 17281 - protein, 148 aa, Homo sapiens
MLRRALLCLAVAALVRADAPEEEDHVLVLRKSNFAEALAAHKYLLVEFYAPWCGHCKALAPEYAKAAGKLKAEGSEIRLAKMDSTANEVEAVKVHSFPTLKFFPASADRTVIDYNGERTLDGFKKFLESGGQDGAGDDDDLEDLEEAE

SEQ ID NO: 17282 - protein, 94 aa, Homo sapiens
MARGSLRRLLRLLVLGLWLALLRSVAGEQAPASDPRPPPQAPPPAPAAAPGARTWTSAWTARLAGRDRTATSAWAALQHLLPPSGCFGPSLGAL

SEQ ID NO: 17283 - protein, 152 aa, Homo sapiens
MLTLHNWLSFYEKNYVCVGRVTGRFYGEDGLPTPALTQVEAAITRGLEANKLQLQEKQTFPPCNAEWSSARGSRLWCSQKSGGVSRDWIGVPRKLYKPGAKEPRCVCVRTTGPPSGQMPDNPPHRNRGDLDHPNLAEYTGCPPLAITCSFPL

SEQ ID NO: 17284 - protein, 162 aa, Homo sapiens
MIRNWLTIFILFPLKLVEKCESSVSLTVPPVVKLENGSSTNVSLTLRPPLNATLVITFEITFRSKNITILELPDEVVVPPGVTNSSFQVTSQNVGQLTVYLHGNHSNQTGPRIRFLVIRSSAISIINQVIGWIYFVAWSISFYPQVIMNWRRKSVIGLSFDF

SEQ ID NO: 17285 - protein, 86 aa, Homo sapiens
MRGMKLLGALLALAALLQGAVSLKIAAFNIQTFGETKMSNATLVSYIVQILSRYDIALVQEVRDSHLTAVGKLLDNLNQWVTVAGS

SEQ ID NO: 17286 - protein, 80 aa, Homo sapiens
MGTPRAQHPPPPQLLFLILLSCPWIQGSDRDPTLATPPAGQTLAVPSLPRATEPGTGPLTTAVTPNGVRGAGPTAPELLT

SEQ ID NO: 17287 - protein, 264 aa, Homo sapiens
MLLLSLTLSLVLLGSSWGCGIPAIKPALSFSQRIVNGENAVLGSWPWQVSLQDSSGFHFCGGSLISQSWVVTAAHCNVSPGRHFVVLGEYDRSSNAEPLQVLSVSRAITHPSWNSTTMNNDVTLLKLASPAQYTTRISPVCLASSNEALTEGLTCVTTGWGRLSGVGNVTPAHLQQVALPLVTVNQCRQYWGSSITDSMICAGGAGASSCQGDSGGPLVCQKGNTWVLIGIVSWGTKNCNVRAPAVYTRVSKFSTWINQVIAYN

SEQ ID NO: 17288 - protein, 115 aa, Homo sapiens
LLSASALFISCSLTALCLGFFYGCEDETENAASTQRASVSSYRRRRHRLLPLASVFSHLLVLRCLPLGKHRFVLFLPQEVRGGHTSGSSVQSRGAQPSSMRPGYLFPQPVGSPSS

SEQ ID NO: 17289 - protein, 229 aa, Homo sapiens
MYPTGALIVNLRPNTFSPARHLTVCIRSFTDSSGANIYLEKTGELRLLVPDGDGRPGRVQCFGLEQGGLFVEATPQQDIGRRTTGFQYELVRRHRASDLHELSAPCRPCSDTEVLLAVCTSDFAVRGSIQQVTHEPERQDSAIHLRVSRLYRQKSRVFEPVPEGDGHWQGRVRTLLECGVRPGHGDFLFTGHMHFGEARLGCAPRFKDFQRMYRDAQERGLNPCEVGTD

SEQ ID NO: 17290 - protein, 962 aa, Homo sapiens
MHFILDPEDPGAPQASTEGKPKHRRLRGGVVMAAPPARPDHTRLLQICLLLGVLVEIRAEQILYSVFEEQEEGSVVGNIAKDLGLAPRELAERGVRIVSRGRTQLFALNPRSGTLVTAGRIDREELCDRSPNCVTNLEILLEDTVKILRVEVEIIDVNDNPPSFGTEQREIKVAENENPGARFPLPEAFDPDVGVNSLQGYQLNSNGYFSLDVQSGADGIKYPELVLERALDREEEAVHHLVLTAFDGGDPVRSGTARILIILVDTNDNAPVFTQPEYHVSVRENVPVGTRLLTVKATDPDEGANGDVTYSFRKVRDKISQLFQLNSLSGDITILGGLDYEDSGFYDIDVEAHDGPGLRARSKVLVTVLDENDNAPEVTVTSLTSSVQESSSPGTVIALFNVHDSDSGGNGLVTCSIPDNLPFTLEKTYGNYYRLLTHRTLDREEVSEYNITVTATDQGTPPLSTETHISLQVMDINDNPPTFPHASYSAYIPENNPRGASILSMTAQDPDSGDNARITYSLAEDTFQGAPLSSYVSINSNTGILYALCSFDYEQFRDLQLLMTASDSGDPPLSSNVSLSLFVLDQNDNVPEILYPTFPTDGSTGVELAPRSADSGYLVTKVVAVDRDSGQNAWLSYSLLKSSEPGLFAVGLHTGEVRTARALLDRDALKQRLVVVVQDHGQPPLSATVTLTVAVADSIPDVLADLGSLKPSADPDDSGLTLYLVVAVAAVSCVFLAFVTVLLALKLRRWHKSRLLHAEGSRLAGVPASHFVGVDGVRAFLQTYSHEVSLTADSRKSHLIFSQPSYADTLISRESCEKSEPLLITQDLLETKGDPNLQQAPPNTDWRFSQAQRPGTSGSQNGDDTGTWPNNQFDTEMLQAMILASASEAADGSSTLGGGAGTMGLSARYGPQFTLQHVPDYRQNVYIPGSNATLTNAAGKRDGKAPAGGNGNKKKSGKKEKK

SEQ ID NO: 17291 - protein, 470 aa, Homo sapiens
MKFLLILLLQATASGALPLNSSTSLEKNNVLFGERYLEKFYGLEINKLPVTKMKYSGNLMKEKIQEMQHFLGLKVTGQLDTSTLEMMHAPRCGVPDVHHFREMPGGPVWRKHYITYRINNYTPDMNREDVDYAIRKAFQVWSNVTPLKFSKINTGMADILVVFARGAHGDFHAFDGKGGILAHAFGPGSGIGGDAHFDEDEFWTTHSGGTNLFLTAVHEIGHSLGLGHSSDPKAVMFPTYKYVDINTFRLSADDIRGIQSLYGDPKENQRLPNPDNSEPALCDPNLSFDAVTTVGNKIFFFKDRFFWLKVSERPKTSVNLISSLWPTLPSGIEAAYEIEARNQVFLFKDDKYWLISNLRPEPNYPKSIHSFGFPNFVKKIDAAVFNPRFYRTYFFVDNQYWRYDERRQMMDPGYPKLITKNFQGIGPKIDAVFYSKNKYYYFFQGSNQFEYDFLLQRITKTLKSNSWFGC

SEQ ID NO: 17292 - protein, 296 aa, Homo sapiens
MELALRRSPVPRWLLLLPLLLGLNAGAVIDWPTEEGKEVWDYVTVRKDAYMFWWLYYATNSCKNFSELPLVMWLQGGPGGSSTGFGNFEEIGPLDSDLKPRKTTWLQAASLLFVDNPVGTGFSYVNGSGAYAKDLAMVASDMMVLLKTFFSCHKEFQTVPFYIFSESYGGKMAAGIGLELYKAIQRGTIKCNFAGVALGDSWISPVDSVLSWGPYLYSMSLLEDKGLAEVSKVAEQVLNAVNKGLYREATELWGKAEMIIEQNTDGVNFYNILTKSTPTSTMESSLEFTQSHLVWF

SEQ ID NO: 17293 - protein, 190 aa, Homo sapiens
MLLLSLTLSLVLLGSSWGQQRLPLLRWFSHQPVLGGHCCPLQCQVLSVSRVSAWAADTEEKWAVQAITHPSWNSTTMNNDVTLLKLASPAQYTTRISPVCLASSNEALTEGLTCVTTGWGRLSGVGNVTPAHLQQVALPLVTVNQCRQYWGSSITDSMICAGGAGASSCQGDSGGPLVCQKGNTWVLIGI

SEQ ID NO: 17294 - protein, 17 aa, Homo sapiens
MTLLFAVGCVFFPLCFT

SEQ ID NO: 17295 - protein, 160 aa, Homo sapiens
MAAALFVLLGFALLGTHGASGAEDLGSKILLTCSLNDSATEVTGHRWLKGGVVLKEDALPGQKTEFKVDSDDQWGEYSCVFLPEPMGTANIQLHGPPRVKAVKSSEHINEGETAMLVCKSESVPPVTDWAWYKITDSEDKALMNGSESRFFVSSSQGRSE

SEQ ID NO: 17296 - protein, 69 aa, Homo sapiens
MELALRRSPVPRWLLLLPLLLGLNAGSMGLCDGPQGCLHVLVALLCHQLLQELLRTAPGHVASGRSRRF

SEQ ID NO: 17297 - protein, 29 aa, Homo sapiens
MGQPSLTWMLMVVVASWFITTAATDTSEA

SEQ ID NO: 17298 - protein, 107 aa, Homo sapiens
MAESLRSPRRSLYKLVGSPPWKEAFRQRCLERMRNSRDRLLNRYRQAGSSGPGNSQNSFLVQEVMEEEWNALQSVENCPEDLAQLEELIDMAVLEEIQQELINQGTT

SEQ ID NO: 17299 - protein, 427 aa, Homo sapiens
MAALVVSGAAEQGGRDGPGRGRAPRGRVANQIPPEILKNPQLQAAIRVLPSNYNFEIPKTIWRIQQAQAKKVALQMPEGLLLFACTIVDILERFTEAEVMVMGDVTYGACCVDDFTARALGADFLVHYGHSCLIPMDTSAQDFRVLYVFVDIRIDTTHLLDSLRLTFPPATALALAAAQELKAEYRVSVPQCKPLSPGEILGCTSPRLSKEVEAVVYLGDGRFHLESVMIANPNVPAYRYDPYSKVLSREHYDHQRMQAARQEAIATARSAKSWGLILGTLGRQGSPKILEHLESRLRALGLSFVRLLLSEIFPSKLSLLPEVDVWVQVACPRLSIDWGTAFPKPLLTPYEAAVALRDISWQQPYPMDFYAGSSLGPWTVNHGQDRRPHAPGRPARGKVQEGSARPPSAVACEDCSCRDEKVAPLAP

SEQ ID NO: 17300 - protein, 68 aa, Homo sapiens
RRPVTGESPGMHRPEAMLLLLTLALLGGPTWAGKMYGPGGGKYFSTTEDYDHEITGLRVSVGLLLVKR

SEQ ID NO: 17301 - protein, 406 aa, Homo sapiens
MQRLMMLLATSGACLGLLAVAAVAAAGANPAQRDTHSLLPTHRRQKRDWIWNQMHIDEEKNTSLPHHVGKIKSSVSRKNAKYLLKGEYVGKVFRVDAETGDVFAIERLDRENISEYHLTAVIVDKDTGENLETPSSFTIKVHDVNDNWPVFTHRLFNASVPESSAVGTSVISVTAVDADDPTVGDHASVMYQILKGKEYFAIDNSGRIITITKSLDREKQARYEIVVEARDAQGLRGDSGTATVLVTLQDINDNFPFFTQTKYTFVVPEDTRVGTSVGSLFVEDPDEPQNRMTKYSILRGDYQDAFTIETNPAHNEGIIKPMKPLDYEYIQQYSFIVEATDPTIDLRYMSPPAGNRAQVIINITDVDEPPIFQQPFYHFQLKENQKKPLIGTVLAMDPDAARHSIG

SEQ ID NO: 17302 - protein, 143 aa, Homo sapiens
MDPLFQQTHKQVHEIQSCMGRLETADKQSVHIVENEIQASIDQIFSRLERLEILSSKEPPNKRQNARLRVDQLKYDVQHLQTALRNFQHRRHAREQQERQREELLSRTFTTNVSQARGEGRPALDRSWGLEFRSLSAICFGGV

SEQ ID NO: 17303 - protein, 80 aa, Homo sapiens
MPPCQPQRPLLLLLLLLACQPQVPSAQVMDFLFEKWKLYGDQCHHNLSLLPPPTELVCNRTFDKYSCWPDTPANTTANIS

SEQ ID NO: 17304 - protein, 125 aa, Homo sapiens
MGQPSLTWMLMVVVASWFITTAATDTSEARWCSECHSNATCTEDEAVTTCTCQEGFTGDGLTCVDLDECAIPGAHNCSANSSCVNTPGSFSCVCPEGFRLSPGLGCTDVDECAEPGLSHCHALAT

SEQ ID NO: 17305 - protein, 273 aa, Homo sapiens
MKLKDSLFDLDGPKVASPLSPTSLTHTSRPPAALTPVPLSQGDLSHPPRKKDRKNRKLGPGAGAGFGVLRRPRPTPGDGEKRSRIKKSKKRKLKKAERGDRLPPPGPPQAPPSDTDSEEEEEEEEEEEEEEMATVVGGEAPVPVLPTPPEAPRPPATVHPEGVPPADSESKEVGSTETSQDGDASSSEGEMRVMDEDIMVESGDDSWDLITCYCRKPFAGRPMIECSLCGTWIHLSCAKIKKTNVPDFFYCQKCKELRPEARRLGGPPKSGEP

SEQ ID NO: 17306 - protein, 741 aa, Homo sapiens
MAAAEGPVGDGELWQTWLPNHVVFLRLREGLKNQSPTEAEKPASSSLPSSPPPQLLTRNVVFGLGGELFLWDGEDSSFLVVRLRGPSGGGEEPALSQYQRLLCINPPLFEIYQVLLSPTQHHVALIGIKGLMVLELPKRWGKNSEFEGGKSTVNCSTTPVAERFFTSSTSLTLKHAAWYPSEILDPHVVLLTSDNVIRIYSLREPQTPTNVIILSEAEEESLVLNKGRAYTASLGETAVAFDFGPLAAVPKTLFGQNGKDEVVAYPLYILYENGETFLTYISLLHSPGNIGKLLGPLPMHPAAEDNYGYDACAVLCLPCVPNILVIATESGMLYHCVVLEGEEEDDHTSEKSWDSRIDLIPSLYVFECVELELALKLASGEDDPFDSDFSCPVKLHRDPKCPSRYHCTHEAGVHSVGLTWIHKLHKFLGSDEEDKDSLQELSTEQKCFVEHILCTKPLPCRQPAPIRGFWIVPDILGPTMICITSTYECLIWPLLSTVHPASPPLLCTREDVEVAESPLRVLAETPDSFEKHIRSILQRSVANPAFLKASEKDIAPPPEECLQLLSRATQVFREQYILKQDLAKEEIQRRVKLLCDQKKKQLEDLSYCREERKSLREMAERLADKYEEAKEKQEDIMNRMKKLLHSFHSELPVLSDSERDMKKELQLIPDQLRHLGNAIKQVTMKKDYQQQKMEKVLSLPKPTIILSAYQRKCIQSILKEEGEHIREMVKQINDIRNHVNF

SEQ ID NO: 17307 - protein, 384 aa, Homo sapiens
MESRGPLATSRLLLLLLLLLLRHTRQGWALRPVLPTQSAHDPPAVHLSNGPGQEPIAVMTFDLTKITKTSSSFEVRTWDPEGVIFYGDTNPKDDWFMLGLRDGRPEIQLHNHWAQLTVGAGPRLDDGRWHQVEVKMEGDSVLLEVDGEEVLRLRQVSGPLTSKRHPIMRIALGGLLFPASNLRLPAEISASAPTSLRSCDVESNPGIFLPPGTQAEFNLRDIPQPHAEPWAFSLDLGLKQAAGSGHLLALGTPENPSWLSLHLQDQKVVLSSGSGPGLDLPLVLGLPLQLKLSMSRVVLSQGSKMKALALPPLGLAPLLNLWAKPQGRLFLGALPGEDSSTSFCLNGLWAQGQRLDVDQALNRSHEIWTHSCPQSPGNGTDASH

SEQ ID NO: 17308 - protein, 368 aa, Homo sapiens
MAAHRPGPLKQQNKAHKGGRHRGRGSAQRDGKGRLALKTLSKKVRKELSRVDQRHRASQLRKQKKEAVLAEKRQLGGKDGPPHQVLVVPLHSRISLPEAMQLLQDRDTGTVHLNELGNTQNFMLLCPRLKHRWFFTSARPGDLHVVLDMAKVADTILFLLDPLEGWDSTALAVQGISGLPLKKQIDTRKKLSKAVEKRFPHDKLLLLDTQQEAGMLLRQLANQKQQHLAFRDRRAYLFAHAVDFVPSEENNLVGTLKISGYVRGQTLNVNRLLHIVGYGDFQMKQIDAPGDPFPLNPRGIKPQKDPDMAMEICATDAVDDMEEGLKVLMKADPGRQESLQAEVIPDPMEGEQTWPTEEELSEAKGQYW

SEQ ID NO: 17309 - protein, 367 aa, Homo sapiens
MIRNGRGAAGGAEQPGPGGRRAVRVWCDGCYDMVHYGHSNQLRQARAMGDYLIVGVHTDEEIAKHKGPPVFTQEERYKMVQAIKWVDEVVPAAPYVTTLETLDKYNCDFCVHGNDITLTVDGRDTYEEVKQAGRYRECKRTQGVSTTDLVGRMLLVTKAHHSSQEMSSEYREYADSFGKCPGGRNPWTGVSQFLQTSQKIIQFASGKEPQPGETVIYVAGAFDLFHIGHVDFLEKVHRLAERPYIIAGLHFDQEVNHYKGKNYPIMNLHERTLSVLACRYVSEVVIGAPYAVTAELLSHFKEPKRRGIFRQIDSGSNLTTDLIVQRIITNRLEYEARNQKKEAKELAFLEAARQQAAQPLGERDGDF

SEQ ID NO: 17310 - protein, 115 aa, Homo sapiens
MRGVSCLQVLLLLVLGAAGTQGRKSAACGQPRMSSRIVGGRDGRDGEWPWQASIQHRGAHVCGGSLIAPQWVLTAAHCFPSAPPRVATATRSKGAAAGLAHLRRPLPRGRGRAPG

SEQ ID NO: 17311 - protein, 114 aa, Homo sapiens
MQALVLLLCIGALLGHSSCQNPASPPEEGSPDPDSTGALVEEEDPFFKVPVNKLAAAVSNFGYDLYRVRSSTSPTTNVLLSPLSVATALSALSLGLMPLTYFRKISKDENSLAT

SEQ ID NO: 17312 - protein, 60 aa, Homo sapiens
MIPARFAGVLLALALILPETRCLQMPSPVGELRSIKVAQNCPILWGHRMRRKESKTWMDY

SEQ ID NO: 17313 - protein, 177 aa, Homo sapiens
MDLLWMPLLLVAACVSAVHSSPEVNAGVSSIHITKPVHILEERSLLVLTPAGLTQMLNQTRFLMVLFHEVLLLLPRLKYNGAILAHRNLHLPGSSDSPASASQVAGITDNPSSKQSRNLAEELGKAVEIMGKGKNGIGFGKVDITIEKELQQEFGITKAPELKLFFEGNRSEPISCK

SEQ ID NO: 17314 - protein, 328 aa, Homo sapiens
MAAVVVAAAGGAGPAVLQVAGLYRGLCAVRSRALGLGLVSPAQLRVFPVRPGSGRPEGGADSSGVGAEAELQANPFYDRYRDKIQLLRRSDPAAFESRLEKRSEFRKQPVGHSRQGDFIKCVEQKTDALGKQSVNRGFTKDKTLSSIFNIEMVKEKTAEEIKQIWQQYFAAKDTVYAVIPAEKFDLIWNRAQSCPTFLCALPRREGYEFFVGQWTGTELHFTALINIQTRGEAAASQLILYHYPELKEEKGIVLMTAEMDSTFLNVAEAQCIANQVQLFYATDRKETYGLVETFNLRPNEFKYMSVIAELEQSGLGAELKCAQNQNKT

SEQ ID NO: 17315 - protein, 92 aa, Homo sapiens
MLLRRVVEGGRAVAAAVRGSASTRTGLGSAEGHVREAAVRGPARTGRSPGPSTRMWGRSREDRALAAAEGPLAPLLHRLLPSPRPGICGGAA

SEQ ID NO: 17316 - protein, 54 aa, Homo sapiens
MLRRALLCLAVAALVRADAPEEEDHVLVLRKSNFAEALAAHKCPLVWPLQGSGP

SEQ ID NO: 17317 - protein, 482 aa, Homo sapiens
MYKMNICNKPSNKTAPEKSVWTAPAQPSGPSPELQGQRSRRNGWSWPPHPLQIVAWLLYLFFAVIGFGILVPLLPHHWVPAGYACMGAIFAGHLVVHLTAVSIDPADANVRDKSYAGPLPIFNRSQHAHVIEDLHCNLCNVDVSARSKHCSACNKCVCGFDHHCKWLNNCVGERNYRLFLHSVASALLGVLLLVLVATYVFVEFFVNPMRLRTNRHFEVLKNHTDVWFVFLPAAPVETQAPAILALAALLILLGLLSTALLGHLLCFHIYLMWHKLTTYEYIVQHRPPQEAKGVHRELESCPPKMRPIQEMEFYMRTFRHMRPEPPGQAGPAAVNANPSQFLATRGQAEPPPPSSPDTLALPPRIRPQKKRKRRVYKVRTSETSDPASGPRAPSRRSSSSTDSADASPVHAAGPAGAYHSASAESVDEIPVAQTRLGSAALAAPRGRGRQPTLARQARAPAVFVSPSSGEPRAPGGREAGLA

SEQ ID NO: 17318 - protein, 227 aa, Homo sapiens
MSCPVPACCALLLVLGLCRARPRNALLLLADDGGFESGAYNNSAIATPHLDALARRSLLFRNAFTSVSSCSPSRASLLTGLPQASSGRSTWGRRPCTRLTLRTRRRMAPSSRWGGTSLELSCSSGNSCRLRMTGLSSSTSPSTTPTAVGTPSPSTEPSVRSLATERAAWVVSQTGPPRPTTHWTCWCLTSSPTPRQPEPTWPLSTPPSAAWTKELDWCSRSCVTPVS

SEQ ID NO: 17319 - protein, 61 aa, Homo sapiens
SPRPGRTALLMASSLLGLPGVAPSSPCWSWPQECLCPGMCFTEDGSARARARPPEAPPALP

SEQ ID NO: 17320 - protein, 518 aa, Homo sapiens
MKSFSRILFLVFLLAGLRSKAAPSAPLPLGCGFPDMAHPSETSPLKGASENSKRDRLNPEFPGTPYPEPSKLPHTVSLETFPLDFTEPLNPDLRETPHPESPETPKADSLTTSISESLDMPKTNLSKMAHPESSETPTPGPTEMPHPGSPETPKPNFSKTSRPEFPETPNTDLMQTTPQESPEILQLNATEVSQAELPETSNTNPTKTPDPKSPEKHDLNSTETPNSEFLQALHPDPSKTPHPESHVTHNPSPTEISQTEFPTTYYQNATDVPRTSDPQISTSLYPETPVPFKDDATALNELSLNPKPGTPAAIQPDSPKLPTSDSPGMVELKAPQNSGPKESNVPPPSARIAGPPALPGRPSQLAPATLRAPQRHSRGEGVNTIIVVERVKETGVTLVGRPRGAAGGALCLFFAGTALLIGIFVLLWCLYRRAARQRPFAHHRLPDDGDEPVLHLDAPKDPYDLYFYAPDTWVPSHIATKQPPPTPPLPPKLPPPPRGGRPQRLEALSPATLPNNFV

SEQ ID NO: 17321 - protein, 109 aa, Homo sapiens
MAAEADGPLKRLLVPILLPEKCYDQLFVQWDLLHVPCLKILLSKGLGLGIVAGSLLVKLPQVFKILGAKSAEGLSLQSVMLELVALTGTMVYSITNNFPFRPAFLPPNS

SEQ ID NO: 17322 - protein, 1047 aa, Homo sapiens
MTILHGGFLLAEQLFHPKALAELTKSDWERVGRPIVEALREISSAAAHSQPFAWKKKALIIIWAKVLQPHPVTPSDTETRWQEDLFFSVGNMIPTINHTILFELLKSLEASGLFIQLLMALPTTICHAELERFLEHVTVDTSAEDVAFFLDVWWEVMKHKGHPQDPLLSQFSAMAHKYLPALDEFPHPPKRLRSDPDACPTMPLLAMLLRGLTQIQSRILGPGRKCCALANLADMLTVFALTEDDPQEVSATVYLDKLATVISVWNSDTQNPYHQQALAEKVKEAERDVSLTSLAKLPSETIFVGCEFLHHLLREWGEELQAVLRSSQGTSYDSYRLCDSLTSFSQNATLYLNRTSLSKEDRQVVSELAECVRDFLRKTSTVLKNRALEDITASIAMAVIQQKMDRHMEVCYIFASEKKWAFSDEWVACLGSNRALFRQPDLVLRLLETVIDVSTADRAIPESQIRQVIHLILECYADLSLPGKNKVLAGILRSWGRKGLSEKLLAYVEGFQEDLNTTFNQLTQSASEQGLAKAVASVARLVIVHPEVTVKKMCSLAVVNLGTHKFLAQILTAFPALRFVEEQGPNSSATFMVSCLKETVWMKFSTPKEEKQFLELLNCLMSPVKPQGIPVAALLEPDEVLKEFVLPFLRLDVEEVDLSLRIFIQTLEANACREEYWLQTCSPFPLLFSLCQLLDRFSKYWQLPKEKRCLSLDRKDLAIHILELLCEIVSANAETFSPDVWIKSLSWLHRKLEQLDWTVGLRLKSFFEGHFKCEVPATLFEICKLSEDEWTSQAHPGYGAGTGLLAWMECCCVSSGISERMLSLLVVDVGNPEEVRLFSKGFLVALVQVMPWCSPQEWQRLHQLTRRLLEKQLLHVPYSLEYIQFVPLLNLKPFAQELQLSVLFLRTFQFLCSHSCRDWLPLEGWNHVVKLLCGSLTRLLDSVRAIQAAGPWVQGPEQDLTQEALFVYTQVFCHALHIMAMLHPEVCEPLYVLALETLTCYETLSKTNPSVSSLLQRAHEQRFLKSIAEGIGPEERRQTLLQKMSSF

SEQ ID NO: 17323 - protein, 311 aa, Homo sapiens
MGVMAMLMLPLLLLGISGLLFIYQEVSRLWSKSAVQNKVVVITDAISGLGKECARVFHTGGARLVLCGKNWERLENLYDALISVADPSKTFTPKLVLLDLSDISCVPDVAKEVLDCYGCVDILINNASVKVKGPAHKISLELDKKIMDANYFGPITLTKALLPNMISRRTGQIVLVNNIQGKFGIPFRTTYAASKHAALGFFDCLRAEVEEYDVVISTVSPTFIRSYHVYPEQGNWEASIWKFFFRKLTYGVHPVEVAEEVMRTVRRKKQEVFMANPIPKAAVYVRTFFPEFFFAVVACGVKEKLNVPEEG

SEQ ID NO: 17324 - protein, 1099 aa, Homo sapiens
MDHTGAIDTEDEVGPLAHLAPSPQSEAVAHEFQELSLQSSQNLPPLNERKNVLQLRLQQRRTREQLVDQGIMPPLKSPAAFHEQIKSLERARTENFLKHKIRSRPDRSELVRMHILEETFAEPSLQATQMKLKRARLADDLNEKIAQRPGPMELVEKNILPVDSSVKEAIIGVGKEDYPHTQGDFSFDEDSSDALSPDQPASQESQGSAASPSEPKVSESPSPVTTNTPAQFASVSPTVPEFLKTPPTADQPPPRPAAPVLPTNTVSSAKPGPALVKQSHPKNPNDKHRSKKCKDPKPRVKKLKYHQYIPPDQKGEKNEPQMDSNYARLLQQQQLFLQLQILSQQKQHYNYQTILPAPFKPLNDKNSNSGNSALNNATPNTPRQNTSTPVRKPGPLPSSLDDLKVSELKTELKLRGLPVSGTKPDLIERLKPYQEVNSSGLAAGGIVAVSSSAIVTSNPEVTVALPVTTLHNTVTSSVSTLKAELPPTGTSNATRVENVHSPLPISPSPSEQSSLSTDDTNMADTFTEIMTMMSPSQFLSSSPLRMTNNEDSLSPTSSTLSNLELDAAEKDRKLQEKEKQIEELKRKLEQEQKLVEVLKMQLEVEKRGQQQRPLEAQPSAPGHSVKSDQKHGSLGSSIKDEASLPDCSSSRQPIPVASHAVGQPVSTGGQTLVAKKAVVIKQEVPVGQAEQQSVVSQFYVSSQGQPPPAVVAQPQALLTTQTAQLLLPVSIQGSSVTSVQLPVGSLKLQTSPQAGMQTQPQIATAAQIPTAALASGLAPTVPQTQDTFPQHVLSQPQQVRKVFTNSASSNTVLPYQRHPAPAVQQPFINKASNSVLQSRNAPLPSLQNGPNTPNKPSSPPPPQQFVVQHSLFGSPVAKTKDPPRYEEAIKQTRSTQAPLPEISNAHSQQMDDLFDILIKSGEISLPIKEEPSPISKMRPVTASITTMPVNTVVSRPPPQVQMAPPVSLEPMGSLSASLENQLEAFLDGTLPSANEIPPLQSSSEDREPFSLIEDLQNDLLSHSGMLDHSHSPMETSETQFAAGTPCLSLDLSDSNLDNMEWLDITMPNSSSGLTPLSTTAPSMFSADFLDPQDLPLPWD

SEQ ID NO: 17325 - protein, 179 aa, Homo sapiens
MTPSEGARAGTGRELEMLDSLLALGGLVLLRDSVEWEGRSLLKALVKKSALCGEQVHILGCEVSEEEFREGFDSDINNRLVYHDFFRDPLNWSKTEEAFPGGPLGALRAMCKRTDPVPVTIALDSLSWLLLRLPCTTLCQVLHAVSHQDSCPGETPPSLFPLIHLPLPRSVPLFLSTLE

SEQ ID NO: 17326 - protein, 2514 aa, Homo sapiens
MKPMKKACTGLSGPGSGSKSPPATRAKALRRRGAGEGDKPEEEDDEAQQPQPQSGPEEAEEGEEEEAERGPGAEGPPLELHPGDPAPGPAEDPKGDGEAGRWEPSLSRKTATFKSRAPKKKYVEEHGAGSSGVAGAPEERVRTPEEASGLGVPPRPPTSTRSSSTDTASEHSADLEDEPAEACGPGPWPPGSTSGSYDLRQLRSQRVLARRGDGLFLPAVVRQVRRSQDLGVQFPGDRALTFYEGVPGAGVDVVLDATPPPGALVVGTAVCTCVEPGVAAYREGVVVEVATKPAAYKVRLSPGPSSQPGLPGSLPQPPQPLHREPEEAVWVARSSLRLLRPPWEPETMLRKPPTGPEEEQAEPGATLPPCPAALDPKQPEDAEVSKISFGGNLGTHCEEGEEKHPPALGTPALLPLPPPQLLSPPPKSPAFVGPGRPGEQPSPCQEGSQGGSRSSSVASLEKGTAPAARARTPLTAAQQKYKKGDVVCTPSGIRKKFNGKQWRRLCSRDGCMKESQRRGYCSRHLSMRTKEMEGLADSGPGGAGRPAAVAAREGSTEFDWGDETSRDSEASSVAARGDSRPRLVAPADLSRFEFDECEAAVMLVSLGSSRSGTPSFSPVSTQSPFSPAPSPSPSPLFGFRPANFSPINASPVIQRTAVRSRHLSASTPKAGVLTPPDLGPHPPPPAPRERHSSGILPTFQTNLTFTVPISPGRRKTELLPHPGALGAPGAGGGGAAPDFPKSDSLDSGVDSVSHTPTPSTPAGFRAVSPAVPFSRSRQPSPLLLLPPPAGLTSDPGPSVRRVPAVQRDSPVIVRNPDVPLPSKFPGEVGTAGEVRAGGPGRGCRETPVPPGVASGKPGLPPPLPAPVPITVPPAAPTAVAQPMPAFGLASSPFQPVAFHPSPAALLPVLVPSSYTSHPAPKKEVIMGRPGTVWTNVEPRSVAVFPWHSLVPFLAPSQPDPSVQPSEAQQPASHPVASNQSKEPAESAAVAHERPPGGTGSADPERPPGATCPESPGPGPPHPLGVVESGKGPPPTTEEEASGPPGEPRLDSETESDHDDAFLSIMSPEIQLPLPPGKRRTQSLSALPKERDSSSEKDGRSPNKREKDHIRRPMNAFMIFSKRHRALVHQRHPNQDNRTVSKILGEWWYALGPKEKQKYHDLAFQVKEAHFKAHPDWKWCNKDRKKSSSEAKPTSLGLAGGHKETRERSMSETGTAAAPGVSSELLSVAAQTLLSSDTKAPGSSSCGAERLHTVGGPGSARPRAFSHSGVHSLDGGEVDSQALQELTQMVSGPASYSGPKPSTQYGAPGPFAAPGEGGALAATGRPPLLPTRASRSQRAASEDMTSDEERMVICEEEGDDDVIADDGFGTTDIDLKCKERVTDSESGDSSGEDPEGNKGFGRKVFSPVIRSSFTHCRPPLDPEPPGPPDPPVAFGKGYGSAPSSSASSPASSSASAATSFSLGSGTFKAQESGQGSTAGPLRPPPPGAGGPATPSKATRFLPMDPATFRRKRPESVGGLEPPGPSVIAAPPSGGGNILQTLVLPPNKEEQEGGGARVPSAPAPSLAYGAPAAPLSRPAATMVTNVVRPVSSTPVPIASKPFPTSGRAEASPNDTAGARTEMGTGSRVPGGSPLGVSLVYSDKKSAAATSPAPHLVAGPLLGTVGKAPATVTNLLVGTPGYGAPAPPAVQFIAQGAPGGGTTAGSGAGAGSGPNGPVPLGILQPGALGKAGGITQVQYILPTLPQQLQVAPAPAPAPGTKAAAPSGPAPTTSIRFTLPPGTSTNGKVLAATAPTPGIPILQSVPSAPPPKAQSVSPVQAPPPGGSAQLLPGKVLVPLAAPSMSVRGGGAGQPLPLVSPPFSVPVQNGAQPPSKIIQLTPVPVSTPSGLVPPLSPATLPGPTSQPQKVLLPSSTRITYVQSAGGHALPLGTSPASSQAGTVTSYGPTSSVALGFTSLGPSGPAFVQPLLSGQAPLLAPGQVGVSPVPSPQLPPACAAPGGPVITAFYSGSPAPTSSAPLAQPSQAPPSLVYTVATSTTPPAATILPKGPPAPATATPAPTSPFPSATGSMTYSLVAPKAQRPSPKAPQKVKAAIASIPVGSFEAGASGRPGPAPRQPLEPGPVREPTAPESELEGQPTPPAPPPLPETWTPTARSSPPLPPPAEERTSAKGPETMASKFPSSSSDWRVPGQGLENRGEPPTPPSPAPAPAVAPGGSSESSSGRAAGDTPERKEAAGTGKKVKVRPPPLKKTFDSVDKVLSEVDFEERFAELPEFRPEEVLPSPTLQSLATSPRAILGSYRKKRKNSTDLDSAPEDPTSPKRKMRRRSSCSSEPNTPKSAKCEGDIFTFDRTGTEAEDVLGELEYDKVPYSSLRRTLDQRRALVMQLFQDHGFFPSAQATAAFQARYADIFPSKVCLQLKIREVRQKIMQAATPTEQPPGAEAPLPVPPPTGTAAAPAPTPSPAGGPDPTSPSSDSGTAQAAPPLPPPPESGPGQPGWEGAPQPSPPPPGPSTAATGR

SEQ ID NO: 17327 - protein, 57 aa, Homo sapiens
MLELLQYEHFRKELVNAQCAKFIDEQQILHWQHYSRKRMRLQQALAEQQQQNNTSGK

SEQ ID NO: 17328 - protein, 88 aa, Homo sapiens
MGQPSLTWMLMVVVASWFITTAATDTSEARWCSECHSNATCTEDEAVTTCTCQEGFTGDGLTCVDLDECAIPGAHNCSANSSCVNTPG

SEQ ID NO: 17329 - protein, 338 aa, Homo sapiens
MAGVACLGKAADADEWCDSGLGSLGPDAAAPGGPGLGAELGPGLSWAPLVFGYVTEDGDTALHLAVIHQHEPFLDFLLGFSAGTEYMDLQNDLGQTALHLAAILGETSTVEKLYAAGAGLCVAERRGHTALHLACRVGAHACARALLQPRPRRPREAPDTYLAQGPDRTPDTNHTPVALYPDSDLEKEEEESEEDWKLQLEAENYEGHTPLHVAVIHKDVEMVRLLRDAGADLDKPEPTCGRSPLHLAVEAQAADVLELLLRAGANPAARMYGGRTPLGSAMLRPNPILARLLRAHGAPEPEGEDEKSGPCSSSSDSDSGDEGVSQEERQGSPAGGSG

SEQ ID NO: 17330 - protein, 87 aa, Homo sapiens
RCCRRRCCCRQPPHALRPLLLLPLVLLPPLAAAAAGPNRCDTIYQGFAECLIRLGDSMGRGGELETICSTVDKEYLIVLREPGGWMS

SEQ ID NO: 17331 - protein, 187 aa, Homo sapiens
MSCPVPACCALLLVLGLCRARPRNALLLLADDGGFESGAYNNSAIATPHLDALARRSLLFRNAFTSVSSCSPSRASLLTGLPQHQNGMYGLHQDVHHFNSFDKVRSLPLLLSQAGVRTGLSSRPGIIGKKHVGPETVYPFDFAYTEENGSVLQVGRNITRIKLLVRKFLQTQDDRPFFLYVAFHDPH

SEQ ID NO: 17332 - protein, 104 aa, Homo sapiens
MATVAELKAVLKDTLEKKGVLGHLKARIRAEVFNALDDDREPRPSLSHENLLINELIREYLEFNKYKYTASVLIAESGQPVVPLDRQFLIHELNAFEESKDNTI

SEQ ID NO: 17333 - protein, 147 aa, Homo sapiens
MELALRRSPVPRWLLLLPLLLGLNAGAVIDWPTEEGKEVWDYVTVRKDAYMFWWLYYATNSCKNFSELPLVMWLQGGPGGSSTGFGNFEEIGPFSEGPSSATLRGLPWVIPGSPLLIRCSPGDLTCTACLFSKTKVWQRCLRLQSKY

SEQ ID NO: 17334 - protein, 50 aa, Homo sapiens
MTELQSALLLRRQLAELNKNPVEGFSAGLIDDNDLYRWEVLIIGPPDTLY

SEQ ID NO: 17335 - protein, 60 aa, Homo sapiens
MRGMKLLGALLALAALLQGAVSLKIAAFNIQTFGETKMSNATLVSYIVQGCTRHLSLRGQ

SEQ ID NO: 17336 - protein, 132 aa, Homo sapiens
MQALVLLLCIGALLGHSSCQNPASPPEEGSPDPDSTGALVEEEDPFFKVPVNKLAAAVSNFGYDLYRVRSSTSPTTNVLLSPLSVATALSALSLGAEQRTESIIHRALYYDLISSPDIHGTYKELLDTVTAP

SEQ ID NO: 17337 - protein, 381 aa, Homo sapiens
MGTQALQGFLFLLFLPLLQPRGASAGSLHSPGLSECFQVNGADYRGHQNRTGPRGAGRPCLFWDQTQQHSYSSASDPHGRWGLGAHNFCRNPDGDVQPWCYVAETEEGIYWRYCDIPSCHMPGYLGCFVDSGAPPALSGPSGTSTKLTVQVCLRFCRMKGYQLCGGDGRLGVYEVSVGSCQGNWTAPQGVIYSPDFPDEYGPDRNCSWALGPPGAALELTFRLFELADPRDRLELRDAASGSLLRAFDGARPPPSGPLRLGTAALLLTFRSDARGHAQGFALTYRGLQDAAEDPEAPEGSAQTPAAPLDGANVSCSPRPGAPPAAIGGAVCWLREKGPRRWGLPGAPGEAGLCGTNSPEGWPCPAPPGTPRLRVLPRATGL

SEQ ID NO: 17338 - protein, 145 aa, Homo sapiens
MRWGQSASGSSVKFTRLPACPAKYLAQIIVMGVQVVGRAFARALRQEFAASRAAADARGRAGHRSAAASNLSGLSLQEAQQILNVSKLSPEEVQKNYEHLFKVNDKSVGGSFYLQSKVVRAKERLDEELKIQAQEDREKGQMPHT

SEQ ID NO: 17339 - protein, 1538 aa, Homo sapiens
MAAGSGGSGGSGGGPGPGPGGGGGPSGSGSGPGSNGGLGSGGELHPRTGRLVSLSACGRTARRQQPGQEFNHGLVLSREPLRDGRVFTVRIDRKVNSWSGSIEIGVTALDPSVLDFPSSATGLKGGSWVVSGCSVLRDGRSVLEEYGQDLDQLGEGDRVGVERTVAGELRLWVNGRDCGVAATGLPPRVWAVVDLYGKCTQITVLPPEPGFSPPTPIPTPPLEPLAPTEDSALAEQGTSADEDFANMELSEVVSNTILSAYNGGLLNVNLSSPPAGEGLGSSGAATSPILTSNDALLFHEKCGTLIKLSNNNKTAERRRPLDEFNNGVVMTNRPLRDNEMFEIRIDKLVDKWSGSIEIGVTTHNPNSLEYPATMTNLQSGTIMMSGCGILTNGKGTRREYCEFSLDELQEGDHIGLTRKSNSALHFFINGIDQGVATPLTPPVVYGVVDLYGMAVKVTIVHNNNHSDRLRRNNAILRALSPEGALRRAAPAAQAEPERLLFHPNCGQKAAITHEGRTALRPHATDDFNHGVVLSSRALRDGEVFQVRIDKMVDKWAGSIEIGVTTHNPAYLQLPSTMTNLRSGTWMMTGNGVMHNGTTILDEYGHNLDRLKAGDTVGVVRREDGTLHFFVNGMTQGPAAWNVPPGVYAVVDLYGQAAQATIVDDVEVAPVPEPLPEGNNQVSPSSPSSGAGGSDLRFHQLHGSNAVITNGGRTALRHNCRSEFNDAIVISNRALRDGELFEIVIQKMVDRWSGSIEAGVTAIRPEDLEFPNTMTDIDYDTWMLSGTAIMQDGNTMRNNYGCDLDALGTGARIGMMRTAKGDLHYFINGQDQGAACSGLPPEVYAVVDLYGQCVQVSITNATGPMDNSLATSNTATEKSFPLHSPVAGVAHRFHSTCGKNVTLEEDGTRAVRAAGYAHGLVFSTKELRAEEVFEVKVEELDEKWAGSLRLGLTTLAPGEMGPGAGGGGPGLPPSLPELRTKTTWMVSSCEVRRDGQLQRMNYGRNLERLGVGSRVGVRRGADDTMHILVDGEDMGPAATGIAKNVWAVLDLYGPVRGVSIVSSTRLEESEGTQPPSPSSDTGSEGEEDDEGEEHGLGGQNEVGIIPTTLEFLENHGKNILLSNGNRTATRVASYNQGIVVINQPLVPQLLVQVRIDFLNRQWTSSLVLGVITCAPERLNFPASACALKRAAWLLRGRGVFHNGLKICEKFGPNLDTCPEGTILGLRLDSSGGLHLHVNGVDQGVAVPDVPQPCHALVDLYGQCEQVTIVNPEPGAASGKSAGTQGDMEKADMVDGIKESVCWGPPPAASPLKSCEYHALCSRFQELLLLPEDYFMPPPKRSLCYCESCRKLRGDEAHRRRGEPPREYALPFGWCRFNLRVNPRLEAGTLTKKWHMAYHGSNVAAVRRVLDRGELGAGTASILSCRPLKGEPGVGFEEPGENCAPPREEQPPPVLLSPSLQYAGAETLASKVQFRDPKSQRTHQAQVAFQVCVRPGSYTPGPPSAALGEPPDPHFSPAELEWVTKEKGATLLCALLVRVE

SEQ ID NO: 17340 - protein, 128 aa, Homo sapiens
MAAAEGPVGDGELWQTWLPNHVVFLRLREGLKNQSPTEAEKPASSSLPSSPPPQLLTRNVVFGLGGELFLWDGEDSSFLVVRLRGPSGGGEEPALSQYQAGVQWRHLGSPQPPPSSFKRFFCLSPPRE

SEQ ID NO: 17341 - protein, 49 aa, Homo sapiens
SYIALPLTLLVLLAGYNHDKGHIRPGERPAHPWGLISKRPASFELKPTH

SEQ ID NO: 17342 - protein, 128 aa, Homo sapiens
MPHLMERMVGSGLLWLALVSCILTQASAVQRGYGNPIEASSYGLDLDCGAPGTPEAHVCFDPCQNYTLLDEPFRSTENSAGSQGCDKNMSGWYRFVGEGGVRMSETCVQVHRCQTDAPMWLNGTHPAL

SEQ ID NO: 17343 - protein, 998 aa, Homo sapiens
MAQVAMSTLPVEDEESSESRMVVTFLMSALESMCKELAKSKAEVACIAVYETDVFVVGTERGRAFVNTRKDFQKDFVKYCVEEEEKAAEMHKMKSTTQANRMSVDAVEIETLRKTVEDYFCFCYGKALGKSTVVPVPYEKMLRDQSAVVVQGLPEGVAFKHPENYDLATLKWILENKAGISFIIKRPFLEPKKHVGGRVMVTDADRSILSPGGSCGPIKVKTEPTEDSGISLEMAAVTVKEESEDPDYYQYNIQAGPSETDDVDEKQPLSKPLQGSHHSSEGNEGTEMEVPAEDSTQHVPSETSEDPEVEVTIEDDDYSPPSKRPKANELPQPPVPEPANAGKRKVREFNFEKWNARITDLRKQVEELFERKYAQAIKAKGPVTIPYPLFQSHVEDLYVEGLPEGIPFRRPSTYGIPRLERILLAKERIRFVIKKHELLNSTREDLQLDKPASGVKEEWYARITKLRKMVDQLFCKKFAEALGSTEAKAVPYQKFEAHPNDLYVEGLPENIPFRSPSWYGIPRLEKIIQVGNRIKFVIKRPELLTHSTTEVTQPRTNTPVKEDWNVRITKLRKQVEEIFNLKFAQALGLTEAVKVPYPVFESNPEFLYVEGLPEGIPFRSPTWFGIPRLERIVRGSNKIKFVVKKPELVISYLPPGMASKINTKALQSPKRPRSPGSNSKVPEIEVTVEGPNNNNPQTSAVRTPTQTNGSNVPFKPRGREFSFEAWNAKITDLKQKVENLFNEKCGEALGLKQAVKVPFALFESFPEDFYVEGLPEGVPFRRPSTFGIPRLEKILRNKAKIKFIIKKPEMFETAIKESTSSKSPPRKINSSPNVNTTASGVEDLNIIQVTIPDDDNERLSKVEKARQLREQVNDLFSRKFGEAIGMGFPVKVPYRKITINPGCVVVDGMPPGVSFKAPSYLEISSMRRILDSAEFIKFTVIRPFPGLVINNQLVDQSESEGPVIQESAEPSQLEVPATEEIKETDGSSQIKQEPDPTW

SEQ ID NO: 17344 - protein, 208 aa, Homo sapiens
MLRRALLCLAVAALVRADAPEEEDHVLVLRKSNFAEALAAHKYLLVEFSGREADDIVNWLKKRTGPAATTLPDGAAAESLVESSEVAVIGFFKDVESDSAKQFLQAAEAIDDIPFGITSNSDVFSKYQLDKDGVVLFKKFDEGRNNFEGEVTKENLLDFIKHNQLPLVIEFTEQTAPKIFGGEIKTHILLFLPKSVSDYDGKLSNFKT

SEQ ID NO: 17345 - protein, 47 aa, Homo sapiens
MANVADTKLYDILGVPPGASENELKKAYRKLAKEYHPDKNPNAGDKN

SEQ ID NO: 17346 - protein, 41 aa, Homo sapiens
ERMVGSGLLWLALVSCILTQASAVQRGKYSAHLASQMSRKT

SEQ ID NO: 17347 - protein, 125 aa, Homo sapiens
MAGAGPTMLLREENGCCSRRQSSSSAGDSDGEREDSAAERARQQLEALLNKTMRIRMTDGRTLVGCFLCTDRDCNVILGSAQEFLKPSDSFSAGEPRVLGLAMVPGHHIVSIEVQRESLTGPPYL

SEQ ID NO: 17348 - protein, 807 aa, Homo sapiens
MRLSPAPLKLSRTPALLALALPLAAALAFSDETLDKVPKSEGYCSRILRAQGTRREGYTEFSLRVEGDPDFYKPGTSYRVTLSAAPPSYFRGFTLIALRENREGDKEEDHAGTFQIIDEEETQFMSNCPVAVTESTPRRRTRIQVFWIAPPAGTGCVILKASIVQKRIIYFQDEGSLTKKLCEQDSTFDGVTDKPILDCCACGTAKYRLTFYGNWSEKTHPKDYPRRANHWSAIIGGSHSKNYVLWEYGGYASEGVKQVAELGSPVKMEEEIRQQSDEVLTVIKAKAQWPAWQPLNVRAAPSAEFSVDRTRHLMSFLTMMGPSPDWNVGLSAEDLCTKECGWVQKVVQDLIPWDAGTDSGVTYESPNKPTIPQEKIRPLTSLDHPQSPFYDPEGGSITQVARVVIERIARKGEQCNIVPDNVDDIVADLAPEEKDEDDTPETCIYSNWSPWSACSSSTCDKGKRMRQRMLKAQLDLSVPCPDTQDFQPCMGPGCSDEDGSTCTMSEWITWSPCSISCGMGMRSRERYVKQFPEDGSVCTLPTEETEKCTVNEECSPSSCLMTEWGEWDECSATCGMGMKKRHRMIKMNPADGSMCKAETSQAEKCMMPECHTIPCLLSPWSEWSDCSVTCGKGMRTRQRMLKSLAELGDCNEDLEQVEKCMLPECPIDCELTEWSQWSECNKSCGKGHVIRTRMIQMEPQFGGAPCPETVQRKKCRIRKCLRNPSIQKLRWREARESRRSEQLKEESEGEQFPGCRMRPWTAWSECTKLCGGGIQERYMTVKKRFKSSQFTSCKDKKEIRACNVHPC

SEQ ID NO: 17349 - protein, 276 aa, Homo sapiens
MEIVWEVLFLLQANFIVCISAQQNSPKIHEGWWAYKEVVQGSFVPVPSFWGLVNSAWNLCSVGKRQSPVNIETSHMIFDPFLTPLRINTGGRKVSGTMYNTGRHVSLRLDKEHLVNISGGPMTYSHRLEEIRLHFGSEDSQGSEHLLNGQAFSGEVQLIHYNHELYTNVTEAAKSPNGLVVVSIFIKVSDSSNPFLNRMLNRDTITRITYKNDAYLLQGLNIEELYPETSSFITYDGSMTIPPCYETASWIIMNKPVYITRMQMHSLRLLSQNQPS

SEQ ID NO: 17350 - protein, 563 aa, Homo sapiens
MGSLSNYALLQLTLTAFLTILVQPQHLLAPVFRTLSILTNQSNCWLCEHLDNAEQPELVFVPASASTWWTYSGQWMYERVWYPQAEVQNHSTSSYRKVTWHWEASMEAQGLSFAQVRLLEGNFSLCVENKNGSGPFLGNIPKQYCNQILWFDSTDGTFMPSIDVTNESRNDDDDTSVCLGTRQCSWFAGCTNRTWNSSAVPLIGLPNTQDYKWVDRNSGLTWSGNDTCLYSCQNQTKGLLYQLFRNLFCSYGLTEAHGKWRCADASITNDKGHDGHRTPTWWLTGSNLTLSVNNSGLFFLCGNGVYKGFPPKWSGRCGLGYLVPSLTRYLTLNASQITNLRSFIHKVTPHRCTQGDTDNPPLYCNPKDNSTIRALFPSLGTYDLEKAILNISKAMEQEFSATKQTLEAHQSKVSSLASASRKDHVLDIPTTQRQTACGTVGKQCCLYINYSEEIKSNIQRLHEASENLKNVPLLDWQGIFAKVGDWFRSWGYVLLIVLFCLFIFVLIYVRVFRKSRRSLNSQPLNLALSPQQSAQLLVSETSCQVSNRAMKGLTTHQYDTSLL

SEQ ID NO: 17351 - protein, 208 aa, Homo sapiens
MTGPCIRQLSLQILFPLCVAVDVWSTLADFCNILTAVNQSEVPLYKDPDDDLTLLILEEDRLLSGFVPLLAAPQDPCYVEKTSDKVIAADCKRVTVLKYFLEALCGQEEPLLAFKGGKYVSVAPVPDTMGKEMGSQEGTRLEDEEEDVVIEDFEEDSEAEGSGGEDDIRELRAKKLALARKIAEQQRRQEKIQAVLEDHSQMRQMELE

SEQ ID NO: 17352 - protein, 932 aa, Homo sapiens
MAAPTKCQLRGRLVLLCSLLGMLWEARASQIRYSVPEETEKGYIVGNISKDLALEPRELAERRVRIVSRGRTQLFSLNPRSGTLVTAGRIDREELCAQSPRCLVNFKVLVEDRVKLYGIEIEVTDINDSAPKFQAESLEVKINEIAVPGARYPLPEAIDPDVGVNSLQSYQLSPNHHFSLNVQTGDNGAINPELVLERALDREEATAHHLVLTASDGGEPRRSSTVRIHVTVLDTNDNAPVFAQRIYRVKVLENVPPGTWLLTATASDLDEGINGKVAYKFWKINEKQSLLFQLNENTGEISTAKSLDYEECSFYEMEIQAEDGGGLKGWTKVLISVEDVNDNRPEVTITSLFSPVREDAPQGTVILLFNAHDRDSGKNGQVVCSIQENLSFTLENSEEDYYRLLTAQILDREKASEYNITVTATDRGTPPLSTEIHITLQVTDINDNPPAFSQASYSVYLPENNARGTSIFSVIAYDPDSNENSRVIYSLAEDTIQGSPLSTYVSINSDTGVLYALCSFDYEQFRDLQMQVTASDSGSPPLSSNVSLRLFVLDQNDNAPEILYPALPTDGSTGVELAPRSAEPGYLVTKVVAVDRDSGQNAWLSYRLFKASEPGLFSVGLHTGEVRTARALLDRDALKQSLVVAVQDHGQPPLSATVTLTVAIADSIPDILADLGSLQIPADLEASDLTLYLVVAVAVVSCVFLTFVITLLALRLRHWHSSHLLRATSDGLAGVPTSHFVGVDGVRAFLQTYSQEFSLTADSRKSHLIFPQPNYADTLISQQSCEKNEPLCVSVDSKFPIEDTPLVPQAPPNTDWRFSQAQRPGTSGSQNGDDTGTWPNNQFDTEMLQAMILASASEAADGSSTLGGGAGTMGLSARYGPQFTLQHVPDYRQNVYIPGSNATLTNAAGKRDGKAPAGGNGNKKKSGKKEKK

SEQ ID NO: 17353 - protein, 141 aa, Homo sapiens
MIKQFLRDVDWGEVDYLIVDTPPGTSDEHLSVVRYLATAHIDGAVIITTPQEVSLQDVRKEINFCRKVKLPIIGVVENMSGFICPKCKKESQIFPPTTGGAELMCQDLEVPLLGRVPLDPLIGIQEFCNLHQSKEENLISS

SEQ ID NO: 17354 - protein, 63 aa, Homo sapiens
MTSSPVSRVVYNGKRTSSPRSPPSSSEIFTPAHEENVRFIYEAFKPIDLSDLKRRSTQDAKKS

SEQ ID NO: 17355 - protein, 1130 aa, Homo sapiens
MAAAVLSGPSAGSAAGVPGGTGGLSAVSSGPRLRLLLLESVSGLLQPRTGSAVAPVHPPNRSAPHLPGLMCLLRLHGSVGGAQNLSALGALVSLSNARLSSIKTRFEGLCLLSLLVGESPTELFQQHCVSWLRSIQQVLQTQDPPATMELAVAVLRDLLRYAAQLPALFRDISMNHLPGLLTSLLGLRPECEQSALEGMKACMTYFPRACGSLKGKLASFFLSRVDALSPQLQQLACECYSRLPSLGAGFSQGLKHTESWEQELHSLLASLHTLLGALYEGAETAPVQNEGPGVEMLLSSEDGDAHVLLQLRQRFSGLARCLGLMLSSEFGAPVSVPVQEILDFICRTLSVSSKNISLHGDGPLRLLLLPSIHLEALDLLSALILACGSRLLRFGILIGRLLPQVLNSWSIGRDSLSPGQERPYSTVRTKVYAILELWVQVCGASAGMLQGGASGEALLTHLLSDISPPADALKLRSPRGSPDGSLQTGKPSAPKKLKLDVGEAMAPPSHRKGDSNANSDVCAAALRGLSRTILMCGPLIKEETHRRLHDLVLPLVMGVQQGEVLGSSPYTSSRCRRELYCLLLALLLAPSPRCPPPLACALQAFSLGQREDSLEVSSFCSEALVTCAALTHPRVPPLQPMGPTCPTPAPVPPPEAPSPFRAPPFHPPGPMPSVGSMPSAGPMPSAGPMPSAGPVPSARPGPPTTANHLGLSVPGLVSVPPRLLPGPENHRAGSNEDPILAPSGTPPPTIPPDETFGGRVPRPAFVHYDKEEASDVEISLESDSDDSVVIVPEGLPPLPPPPPSGATPPPIAPTGPPTASPPVPAKEEPEELPAAPGPLPPPPPPPPPVPGPVTLPPPQLVPEGTPGGGGPPALEEDLTVININSSDEEEEEEEEEEEEEEEEEEEEEDFEEEEEDEEEYFEEEEEEEEEFEEEFEEEEGELEEEEEEEDEEEEEELEEVEDLEFGTAGGEVEEGAPPPPTLPPALPPPESPPKVQPEPEPEPGLLLEVEEPGTEEERGADTAPTLAPEALPSQGEVEREGESPAAGPPPQELVEEEPSAPPTLLEEETEDGSDKVQPPPETPAEEEMETETEAEALQEKEQDDTAAMLADFIDCPPDDEKPPPPTEPDS

SEQ ID NO: 17356 - protein, 236 aa, Homo sapiens
MRGVSCLQVLLLLVLACGQPRMSSRIVGGRDGRDGEWPWQASIQHRGAHVCGGSLIAPQWVLTAAHCFPRRALPAEYRVRLGALRLGSTSPRTLSVPVRRVLLPPDYSEDGARGDLALLQLRRPVPLSARVQPVCLPVPGARPPPGTPCRVTGWGSLRPGVPLPEWRPLQGVRVPLLDSRTCDGLYHVGADVPQAERIVLPGSLCAGYPQGHKDACQVCTQPPQPPESPPCAQHPP

SEQ ID NO: 17357 - protein, 161 aa, Homo sapiens
MGQPSLTWMLMVVVASWFITTAATDTSEARTKYNCPARWSWRTPQRGGDTEQGWCSECHSNATCTEDEAVTTCTCQEGFTGDGLTCVDLDECAIPGAHNCSANSSCVNTPGSFSCVCPEGFRLSPGLGCTDVDECAEPGLSHCHALATCVNVVGSYLCVCP

SEQ ID NO: 17358 - protein, 219 aa, Homo sapiens
MELAAGSFSEEQFWEACAELQQPALAGADWQLLVETSGISIYRLLDKKTGLYEYKVFGVLEDCSPTLLADIYMDSDYRKQWDQYVKELYEQECNGETVVYWEVKYPFPMSNRDYVYLRQRRDLDMEGRKIHVILARSTSMPQLGERSGVIRVKQYKQSLAIESDGKKGSKVFMYYFDNPGGQIPSWLINWAAKNQSRTKREAQNQRDLIKFLANPNILQ

SEQ ID NO: 17359 - protein, 145 aa, Homo sapiens
MPHLMERMVGSGLLWLALVSCILTQASAVQRDPSTVEDKCEKACRPEEECLALNSTWGCFCRQDLNSSDVHSLQPQLDCGPREIKVKVDKCLLGGLGLGEEVIAYLRDPNCSSILQTEERNWVSVTSPVQASACRNILERNQTHA

SEQ ID NO: 17360 - protein, 1473 aa, Homo sapiens
MAGGAWGRLACYLEFLKKEELKEFQLLLANKAHSRSSSGETPAQPEKTSGMEVASYLVAQYGEQRAWDLALHTWEQMGLRSLCAQAQEGAGHSPSFPYSPSEPHLGSPSQPTSTAVLMPWIHELPAGCTQGSERRVLRQLPDTSGRRWREISASLLYQALPSSPDHESPSQESPNAPTSTAVLGSWGSPPQPSLAPREQEAPGTQWPLDETSGIYYTEIREREREKSEKGRPPWAAVVGTPPQAHTSLQPHHHPWEPSVRESLCSTWPWKNEDFNQKFTQLLLLQRPHPRSQDPLVKRSWPDYVEENRGHLIEIRDLFGPGLDTQEPRIVILQGAAGIGKSTLARQVKEAWGRGQLYGDRFQHVFYFSCRELAQSKVVSLAELIGKDGTATPAPIRQILSRPERLLFILDGVDEPGWVLQEPSSELCLHWSQPQPADALLGSLLGKTILPEASFLITARTTALQNLIPSLEQARWVEVLGFSESSRKEYFYRYFTDERQAIRAFRLVKSNKELWALCLVPWVSWLACTCLMQQMKRKEKLTLTSKTTTTLCLHYLAQALQAQPLGPQLRDLCSLAAEGIWQKKTLFSPDDLRKHGLDGAIISTFLKMGILQEHPIPLSYSFIHLCFQEFFAAMSYVLEDEKGRGKHSNCIIDLEKTLEAYGIHGLFGASTTRFLLGLLSDEGEREMENIFHCRLSQGRNLMQWVPSLQLLLQPHSLESLHCLYETRNKTFLTQVMAHFEEMGMCVETDMELLVCTFCIKFSRHVKKLQLIEGRQHRSTWSPTMVVLFRWVPVTDAYWQILFSVLKVTRNLKELDLSGNSLSHSAVKSLCKTLRRPRCLLETLRLAGCGLTAEDCKDLAFGLRANQTLTELDLSFNVLTDAGAKHLCQRLRQPSCKLQRLQLVSCGLTSDCCQDLASVLSASPSLKELDLQQNNLDDVGVRLLCEGLRHPACKLIRLGLDQTTLSDEMRQELRALEQEKPQLLIFSRRKPSVMTPTEGLDTGEMSNSTSSLKRQRLGSERAASHVAQANLKLLDVSKIFPIAEIAEESSPEVVPVELLCVPSPASQGDLHTKPLGTDDDFWGPTGPVATEVVDKEKNLYRVHFPVAGSYRWPNTGLCFVMREAVTVEIEFCVWDQFLGEINPQHSWMVAGPLLDIKAEPGAVEAVHLPHFVALQGGHVDTSLFQMAHFKEEGMLLEKPARVELHHIVLENPSFSPLGVLLKMIHNALRFIPVTSVVLLYHRVHPEEVTFHLYLIPSDCSIRKAIDDLEMKFQFVRIHKPPPLTPLYMGCRYTVSGSGSGMLEILPKELELCYRSPGEDQLFSEFYVGHLGSGIRLQVKDKKDETLVWEALVKPGDLMPATTLIPPARIAVPSPLDAPQLLHFVDQYREQLIARVTSVEVVLDKLHGQVLSQEQYERVLAENTRPSQMRKLFSLSQSWDRKCKDGLYQALKETHPHLIMELWEKGSKKGLLPLSS

SEQ ID NO: 17361 - protein, 36 aa, Homo sapiens
MKFVYKEEHPFEKRRSEGEKIRKKYPDRVPLVSSTS

SEQ ID NO: 17362 - protein, 83 aa, Homo sapiens
MANSGLQLLGFSMALLGWVGLVACTAIPQWQMSSYAGDNIITAQAMYKGLWMDCVTQSTGMMSCKMYDSVLALSGNSVPNCSI

SEQ ID NO: 17363 - protein, 399 aa, Homo sapiens
MGTQALQGFLFLLFLPLLQPRGASAGSLHSPGLSECFQVNGADYRGHQNRTGPRGAGRPCLFWDQTQQHSYSSASDPHGRWGLGAHNFCRNPDGDVQPWCYVAETEEGIYWRYCDIPSCHMPGYLGCFVDSGAPPALSGPSGTSTKLTVQVCLRFCRMKGYQLAGVEAGYACFCGSESDLARGRLAPATDCDQICFGHPGQLCGGDGRLGVYEVSVGSCQGNWTAPQGVIYSPDFPDEYGPDRNCSWALGPPGAALELTFRLFELADPRDRLELRDAASGSLLRAFDGARPPPSGPLRLGTAALLLTFRSDARGHAQGFALTYRGLQDAAEDPEAPEGSAQTPAAPLDGANVSCSPRPGAPPAAIGGEAGARDGSESGSRPLAPILTAAVCPQPGSSRR

SEQ ID NO: 17364 - protein, 226 aa, Homo sapiens
MARGSLRRLLRLLVLGLWLALLRSVAGEQAPGTRDSGVGEPRAGAREPDWVSGEQRRTGGTGGCGDLGSGGLQTARSRLWEVPSLSKLHSQSGPQFLPPSNWGWGGSSVPQVRSTSNGERKRCSTSCPLPAALAHPWGRSEPDLRAGAAFWLFGLETMPQEREVHHPHRGDRRRGLPSCGADPVTMCPLPAGARPLIIHSSILEPVSASQTRREPSSSNHKGGGGR

SEQ ID NO: 17365 - protein, 156 aa, Homo sapiens
MLRRALLCLAVAALVRADAPEEEDHVLVLRKSNFAEALAAHKYLLVDATEESDLAQQYGVRGYPTIKFFRNGDTASPKEYTAGREADDIVNWLKKRTGPAATTLPDGAAAESLVESSEVAVIGFFKDVESDSAKQFLQAAEAIDDIPFGITSNSDV

SEQ ID NO: 17366 - protein, 434 aa, Homo sapiens
MYELLVLFMLIQPQSMAHPCGGTPTYPESQIFFPTIHERPVSFSPPPTCPPKVAISQRRKSTSFLEAQTHHFQPLLRTVGQSLLPPGGSPTNWTPEAVVMLGTTASRVTGESCEIQVHPMFEPSQVYSDYRPGLVLPEEAHYFIPQEAVYVAGVHYQARVAEQYEGIPYNSSVLSSPMKQIPEQKPVQGGPTSSSVFEFPSGQAFLVGHLQNLRLDSGLGPGSPLSSISAPISTDATRLKFHPVFVPHSAPAVLTHNNESRSNCVFEFHVHTPSSSSGEGGGILPQRVYRNRQVAVDLNQEELPPQSVGLHGYLQPVTEEKHNYHAPELTVSVVEPIGQNWPIGSPEYSSDSSQITSSDPSDFQSPPPTGGAAAPFGSDVSMPFIHLPQTVLQESPLFFCFPQGTTSQQVLTASFSSGGSALHPQVIGKLPQLF

SEQ ID NO: 17367 - protein, 93 aa, Homo sapiens
MGPPGSPWQWVTLLLGLLLPPAAPFWLLNVLFPPHTTPKAELSNHTRPVILARSQAGQTRCGELDVLPQDRGLLHHLAGSQHVPTPWGRLLDR

SEQ ID NO: 17368 - protein, 266 aa, Homo sapiens
MPPRGPASELLLLRLLLLGAATAAPLAPRPSKEELTRCLAEVVTEVLTVGQVQRGPCTALLHKELCGTEPHGCASTEEKGLLLGDFKKQEAGKMRSSQEVRDEEEEEVAERTHKSEVQEQAIRMQGHRQLHQEEDEEEEKEERKRGPMETFEDLWQRHLENGGDLQKRVAEKASDKETAQFQAEEKGVRVLGGDRSLWQGAERGGGERREDLPHHHHHHHQPEAEPRQEKEEASEREEKEVEQLEHLRDELKKVTETLGEQLRREG

SEQ ID NO: 17369 - protein, 188 aa, Homo sapiens
MLRRALLCLAVAALVRADAPEEEDHVLVLRKSNFAEALAAHKYLLVEFYAPWCGHCKALAPEYAKAAGKLKAEGSEIRLAKVDATEESDLAQQYGVRGYPTIKFFRNGDTASPKEYTAAESLVESSEVAVIGFFKDVESDSAKQFLQAAEAIDDIPFGITSNSDVFSKYQLDKDGVVLFKKFDEGRNN

SEQ ID NO: 17370 - protein, 176 aa, Homo sapiens
MWRLALGGVFLAAAQACVFCRLPAHDLSGRLARLCSQMEARQKECGASPDFSAFALDEVSMNKVTEKTHRVLRVMEIKEAVSSLPSYWSWLRKTKLPEYTREALCPPACRGSTTLYNCSTCKGTEVSCWPRKRCFPGSQDLWEAKILLLSIFGAFLLLGVLSLLVESHHLQAKSGL

SEQ ID NO: 17371 - protein, 135 aa, Homo sapiens
MAGAGPTMLLREENGCCSRRQSSSSAGDSDGEREDSAAERARQQLEALLNKTMRIRMTDGRTLVGCFLCTDRDCNVILGSAQEFLKPSGQCPGNAHPPDSFSAGEPRVLGLAMVPGHHIVSIEVQRESLTGPPYL

SEQ ID NO: 17372 - protein, 111 aa, Homo sapiens
MQALVLLLCIGALLGHSSCQNPASPPEEGSPDPDSTGALVEEEDPFFKVPVNKLAAAVSNFGYDLYRVRSSTSPTTNVLLSPLSVATALSALSLGAEQRTESIIHRALYYD

SEQ ID NO: 17373 - protein, 161 aa, Homo sapiens
MGQPSLTWMLMVVVASWFITTAATDTSEARTKYNCPARWSWRTPQRGGDTEQGPDEDFTSQGSRKHKMCKEREGQQVHRKSYQRWCSECHSNATCTEDEAVTTCTCQEGFTGDGLTCVDLDECAIPGAHNCSANSSCVNTPGSFSCVCPEGFRLSPGLGCT

SEQ ID NO: 17374 - protein, 490 aa, Homo sapiens
MEDSASASLSSAAATGTSTSTPAAPTARKQLDKEQVRKAVDALLTHCKSRKNNYGLLLNENESLFLMVVLWKIPSKELRVRLTLPHSIRSDSEDICLFTKDEPNSTPEKTEQFYRKLLNKHGIKTVSQIISLQTLKKEYKSYEAKLRLLSSFDFFLTDARIRRLLPSLIGRHFYQRKKVPVSVNLLSKNLSREINDCIGGTVLNISKSGSCSAIRIGHVGMQIEHIIENIVAVTKGLSEKLPEKWESVKLLFVKTEKSAALPIFSSFVSNWDEATKRSLLNKKKKEARRKRRERNFEKQKERKKKRQQARKTASVLSKDDVAPESGDTTVKKPESKKEQTPEHGKKKRGRGKAQVKATNESEDEIPQLVPIGKKTPANEKVEIQKHATGKKSPAKSPNPSTPRGKKRKALPASETPKAAESETPGKSPEKKPKIKEEAVKEKSPSLGKKDARQTPKKPEAKFFTTPSKSVRKASHTPKKWPKKPKVPQST

SEQ ID NO: 17375 - protein, 87 aa, Homo sapiens
MQALVLLLCIGALLGHSSCQNPASPPEEGSPDPDSTGALVEEEDPFFKVPVNKLAAAVSNFGYDLYRVRSSTSPTTNVLLSPLSVAT

SEQ ID NO: 17376 - protein, 424 aa, Homo sapiens
MGTQALQGFLFLLFLPLLQPRGASAGSLHSPGLSECFQVNGADYRGHQNRTGPRGAGRPCLFWDQTQQHSYSSASDPHGRWGLGAHNFCRNPDGDVQPWCYVAETEEGIYWRYCDIPSCHMPGYLGCFVDSGAPPALSGPSGTSTKLTVQVCLRFCRMKGYQLAGVEAGYACFCGSESDLARGRLAPATDCDQICFGHPGQLCGGDGRLGVYEVSVGSCQGNWTAPQGVIYSPDFPDEYGPDRNCSWALGPPGAALELTFRLFELADPRDRLELRDAASGSLLRAFDGARPPPSGPLRLGTAALLLTFRSDARGHAQGFALTYRGLQDAAEDPEAPEGSAQTPAAPLDGANVSCSPRPGAPPAAIGARVFSTVTAVSVLLLLLLGLLRPLRRRCGALGQGLRADRWWGAGAPEGNRARKELLGS

SEQ ID NO: 17377 - protein, 523 aa, Homo sapiens
MPPCQPQRPLLLLLLLLACQPQVPSAQVMDFLFEKWKLYGDQCHHNLSLLPPPTELVCNRTFDKYSCWPDTPANTTANISCPWYLPWHHKVQHRFVFKRCGPDGQWVRGPRGQPWRDASQCQMDGEEIEVQKEVAKMYSSFQVMYTVGYSLSLGALLLALAILGGLSKLHCTRNAIHANLFASFVLKASSVLVIDGLLRTRYSQKIGDDLSVSTWLSDGVSPPRRPQAGGWVGSQAGGHVAALTLHLYQAVAGCRVAAVFMQYGIVANYCWLLVEGLYLHNLLGLATLPERSFFSLYLGIGWGAPMLFVVPWAVVKCLFENVQCWTSNDNMGFWWILRFPVFLAILINFFIFVRIVQLLVAKLRARQMHHTDYKFRLAKSTLTLIPLLGVHEVVFAFVTDEHAQGTLRSAKLFFDLFLSSFQVPARPPAPPPGAQCATPDHPVSPGPAGGCPLLLPQQGGAVGAAAALAPLAPGQSAMGGAEHQQPQGLIFARPRPSQQGAAVWEGWWQPGFICGDPLGWWPP

SEQ ID NO: 17378 - protein, 133 aa, Homo sapiens
MHPAAFPLPVVVAAVLWGAAPTRGLIRAGFLVEAHPDNACSPIAPPPPAPVNGSVFIALLRRFDCNFDLKVLNAQKAGYGAAVVHNVNSNELLNMVWNSEEIQQQIWIPSVFIGERSSEYLRALFVYEKGRPV

SEQ ID NO: 17379 - protein, 53 aa, Homo sapiens
MIRNWLTIFILFPLKLVEKCESSVSLTVPPVVKLENGSSTNVSLTLRLWCLLE

SEQ ID NO: 17380 - protein, 163 aa, Homo sapiens
MPHLMERMVGSGLLWLALVSCILTQASAVQRGEGGVRMSETCVQVHRCQTDAPMWLNGTHPALGDGITNHTACAHWSGNCCFWKTEVLVKACPGGYHVYRLEGTPWCNLRYCTDPSTVEDKCEKACRPEEECLALNSTWGCFCRQDLNSSDVHSLQPQLDCGP

SEQ ID NO: 17381 - protein, 86 aa, Homo sapiens
MGQPSLTWMLMVVVASWFITTAATDTSEARWCSECHSNATCTEDEAVTTCTCQEGFTGDGLTCVDLDECAIPGAHNCSANSSCVNT

SEQ ID NO: 17382 - protein, 553 aa, Homo sapiens
MSLSRSEEMHRLTENVYKRVEEKYQRNLFPIFSPSALKPESRNFRGESWQGTIMEQFNPSLRNFIAMGKNYEKALAGVTYAAKGYFDALVKMGELASESQGSKELGDVLFQMAEVHRQIQNQLEEMLKSFHNELLTQLEQKVELDSRYLSAALKKYQTEQRSKGDALDKCQAELKKLRKKSQGSKNPQKYSDKELQYIDAISNKQGELENYVSDGYKTALTEERRRFCFLVEKQCAVAKNSAAYHSKGKELLAQKLPLWQQACADPSKIPERAVQLMQQVASNGATLPSALSASKSNLVISDPIPGAKPLPVPPELAPFVGRMSAQESTPIMNGVTGPDGEDYSPWADRKAAQPKSLSPPQSQSKLSDSYSNTLPVRKSVTPKNSYATTENKTLPRSSSMAAGLERNGRMRVKAIFSHAAGDNSTLLSFKEGDLITLLVPEARDGWHYGESEKTKMRGWFPFSYTRVLDSDGSDRLHMSLQQGKSSSTGNLLDKDDLAIPPPDYGAASRAFPAQTASGFKQRPYSVAVPAFSQGLDDYGARSMSSADVEVARF

SEQ ID NO: 17383 - protein, 108 aa, Homo sapiens
MSCPVPACCALLLVLGLCRARPRNALLLLADDGGFESGAYNNSAIATPHLDALARRSLLFRNAFTSVSSCSPSRASLLTGLPQAFLPLRRLPRPPPLWALPAPVRNLL

SEQ ID NO: 17384 - protein, 57 aa, Homo sapiens
MESRGPLATSRLLLLLLLLLLRHTRQGWALRPVLPTQVQERDRALSSCSLPFSPLAL

SEQ ID NO: 17385 - protein, 486 aa, Homo sapiens
MRALVLLGCLLASLLFSGQAELQVSASGGTEDVGNLLENHFSAGDASLEEKERALYADTAPQDKKLLLHYPDGREAESPKKTPASAASAGPDPEASLSNASATESPPPGERDDRDAAGPGEEKNGPPVASALPPGGAKGPVEEEWPEPSSGEGQGEEETGFGLPTEGTASGEAGGQAGGHELPEEVQEVQGDSLVQGAVAGTAEPKAEGASPHSEGDGVGPLNAEAEGSPGPGEEPAVPEGAPDVAAVGGESEPDIDTQASEGTEDQGEPGPAAEASAEPGGAQSVKAGDTEENQSPEMTEEDADEASSEEESGDGSGSEEEGGVPSEEESEEDSGDGASSEEAEGASEEATEPQEAGEPQEAREPQEGGDLQEAEESQEGGDPQEAEEPQEGGAPQEGGEPQEGGDPQEAREPQEAREPQEGAELPEATGTTSHRDRGAQPGPEELNTESMGSETLDMKAEEPEEGHQGEGESHHCCPGRDGGCK

SEQ ID NO: 17386 - protein, 357 aa, Homo sapiens
MVHYGHSNQLRQARAMGDYLIVGVHTDEEIAKHKGPPVFTQEERYKMVQAIKWVDEVVPAAPYVTTLETLDKYNCDFCVHGNDITLTVDGRDTYEEVKQAGRYRECKRTQGVSTTDLVGRMLLVTKAHHSSQEMSSEYREYADSFGKCPGGRNPWTGVSQFLQTSQKIIQFASGKEPQPGETVIYVAGAFDLFHIGHVDFLEKVHRLAERPYIIAGLHFDQEVNHYKGKNYPIMNLHERTLSVLACRYVSEVVIGAPYAVTAELLSHFKVDLVCHGKTEIIPDRDGSDPYQEPKRRGIFRQIDSGSNLTTDLIVQRIITNRLEYEARNQKKEAKELAFLEAARQQAAQPLGERDGDF

SEQ ID NO: 17387 - protein, 442 aa, Homo sapiens
MLPAAARPLWGPCLGLRAAAFRLARRQVPCVCAVRHMRSSGHQRCEALAGAPLDNAPKEYPPKIQQLVQDIASLTLLEISDLNELLKKTLKIQDVGLVPMGGVMSGAVPAAAAQEAVEEDIPIAKERTHFTVRLTEAKPVDKVKLIKEIKNYIQGINLVQAKKLVESLPQEIKANVAKAEAEKIKAALEATQQEVKLRMTGMALRVVRTDGILALYSGLSASLCRQMTYSLTRFAIYETVRDRVAKGSQGPLPFHEKVLLGSVSGLAGGFVGTPADLVNVRMQNDVKLPQGQRRNYAHALDGLYRVAREEGLRRLFSGATMASSRGALVTVGQLSCYDQAKQLVLSTGYLSDNIFTHFVASFIAGGCATFLCQPLDVLKTRLMNSKGEYQGVFHCAVETAKLGPLAFYKGLVPAGIRLIPHTVLTFVFLEQLRKNFGIKVPS

SEQ ID NO: 17388 - protein, 227 aa, Homo sapiens
MAAQRPLRVLCLAGFRQSERGFREKTGALRKALRGRAELVCLSGPHPVPDPPGPEGARSDFGSCPPEEQPRGWWFSEQEADVFSALEEPAVCRGLEESLGMVAQALNRLGPFDGLLGFSQGAALAALVCALGQAGDPRFPLPRFILLVSGFCPRGIGFKESILQRPLSLPSLHVFGDTDKVIPSQESVQLASQFPGAITLTHSGGHFIPAAAPQRQAYLKFLDQFAE

SEQ ID NO: 17389 - protein, 158 aa, Homo sapiens
MTPGALLMLLGALGAPLAPGVRGSEAEGRLREKLFSGYDSSVRPAREVGDRVRVSVGLILAQLISLNEKDEEMSTKVYLDLAVLECGGSSHPPASGGTSTSAEITAEWTDYRLSWDPAEHDGIDSLRITAESVWLPDVVLLNNNDGNFDVALDISVVV

SEQ ID NO: 17390 - protein, 49 aa, Homo sapiens
MGLGLLLPLLLLWTRGTQGSELDPKGQHVCVASRWVSWESDACGQQPLC

SEQ ID NO: 17391 - protein, 182 aa, Homo sapiens
MASVDLSYCSFLHLLLLCSPILACPPLNGIRCVAYNNQSNRLAVSRTDGTVEIYNLSANYFQEKFFPGHESRATEALCWAEGQRLFSAGLNGEIMEYDLQALNIKYAMDAFGGPIWSMAASPSGSQLLVGCEDGSVKLFQITPDKIQFERNFDRQKSRILSLSWHPSGTHIAAGSIDYISVF

SEQ ID NO: 17392 - protein, 128 aa, Homo sapiens
MATVAELKAVLKDTLEKKGVLGHLKARIRAEVFNALDDDREPRPSLSHENLLINELIREYLEFNKYKYTASVLIAAHCILRLLGSSSSPASASRVPGTTESGQPVVPLDRQFLIHELNAFEESKDNTI

SEQ ID NO: 17393 - protein, 443 aa, Homo sapiens
MRARPRPRPLWATVLALGALAGVGVGGPNICTTRGVSSCQQCLAVSPMCAWCSDEALPLGSPRCDLKENLLKDNCAPESIEFPVSEARVLEDRPLSDKGSGDSSQVTQVSPQRIALRLRPDDSKNFSIQVRQVEDYPVDIYYLMDLSYSMKDDLWSIQNLGTKLATQMRKLTSNLRIGFGAFVDKPVSPYMYISPPEALENPCYDMKTTCLPMFGYKHVLTLTDQVTRFNEEVKKQSVSRNRDAPEGGFDAIMQATVCDEKIGWRNDASHLLVFTTDAKTHIALDGRLAGIVQPNDGQCHVGSDNHYSASTTMDYPSLGLMTEKLSQKNINLIFAVTENVVNLYQNYSELIPGTTVGVLSMDSSNVLQLIVDAYGKIRSKVELEVRDLPEELSLSFNATCLNNEVIPGLKSCMGLKIGDTVRWAGQGLCPGASVGTQPPFFLL

SEQ ID NO: 17394 - protein, 102 aa, Homo sapiens
MGQPSLTWMLMVVVASWFITTAATDTSEARWCSECHSNATCTEDEAVTTCTCQEGFTGDGLTCVDLDECAIPGAHNCSANSSCVNTPGSFSCVCPEGFRLSP

SEQ ID NO: 17395 - protein, 128 aa, Homo sapiens
MQALVLLLCIGALLGHSSCQNPASPPEEEEDPFFKVPVNKLAAAVSNFGYDLYRVRSSTSPTTNVLLSPLSVATALSALSLGAEQRTESIIHRALYYDLISSPDIHGTYKELLDTVTAPQKNLKSASR

SEQ ID NO: 17396 - protein, 176 aa, Homo sapiens
MELALRRSPVPRWLLLLPLLLGLNAGAVIDWPTEEGKEVWDYVTVRKDAYMFWWLYYATNSCKNFSELPLVMWLQLQAASLLFVDNPVGTGFSYVNGSGAYAKDLAMVASDMMVLLKTFFSCHKEFQTVPFYIFSESYGGKMAAGIGLELYKAIQRGTIKCNFAGVALGDSWISPV

SEQ ID NO: 17397 - protein, 106 aa, Homo sapiens
MLRRALLCLAVAALVRADAPEEEDHVLVLRKSNFAEALAAHKYLLVEFYAPWCGHCKALAPEYAKAAGKLKAEGSEIRPPRRSLSPVWEGRSRTGHGHSVPPAVSP

SEQ ID NO: 17398 - protein, 61 aa, Homo sapiens
MLVGQGAGPLGPAVVTAAVVLLLSGVGPAHGSEDIVVGCGGFVKSDVEINYSLIEQVLNMH

SEQ ID NO: 17399 - protein, 178 aa, Homo sapiens
MHRPEAMLLLLTLALLGGPTWAGKMYGPGGGKYFSTTEDYDHEITGLRVSVGLLLVKSVQVKLGDSWDVKLGALGGNTQEVTLQPGEYITKVFVAFQAFLRGMVMYTSKDRYFYFGKLDGQISSAYPSQEGQVLVGIYGQYQLLGIKSIGFEWNYPLEEPTTEPPVNLTYSANSPVGR

SEQ ID NO: 17400 - protein, 47 aa, Homo sapiens
MARGSLRRLLRLLVLGLWLALLRSVAGEQAPDPRIAESRPQPLTRGP

SEQ ID NO: 17401 - protein, 278 aa, Homo sapiens
MSALGSPVRAYDFLLKFLLVGDSDVGKGEILASLQDGAAESPYGHPAGIDYKTTTILLDGRRVKLQLWDTSGQGRFCTIFRSYSRGAQGVILVYDIANRWSFDGIDRWIKEIDEHAPGVPKILVGNRLHLAFKRQVPTEQAQAYAERLGVTFFEVSPLCNFNITESFTELARIVLLRHGMDRLWRPSKVLSLQDLCCRAVVSCTPVHLVDKLPLPIALRSHLKSFSMANGLNARMMHGGSYSLTTSSTHKRSSLRKVKLVRPPQSPPKNCTRNSCKIS

SEQ ID NO: 17402 - protein, 166 aa, Homo sapiens
MLRRALLCLAVAALVRADAPEEEDHVLVLRKSNFAEALAAHKYLLVEFYAPWCGHCKALAPEYAKAAGKLKAEGSEIRLAKVDATEESDLAQQYGVRGYPTIKFFRNGDTASPKEYTGFDEGRNNFEGEVTKENLLDFIKHNQLPLVIEFTEQTAPKIFGGEIKTH

SEQ ID NO: 17403 - protein, 156 aa, Homo sapiens
MARSATLAAAALALCLLLAPPGLAWYKPAAGHSSYSVGRAAGLLSGLRRSPYARRSQPYRGAEPPGGAGASPELQLHPRLRSLVSPACRGLMGGGGRTWVGVRRPLSLCLPAPQAVCVQDVAPNLQRCERLPDGRGTYQCKANVFLSLRAADCLAA

SEQ ID NO: 17404 - protein, 163 aa, Homo sapiens
MAKEEPQSISRDLQELQKKLSLLIDSFQNNSKLPQHSRISLDSDDGVSRLGSAGSKVVAFMKSPVGQYLDSHPFLAFTLLVFIVMSAVPVGFFLLIVVLTTLAALLGVIILEGLVISVGGFSLLCILCGLGFVSLAMSGMMIASYVVVSSLISCWFSPRSHEI

SEQ ID NO: 17405 - protein, 198 aa, Homo sapiens
MATVAELKAVLKDTLEKKGVLGHLKARIRAEVFNALDDDREPRPSLSHENLLINELIREYLEFNKYKYTASVLIAAHCILRLLGSSSSPASASRVPGTTESGQPVVPLDRQFLIHELNAFEESKDNTIPLLYGILAHFLRGTKDGIQNAFLKGPSLQPSDPSLGRQPSRRKPMDDHLRKEEQKSTNIEDLHVSQAVNR

SEQ ID NO: 17406 - protein, 190 aa, Homo sapiens
MLLLSLTLSLVLLGSSWGCGIPAIKPALSFSQRIVNGENAVLGSWPWQVSLQDSSGFHFCGGSLISQSWVVTAAHCNVSPGRHFVVLGEYDRSSNAEPLQVLSVSRAITHPSWNSTTMNNDVTLLKLASPAQYTTRISPVCLASSNEALLSARRETHGCLLVLSPGAPKTAMCAHLLCILELASSAPGST

SEQ ID NO: 17407 - protein, 423 aa, Homo sapiens
MGTQALQGFLFLLFLPLLQPRGASAGSLHSPGLSECFQVNGADYRGHQNRTGPRGAGRPCLFWDQTQQHSYSSASDPHGRWGLGAHNFCRNPDGDVQPWCYVAETEEGIYWRYCDIPSCHMPGYLGCFVDSGAPPALSGPSGTSTKLTVQVCLRFCRMKGYQLCGGDGRLGVYEVSVGSCQGNWTAPQGVIYSPDFPDEYGPDRNCSWALGPPGAALELTFRLFELADPRDRLELRDAASGSLLRAFDGARPPPSGPLRLGTAALLLTFRSDARGHAQGFALTYRGLQDAAEDPEAPEGSAQTPAAPLDGANVSCSPRPGAPPAAIGARVFSTVTAVSVLLLLLLGLLRPLRRRSCLLAPGKGPPALGASRGPRRSWAVWYQQPRGVALPCSPGDPQAEGSAAGYRPLSASSQSSLRSLISAL

SEQ ID NO: 17408 - protein, 929 aa, Homo sapiens
MGNSSGWRGPAGQRRMLFLFLLSLLDQALSEPIRYAIPEELDRGSLVGNLAKDLGFGVGDLPTRNLRVIAEKKFFTVSPENGNLLVSDRIDREEICGKKSTCVLEFEMVAEKPLNFFHVTVLIQDINDNPPTFSQNITELEISELALTGATFALESAQDPDVGVNSLQQYYLSPDPHFSLIQKENLDGSRYPELVLKAPLDREEQPHHHLVLTAVDGGEPSRSCTTQIRVIVADANDNPPVFTQDMYRVNVAENLPAGSSVLKVMAIDMDEGINAEIIYAFINIGKEVRQLFKLDSKTGELTTIGELDFEERDSYTIGVEAKDGGHHTAYCKVQIDISDENDNAPEITLASESQHIQEDAELGTAVALIKTHDLDSGFNGEILCQLKGNFPFKIVQDTKNTYRLVTDGALDREQIPEYNVTITATDKGNPPLSSSKTITLHILDVNDNVPVFHQASYTVHVAENNPPGASIAHVRASDPDLGPNGLVSYYIVASDLEPRELSSYVSVSARSGVVFAQRAFDHEQLRAFELTLQARDQGSPTLSANVSLRVLVDDRNDNAPLVLYPALGPEGSALFDMVPRSAEPGYLVTKVVAVDADSGYNAWLSYHIVQASEPGLFSLGLRTGEVRTARTLGDREAARQRLLVTVRDGGQQPLSATVMLHLIFADSLQEIQPDLSDRPTPSDPQAELQFHLVVALALISVLFLLAVILAISLRLRCSSRPATEGYFQPGVCFKTVPGVLPTYSERTLPYSYNPCAASHSSNTEFKFLNIKAENAAPQDLLCDEASWFESNDNPEMPSNSGNLQKQAPPNTDWRFSQAQRPGTSGSQNGDDTGTWPNNQFDTEMLQAMILASASEAADGSSTLGGGAGTMGLSARYGPQFTLQHVPDYRQNVYIPGSNATLTNAAGKRDGKAPAGGNGNKKKSGKKEKK

SEQ ID NO: 17409 - protein, 43 aa, Homo sapiens
MCKRTDPVPVTIALDSLSWLLLRLPCTTLCQVLHAVSHQDSCP

SEQ ID NO: 17410 - protein, 87 aa, Homo sapiens
MAKHLKFIARTVMVQEGNVESAYRTLNRILTMDGLIEDIKHRRYYEKPCCRRQRESYERCRRIYNMEMARKINFLMRKNRADPWQGC

SEQ ID NO: 17411 - protein, 148 aa, Homo sapiens
ALGAVIALLLWGQLFAVDSGNDVTDIADDGCPKPPEIAHGYVEHSVRYQCKNYYKLRTEGDGVYTLNDKKQWINKAVGDKLPECEADDGCPKPPEIAHGYVEHSVRYQCKNYYKLRTEGDGVYTLNNEKQWINKAVGDKLPECEAGGC

SEQ ID NO: 17412 - protein, 145 aa, Homo sapiens
MGQGWATAGLPSLLFLLLCYGHPLLVPSQEASQQVTVTHGTSSQATTSSQTTTHQATAHQTSAQSPNLVTDEAEASKFVEEYDRTSQVVWNEYAEANWNYNTNITTETSKILGLYDTWGSSLLCPCLDMCCLTAGIQGGCRRTCK

SEQ ID NO: 17413 - protein, 58 aa, Homo sapiens
MEGAGAGSGFRKELVSRLLHLHFKDDKTKEAAVRGVRQAQAEDALRVDVDQLEKLLDF

SEQ ID NO: 17414 - protein, 401 aa, Homo sapiens
MGGHPQLRLVKALLLLGLNPVSASLQDQHCESLSLASNISGLQCNASVDLIGTCWPRSPAGQLVVRPCPAFFYGVRYNTTNNGYRECLANGSWAARVNYSECQEILNEEKKSKVHYHVAVIINYLGHCISLVALLVAFVLFLRLRSIRCLRNIIHWNLISAFILRNATWFVVQLTMSPEVHQSNVGWCRLVTAAYNYFHVTNFFWMFGEGCYLHTAIVLTYSTDRLRKWMFICIGWGVPFPIIVAWAIGKLYYDNEKCWFGKRPGVYTDYIYQGPMILVLLINFIFLFNIVRILMTKLRASTTSETIQYRKAVKATLVLLPLLGITYMLFFVNPGEDEVSRVVFIYFNSFLESFQVRSAIRKRWHRWQDKHSIRARVARAMSIPTSPTRVSFHSIKQSTAV

SEQ ID NO: 17415 - protein, 184 aa, Homo sapiens [sequence omitted]

SEQ ID NO: 17416 - protein, 96 aa, Homo sapiens
MELAALCRWGLLLALLPPGAASTQVCTGTDMKLRLPASPETHLDMLRHLYQGCQVVQGNLELTYLPTNASLSFLQTTTFLRTWDPAPSSAPCTTKR

SEQ ID NO: 17417 - protein, 172 aa, Homo sapiens
MICTFLRAVQYTEKLHRSSAKRLLLPYIVLNKACLKTEPSLRCGLQYQKKTLRPRCILGVTQKTIWTQGPSPRKAKEDGSKQVSVHRSQRGGTAVPTSQKVKEAGRDFTYLIVVLFGISITGGLFYTIFKELFSSSSPSKIYGRALEKCRSHPEGCSSHRPRSNVIARICSP

SEQ ID NO: 17418 - protein, 32 aa, Homo sapiens
MKVLLLTGLGALFFAYYWDDNFDPASRERECC

SEQ ID NO: 17419 - protein, 265 aa, Homo sapiens
MMRTCVLLSAVLWCLTGVQCPRFTLFNKKGFIYGKTGQPDKIYVELHQNSPVLICMDFKLSKKEIVDPTYLWIGPNEKTLTGNNRINITETGQLMVKDFLEPLSGLYTCTLSYKTVKAETQEEKTVKKRYDFMVFVNPFAPGWKGACNGSVDCEDTTNHNILQARDRIEDFFRSQAYIFYHNFNKTLPAMHFVDHSLQVVRLDSCRPGFGKNERLHSNCASCCVVCSPATFSPDVNVTCQTCVSVLTYGAKSCPQTSNKNQQYED

SEQ ID NO: 17420 - protein, 651 aa, Homo sapiens
MKNCGRRFHNEVGKFRFLNELIKVVSPKYLGDRVSEKVKTKVIELLYSWTMALPEEAKIKDAYHMLKRQGIVQSDPPIPVDRTLIPSPPPRPKNPVFDDEEKSKLLAKLLKSKNPDDLQEANKLIKSMVKEDEARIQKVTKRLHTLEEVNNNVRLLSEMLLHYSQEDSSDGDRELMKELFDQCENKRRTLFKLASETEDNDNSLGDILQASDNLSRVINSYKTIIEGQVINGEVATLTLPDSEGNSQCSNQGTLIDLAELDTTNSLSSVLAPAPTPPSSGIPILPPPPQASGPPRSRSSSQAEATLGPSSTSNALSWLDEELLCLGLADPAPNVPPKESAGNSQWHLLQREQSDLDFFSPRPGTAACGASDAPLLQPSAPSSSSSQAPLPPPFPAPVVPASVPAPSAGSSLFSTGVAPALAPKVEPAVPGHHGLALGNSALHHLDALDQLLEEAKVTSGLVKPTTSPLIPTTTPARPLLPFSTGPGSPLFQPLSFQSQGSPPKGPELSLASIHVPLESIKPSSALPVTAYDKNGFRILFHFAKECPPGRPDVLVVVVSMLNTAPLPVKSIVLQAAVPKSMKVKLQPPSGTELSPFSPIQPPAAITQVMLLANPLKEKVRLRYKLTFALGEQLSTEVGEVDQFPPVEQWGNL

SEQ ID NO: 17421 - protein, 337 aa, Homo sapiens
MRGELWLLVLVLREAARALSPQPGAGHDEGPGSGWAAKGTVRGWNRRARESPGHVSEPDRTQLSQDLGGGTLAMDTLPDNRTRVVEDNHSYYVSRLYGPSEPHSRELWVDVAEANRSQVKIHTILSNTHRQASRVVLSFDFPFYGHPLRQITIATGGFIFMGDVIHRMLTATQYVAPLMANFNPGYSDNSTVVYFDNGTVFVVQWDHVYLQGWEDKGSFTFQAALHHDGRIVFAYKEIPMSVPEISSSQHPVKTGLSDAFMILNPSPDVPESRRRSIFEYHRIELDPSKVTSMSAVEFTPLPTCLQHRSCDACMSSDLTFNCSWCHVLQSRDEVSPC

SEQ ID NO: 17422 - protein, 76 aa, Homo sapiens
MKGNREMVYDCTSSSFDGIIAMMSPEDSWVSKWQRVSNFKPGVYAVSVTGRLPQGIVRELKSRGVAYKSRDTAIKT

SEQ ID NO: 17423 - protein, 36 aa, Homo sapiens
MGQGWATAGLPSLLFLLLCYGHPLLVPSQEASQQTW

SEQ ID NO: 17424 - protein, 75 aa, Homo sapiens
MKVLLLTGLGALFFAYYWDDNFDPASLQGARVLLTGANAGVGEELAYHYARLGSHLVLTAHTEALLQKAGWTTSC

SEQ ID NO: 17425 - protein, 588 aa, Homo sapiens
MAGPVSLRDLLMGASAWMGSESPGGSPTEGGGSAAGGPEPPWREDEICVVGIFGKTALRLNSEKFSLVNTVCDRQVFPLFRHQDPGDPGPGIRTEAGAVGEAGGAEDPGAAAGGSVRGSGAVAEGNRTEAGSQDYSLLQAYYSQESKVLYLLLTSICDNSQLLRACRALQSGEAGGGLSLPHAEAHEFWKHQEKLQCLSLLYLFSVCHILLLVHPTCSFDITYDRVFRALDGLRQKVLPLLKTAIKDCPVGKDWKLNCRPCPPRLLFLFQLNGALKVEPPRNQDPAHPDKPKKHSPKRRLQHALEDQIYRIFRKSRVLTNQSINCLFTVPANQAFVYIVPGSQEEDPVGMLLDQLRSHCTVKDPESLLVPAPLSGPRRYQVMRQHSRQQLSFHIDSSSSSSSGQLVDFTLREFLWQHVELVLSKKGFDDSVGRNPQPSHFELPTYQKWISAASKLYEVAIDGKEEDLGSPTGELTSKILSSIKVLEGFLDIDTKFSENRCQKALPMAHSAYQSNLPHNYTMTVHKNQLAQALRVYSQHARGPAFHKYAMQLHEDCYKFWSNGHQLCEERSLTDQHCVHKFHSLPKSGS

SEQ ID NO: 17426 - protein, 2639 aa, Homo sapiens
MDGRDFAPPPHLLSERGSLGHRSAAAAARLAPAGPAAQPPAHFQPGKYFPSPLPMASHTASSRLMGSSPASSFMGSFLTSSLGSAASTHPSGPSSSPPEQAYRGSHPTTSQIWFSHSHEAPGYPRFSGSLASTFLPVSHLDHHGNSNVLYGQHRFYGTQKDNFYLRNLPPQPTLLPANHNFPSVARAAPAHPMGSCSRDRDRGEAGSLQKGPKDFDRFLVGKELGREKAGKAAEGKERPAAEEDGGKERHKLVLPVPADGHCREGGPAPRGACEGRPKHLTSCLLNTKVLNGEMGRAALASCAGGMLGRPGTGVVTSGRCAKEAAGPPEPGPAFSECLERRQMLHHTASYAGPPPPLSTAAGSFPCLQLHGGPDGLCPLQDKAPRDLKASGPTFVPSVGHLADKGRPFQAAEACAVAGEGKDRHLEGTMAPDHAAPYGVSYAHLKAEGKGERRPGGFEAALNPRLKGLDYLSSAGPEASFPGLPKSGLDKSGYFELPTSSQDCARPGHQDPLGGKAPQACCTLDKTVGKEAPAGPPGAQKVARIRHQQHLMAAEVEQGGIGAEAKRKSLELASLGYSGPHLPPWGVQAGQGTAMAISEERKAGAYLDPFGSGLQQAALLPQELPAPPDEVSAMKNLLKYSSQALVVGQKAPLVGLGGLKASCIQQEAKFLSSKGPGQSERPDCARSREHDTTHGDGEVRQPPVGIAVALARQKDTVSRSEAAYGTNTARQGRAAPAFKGGGGPRSTHALDLEAEEERTRLCDDRLGLASRELLLQDSKDRVEFARIHPPSSCPGDLAPHLMMQSGQLGGDPAPHTHPHPPWLPRTRSPSLWMGGHSYGLGHPALHQNLPPGFPASVAGPVPSVFPLPQDAPTQLVILPSEPTPHSAPHALADVMDQASLWPPMYGGRGPASHMQHPGQLPVYSRPQLLRQQELYALQQQRAAQFQRKPEDQHLDLEEPAQEKAPKSTHKPVALTPTAPGAPSPAAGPTKLPPCCHPPDPKPPASSPTPPPRPSAPCTLNVCPASSPGPGSRVRSAEEKNGEGQQSTADIITSEPVARAHSVAHAGLEFLASNDPSTSASQSFGITDLPPGYLRPMAGLGFSLPSDVHSSNLEDPETMQTTAPGAQPEPTRTFLPGEPPPCSPRSLEEPGLLSGAREATQDLAATPYPTERGPQGKAADPSPLEGLQELQCAALLEAGGPEATGQAHSTQGGAREERSREEGEQGPSSGASSQVLEQRAGSPGALEDEGEQPAPEEDELEEDELGQQSMEDSEEDCGGAPDNSHPPRALPGLDALVAATINLGDLPSDSPPDPQPPAASGPPSTVPLPHSSGIHGIALLSELADLAIQRQRSERTVPEEEEDVLAFNLQHLATLATAWSLVEAAGLDSSTAPAQPPTANPCSGPRLTPRMQILQRKDTWTPKTKPVCPLKAAIDRLDTQEVGMRVRLAELQRRYKEKQRELARLQRKHDHERDESSRSPARRGPGRPRKRKHSSSLPAPRPTGPLPRSDGKKVKAVRTSLGLLCAELRGGSGGEPAKKRSKLERSVYAGLQTASVEKAQCKKSSCQGGLAPSVAHRVAQLKPKVKSKGLPTGLSSFQQKEATPGGRIREKLSRAKSAKVSGATRHPQPKGHGSRETPRCPAQPSVAASQEAGSGYDSEDCEGLLGTEAPPREAGLLLHTGASVAVLGPSPSSVVKMEANQKAKKKKERQGLLGACRLSSPESEVKIKRRSVKAKVGTTLERAPGQRPPGALGKKKAKGKAKGSLRAEPGATPSRDALFNPSRAFACREEGSQLASERLKRATRKGTVLQPVLRRKNGALSITLATRNAKAILGKGRKLSKVKHKAGKQGKGRAVSRLLESFAVEEDFEFDDNSSFSEEEEDEEEEEEDSGPLSAEQSAALARSCAIHKEDLRDGLPVLIPKEDSLLYAGSVRTLQPPDIYSIVIEGERGNRQRIYSLEQLLQEAVLDVRPQSSRYLPPGTRVCAYWSQKSRCLYPGNVVRGASGDEDEDLDSVVVEFDDGDTGHIAVSNVRLLPPDFKIQCTEPSPALLVSSSCRRTKKVSSEAPPPSEAATPSLSPKAQDGPEALKTPGKKSISKDKAGKAELLTSGAKSPTGASDHFLGRRGSPLLSWSAVAQTKRKAVAAASKGPGVLQNLFQLNGSSKKLRAREALFPVHSVATPIFGNGFRADSFSSLASSYAPFVGGTGPGLPRGAHKLLRAKKAERVEAEKGGRRRAGGEFLVKLDHEGVTSPKNKTCKALLMGDKDFSPKLGRPLPSPSYVHPALVGKDKKGRAPIPPLPMGLALRKYAGQAEFPLPYDSDCHSSFSDEDEDGPGLAAGVPSRFLARLSVSSSSSGSSTSSSSGSVSTSSLCSSDNEDSSYSSDDEDPALLLQTCLTHPVPTLLAQPEALRSKGSGPHAHAQRCFLSRATVAGTGAGSGPSSSSKSKLKRKEALSFSKAKELSRRQRPPSVENRPKISAFLPARQLWKWSGNPTQRRGMKGKARKLFYKAIVRGEETLRVGDCAVFLSAGRPNLPYIGRIESMWESWGSNMVVKVKWFYHPEETKLGKRQCDGKNALYQSCHEDENDVQTISHKCQVVAREQYEQMARSRKCQDRQDLYYLAGTYDPTTGRLVTADGVPILC

SEQ ID NO: 17427 - protein, 65 aa, Homo sapiens
MKVSAALLCLLLIAATFIPQGLAQPDAINAPVTCCYNFTNRKISVQRLASYRRITSSKCPKEAVM

SEQ ID NO: 17428 - protein, 19 aa, Homo sapiens
MKAFHTFCVVLLVFGSVSE

SEQ ID NO: 17429 - protein, 625 aa, Homo sapiens
GIGLGFMTAVCVIWFFTPPSAHKYHKLHKNLRHWNTRSLDIKEPEILKGWMNEIYNYDPETYHATLTHSVFVRLEGGTLRLSKPNKNISRRASYNEPKPEVTYISQKIYDLSDSKIYLVPKTLARKRIWNKKYPICIELGQQDDFMSKAQTDKETSEEKPPAEGSEDPKKPPRPQEGTRSSQRDQILYLFGRTGREKEEWFRRFILASKLKSEIKKSSGVSGGKPGLLPAHSRHNSPSGHLTHSRSSSKGSVEEIMSQPKQKELAGSVRQKMLLDYSVYMGRCVPQESRSPQRSPLQSAESSPTAGKKLPEVPPSEEEEQEAWVNALLGRIFWDFLGEKYWSDLVSKKIQMKLSKIKLPYFMNELTLTELDMGVAVPKILQAFKPYVDHQGLWIDLEMSYNGSFLMTLETKMNLTKLGKEPLVEALKVGEIGKEGPRAFCLADSDEESSSAGSSEEDDAPEPSGGDKQLLPGAEGYVGGHRTSKIMRFVDKITKSKYFQKATETEFIKKKIEEVSNTPLLLTVEVQECRGTLAVNIPPPPTDRVWYGFRKPPHVELKARPKLGEREVTLVHVTDWIEKKLEQEFQKVFVMPNMDDVYITIMHSAMDPRSTSCLLKDPPVEAADQP

SEQ ID NO: 17430 - protein, 487 aa, Homo sapiens
MPLPVQVFNLQGAVEPMQIDVDPQEDPQNAPDVNYVVENPSLDLEQYAASYSGLMRIERLQFIADHCPTLRVEALKMALSFVQRTFNVDMYEEIHRKLSEATRELQNAPDAIPESGVEPPALDTAWVEATRKKALLKLEKLDTDLKNYKGNSIKESIRRGHDDLGDHYLDCGDLSNALKCYSRARDYCTSAKHVINMCLNVIKVSVYLQNWSHVLSYVSKAESTPEIAEQRGERDSQTQAILTKLKCAAGLAELAARKYKQAAKCLLLASFDHCDFPELLSPSNVAIYGGLCALATFDRQELQRNVISSSSFKLFLELEPQVRDIIFKFYESKYASCLKMLDEMKDNLLLDMYLAPHVRTLYTQIRNRALIQYFSPYVSADMHRMAAAFNTTVAALEDELTQLILEGLISARVDSHSKILYARDVDQRSTTFEKSLLMGKEFQRRAKAMMLRAAVLRNQIHVKSPPREGSQGELTPANSQSRMSTNM

SEQ ID NO: 17431 - protein, 85 aa, Homo sapiens
MQTCPLAFPGHVSQALGTLLFLAASLSAQNEGWDSPICTEGVVSVSWGENTVMSCNISNAFSHVNIKLRAHGQESAIFNEVAPGY

SEQ ID NO: 17432 - protein, 236 aa, Homo sapiens
MCVTYHNGTGYCKCPEGFLGEYCQHRDPCEKNRCQNGGTCVAQAMLGKATCRCASGFTGEDCQYSTSHPCFVSRPCLNGGTCHMLSRDTYECTCQVGFTGKECQWTDACLSHPCANGSTCTTVANQFSCKCLTGFTGQKCETDVNECDIPGHCQHGGTCLNLPGSYQCQCLQGFTGQYCDSLYVPCAPSPCVNGGTCRQTGDFTFECNCLPETVRRGTELWERDREVWNGKEHDEN

SEQ ID NO: 17433 - protein, 28 aa, Homo sapiens
MGWLFLKVLLAGVSFSGFLYPLVDFCIS

SEQ ID NO: 17434 - protein, 305 aa, Homo sapiens
MPLLTLYLLLFWLSGYSIVTQITGPTTVNGLERGSLTVQCVYRSGWETYLKWWCRGAIWRDCKILVKTSGSEQEVKRDRVSIKDNQKNRTFTVTMEDLMKTDADTYWCGIEKTGNDLGVTVQVTIDPASTPAPTTPTSTTFTAPVTQEETSSSPTLTGHHLDNRHKLLKLSVLLPLIFTILLLLLVAASLLAWRMMKYQQKAAGMSPEQVLQPLEGDLCYADLTLQLAGTSPQKATTKLSSAQVDQVEVEYVTMASLPKEDISYASLTLGAEDQEPTYCNMGHLSSHLPGRGPEEPTEYSTISRP

SEQ ID NO: 17435 - protein, 700 aa, Homo sapiens
MEATGVLPFVRGVDLSGNDFKGGYFPENVKAMTSLRWLKLNRTGLCYLPEELAALQKLEHLSVSHNNLTTLHGELSSLPSLRAIVARANSLKNSGVPDDIFKLDDLSVLDLSHNQLTECPRELENAKNMLVLNLSHNSIDTIPNQLFINLTDLLYLDLSENRLESLPPQMRRLVHLQTLVLNGNPLLHAQLRQLPAMTALQTLHLRSTQRTQSNLPTSLEGLSNLADVDLSCNDLTRVPECLYTLPSLRRLNLSSNQITELSLCIDQWVHVETLNLSRNQLTSLPSAICKLSKLKKLYLNSNKLDFDGLPSGIGKLTNLEEFMAANNNLELVPESLCRCPKLRKLVLNKNHLVTLPEAIHFLTEIEVLDVRENPNLVMPPKPADRAAEWYNIDFSLQNQLRLAGASPATVAAAAAGSGPKDPMARKMRLRRRKDSAQDDQAKQVLKGMSDVAQEKNKKQEESADARAPSGKVRRWDQGLEKPRLDYSEFFTEDVGQLPGLTIWQIENFVPVLVEEAFHGKFYEADCYIVLKTFLDDSGSLNWEIYYWIGGEATLDKKACSAIHAVNLRNYLGAECRTVREEMGDESEEFLQVFDNDISYIEGGTASGFYTVEDTHYVTRMYRVYGKKNIKLEPVPLKGTSLDPRNMSGRAGCAWSARAMSSTPLPAASTPGAPSARPWPKTGWHSPRLGEEEEGASSTVC

SEQ ID NO: 17436 - protein, 2482 aa, Homo sapiens
MKGTDSGSCCRRRCDFGCCCRASRRAHYTPYRSGDATRTPQSPRQTPSRERRRPEPAGSWAAAAEEEEAAAAATPWMRDYFAEDDGEMVPRTSHTAAFLSDTKDRGPPVQSQIWRSGEKVPFVQTYSLRAFEKPPQVQTQALRDFEKHLNDLKKENFSLKLRIYFLEERMQQKYEASREDIYKRNIELKVEVESLKRELQDKKQHLDKTWADVENLNSQNEAELRRQFEERQQETEHVYELLENKIQLLQEESRLAKNEAARMAALVEAEKECNLELSEKLKGVTKNWEDVPGDQVKPDQYTEALAQRDKRIEELNQSLAAQERLVEQLSREKQQLLHLLEEPTSMEVQPMTEELLKQQKLNSHETTITQQSVSDSHLAELQEKIQQTEATNKILQEKLNEMSYELKCAQESSQKQDGTIQNLKETLKSRERETEELYQVIEGQNDTMAKLREMLHQSQLGQLHSSEGTSPAQQQVALLDLQSALFCSQLEIQKLQRVVRQKERQLADAKQCVQFVEAAAHESEQQKEASWKHNQELRKALQQLQEELQNKSQQLRAWEAEKYNEIRTQEQNIQHLNHSLSHKEQLLQEFRELLQYRDNSDKTLEANEMLLEKLRQRIHDKAVALERAIDEKFSALEEKEKELRQLRLAVRERDHDLERLRDVLSSNEATMQSMESLLRAKGLEVEQLSTTCQNLQWLKEEMETKFSRWQKEQESIIQQLQTSLHDRNKEVEDLSATLLCKLGPGQSEIAEELCQRLQRKERMLQDLLSDRNKQVLEHEMEIQGLLQSVSTREQESQAAAEKLVQALMERNSELQALRQYLGGRDSLMSQAPISNQQAEVTPTGRLGKQTDQGSMQIPSRDDSTSLTAKEDVSIPRSTLGDLDTVAGLEKELSNAKEELELMAKKERESQMELSALQSMMAVQEEELQVQAADMESLTRNIQIKEDLIKDLQMQLVDPEDIPAMERLTQEVLLLREKVASVESQGQEISGNRRQQLLLMLEGLVDERSRLNEALQAERQLYSSLVKFHAHPESSERDRTLQVELEGAQVLRSRLEEVLGRSLERLNRLETLAAIGGAAAGDDTEDTSTEFTDSIEEEAAHHSHQQLVKVALEKSLATVETQNPSFSPPSPMGGDSNRCLQEEMLHLRAEFHQHLEEKRKAEEELKELKAQIEEAGFSSVSHIRNTMLSLCLENAELKEQMGEAMSDGWEIEEDKEKGEVMVETVVTKEGLSESSLQAEFRKLQGKLKNAHNIINLLKEQLVLSSKEGNSKLTPELLVHLTSTIERINTELVGSPGKHQHQEEGNVTVRPFPRPQSLDLGATFTVDAHQLDNQSQPRDPGPQSAFSLPGSTQHLRSQLSQCKQRYQDLQEKLLLSEATVFAQANELEKYRVMLSESLVKQDSKQIQVDLQDLGYETCGRSENEAEREETTSPECEEHNSLKEMVLMEGLCSEQGRRGSTLASSSERKPLENQLGKQEEFRVYGKSENILVLRKDIKDLKAQLQNANKVIQNLKSRVRSLSVTSDYSSSLERPRKLRAVGTLEGSSPHSVPDEDEGWLSDGTGAFYSPGLQAKKDLESLIQRVSQLEAQLPKNGLEEKLAEELRSASWPGKYDSLIQDQARELSYLRQKIREGRGICYLITRHAKDTVKSFEDLLRSNDIDYYLGQSFREQLAQGSQLTERLTSKLSTKDHKSEKDQAGLEPLALRLSRELQEKEKVIEVLQAKLDARSLTPSSSHALSDSHRSPSSTSFLSDELEACSDMDIVSEYTHYEEKKASPSHSDSIHHSSHSAVLSSKPSSTSASQGAKAESNSNPISLPTPQNTPKEANQAHSGFHFHSIPKLASLPQAPLPSAPSSFLPFSPTGPLLLGCCETPVVSLAEAQQELQMLQKQLGESASTVPPASTATLLSNDLEADSSYYLNSAQPHSPPRGTIELGRILEPGYLGSSGKWDVMRPQKGSVSGDLSSGSSVYQLNSKPTGADLLEEHLGEIRNLRQRLEESICINDRLREQLEHRLTSTARGRGSTSNFYSQGLESIPQLCNENRVLREDNRRLQAQLSHVSREHSQETESLREALLSSRSHLQELEKELEHQKVERQQLLEDLREKQQEVLHFREERLSLQENDSRLQHKLVLLQQQCEEKQQLFESLQSELQIYEALYGNSKKGLKAYSLDACHQIPLSSDLSHLVAEVRALRGQLEQSIQGNNCLRLQLQQQLESGAGKASLSPSSINQNFPASTDPGNKQLLLQDSAVSPPVRDVGMNSPALVFPSSASSTPGSETPIINRANGLGLDTSPVMKTPPKLEGDATDGSFANKHGRHVIGHIDDYSALRQQIAEGKLLVKKIVSLVRSACSFPGLEAQGTEVLGSKGIHELRSSTSALHHALEESASLLTMFWRAALPSTHIPVLPGKVGESTERELLELRTKVSKQERLLQSTTEHLKNANQQKESMEQFIVSQLTRTHDVLKKARTNLEVKSLRALPCTPAL

SEQ ID NO: 17437 - protein, 145 aa, Homo sapiens [sequence omitted]

SEQ ID NO: 17438 - protein, 743 aa, Homo sapiens
MEAAAVTVTRSATRRRRRQLQGLAAPEAGTQEEQEDQEPRPRRRRPGRSIKDEEEETVFREVVSFSPDPLPVRYYDKDTTKPISFYLSSLEELLAWKPRLEDGFNVALEPLACRQPPLSSQRPRTLLCHDMMGGYLDDRFIQGSVVQTPYAFYHWQCIDVFVYFSHHTVTIPPVGWTNTAHRHGVCVLGTFITEWNEGGRLCEAFLAGDERSYQAVADRLVQITQFFRFDGWLINIENSLSLAAVGNMPPFLRYLTTQLHRQVPGGLVLWYDSVVQSGQLKWQDELNQHNRVFFDSCDGFFTNYNWREEHLERMLGQAGERRADVYVGVDVFARGNVVGGRFDTDKSLELIRKHGFSVALFAPGWVYECLEKKDFFQNQDKFWGRLERYLPTHSICSLPFVTSFCLGMGARRVCYGQEEAVGPWYHLSAQEIQPLFGEHRLGGDGRGWVRTHCCLEDAWHGGSSLLVRGVIPPEVGNVAVRLFSLQAPVPPKIYLSMVYKLEGPTDVTVALELTTGDAGSCHIGGISVLNAETSSRHSLRPLRVPPTKLARWVGRCGRQLSGGWVQHCYEVSLRGCLLLDLLVCFSRPPGSREEESFTCRLGEIQVVDAASLLAPLPQVQAVTISHIRWQPSASEREGPPALLQLSCTLHWSFLLSQVRCFRIHCWGGMSDDSPGRELPRPEMPMFLGLAFATQYRIVDLLVEAAGPGQDRRMEFLVEPVPKEGFRVPQAEWGRAVLLYSAPA

SEQ ID NO: 17439 - protein, 203 aa, Homo sapiens
MLQQDSNDDTEDVSLFDAEEETTNRPRKAKIRHPVASFFHLFFRVSAIIVYLLCGLLSSSFITCMVTIILLLSCDFWAVKNVTGRLMVGLRWWNHIDEDGKSHWVFESRKESSQENKTVSEAESRIFWLGLIACPVLWVIFAFSALFSFRVKWLAVVIMGVVLQGANLYGYIRCKVRSRKHLTSMATSYFGKQFLRQVSVFWM

SEQ ID NO: 17440 - protein, 521 aa, Homo sapiens
MEANWTAFLFQAHEASHHQQQAAQNSLLPLLSSAVEPPDQKPLLPIPITQKPQGAPETLKDAIGIKKEKPKTSFVCTYCSKAFRDSYHLRRHESCHTGIKLVSRPKKTPTTVVPLISTIAGDSSRTSLVSTIAGILSTVTTSSSGTNPSSSASTTAMPVTQSVKKPSKPVKKNHACEMCGKAFRDVYHLNRHKLSHSDEKPFECPICNQRFKRKDRMTYHVRSHEGGITKPYTCSVCGKGFSRPDHLSCHVKHVHSTERPFKCQTCTAAFATKDRLRTHMVRHEGKVSCNICGKLLSAAYITSHLKTHGQSQSINCNTCKQGISKTCMSEETSNQKQQQQQQQQQQQQQQQQQQHVTSWPGKQVETLRLWEEAVKARKKEAANLCQTSTAATTPVTLTTPFSITSSVSSGTMSNPVTVAAAMSMRSPVNVSSAVNITSPMNIGHPVTITSPLSMTSPLTLTTPVNLPTPVTAPVNIAHPVTITSPMNLPTPMTLAAPLNIAMRPVESMPFLPQALPTSPPW

SEQ ID NO: 17441 - protein, 103 aa, Homo sapiens [sequence omitted]

SEQ ID NO: 17442 - protein, 56 aa, Homo sapiens
MLASAPRLNSADRPMKTSVLRQRKGSVRKQHLLSWAWQQGRGQVVEILQSEKQTER

SEQ ID NO: 17443 - protein, 77 aa, Homo sapiens
MSKRPSYAPPPTPAPATQMPSTPGFVGYNPYSHLAYNNYRLGGNPGTNSRVTVGESTITASGKQLELTRNAFRIRSF

SEQ ID NO: 17444 - protein, 631 aa, Homo sapiens
MEYCSSGSLLSVLESPENAFGLPEDEFLVVLRCVVAGMNHLRENGIVHRDIKPGNIMRLVGEEGQSIYKLTDFGAARELDDDEKFVSVYGTEEYLHPDMYERAVLRKPQQKAFGVTVDLWSIGVTLYHAATGSLPFIPFGGPRRNKEIMYRITTEKPAGAIAGAQRRENGPLEWSYTLPITCQLSLGLQSQLVPILANILEVEQAKCWGFDQFFAETSDILQRVVVHVFSLSQAVLHHIYIHAHNTIAIFQEAVHKQTSVAPRHQEYLFEGHLCVLEPSVSAQHIAHTTASSPLTLFSTAIPKGLAFRDPALDVPKFVPKVDLQADYNTAKGVLGAGYQALRLARALLDGQELMFRGLHWVMEVLQATCRRTLEVARTSLLYLSSSLGTERFSSVAGTPEIQELKAAAELRSRLRTLAEVLSRCSQNITETQESLSSLNRELVKSRDQVHEDRSIQQIQCCLDKMNFIYKQFKKSRMRPGLGYNEEQIHKLDKVNFSHLAKRLLQVFQEECVQKYQASLVTHGKRMRVVHETRNHLRLVGCSVAACNTEAQGVQESLSKLLEELSHQLLQDRAKGAQASPPPIAPYPSPTRKDLLLHMQELCEGMKLLASDLLDNNRIIERLNRVPAPPDV

SEQ ID NO: 17445 - protein, 354 aa, Homo sapiens
MSNSVPLLCFWSLCYCFAAGSPVPFGPEGRLEDKLHKPKATQTEVKPSVRFNLRTSKDPEHEGCYLSVGHSQPLEDCSFNMTAKTFFIIHGWTMSGIFENWLHKLVSALHTREKDANVVVVDWLPLAHQLYTDAVNNTRVVGHSIARMLDWLQEKDDFSLGNVHLIGYSLGAHVAGYAGNFVKGTVGRITGLDPAGPMFEGADIHKRLSPDDADFVDVLHTYTRSFGLSIGIQMPVGHIDIYPNGGDFQPGCGLNDVLGSIAYGTITEVVKCEHERAVHLFVDSLVNQDKPSFAFQCTDSNRFKKGICLSCRKNRCNSIGYNAKKMRNKRNSKMYLKTRAGMPFRGNLQSLECP

SEQ ID NO: 17446 - protein, 585 aa, Homo sapiens
MYEGKENVSFELQRDFSQETDFSEASLLEKQQEVHSAGNIKKEKSNTIDGTVKDETSPVEECFFSQSSNSYQCHTITGEQPSGCTGLGKSISFDTKLVKHEIINSEERPFKCEELVEPFRCDSQLIQHQENNTEEKPYQCSECGKAFSINEKLIWHQRLHSGEKPFKCVECGKSFSYSSHYITHQTIHSGEKPYQCKMCGKAFSVNGSLSRHQRIHTGEKPYQCKECGNGFSCSSAYITHQRVHTGEKPYECNDCGKAFNVNAKLIQHQRIHTGEKPYECNECGKGFRCSSQLRQHQSIHTGEKPYQCKECGKGFNNNTKLIQHQRIHTGEKPYECTECGKAFSVKGKLIQHQRIHTGEKPYECNECGKAFRCNSQFRQHLRIHTGEKPYECNECGKAFSVNGKLMRHQRIHTGEKPFECNECGRCFTSKRNLLDHHRIHTGEKPYQCKECGKAFSINAKLTRHQRIHTGEKPFKCMECEKAFSCSSNYIVHQRIHTGEKPFQCKECGKAFHVNAHLIRHQRSHTGEKPFRCVECGKGFSFSSDYIIHQTVHTWKKPYMCSVCGKAFRFSFQLSQHQSVHSEGKS

SEQ ID NO: 17447 - protein, 53 aa, Homo sapiens
MAIHKALVMCLGLPLFLFPGAWAQGHVPPGCSQGLNPLYYNLCDRSGAWGIVL

SEQ ID NO: 17448 - protein, 218 aa, Homo sapiens
MMRTCVLLSAVLWCLTGAYREPDYSYQMAVRFTTRSCIGRYNDVFFRVLKKILDSLISDLSCHVIEPSYKCHSVEIPEHGLIHELFIAFQVNPFAPGWKGACNGSVDCEDTTNHNILQARDRIEDFFRSQAYIFYHNFNKTLPAMHFVDHSLQVVRLDSCRPGFGKNERLHSNCASCCVVCSPATFSPDVNVTCQTCVSVLTYGAKSCPQTSNKNQQY

SEQ ID NO: 17449 - protein, 742 aa, Homo sapiens
MSGGHQLQLAALWPWLLMATLQAGFGRTGLVLAAAVESERSAEQKAIIRVIPLKMDPTGKLNLTLEGVFAGVAEITPAEGKLMQARMAGERGASAVLFDITEDRAAAEQLQQPLGLTWPVVLIWGNDAEKLMEFVYKNQKAHVRIELKEPPAWPDYDVWILMTVVGTIFVIILASVLRIRCRPRHSRPDPLQQRTAWAISQLATRRYQASCRQARGEWPDSGSSCSSAPVCAICLEEFSEGQELRVISCLHEFHRNCVDPWLHQHRTCPLCMFNITEGDSFSQSLGPSRSYQEPGRRLHLIRQHPGHAHYHLPAAYLLGPSRSAVARPPRPGPFLPSQEPGMGPRHHRFPRAAHPRAPGEQQRLAGAQHPYAQGWGLSHLQSTSQHPAACPVPLRRARPPDSSGSGESYCTERSGYLADGPASDSSSGPCHGSSSDSVVNCTDISLQGVHGSSSTFCSSLSSDFDPLVYCSPKGDPQRVDMQPSVTSRPRSLDSVVPTGETQVSSHVHYHRHRHHHYKKRFQWHGRKPGPETGVPQSRPPIPRTQPQPEPPSPDQQVTRSNSAAPSGRLSNPQCPRALPEPAPGPVDASSICPSTSSLFNLQKSSLSARHPQRKRRGGPSEPTPGSRPQDATVHPACQIFPHYTPSVAYPWSPEAHPLICGPPGLDKRLLPETPGPCYSNSQPVWLCLTPRQPLEPHPPGEGPSEWSSDTAEGRPCPYPHCQVLSAQPGSEEELEELCEQAV

SEQ ID NO: 17450 - protein, 232 aa, Homo sapiens
MARSPGRAYALLLLLICFNVGSGLHLQVLSTRNENKLLPKHPHLVRQKRAWITAPVALREGEDLSKKNPIAKIHSDLAEERGLKITYKYTGKGITEPPFGIFVFNKDTGELNVTSILDREETPFFLLTGYALDARGNNVEKPLELRIKVLDINDNEPVFTQDVFVGSVEELSAAHTLVMKINATDADEPNTLNSKISYRIVSLEPAYPPVFYLNKDTGEIYTTSVTLDREVS

SEQ ID NO: 17451 - protein, 86 aa, Homo sapiens
MALRHLALLAGLLVGVASKSMENTAQLPECCVDVVGVNASCPGASLCGPGCYRRWNADGSASCVRCGNGTLPAYNGSECRSFAGPG

SEQ ID NO: 17452 - protein, 391 aa, Homo sapiens
MVMFKKIKSFEVVFNDPEKVYGSGEKVAGRVIVEVCEVTRVKAVRILACGVAKVLWMQGSQQCKQTSEYLRYEDTLLLEDQPTGENEMVIMRPGNKYEYKFGFELPQGPLGTSFKGKYGCVDYWVKAFLDRPSQPTQETKKNFEVVDLVDVNTPDLMAPVSAKKEKKVSCMFIPDGRVSVSARIDRKGFCEGDEISIHADFENTCSRIVVPKAAIVARHTYLANGQTKVLTQKLSSVRGNHIISGTCASWRGKSLRVQKIRPSILGCNILRVEYSLLIYVSVPGSKKVILDLPLVIGSRSGLSSRTSSMASRTSSEMSWVDLNIPDTPEAPPCYMDVIPEDHRLESPTTPLLDDMDGSQDSPIFMYAPEFKFMPPPTYTEVDPCILNNNVQ

SEQ ID NO: 17453 - protein, 146 aa, Homo sapiens
MQTCPLAFPGHVSQALGTLLFLAASLSAQNEGWDSPICTEGVVSVSWGENTVMSCNISNAFSHVNIKLRAHGQESAIFNEVAPGYFSRDGWQLQVQGGVAQLVIKGARDSHAGLYMWHLVGHQRNNRQVTLEVSEPRGLKDRASAQ

SEQ ID NO: 17454 - protein, 208 aa, Homo sapiens
MGQGWATAGLPSLLFLLLCYGHPLLVPSQEASQQVTVTHGTSSQATTSSQTTTHQATAHQTSAQSPNLVTDEAEASKFVEEYDRTSQVVWNEYAEANWNYNTNITTETSKILLQKNMQIANHTLKYGTQARKFDVNQLQNTTIKRIIKKVQDLERAALPAQELEEYNKILLDMETTYSVATVCHPNGSCLQLEPALKFSELPLQAEVS

SEQ ID NO: 17455 - protein, 53 aa, Homo sapiens
MSSFGYRTLTVALFTLICCPGVNEFQRQRVPASKAGHPDTATHFGGCGQVLHH

SEQ ID NO: 17456 - protein, 88 aa, Homo sapiens
MSALGAVIALLLWGQLFAVDSGNDVTDIADDGCPKPPEIAHGYVEHSVRYQCKNYYKLRTEGDGVYTLNNEKQWINKAVGDKLPECEA

SEQ ID NO: 17457 - protein, 103 aa, Homo sapiens [sequence omitted]

SEQ ID NO: 17458 - protein, 204 aa, Homo sapiens
MPRTLDGQITMEKTPSYFVTREAPARISAMSKDTKLIVVVRDPVTRAISDYTQTLSKRPDIPTFESLTFKNRTAGLIDTSWSAIQIGIYAKHLEHWLRHFPIRQMLFVSGERLISDPAGELGRVQDFLGLKRIITDKHFYFNKTKGFPCLKKAEGSSRPHCLGKTKGRTHPEIDREVVRRLREFYRPFNLKFYQMTGHDFGWDG

SEQ ID NO: 17459 - protein, 207 aa, Homo sapiens
MASFPPRVNEKEIVFLFFLLVRLRTIGELLAPAAPFDKKCGRENWTVAFAPDGSYFAWSQGHRTVKLVPWSQCLQNFLLHGTKNVTNSSSLRLPRQNSDGGQKNKPREHIIDCGDIVWSLAFGSSVPEKQSRCVNIEWHRFRFGQDQLLLATGLNNGRIKIWDVYTGKLLLNLVDHTEVVRDLTFAPDGSLILVSASRDKTLRVWDL

SEQ ID NO: 17460 - protein, 180 aa, Homo sapiens
MRLAVLFSGALLGLLAATLLPSFTVTPTVTESTGTTSHRTTKSHKTTTHRTTTTGTTSHGPTTATHNPTTTSHGNVTVHPTSNSTATSQGPSTATHSPATTSHGNATVHPTSNSTATSPGFTSSAHPEPPPPSPSPSPTSKETIGDYTWTNGSQPCVHLQAQIQIRVMYTTQGGGEAWGI

SEQ ID NO: 17461 - protein, 98 aa, Homo sapiens
MALRHLALLAGLLVGVASKSMENTDTDVPAPEVLTRSTAGVRGACASQRGALRCLLGERLLRNGWVRRGPHGEASWPAMGAPLPAVTAQRAAHRYRGV

SEQ ID NO: 17462 - protein, 117 aa, Homo sapiens
MSDLGAVISLLLWGRQLFALYSGNDVTDISDDRFPKPPEIANGYVEHLFRYQCKNYYRLRTEGDGVYTLNDKKQWINKAVGDKLPECEAVCGKPKNPANPVQRILGGHLVRGWDPKL

SEQ ID NO: 17463 - protein, 614 aa, Homo sapiens
MNTFQDQSGSSSNREPLLRCSDARRDLELAIGGVLRAEQQIKDNLREVKAQIHSCISRHLECLRSREVWLYEQVDLIYQLKEETLQQQAQQLYSLLGQFNCLTHQLECTQNKDLANQVSVCLERLGSLTLKPEDSTVLLFEADTITLRQTITTFGSLKTIQIPEHLMAHASSANIGPFLEKRGCISMPEQKSASGIVAVPFSEWLLGSKPASGYQAPYIPSTDPQDWLTQKQTLENSQTSSRACNFFNNVGGNLKGLENWLLKSEKSSYQKCNSHSTTSSFSIEMEKVGDQELPDQDEMDLSDWLVTPQESHKLRKPENGSRETSEKFKLLFQSYNVNDWLVKTDSCTNCQGNQPKGVEIENLGNLKCLNDHLEAKKPLSTPSMVTEDWLVQNHQDPCKVEEVCRANEPCTSFAECVCDENCEKEALYKWLLKKEGKDKNGMPVEPKPEPEKHKDSLNMWLCPRKEVIEQTKAPKAMTPSRIADSFQVIKNSPLSEWLIRPPYKEGSPKEVPGTEDRAGKQKFKSPMNTSWCSFNTADWVLPGKKMGNLSQLSSGEDKWLLRKKAQEVLLNSPLQEEHNFPPDHYGLPAVCDLFACMQLKVDKEKWLYRTPLQM

SEQ ID NO: 17464 - protein, 224 aa, Homo sapiens
MADKVRRQRPRRRVCWALVAVLLADLLALSDTLAVMSVDLGSESMKVAIVKPGVPMEIVLNKESRRKTPVIVTLKENERFFGDSAASMAIKNPKATLRYFQHLLGKQADNPHVALYQARFPEHELTFDPQRQTVHFQISSQLQFSPEEVLGMVLNYSRSLAEDFAEQPIKDAVITVPVFFNQAERRAVLQAARMAGLKVLQLINDNTATALSYGVFRRKDINTT

SEQ ID NO: 17465 - protein, 360 aa, Homo sapiens
MSGSVLFTAGERWRCFLTPSRSSLYWALHNFCCRKKSTTPKKITPNVTFCDENAKEPENALDKLFSSEQQASILHVLNTASTKELEAFRLLRGRRSINIVEHRENFGPFQNLESLMNVPLFKYKSTVQVCNSILCPKTGREKRKSPENRFLRKLLKPDIERERLKAVNSIISIVFGTRRIAWAHLDRKLTVLDWQQSDRWSLMRGIYSSSVYLEEISSIISKMPKADFYVLEKTGLSIQNSSLFPILLHFHIMEAMLYALLNKTFAQDGQHQVLSMNRNAVGKHFELMIGDSRTSGKELVKQFLFDSILKADPRVFFPSDKIVHYRQMFLSTELQRVEELYDSLLQAIAFYELAVFDSQP

SEQ ID NO: 17466 - protein, 226 aa, Homo sapiens
MSGSVLFTAGERWRCFLTPSRSSLYWALHNFCCRKKSTTPKKITPNVTFCDENAKEPENALDKLFSSEQQASILHVLNTASTKELEAFRLLRGRRSINIVEHRENFGPFQNLESLMNVPLFKYKSTVQVCNSILCPKTGREKRKSPENRFLRKLLKPDIERERLKAVNSIISIVFGTRRIAWAHLDRKLTVLDWQQSDRWSLMRGIYSSSVYLEEVRQLHLQIPTC

SEQ ID NO: 17467 - protein, 168 aa, Homo sapiens
MGAASGRRGPGLLLPLPLLLLLPPQPALALDPGLQPGNFSADEAGAQLFAQSYNSSAEQVLFQSVAASWAHDTNITAENARRQEEAALLSQEFAEAWGQKAKELYEPIWQNFTDPQLRRIIGAVRTLGSANLPLAKRQQISPTSWLPREATPCSCLPGRAGTTLRASR

SEQ ID NO: 17468 - protein, 149 aa, Homo sapiens
ARLVLLAGAAALASGSQGDREPVYRDCVLQCEEQNCSGGALNHFRSRQPIYMSLAGWTCRDDCKYECMWVTVGLYLQEGHKVPQFHGKWPFSRFLFFQEPASAVASFLNGLASLVMLCRYRTFVPASSPMYHTCVAFAWMRKLRHSKAK

SEQ ID NO: 17469 - protein, 189 aa, Homo sapiens
MINTQDSSILPLSNCPQLQCCRHIVPGPLWCSDAPHPLSKIPGGRGGGRDPSLSALIYKDEKLTVTQDLPVNDGKPHIVHFQYEVTEVKVSSWDAVLSSQSLFVEIPDGLLADGSKEGLLALLEFAEEKMKVNYVFICFRKGREDRAPLLKTFSFLGFEIVRPGHPCVPSRPDVMFMVYPLDQNLSDED

SEQ ID NO: 17470 - protein, 81 aa, Homo sapiens
MVMATVKKGKPELRKKVHPAVVIRQRKSYRRKDGVFLYFEDNAGVIVNNKGEMKGSAITGPVAKECADLWPRIASNAGSIA

SEQ ID NO: 17471 - protein, 782 aa, Homo sapiens
MGDEKDSWKVKTLDEILQEKKRRKEQEEKAEIKRLKNSDDRDSKRDSLEEGELRDHRMEITIRNSPYRREDSMEDRGEEDDSLAIKPPQQMSRKEKAHHRKDEKRKEKRRHRSHSAEGGKHARVKEKEREHERRKRHREEQDKARREWERQKRREMAREHSRRERDRLEQLERKRERERKMREQQKEQREQKERERRAEERRKEREARREVSAHHRTMREDYSDKVKASHWSRSPPRPPRERFELGDGRKPVKEEKMEERDLLSDLQDISDSERKTSSAESSSAESGSGSEEEEEEEEEEEEEGSTSEESEEEEEEEEEEEEETGSNSEEASEQSAEEVSEEEMSEDEERENENHLLVVPESRFDRDSGESEEAEEEVGEGTPQSSALTEGDYVPDSPALSPIELKQELPKYLPALQGCRSVEEFQCLNRIEEGTYGVVYRAKDKKTDEIVALKRLKMEKEKEGFPITSLREINTILKAQHPNIVTVREIVVGSNMDKIYIVMNYVEHDLKSLMETMKQPFLPGEVKTLMIQLLRGVKHLHDNWILHRDLKTSNLLLSHAGILKVGDFGLAREYGSPLKAYTPVVVTLWYRAPELLLGAKEYSTAVDMWSVGCIFGELLTQKPLFPGKSEIDQINKVFKDLGTPSEKIWPGYSELPAVKKMTFSEHPYNNLRKRFGALLSDQGFDLMNKFLTYFPGRRISAEDGLKHEYFRETPLPIDPSMFPTWPAKSEQQRVKRGTSPRPPEGGLGYSQLGDDDLKETGFHLTTTNQGASAAGPGFSLKF

SEQ ID NO: 17472 - protein, 429 aa, Homo sapiens
MCPGALWVALPLLSLLAGSLQGKPLQSWGRGSAGGNAHSPLGVPGGGLPEHTFNLKMFLENVKVDFLRSLNLSGVPSQDKTRVEPPQYMIDLYNRYTSDKSTTPASNIVRSFSMEDAISITATEDFPFQKHILLFNISIPRHEQITRAELRLYVSCQNHVDPSHDLKGSVVIYDVLDGTDAWDSATETKTFLVSQDIQDEGWETLEVSSAVKRWVRSDSTKSKNKLEVTVESHRKGCDTLDISVPPGSRNLPFFVVFSNDHSSGTKETRLELREMISHEQESVLKKLSKDGSTEAGESSHEEDTDGHVAAGSTLARRKRSAGAGSHCQKTSLRVNFEDIGWDSWIIAPKEYEAYECKGGCFFPLADDVTPTKHAIVQTLVHLKFPTKVGKACCVPTKLSPISVLYKDDMGVPTLKYHYEGMSVAECGCR

SEQ ID NO: 17473 - protein, 174 aa, Homo sapiens
MADVLDLHEAGGEDFAMDEDGDESIHKLKEKAKKRKGRGFGSEEGSRARMREDYDSVEQDGDEPGPQRSVEGWILFVTGVHEEATEEDIHDKFAEYGEIKNIHLNLDRRTGYLKGYTLVEYETYKEAQAAMEGLNGQDLMGQPISVDWCFVRGPPKGKRRGGRRRSRSPDRRRR

SEQ ID NO: 17474 - protein, 234 aa, Homo sapiens
MKVLLLTGLGALFFAYYWDDNFDPGGLDYLVLNHIGGAPAGTRARSPQATRWLMQVNFVSYVQLTSRALPSLTDSKGSLVVVSSLLGRVPTSFSTPYSAAKFALDGFFGSLRRELDVQDVNVAITMCVLGLRDRASAAEAVRSSTSRPRQPEHRGVPLQSQTAMFLPPTVPGARTLTETPLRGWPQPKMKSSRQKSKTEKNDGHLEPVTAWEVQVPRVRRLCRGLARPHLFGHD

SEQ ID NO: 17475 - protein, 62 aa, Homo sapiens
AQPGGSSWRRIALLILAITIHNVPEGLAVGVGFGAIEKTASATFESARVLNLVSCPGLNLPS

SEQ ID NO: 17476 - protein, 541 aa, Homo sapiens
MNCYLLLRFMLGIPLLWPCLGATENSQTKKVKQPVRSHLRVKRGWVWNQFFVPEEMNTTSHHIGQLRSDLDNGNNSFQYKLLGAGAGSTFIIDERTGDIYAIQKLDREERSLYILRAQVIDIATGRAVEPESEFVIKVSDINDNEPKFLDEPYEAIVPEMSPEGTLVIQVTASDADDPSSGNNARLLYSLLQGQPYFSVEPTTGVIRISSKMDRELQDEYWVIIQAKDMIGQPGALSGTTSVLIKLSDVNDNKPIFKESLYRLTVSESAPTGTSIGTIMAYDNDIGENAEMDYSIEEDDSQTFDIITNHETQEGIVILKKKVDFEHQNHYGIRAKVKNHHVPEQLMKYHTEASTTFIKIQVEDVDEPPLFLLPYYVFEVFEETPQGSFVGVVSATDPDNRKSPIRYSITRSKVFNINDNGTITTSNSLDREISAWYNLSITATEKYNIEQISSIPLYVQVLNINDHAPEFSQYYETYVCENAGSGQVIQTISAVDRDESIEEHHFYFNLSVEDTNNSSFTIIDNQELVLTFKKNLSSTSPS

SEQ ID NO: 17477 - protein, 114 aa, Homo sapiens
MNVLLGSVVIFATFVTLCNASCYFIPNEGVPGDSTRKCMDLKGNKHPINSEWQTDNCETCTCYETEISCCTLVSTPVGYDKDNCQRIFKKEDCKYIVVEKKDPKKTCSVSEWII

SEQ ID NO: 17478 - protein, 184 aa, Homo sapiens
MSWPRRLLLRYLFPALLLHGLGEGSALLHPDSRSHPRSLEKSAWRAFKESQCHHMLKHLHNGARITVQMPPTIEGHWVSTGCEVRSGPEFITRSYRFYHNNTFKAYQFYYGSNRCTNPTYTLIIRGKIRLRQASWIIRGGTEADYQLHNVQGHGRHRVRVQSESHEGHPHGCGHSLTAQRLQRE

SEQ ID NO: 17479 - protein, 22 aa, Homo sapiens
MSWPRRLLLRYLFPALLLHAVK

SEQ ID NO: 17480 - protein, 178 aa, Homo sapiens
MQTCPLAFPGHVSQALGTLLFLAASLSAQNEGWDSPICTEGVVSVSWGENTVMSCNISNAFSHVNIKLRAHGQESAIFNEVAPGYFSRDGWQLQVQGGVAQLVIKGARDSHAGLYMWHLVGHQRNNRQVTLEVSGAEPQSAPDTGFWPVPAVVTAVFILLVALVMFAWYRCRCSQQRR

SEQ ID NO: 17481 - protein, 170 aa, Homo sapiens
MQTCPLAFPGHVSQALGTLLFLAASLSAQNEGWDSPICTEGVVSVSWGENTVMSCNISNAFSHVNIKLRAHGQESAIFNEVAPGYFSRDGWQLQVQGGVAQLVIKGARDSHAGLYMWHLVGHQRNNRQVTLEVSEPRGLKDRASAQLLGPGTSRGAEPQSAPDTGFWPVP

SEQ ID NO: 17482 - protein, 111 aa, Homo sapiens
MALRHLALLAGLLVGVASKSMENTDTDVPAPEVLTRSTAGVRGACASQRGALRCLLGPAARVLCGCGGRQRQLPRRKSVWSRLLQALERGRERQLRPLWERNPPSLQRLRV

SEQ ID NO: 17483 - protein, 1247 aa, Homo sapiens
MMREWVLLMSVLLCGLAGPTHLFQPSLVLDMAKVLLDNYCFPENLLGMQEAIQQAIKSHEILSISDPQTLASVLTAGVQSSLNDPRLVISYEPSTPEPPPQVPALTSLSEEELLAWLQRGLRHEVLEGNVGYLRVDSVPGQEVLSMMGEFLVAHVWGNLMGTSALVLDLRHCTGGQVSGIPYIISYLHPGNTILHVDTIYNRPSNTTTEIWTLPQVLGERYGADKDVVVLTSSQTRGVAEDIAHILKQMRRAIVVGERTGGGALDLRKLRIGESDFFFTVPVSRSLGPLGGGSQTWEGSGVLPCVGTPAEQALEKALAILTLRSALPGVVHCLQEVLKDYYTLVDRVPTLLQHLASMDFSTVVSEEDLVTKLNAGLQAASEDPRLLVRAIGPTETPSWPAPDAAAEDSPGVAPELPEDEAIRQALVDSVFQVSVLPGNVGYLRFDSFADASVLGVLAPYVLRQVWEPLQDTEHLIMDLRHNPGGPSSAVPLLLSYFQGPEAGPVHLFTTYDRRTNITQEHFSHMELPGPRYSTQRGVYLLTSHRTATAAEEFAFLMQSLGWATLVGEITAGNLLHTRTVPLLDTPEGSLALTVPVLTFIDNHGEAWLGGGVVPDAIVLAEEALDKAQEVLEFHQSLGALVEGTGHLLEAHYARPEVVGQTSALLRAKLAQGAYRTAVDLESLASQLTADLQEVSGDHRLLVFHSPGELVVEEAPPPPPAVPSPEELTYLIEALFKTEVLPGQLGYLRFDAMAELETVKAVGPQLVRLVWQQLVDTAALVIDLRYNPGSYSTAIPLLCSYFFEAEPRQHLYSVFDRATSKVTEVWTLPQVAGQRYGSHKDLYILMSHTSGSAAEAFAHTMQDLQRATVIGEPTAGGALSVGIYQVGSSPLYASMPTQMAMSATTGKAWDLAGVEPDITVPMSEALSIAQDIVALRAKVPTVLQTAGKLVADNYASAELGAKMATKLSGLQSRYSRVTSEVALAEILGADLQMLSGDPHLKAAHIPENAKDRIPGIVPMQIPSPEVFEELIKFSFHTNVLEDNIGYLRFDMFGDGELLTQVSRLLVEHIWKKIMHTDAMIIDMRFNIGGPTSSIPILCSYFFDEGPPVLLDKIYSRPDDSVSELWTHAQVVGERYGSKKSMVILTSSVTAGTAEEFTYIMKRLGRALVIGEVTSGGCQPPQTYHVDDTNLYLTIPTARSVGASDGSSWEGVGVTPHVVVPAEEALARAKEMLQHNQLRVKRSPGLQDHL

SEQ ID NO: 17484 - protein, 268 aa, Homo sapiens
MEMKKKINLELRNRSPEEVTELVLDNCLCVNGEIEGLNDTFKELEFLSMANVELSSLARLPSLNKLRKLELSDNIISGGLEVLAEKCPNLTYLNLSGNKIKDLSTVEALQNLKNLKSLDLFNCEITNLEDYRESIFELLQQITYLDGFDQEDNEAPDSEEEDDEDGDEDDEEEEENEAGPPEGYEEEEEEEEEEDEDEDEDEDEAGSELGEGEEEVGLSYLMKEEIQDEEDDDDYVEEGEEEEEEEEGGLRGEKRKRDAEDDGEEEDD

SEQ ID NO: 17485 - protein, 422 aa, Homo sapiens
MVMAALSLVAACWGRAAADESVQLPAAPGSSVRARETMVSVTMATSEWIQFFKEAGIPPGPAVNYAVMFVDNRIQKSMLLDLNKEIMNELGVTVVGDIIAILKHAKVVHRQDMCKAATESVPCSPSPLAGEIRRGTSAASRMITNSLNHDSPPSTPPRRPDTSTSKISVTVSNKMAAKSAKATAALARREEESLAVPAKRRRVTAEMEGKYVINMPKGTTPRTRKILEQQQAAKGLHRTSVFDRLGAETKADTTTGSKPTGVFSRLGATPETDEDLAWDSDNDSSSSVLQYAGVLKKLGRGPAKASPQPALTVKAKATSSATTAAAPTLRRLALSSRSGLERKPESLSKVSIIKRLGAAALVPEAQDSQVTSTKSKSSAEVKVTIKRTLVGPRGSSSSEGLGAQMDHAGTVSVFKRLGRRTF

SEQ ID NO: 17486 - protein, 189 aa, Homo sapiens
MKVLLLTGLGALFFAYYWDDNFDPGKLCELRATDVAGAAQPDGQQGLPGGGVLAARPRAHVVLHSLLGGQVCAGRLLRLPAAGAGRAGRERGHHHVRPGPPRSRLRRRGSQGSHEGQGGPGAQGSPGRDPRRRHARGRRLLPVAFPPAVLAPALATAPAGLVYPPGAQRHGRGSLSTGGCPSSPRRQCS

SEQ ID NO: 17487 - protein, 370 aa, Homo sapiens
MNVAAKYRMASLYVGDLHADVTEDLLFRKFSTVGPVLSIRICRDQVTRRSLGYAYVNFLQLADAQKALDTMNFDIIKGKSIRLMWSQRDAYLRRSGIGNVFIKNLDKSIDNKTLYEHFSAFGKILSSKVMSDDQGSKGYAFVHFQNQSAADRAIEEMNGKLLKGCKVFVGRFKNRKDREAELRSKASEFTNVYIKNFGGDMDDERLKDVFSKYGKTLSVKVMTDSSGKSKGFGFVSFDSHEAAKKAVEEMNGRDINGQLIFVGRAQKKVERQAELKQMFEQLKRERIRGCQGVKLYIKNLDDTIDDEKLRNEFSSFGSISRVKVMQEEGQSKGFGLICFSSPEDATKAMTEMNGRILGSKPLSIALAQRH

SEQ ID NO: 17488 - protein, 148 aa, Homo sapiens
MAGLAARLVLLAGAAALASGSQGDREPVYRDCVLQCEEQNCSGGALNHFRSRQPIYMSLAGWTCRDDCKYECMWVTVGLYLQEGHKVPQFHGKWPFSRFLFFQEPASAVASFLNGLASLVMLCRYRTFVPASSPMYHTCVAFAWLSGR

SEQ ID NO: 17489 - protein, 47 aa, Homo sapiens
MKVLLLTGLGALFFAYYWDDNFDPGGRELPEAGRPQGLLHRGGHGLP

SEQ ID NO: 17490 - protein, 700 aa, Homo sapiens
MDLWNLSWFLFLDALLVISGLATPENFDVDGGMDQDIFDINEGLGLDLFEGDIRLDRAQIRNSIIGEKYRWPHTIPYVLEDSLEMNAKGVILNAFERYRLKTCIDFKPWAGETNYISVFKGSGCWSSVGNRRVGKQELSIGANCDRIATVQHEFLHALGFWHEQSRSDRDDYVRIMWDRILSGREHNFNTYSDDISDSLNVPYDYTSVMHYSKTAFQNGTEPTIVTRISDFEDVIGQRMDFSDSDLLKLNQLYNCSSSLSFMDSCSFELENVCGMIQSSGDNADWQRVSQVPRGPESDHSNMGQCQGSGFFMHFDSSSVNVGATAVLESRTLYPKRGFQCLQFYLYNSGSESDQLNIYIREYSADNVDGNLTLVEEIKEIPTGSWQLYHVTLKVTKKFRVVFEGRKGSGASLGGLSIDDINLSETRCPHHIWHIRNFTQFIGSPNGTLYSPPFYSSKGYAFQIYLNLAHVTNAGIYFHLISGANDDQLQWPCPWQQATMTLLDQNPDIRQRMSNQRSITTDPFMTTDNGNYFWDRPSKVGTVALFSNGTQFRRGGGYGTSAFITHERLKSRDFIKGDDVYILLTVEDISHLNSTQIQLTPAPSVQDLCSKTTCKNDGVCTVRDGKAECRCQSGEDWWYMGERCEKRGSTRDTIVIAVSSTVAVFALMLIITLVSVYCTRKKYRERMSSNRPNLTPQNHAF

SEQ ID NO: 17491 - protein, 141 aa, Homo sapiens
MVMAALSLVAACWGRAAADESVQLPAAPGSSVRARETMVSVTMATSEWIQFFKEAGIPPGPAVNYAVMFVDNRIQKSMLLDLNKEIMNELGVTVVGDIIAILKHAKVVHRQGLTPSPRLECSSTISAHCNLCLPGHVQSCH

SEQ ID NO: 17492 - protein, 211 aa, Homo sapiens
MADKVRRQRPRRRVCWALVAVLLADLLALSDTLAVMSVDLGSESMKVAIVKPGVPMEIVLNKESRRKTPVIVTLKENERFFGDSAASMAIKNPKATLRYFQHLLGKQADNPHVALYQARFPEHELTFDPQRQTVHFQISSQLQFSPEEVLGMVLNYSRSLAEDFAEQPIKDAVITVPVFFNQAERRAVLQAARMAGLKVLQLINDNTATAL

SEQ ID NO: 17493 - protein, 1465 aa, Homo sapiens
MRGLGTCLATLAGLLLTAAGETFSGGCLFDEPYSTCGYSQSEGDDFNWEQVNTLTKPTSDPWMPSGSFMLVNASGRPEGQRAHLLLPQLKENDTHCIDFHYFVSSKSNSPPGLLNVYVKVNNGPLGNPIWNISGDPTRTWNRAELAISTFWPNFYQVIFEVITSGHQGYLAIDEVKVLGHPCTRTPHFLRIQNVEVNAGQFATFQCSAIGRTVAGDRLWLQGIDVRDAPLKEIKVTSSRRFIASFNVVNTTKRDAGKYRCMIRTEGGVGISNYAELVVKEPPVPIAPPQLASVGATYLWIQLNANSINGDGPIVAREVEYCTASGSWNDRQPVDSTSYKIGHLDPDTEYEISVLLTRPGEGGTGSPGPALRTRTKCADPMRGPRKLEVVEVKSRQITIRWEPFGYNVTRCHSYNLTVHYCYQVGGQEQVREEVSWDTENSHPQHTITNLSPYTNVSVKLILMNPEGRKESQELIVQTDEDLPGAVPTESIQGSTFEEKIFLQWREPTQTYGVITLYEITYKAVSSFDPEIDLSNQSGRVSKLGNETHFLFFGLYPGTTYSFTIRASTAKGFGPPATNQFTTKISAPSMPAYELETPLNQTDNTVTVMLKPAHSRGAPVSVYQIVVEEERPRRTKKTTEILKCYPVPIHFQNASLLNSQYYFAAEFPADSLQAAQPFTIGDNKTYNGYWNTPLLPYKSYRIYFQAASRANGETKIDCVQVATKGAATPKPVPEPEKQTDHTVKIAGVIAGILLFVIIFLGVVLVMKKRKLAKKRKETMSSTRQEMTVMVNSMDKSYAEQGTNCDEAFSFMDTHNLNGRSVSSPSSFTMKTNTLSTSVPNSYYPDPFVPTAILVPINDETHTMASDTSSLVQSHTYKKREPADVPYQTGQLHPAIRVADLLQHITQMKCAEGYGFKEEYESFFEGQSAPWDSAKKDENRMKNRYGNIIAYDHSRVRLQTIEGDTNSDYINGNYIDGYHRPNHYIATQGPMQETIYDFWRMVWHENTASIIMVTNLVEVGRVKCCKYWPDDTEIYKDIKVTLIETELLAEYVIRTFAVEKRGVHEIREIRQFHFTGWPDHGVPYHATGLLGFVRQVKSKSPPSAGPLVVHCSAGAGRTGCFIVIDIMLDMAEREGVVDIYNCVRELRSRRVNMVQTEEQYVFIHDAILEACLCGDTSVPASQVRSLYYDMNKLDPQTNSSQIKEEFRTLNMVTPTLRVEDCSIALLPRNHEKNRCMDILPPDRCLPFLITIDGESSNYINAALMDSYKQPSAFIVTQHPLPNTVKDFWRLVLDYHCTSVVMLNDVDPAQLCPQYWPENGVHRHGPIQVEFVSADLEEDIISRIFRIYNAARPQDGYRMVQQFQFLGWPMYRDTPVSKRSFLKLIRQVDKWQEEYNGGEGRTVVHCLNGGGRSGTFCAISIVCEMLRHQRTVDVFHAVKTLRNNKPNMVDLLDQYKFCYEVALEYLNSG

SEQ ID NO: 17494 - protein, 75 aa, Homo sapiens
MKLHYVAVLTLAILMFLTWLPESLSCNKALCASDVSKCLIQELCQCRPGEGNCSCCKECMLCLGALWDECCDCVD

SEQ ID NO: 17495 - protein, 127 aa, Homo sapiens
MDYPTLLLALLHVYRALCEEVLWHTSVPFAENMSLECVYPSMGILTQVEWFKIGTQQDSIAIFSPTHGMVIRKPYAERVYFLNSTMASNNMTLFFRNASEDDVGYYSCSLYTYPQGTWQKVIQVVQS

SEQ ID NO: 17496 - protein, 217 aa, Homo sapiens
MSVGFIGAGQLAFALAKGFTAAGVLAAHKIMASSPDMDLATVSALRKMGVKLTPHNKETVQHSDVLFLAVKPHIIPFILDEIGADIEDRHIVVSCAAGVTISSIEKKLSAFRPAPRVIRCMTNTPVVVREGATVYATGTHAQVEDGRLMEQLLSSVGFCTEVEEDLIDAVTGLSGSGPAYAFTALDALADGGVKMGLPRRLAVRLGAQALLGAAVHG

SEQ ID NO: 17497 - protein, 146 aa, Homo sapiens
MLLALVCLLSCLLPSSEAKLYGRCELARVLHDFGLDGYRGYSLADWVCLAYFTSGFNAAALDYEADGSTNNGIFQINSRRWCSNLTPNVPNVCRMYCSDLLNPNLKDTVICAMKITQEPQGLGYWEAWRHHCQGKDLTEWVDGCDF

SEQ ID NO: 17498 - protein, 122 aa, Homo sapiens
MKLAAMIKKMCPSDSELSIPAKNCYRMVILGSSKVGKTAIVSRFLTGRFEDAYTPTIEDFHRKFYSIRGEVYQLDILDTSGNHPFPAMRRLSILTDPRHQVLPQEQNQGERGRAPGHLRQQG

SEQ ID NO: 17499 - protein, 215 aa, Homo sapiens
MVLLTMIARVADGLPLAASMQEDEQSGRDLQQYQSQAKQLFRKLNEQSPTRCTLEAGAMTFHYIIEQGVCYLVLCEAAFPKKLAFAYLEDLHSEFDEQHGKKVPTVSRPYSFIEFDTFIQKTKKLYIDSRARRNLGSINTELQDVQRIMVANIEEVLQRGEALSALDSKANNLSSLSKKYRQDAKYLNMRSTYAKLAAVAVFFIMLIVYVRFWWL

SEQ ID NO: 17500 - protein, 78 aa, Homo sapiens
LALLALLMSLTQGVLTALRLRKMTFGRVSDLGQFIRESEPEPDVRKSKGSMFSQAMKKWVQGNTDEAQEELAWKIAKM

SEQ ID NO: 17501 - protein, 141 aa, Homo sapiens
MVTIILLLSCDFWAVKNVTGRLMVGLRWWNHIDEDGKSHWVFESRKESSQENKTVSEAESRIFWLGLIACPVLWVIFAFSALFSFRVKWLAVVIMGVVLQGANLYGYIRCKVRSRKHLTSMATSYFGKQFLRQNTGDDQTS

SEQ ID NO: 17502 - protein, 26 aa, Homo sapiens
AYRSYLIVFFVPILLLPLPILVPSKL

SEQ ID NO: 17503 - protein, 334 aa, Homo sapiens
MASGTTTTAVKIGIIGGTGLDDPEILEGRTEKYVDTPFGKPSDALILGKIKNVDCVLLARHGRQHTIMPSKVNYQANIWALKEEGCTHVIVTTACGSLREEIQPGDIVIIDQFIDRTTMRPQSFYDGSHSCARGVCHIPMAEPFCPKTREVLIETAKKLGLRCHSKGTMVTIEGPRFSSRAESFMFRTWGADVINMTTVPEVVLAKEAGICYASIAMATDYDCWKEHEEAVSVDRVLKTLKENANKAKSLLLTTIPQIGSTEWSETLHNLKMIKFQMILSEGYHPFNIQESPFYRGLLDFPSVGHGRGEILPLSPLDLAGYCFQQPMQPPCPDS

SEQ ID NO: 17504 - protein, 90 aa, Homo sapiens
MELAALCRWGLLLALLPPGAASTQVCTGTDMKLRLPASPETHLDMLRHLYQGCQVVQGNLELTYLPTNASLSFLQVRPVGNPARPCLQLG

SEQ ID NO: 17505 - protein, 976 aa, Homo sapiens
MHSLALQNTLHERTWSDEKNLMQQELRSLKQNIFLFYVKLRWLLKHWRQGKQMEEEGEEFTEGEHPETLSRLGELGVQGGHQADGPDHDSDRGCGFPVGEHSPHSRVQIGDHSLRLQTADRGQPHKQVVENQQLFSAFKALLEDFRAELREDERARLRLQQQYASDKAAWDVEWAVLKCRLEQNCCGYPRINIEEETLGFTRLPAGSTVKTLKSLGLQRLELEEKTENKLGELGSSAESKGALKKEREVHQKLLADSHSLVMDLRWQIHHSEKNWNREKVELLDRLDRDRQEWERQKKEFLWRIEQGSLRMPRPVAMWPCADADSIPFEDRPLSKLKESDRCSASENLYLDALSLDDEPEEPPAHRPEREFRNRLPEEEENHKGNLQRAVSVSSMSEFQRLMDISPFLPEKGLPSTSSKEDVTPPLSPDDLKYIEEFNKSWDYTPNRGHNGGGPDLWADRTEVGRAGHEDSTEPFPDSSWYLTTSVTMTTDTMTSPEHCQKQPLRSHVLTEQSGLRVLHSPPAVRRVDSITAAGGEGPFPTSRARGSPGDTKGGPPEPMLSRWPCTSPRHSRDYVEGARRPLDSPLCTSLGFASPLHSLEMSKNLSDDMKEVAFSVRNAICSGPGELQVKDMACQTNGSRTMGTQTVQTISVGLQTEALRGSGVTSSPHKCLTPKAGGGATPVSSPSRSLRSRQVAPAIEKVQAKFERTCCSPKYGSPKLQRKPLPKADQPNNRTSPGMAQKGYSESAWARSTTTRESPVHTTINDGLSSLFNIIDHSPVVQDPFQKGLRAGSRSRSAEPRPELGPGQETGTNSRGRSPSPIGVGSEMCREEGGEGTPVKQDLSAPPGYTLTENVARILNKKLLEHALKEERRQAAHGPPGLHSDSHSLGDTAEPGPMEELPCSALAPSLEPCFSRPERPANRRPPSRWAPHSPTASQPQSPGDPTSLEEHGGEEPPEEQPHRDASLHGLSQYNSL

SEQ ID NO: 17506 - protein, 347 aa, Homo sapiens
MSASQDSRSRDNGPDGMEPEGVIESNWNEIVDSFDDMNLSESLLRGIYAYGFEKPSAIQQRAILPCIKGYDVIAQAQSGTGKTATFAISILQQIELDLKATQALVLAPTRELAQQIQKVVMALGDYMGASCHACIGGTNVRAEVQKLQMEAPHIIVGTPGRVFDMLNRRYLSPKYIKMFVLDEADEMLSRGFKDQIYDIFQKLNSNTQVVLLSATMPSDVLEVTKKFMRDPIRILVKKEELTLEGIRQFYINVEREEWKLDTLCDLYETLTITQAVIFINTRRKVDWLTEKMHARDFTVSAMHGDMDQKERDVIMREFRSGSSRVLITTDLLGKLYPQNRSRWTVWP

SEQ ID NO: 17507 - protein, 364 aa, Homo sapiens
ALGAVIALLLWGQLFAVDSGNDVTDIADDGCPKPPEIAHGYVEHSVRYQCKNYYKLRTEGDGVYTLNDKKQWINKAVGDKLPECEADDGCPKPPEIAHGYVEHSVRYQCKNYYKLRTEGDGVYTLNNEKQWINKAVGDKLPECEAGATLINEQWLLTTAKNLFLNHSENATAKDIAPTLTLYVGKKQLVEIEKVVLHPNYSQVDIGLIKLKQKVSVNERVMPICLPSKDYAEVGRVGYVSGWGRNANFKFTDHLKYVMLPVADQDQCIRHYEGSTVPEKKTPKSPVGVQPILNEHTFCAGMSKYQEDTCYGDAGSAFAVHDLEEDTWYATGILSFDKSCAVAEYGVYVKVTSIQDWVQKTIAEN

SEQ ID NO: 17508 - protein, 469 aa, Homo sapiens
MLPPWTLGLLLLATVRGKEVCYGQLGCFSDEKPWAGTLQRPVKLLPWSPEDIDTRFLLYTNENPNNFQLITGTEPDTIEASNFQLDRKTRFIIHGFLDKAEDSWPSDMCKKMFEVEKVNCICVDWRHGSRAMYTQAVQNIRVVGAETAFLIQALSTQLGYSLEDVHVIGHSLGAHTAAEAGRRLGGRVGRITGLDPAGPCFQDEPEEVRLDPSDAVFVDVIHTDSSPIVPSLGFGMSQKVGHLDFFPNGGKEMPGCKKNVLSTITDIDGIWEGIGGFVSCNHLRSFEYYSSSVLNPDGFLGYPCASYDEFQESKCFPCPAEGCPKMGHYADQFKGKTSAVEQTFFLNTGESGNFTSURYKISVTLSGKEKVNGYIRIALYGSNENSKQYEIFKGSLKPDASHTCAIDVDFNVGKIQKVKFLWNKRGINLSEPKLGASQITVQSGEDGTEYNFCSSDTVEENVLQSLYPC

SEQ ID NO: 17509 - protein, 154 aa, Homo sapiens
MADKVRRQRPRRRVCWALVAVLLADLLALSDTLAVMSVDLGSESMKVAIVKPGVPMEIVLNKESRRKTPVIVTLKENERFFGDSAASMAIKNPKATLRYFQHLLGKQADNPHVALYQARFPEHELTFDPQRQTVHFQISSQLQFSPEEVLGMVL

SEQ ID NO: 17510 - protein, 126 aa, Homo sapiens
MAPQRRAATKAPEGNGAAERRNRSSTKKDRAPREVQRLWQRPWLRTAGLGAGFVLTALLLWSSLGADDGVAEVLARRGEVVAGRFIEVPCSEDYDSHRRLHSPKVRQRCHRCRHHQGGSGADSQRS

SEQ ID NO: 17511 - protein, 428 aa, Homo sapiens
MITGVFSMRLWTPVGVLTSLAYCLHQRRVALAELQEADGQCPVDRSLLKLKMVQVVFRHGARSPLKPLPLEEQVEWNPQLLEVPPQTQFDYTVTNLAGGPKPYSPYDSQYHETTLKGGMFAGQLTKVGMQQMFALGERLRKNYVEDIPFLSPTFNPQEVFIRSTNIFRNLESTRCLLAGLFQCQKEGPIIIHTDEADSEVLYPNYQSCWSLRQRTRGRRQTASLQPGISEDLKKVKDRMGIDSSDKVDFFILLDNVAAEQAHNLPSCPMLKRFARMIEQRAVDTSLYILPKEDRESLQMAVGPFLHILESNLLKAMDSATAPDKIRKLYLYAAHDVTFIPLLMTLGIFDHKWPPFAVDLTMELYQHLESKEWFVQLYYHGKEQVPRGCPDGLCPLDMFLNAMSVYTLSPEKYHALCSQTQVMEVGNEE

SEQ ID NO: 17512 - protein, 480 aa, Homo sapiens
MKAFHTFCVVLLVFGSVSEAKFDDFEDEEDIVEYDDNDFAEFEDVMEDSVTESPQRVIITEDDEDETTVELEGQDENQEGDFEDADTQEGDTESEPYDDEEFEGYEDKPDTSSSKNKDPITIVDVPAHLQNSWESYYLEILMVTGLLAYIMNYIIGKNKNSRLAQAWFNTHRELLESNFTLVGDDGTNKEATSTGKLNQENEHIYNLWCSGRVCCEGMLIQLRFLKRQDLLNVLARMMRPVSDQVQIKVTMNDEDMDTYVFAVGTRKALVRLQKEMQDLSEFCSDKPKSGAKYGLPDSLAILSEMGEVTDGMMDTKMVHFLTHYADKIESVHFSDQFSGPKIMQEEGQPLKLPDTKRTLLFTFNVPGSGNTYPKDMEALLPLMNMVIYSIDKAKKFRLNREGKQKADKNRARVEENFLKLTHVQRQEAAQSRREEKKRAEKERIMNEEDPEKQRRLEVRQTYHWGKTTICKDDCLCSVGC

SEQ ID NO: 17513 - protein, 161 aa, Homo sapiens
MIISHFPKCVAVFALLALSVGALDTFIAAVYEHAVILPNRTETPVSKEEALLLMNKNIDVLEKAVKLAAKQVLPFYTCKGDLQFGQRVFGIHDKLFCPTCFEQGAHIIVTPEDGIYGWIFTRESIYPYLEDIPDPGVNWIPCRDPWREWNLRPRSSQGVPL

SEQ ID NO: 17514 - protein, 221 aa, Homo sapiens
MAGPPRLLLLPLLLALARGLPGALAAQEVQQSPHCTTVPVGASVNITCSTSGGLRGIYLRQLGPQPQDIIYYEDGVVPTTDRRFRGRIDFSGSQDNLTITMHRLQLSDTGTYTCQAITEVNVYGSGTLVLVTEEQSQGWHRCSDAPPRASALPAPPTGSALPDPQTASALPDPPAASALPAALAVISFLLGLGLGVACVLARTQVSVSPSCHLHPKDCSLS

SEQ ID NO: 17515 - protein, 268 aa, Homo sapiens
MLLKEYRICMPLTVDEYKIGQLYMISKHSHEQSDRGEGVEVVQNEPFEDPHHGNGQFTEKRVYLNSKLPSWARAVVPKIFYVTEKAWNYYPYTITEYTCSFLPKFSIHIETKYEDNKGSNDTIFDNEAKDVEREVCFIDIACDEIPERYYKESEDPKHFKSEKTGRGQLREGWRDSHQPIMCSYKLVTVKFEVWGLQTRVEQFVHKVVRDILLIGHRQAFAWVDEWYDMTMDDVREYEKNMHEQTNIKVCNQHSSPVDDIESHAQTST

SEQ ID NO: 17516 - protein, 82 aa, Homo sapiens
MLSLKKYLTEGLLQFTILLSLIGVRVDVDTYLTSQLPPLREIILGPSSAYTQTQFHNLRNTLDGYGIHPKSIDLDNYFTARR

SEQ ID NO: 17517 - protein, 271 aa, Homo sapiens
MSSYLGQGPELLWLRFSSRSPRRSPSSARWQSCLLLSQTYSLVESAFACLLLSPPPRLTQVRWSRYSPEFKDPLIDKEYYRKPVEELTEEEKYVRELKKTQLIKAAPAGKTSSVFEDPVISKFTNMMMIGGNKVLARSLMIQTLEAVKRKQFEKYHAASAEEQATIERNPYTIFHQALKNCEPMIGLVPILKGGRFYQVPVPLPDRRRRFLAMKWMITECRDKKHQRTLMPEKLSHKLLEAFHNQGPVIKRKHDLHKMAEANRALAHYRWW

SEQ ID NO: 17518 - protein, 153 aa, Homo sapiens
MAMISGLSGRKSSTGSPTSPLNAEKLESEDVSQAFLEAVAEEKPHVKPYFSKTIRDLEVVEGSAARFDCKIEGYPDPEVVWFKDDQSIRESRHFQIDYDEDGNCSLIISDVCGDDDAKYTCKAVNSLGEATCTAELIVETMEEGEGEGEEEEE

SEQ ID NO: 17519 - protein, 1055 aa, Homo sapiens
MELAALCRWGLLLALLPPGAASTQVCTGTDMKLRLPASPETHLDMLRHLYQGCQVVQGNLELTYLPTNASLSFLQDIQEVQGYVLIAHNQVRQVPLQRLRIVRGTQLFEDNYALAVLDNGDPLNNTTPVTGASPGGLRELQLRSLTEILKGGVLIQRNPQLCYQDTILWKDIFHKNNQLALTLIDTNRSRACHPCSPMCKGSRCWGESSEDCQSLTRTVCAGGCARCKGPLPTDCCHEQCAAGCTGPKHSDCLACLHFNHSGICELHCPALVTYNTDTFESMPNPEGRYTFGASCVTACPYNYLSTDVGSCTLVCPLHNQEVTAEDGTQRCEKCSKPCARVCYGLGMEHLREVRAVTSANIQEFAGCKKIFGSLAFLPESFDGDPASNTAPLQPEQLQVFETLEEITGYLYISAWPDSLPDLSVFQNLQVIRGRILHNGAYSLTLQGLGISWLGLRSLRELGSGLALIHHNTHLCFVHTVPWDQLFRNPHQALLHTANRPEDECVGEGLACHQLCARGHCWGPGPTQCVNCSQFLRGQECVEECRVLQGLPREYVNARHCLPCHPECQPQNGSVTCFGPEADQCVACAHYKDPPFCVARCPSGVKPDLSYMPIWKFPDEEGACQPCPINCTHSCVDLDDKGCPAEQRASPLTSIISAVVGILLVVVLGVVFGILIKRRQQKIRKYTMRRLLQETELVEPLTPSGAMPNQAQMRILKETELRKVKVLGSGAFGTVYKGIWIPDGENVKIPVAIKVLRENTSPKANKEILDEAYVMAGVGSPYVSRLLGICLTSTVQLVTQLMPYGCLLDHVRENRGRLGSQDLLNWCMQIAKGMSYLEDVRLVHRDLAARNVLVKSPNHVKITDFGLARLLDIDETEYHADGGKVPIKWMALESILRRRFTHQSDVWSYGVTVWELMTFGAKPYDGIPAREIPDLLEKGERLPQPPICTIDVYMIMVKCWMIDSECRPRFRELVSEFSRMARDPQRFVVIQNEDLGPASPLDSTFYRSLLEDDDMGDLVDAEEYLVPQQGFFCPDPAPGAGGMVHHRHRSSSTRNM

SEQ ID NO: 17520 - protein, 74 aa, Homo sapiens
MAIPGRQYGLILPKKTQQLHPVLQKPSVFGNDSDDDDEMGFHSCCPGWSAMVQSRLTATSTSWVQAIFLPQPPK

SEQ ID NO: 17521 - protein, 60 aa, Homo sapiens
MKVNYVFICFRKGREDRAPLLKTFSFLGFEIVRPGHPCVPSRPDVMFMVYPLDQNLSDED

SEQ ID NO: 17522 - protein, 149 aa, Homo sapiens
MADKVRRQRPRRRVCWALVAVLLADLLALSDTLAVMSVDLGSESMKVAIVKPGVPMEIVLNKESRRKTPVIVTLKENERFFGDSAASMAIKNPKATLRYFQHLLGKQADNPHVALYQARFPEHELTFDPQRQTVHFQISSQLQFSPEEV

SEQ ID NO: 17523 - protein, 91 aa, Homo sapiens
MSALGAVIALLLWGQLFAVDSGNDVTDIADDGCPKPPEIAHGYVEHSVRYQCKNYYKLRTEGDGVYTLNNEKQWINKAVGDKLPECEAGGC

SEQ ID NO: 17524 - protein, 460 aa, Homo sapiens
MRITTGIYCLYLCNFIDGVLTLNAENTNYAYQVPNFHKCEICLLSFPKESQFQRHMRDHERNDKPHRCDQCPQTFNVEFNLTLHKCTHSGEDPTCPVCNKKFSRVASLKAHIMLHEKEENLICSECGDEFTLQSQLAVHMEEHRQELAGTRQHACKACKKEFETSSELKEHMKTHYKIRVSSTRSYNRNIDRSGFTYSCPHCGKTFQKPSQLTRHIRIHTGERPFKCSECGKAFNQKGALQTHMIKHTGEKPHACAFCPAAFSQKGNLQSHVQRVHSEVKNGPTYNCTECSCVFKSLGSLNTHISKMHMGGPQNSTSSTETAHVLTATLFQTLPLQQTEAQATSASSQPSSQAVSDVIQQLLELSEPAPVESGQSPQPGQQLSITVGINQDILQQALENSGLSSIPAAAHPNDSCHAKTSAPHAQNPDVSSVSNEQTDPTDAEQEKEQESPEKLDKKEKK

SEQ ID NO: 17525 - protein, 166 aa, Homo sapiens
MSSFGYRTLTVALFTLICCPGSDEKVFEVHVRPKKLAVEPKGSLEVNCSTTCNQPEVGGLETSLDKILLDEQAQWKHYLVSNISHDTVLQCHFTCSGKQESMNSNVSVYQPPRQVILTLQPTLVAVGKSFTIECRVPTVEPLDSLTLFLFRGNETLHYETFGKAAP

SEQ ID NO: 17526 - protein, 149 aa, Homo sapiens
MQTCPLAFPGHVSQALGTLLFLAASLSAQNEGWDSPICTEGVVSVSWGENTVMSCNISNAFSHVNIKLRAHGQESAIFNEVAPGYFSRDGWQLQVQGGVAQLVIKGARDSHAGLYMWHLVGHQRNNRQVTLEVSGAAVPSNAGRRSSSS

SEQ ID NO: 17527 - protein, 276 aa, Homo sapiens
MDYPTLLLALLHVYRALCEEVLWHTSVPFAENMSLECVYPSMGILTQVEWFKIGTQQDSIAIFSPTHGMVIRKPYAERVYFLNSTMASNNMTLFFRNASEDDVGYYSCSLYTYPQGTWQKVIQVVQSDSFEAAVPSNSHIVSEPGKNVTLTCQPQMTWPVQAVRWEKIQPRQIDLLTYCNLVHGRNFTSKFPRQIVSNCSHGRWSVIVIPDVTVSDSGLYRCYLQASAGENETFVMRLTVAEGKTDNQYTLFVAGGTVLLLLFVISITTIIVIFLN

SEQ ID NO: 17528 - protein, 214 aa, Homo sapiens
MSSFGYRTLTVALFTLICCPGSDEKVFEVHVRPKKLAVEPKGSLEVNCSTTCNQPEVGGLETSLDKILLDEQAQWKHYLVSNISHDTVLQCHFTCSGKQESMNSNVSVYQPPRQVILTLQPTLVAVGKSFTIECRVPTVEPLDSLTLFLFRGNETLHYETFGKAAPAPQEATATFNSTADREDGHRNFSCLAVLDLMSRGGNIFHKHSAPKMLE

SEQ ID NO: 17529 - protein, 99 aa, Homo sapiens
MLSLKKYLTEGLLQFTILLSLIGVRVDVDTYLTSQLPPLREIILGPSSAYTQTQFHNLRNTLDGYGIHPKSIDLDNYFTARRLLSQVRALDRFQVPTTE

SEQ ID NO: 17530 - protein, 171 aa, Homo sapiens
MPETSHIVALTSKSEQELYIPSVVSNSPSTVQSIENTSKSHGEIFKKDVCAENNNNMAMLICLIIIAVLFLICTFLFLSTVVLANKVSSLRRSKQVGKRQPRSNGDFLASGLWPAESDTWKRTKQLTGPNLVMQSTGVLTATRERKDEEGTEKLTNKQIAKSPKCPVRTRI

SEQ ID NO: 17531 - protein, 735 aa, Homo sapiens
MAADSREEKDGELNVLDDILTEVPEQDDELYNPESEQDKNEKKGSKRKSDRMESTDTKRQKPSVHSRQLVSKPLSSSVSNNKRIVSTKGKSATEYKNEEYQRSERNKRLDADRKIRLSSSASREPYKNQPEKTCVRKRDPERRAKSPTPDGSERIGLEVDRRASRSSQSSKEEVNSEEYGSDHETGSSGSSDEQGNNTENEEEGVEEDVEEDEEVEEDAEEDEEVDEDGEEEEEEEEEEEEEEEEEEEEYEQDERDQKEEGNDYDTRSEASDSGSESVSFTDGSVRSGSGTDGSDEKKKERKRARGISPIVFDRSGSSASESYAGSEKKHEKLSSSVRAVRKDQTSKLKYVLQDARFFLIKSNNHENVSLAKAKGVWSTLPVNEKKLNLAFRSARSVILIFSVRESGKFQGFARLSSESHHGGSPIHWVLPAGMSAKMLGGVFKIDWICRRELPFTKSAHLTNPWNEHKPVKIGRDGQEIELECGTQLCLLFPPDESIDLYQVIHKMRHKRRMHSQPRSRGRPSRREPVRDVGRRRPEDYDIHNSRKKPRIDYPPEFHQRPGYLKDPRYQEVDSFTNLIPNRRFSGVRRDVFLNGSYNDYVREFHNMGPPPPWQGMPPYPGMEQPPHHPYYQHHAPPPQAHPPYSGHHPVPHEARYRDKRVHDYDMRVDDFLRRTQAVVSGRRSRPRERDRERERDRPRDNRRDRERDRGRDRERERERLCDRDRDRGERGRYRR

SEQ ID NO: 17532 - protein, 193 aa, Homo sapiens
MRLQKRLASSVLRCGKKKVWLDPNETNEIANANSRQQIRKLIKDGLIIRKPVTVHSRARCRKNTLARRKGRHMGIGKRKGTANARMPEKVTWMRRMRILRRLLRRYRESKKIDRHMYHSLYLKVKGNVFKNKRILMEHIHKLKADKARKKLLADQAEARRSKTKEARKRREERLQAKKEEIIKTLSKEEETKK

SEQ ID NO: 17533 - protein, 332 aa, Homo sapiens
MLLKEYRICMPLTVDEYKIGQLYMISKHSHEQSDRGEGVEVVQNEPFEDPHHGNGQFTEKRVYLNSKLPSWARAVVPKIFYVTEKAWNYYPYTITEYTCSFLPKFSIHIETKYEDNKGSNDTIFDNEAKDVEREVCFIDIACDEIPERYYKESEDPKHFKSEKTGRGQLREGWRDSHQPIMCSYKLVTVKFEVWGLQTRVEQFVHKVVRDILLIGHRQAFAWVDEWYDMTMDEVREFERATQEATNKKIGIFPPAISISSIPLLPSSVRSAPSSAPSTPLSTDAPEFLSVPKDRPRKKSAPETLTLPDPEKKATLNLPGMHSSDKPCRPKSE

SEQ ID NO: 17534 - protein, 716 aa, Homo sapiens
MQSTANYLWHTDDLLGQGATASVYKARNKKSGELVAVKVFNTTSYLRPREVQVREFEVLRKLNHQNIVKLFAVEETGGSRQKVLVMEYCSSGSLLSVLESPENAFGLPEDEFLVVLRCVVAGMNHLRENGIVHRDIKPGNIMRLVGEEGQSIYKLTDFGAARELDDDEKFVSVYGTEEYLHPDMYERAVLRKPQQKAFGVTVDLWSIGVTLYHAATGSLPFIPFGGPRRNKEIMYRITTEKPAGAIAGAQRRENGPLEWSYTLPITCQLSLGLQSQLVPILANILEVEQAKCWGFDQFFAETSDILQRVVVHVFSLSQAVLHHIYIHAHNTIAIFQEAVHKQTSVAPRHQEYLFEGHLCVLEPSVSAQHIAHTTASSPLTLFSTAIPKGLAFRDPALDVPKFVPKVDLQADYNTAKGVLGAGYQALRLARALLDGQELMFRGLHWVMEVLQATCRRTLEVARTSLLYLSSSLGTERFSSVAGTPEIQELKAAAELRSRLRTLAEVLSRCSQNITETQESLSSLNRELVKSRDQVHEDRSIQQIQCCLDKMNFIYKQFKKSRMRPGLGYNEEQIHKLDKVNFSHLAKRLLQVFQEECVQKYQASLVTHGKRMRVVHETRNHLRLVGCSVAACNTEAQGVQESLSKLLEELSHQLLQDRAKGAQASPPPIAPYPSPTRKDLLLHMQELCEGMKLLASDLLDNNRIIERLNRVPAPPDV

SEQ ID NO: 17535 - protein, 403 aa, Homo sapiens
ALGAVIALLLWGQLFAVDSGNDVTDIADDGCPKPPEIAHGYVEHSVRYQCKNYYKLRTEGDGVYTLNDKKQWINKAVGDKLPECEADDGCPKPPEIAHGYVEHSVRYQCKNYYKLRTEGDVYTLNNEKQWINKAVGDKLPECEAVCGKPKNPANPVQRILGGHLDAKGSFPWQAKMVSHHNLTTGATLINEQWLLTTAKNLFLNHSENATAKDIAPTLTLYVGKKQLVEIEKVVLHPNYSQVDIGLIKLKQKVSVNERVMPICLPSKDYAEVGRVGYVSGWGRNANFKFTDHLKYVMLPVADQDQCIRHYEGSTVPEKKTPKSPVGVQPILNEHTFCAGMSKYQEDTCYGDAGSAFAVHDLEEDTWYATGILSFDKSCAVAEYGVYVKVTSIQDWVQKTIAEN

SEQ ID NO: 17536 - protein, 141 aa, Homo sapiens
MGAPLLSPGWGAGAAGRRWWMLLAPLLPALLLVRPAGALVEGLYCGTRDCYEVLGVSRSAGKAEIARAYRQLARRYHPDRYRPQPGDEGPGRTPQSAEEAFLLVATAYETLKILVMFQSSCICPRGLGVEWTPAEAPQLFL

SEQ ID NO: 17537 - protein, 5207 aa, Homo sapiens
MECPSCQHVSKEETPKFCSQCGERLPPAAPIADSENNNSTMASASEGEMECGQELKEEGGPCLFPGSDSWQENPEEPCSKASWTVQESKKKKRKKKKKGNKSASSELASLPLSPASPCHLTLLSNPWPQDTALPHSQAQQSGPTGQPSQPPGTATTPLEGDGLSAPTEVGDSPLQAQALGEAGVATGSEAQSSPQFQDHTEGEDQDASIPSGGRGLSQEGTGPPTSAGEGHSRTEDAAQELLLPESKGGSSEPGTELQTTEQQAGASASMAVDAVAEPANAVKGAGKEMKEKTQRMKQPPATTPPFKTHCQEAETKTKDEMAAAEEKVGKNEQGEPEDLKKPEGKNRSAAAVKNEKEQKNQEADVQEVKASTLSPGGGVTVFFHAIISLHFPFNPDLHKVFIRGGEEFGESKWDSNICELHYTRDLGHDRVLVEGIVCISKKHLDKYIPYKYVIYNGESFEYEFIYKHQQKKGEYVNRCLFIKSSLLGSGDWHQYYDIVYMKPHGRLQKVMNHITDGPRKDLVKGKQIAAALMLDSTFSILQTWDTINLNSFFTQFEQFCFVLQQPMIYEGQAQLWTDLQYREKEVKRYLWQHLKKHVVPLPDGKSTDFLPVDCPVRSKLKTGLIVLFVVEKIELLLEGSLDWLCHLLTSDASSPDEFHRDLSHILGIPQSWRLYLVNLCQRCMDTRTYTWLGALPVLHCCMELAPRHKDAWRQPEDTWAALEGLSFSPFREQMLDTSSLLQFMREKQHLLSIDEPLFRSWFSLLPLSHLVMYMENFIEHLGRFPAHILDCLSGIYYRLPGLEQVLNTQDVQDVQNVQNILEMLLRLLDTYRDKIPEEALSPSYLTVCLKLHEAICSSTKLLKFYELPALSAEIVCRMIRLLSLVDSAGQRDETGNNSVQTVFQGTLAATKRWLREVFTKNMLTSSGASFTYVKEIEVWRRLVEIQFPAEHGWKESLLGDMEWRLTKEEPLSQITAYCNSCWDTKGLEDSVAKTFEKCIIEAVSSACQSQTSILQGFSYSDLRKFGIVLSAVITKSWPRTADNFDDILKHLLTLADVKHVFRLCGTDEKILANVTEDAKRLIAVADSVLTKVVGDLLSGTILVGQLELIIKHKNQFLDIWQLREKSLSPQDEQCAVEEALDWRREELLLLKKEKRCVDSLLKMCGNVKHLIQVDFGVLAVRHSQDLSSKRLNDTVTVRLSTSSNSQRATHYHLSSQVQEMAGKIDLLRDSHIFQLFWREAAEPLSEPKEDQEAAELLSEPEEESERHILELEEVYDYLYQPSYRKFIKLHQDLKSGEVTLAEIDVIFKDFVNKYTDLDSELKIMCTVDHQDQRDWIKDRVEQIKEYHHLHQAVHAAKVILQVKESLGLNGDFSVLNTLLNFTDNFDDFRRETLDQINQELIQAKKLLQDISEARCKGLQALSLRKEFICWVREALGGINELKVFVDLASISAGENDIDVDRVACFHDAVQGYASLLFKLDPSVDFSAFMKHLKKLWKALDKDQYLPRKLCDSARNLEWLKTVNESHGSVERSSLTLATAINQRGIYVIQAPKGGQKISPDTVLHLILPESPGSHEESREYSLEEVKELLNKLMLMSGKKDRNNTEVERFSEVFCSVQRLSQAFIDLHSAGNMLFRTWIAMAYCSPKQGVSLQMDFGLDLVTELKEGGDVTELLAALCRQMEHFLDSWKRFVTQKRMEHFYLNFYTAEQLVYLSTELRKQPPSDAALTMLSFIKSNCTLRDVLRASVGCGSEAARYRMRRVMEELPLMLLSEFSLVDKLRIIMEQSMRCLPAFLPDCLDLETLGHCLAHLAGMGGSPVERCLPRGLQVGQPNLVVCGHSEVLPAALAVYMQTPSQPLPTYDEVLLCTPATTFEEVALLLRRCLTLGSLGHKVYSLLFADQLSYEVARQAEELFHNLCTQQHREDYQLVMVCDGDWEHCYLPSAFSQHKVFVTPQAPLEAIQAYLAGHYRVPKQTLSAAAVFNDRLCVGIVASERAGVGKSLYVKRLHDKMKMQLNVKNVPLKTIRLIDPQVDESRVLGALLPFLDAQYQKVPVLFHLDVTSSVQTGIWVFLFKLLILQYLMDINGKMWLRNPCHLYIVEILERRTSVPSRSSSALRTRVPQFSFLDIFPKVTCRPPKEVIDMELSALRSDTEPGMDLWEFCSETFQRPYQYLRRFNQNQDLDTFQYQEGSVEGTPEECLQHFLFHCGVINPSWSELRNFARFLNYQLRDCEASLFCNPSFIGDTLRGFKKFVVTFMIFMARDFATPSLHTSDQSPGKHMVTMDGVREEDLAPFSLRKRWESEPHPYVFFNDDHTTMTFIGFHLQPNINGSVDAISHLTGKVIKRDVMTRDLYQGLLLQRVPFNVDFDKLPRHKKLERLCLTLGIPQATDPDKTYELTTDNMLKILAIEMRFRCGIPVIIMGETGCGKTRLIKFLSDLRRGGTNADTIKLVKVHGGTTADMIYSRVREAENVAFANKDQHQLDTILFFDEANTTEAISCIKEVLCDHMVDGQPLAEDSGLHIIAACNPYRKHSEEMICRLESAGLGYRVSMEETADRLGSIPLRQLVYRVHALPPSLIPLVWDFGQLSDVAEKLYIQQIVQRLVESISLDENGTRVITEVLCASQGFMRKTEDECSFVSLRDVERCVKVFRWFHEHSAMLLAQLNAFLSKSSVSKNHTERDPVLWSLMLAIGVCYHASLEKKDSYRKAIARFFPKPYDDSRLLLDEITRAQDLFLDGVPLRKTIAKNLALKENVFMMVVCIELKIPLFLVGKPGSSKSLAKTIVADAMQGPAAYSDLFRSLKQVHLVSFQCSPHSTPQGIISTFRQCARFQQGKDLQQYVSVVVLDEVGLAEDSPKMPLKTLHPLLEDGCIEDDPAPHKKVGFVGISNWALDPAKMNRGIFVSRGSPNETELIESAKGICSSDILVQDRVQGYFASFAKAYETVCKRQDKEFFGLRDYYSLIKMVFAAAKASNRKPSPQDIAQAVLRNFSGKDDIQALDIFLANLPEAKCSEEVSPMQLIKQNIFGPSQKVPGGEQEDAESRYLLVLTKNYVALQILQQTFFEGDQQPEIIFGSGFPKDQEYTQLCRNINRVKICMETGKMVLLLNLQNLYESLYDALNQYYVHLGGQKYVDLGLGTHRVKCRVHPNFRLIVIEEKDVVYKHFPIPLINRLEKHYLDINTVLEKWQKSIVEELCAWVEKFINVKAHHFQKRHKYSPSDVFIGYHSDACASVVLQVIERQGPRALTEELHQKVSEEAKSILLNCATPDAVVRLSAYSLGGFAAEWLSQEYFHRQRHNSFADFLQAHLHTADLERHAIFTEITTFSRLLTSHDCEILESEVTGRAPKPTLLWLQQFDTEYSFLKEVRNCLTNTAKCKILIFQTDFEDGIRSAQLIASAKYSVINEINKIRENEDRIFVYFITKLSRVGRGTAYVGFHGGLWQSVHIDDLRRSTLMVSDVTRLQHVTISQLFAPGDLPELGLEHRAEDGHEEAMETEASTSGEVAEVAEEAMETESSEKVGKETSELGGSDVSILDTTRLLRSCVQSAVGMLRDQNESCTRNMRRVVLLLGLLNEDDACHASFLRVSKMRLSVFLKKQEESQFHPLEWLAREACNQDALQEAGTFRHTLWKRVQGAVTPLLASMISFIDRDGNLELLTRPDTPPWARDLWMFIFSDTMLLNIPLVMNNERHKGEMAYIVVQNHMNLSENASNNVPFSWKIKDYLEELWVQAQYITDAEGLPKKFVDIFQQTPLGRFLAQLHGEPQQELLQCYLKDFILLTMRVSTEEELKFLQMALWSCTRKLKAASEAPEEEVSLPWVHLAYQRFRSRLQNFSRILTIYPQVLHSLMEARWNHELAGCEMTLDAFAAMACTEMLTRNTLKPSPQAWLQLVKNLSMPLELICSDEHMQGSGSLAQAVIREVRAQWSRIFSTALFVEHVLLGTESRVPELQGLVTEHVFLLDKCLRENSDVKTHGPFEAVMRTLCECKETASKTLSRFGIQPCSICLGDAKDPVCLPCDHVHCLRCLRAWFASEQMICPYCLTALPDEFSPAVSQAHREAIEKHARFRQMCNSFFVDLVSTICFKDNAPPEKEVIESLLSLLFVQKGRLRDAAQRHCEHTKSLSPFNDVVDKTPVIRSVILKLLLKYSFHDVKDYIQEYLTLLKKKAFITEDKTELYMLFINCLEDSILEKTSAYSRNDELNHLEEEGRFLKAYSPASRGREPANEASVEYLQEVARIRLCLDRAADFLSEPEGGPEMAKEKQCYLQQVKQFCIRVENDWHRVYLVRKLSSQRGMEFVQGLSKPGRPHQWVFPKDVVKQQGLRQDHPGQMDRYLVYGDEYKALRDAVAKAVLECKPLGIKTALKACKTPQSQQSAYFLLTLFREVAILYRSHNASLHPTPEQCEAVSKFIGECKILSPPDISRFATSLVDNSVPLLRAGPSDSNLDGTVTEMAIHAAAVLLCGQNELLEPLKNLAFSPATMAHAFLPTMPEDLLAQARRWKGLERVHWYTCPNGHPCSVGECGRPMEQSICIDCHAPIGGIDHKPRDGFHLVKDKADRTQTGHVLGNPQRRDVVTCDRGLPPVVFLLIRLLTHLALLLGASQSSQALINIIKPPVRDPKGFLQQHILKDLEQLAKMLGHSADETIGVVHLVLRRLLQEQHQLSSRRLLNFDTELSTKEMRNNWEKEIAAVISPELEHLDKTLPTMNNLISQDKRISSNPVAKIIYGDPVTFLPHLPRKSVVHCSKIWSCRKRITVEYLQHIVEQKNGKERVPILWHFLQKEAELRLVKFLPEILALQRDLVKQFQNVQQVEYSSIRGFLSKHSSDGLRQLLHNRITVFLSTWNKLRRSLETNGEINLPKDYCSTDLDLDTEFEILLPRRRGLGLCATALVSYLIRLHNEIVYAVEKLSKENNSYSVDAAEVTELHVISYEVERDLTPLILSNCQYQVEEGRETVQEFDLEKIQRQIVSRFLQGKPRLSLKGIPTLVYRHDWNYEHLFMDIKNKMAQDSLPSSVISAISGQLQSYSDACEVLSVVEVTLGFLSTAGGDPNMQLNVYTQDILQMGDQTIHVLKALNRCQLKHTIALWQFLSAHKSEQLLRLHKEPFGEISSRYKADLSPENAKLLSTFLNQTGLDAFLLELHEMIILKLKNPQTQTEERFRPQWSLRDTLVSYMQTKESEILPEMASQFPEEILLASCVSVWKTAAVLKWNREMR

SEQ ID NO: 17538 - protein, 43 aa, Homo sapiens
MQTCPLAFPGHVSQALGTLLFLAASLSAQNEAACPRAGERHLQ

SEQ ID NO: 17539 - protein, 739 aa, Homo sapiens
MGQGWATAGLPSLLFLLLCYGHPLLVPSQEASQQVTVTHGTSSQATTSSQTTTHQATAHQTSAQSPNLVTDEAEASKFVEEYDRTSQVVWNEYAEANWNYNTNITTETSKILLQKNMQIANHTLKYGTQARKFDVNQLQNTTIKRIIKKVQDLERAALPAQELEEYNKILLDMETTYSVATVCHPNGSCLQLEPDLTNVMATSRKYEDLLWAWEGWRDKAGRAILQFYPKYVELINQAARLNGYVDAGDSWRSMYETPSLEQDLERLFQELQPLYLNLHAYVRRALHRHYGAQHINLEGPIPAHLLGNMWAQTWSNIYDLVVPFPSAPSMDTTEAMLKQGWTPRRMFKEADDFFTSLGLLPVPPEFWNKSMLEKPTDGREVVCHASAWDFYNGKDFRIKQCTTVNLEDLVVAHHEMGHIQYFMQYKDLPVALREGANPGFHEAIGDVLALSVSTPKHLHSLNLLSSEGGSDEHDINFLMKMALDKIAFIPFSYLVDQWRWRVFDGSITKENYNQEWWSLRLKYQGLCPPVPRTQGDFDPGAKFHIPSSVPYIRYFVSFIIQFQFHEALCQAAGHTGPLHKCDIYQSKEAGQRLATAMKLGFSRPWPEAMQLITGQPNMSASAMLSYFKPLLDWLRTENELHGEKLGWPQYNWTPNSDDFYNETETKIFLQFYDQTGIWDHGAPHLLPPSQARGTREAPVYMSKRAASSGPPGSPKLPPAAQGHGEVPVHDLLWHPGPPV

SEQ ID NO: 17540 - protein, 101 aa, Homo sapiens
MSLYGFVASLIILHLSGATKKGTEKQTTSETQKSVQCGTWTKHAEGGIFTSPNYPSKYPPDRECIYIIEAAPRQCIELYFDEKYSIEPSWECKFDHIEVRD

SEQ ID NO: 17541 - protein, 291 aa, Homo sapiens
MDFLMSGLAACGACVFTNPLEVVKTRMQLQGELQAPGTYQRHYRNVFHAFITIGKVDGLAALQKGLAPALLYQFLMNGIRLGTYGLAEAGGYLHTAEGTHSPARSAAAGAMAGVMGAYLGSPIYMVKTHLQAQAASEIAVGHQYKHQGMFQALTEIGQKHGLVGLWRGALGGLPRVIVGSSTQLCTFSSTKDLLSQWEIFPPQSWKLALVAAMMSGIAVVLAMAPFDVACTRLYNQPTDAQGKGLMYRGILDALLQTARTEGIFGMYKEPSPQVLSNIMQCFSAFTGDQRC

SEQ ID NO: 17542 - protein, 196 aa, Homo sapiens
MSEGDSVGESVHGKPSVVYRFFTRLGQIYQSWLDKSTPYTAVRWVVTLGLSFVYMIRVYLLQGWYIVTYALGIYHLNLFIAFLSPKVDPSLMEDSDDGPSLPTKQNEEFRPFIRRLPEFKFWHAATKGILVAMVCTFFDAFNVPVFWPILVMYFIMLFCITMKRQIKHMIKYRYIPFTHGKRRYRGKEDAGKAFAS

SEQ ID NO: 17543 - protein, 126 aa, Homo sapiens
IVVLFGISITGGLFYTIFKELFSSSSPSKIYGRALEKCRSHPEVIGVFGESVKGYGEVTRRGRRQHVRFTEYVKDGLKHTCVKFYIEGSEPGKQGTVYAQVKEVWESWDVGSEVLSAVLFKFWKGK

SEQ ID NO: 17544 - protein, 300 aa, Homo sapiens
MDFLMSGLAACGACVFTNPLEVVKTRMQLQGELQAPGTYQRHYRNVFHAFITIGKVDGLAALQKGLAPALLYQFLMNGIRLGTYGLAEAGGYLHTAEGTHSPARSAAAGAMAGVMGAYLGSPIYMVKTHLQAQAASEIAVGHQYKHQGMFQALTEIGQKHGLVGLWRGALGGLPRVIVGSSTQLCTFSSTKDLLSQWEIFPPQSWKLALVAAMMSGIAVVLAMAPFDVACTRLYNQPTDAQGKGLMYRGILDALLQTARTEGIFGMYKGIGASYFRLGPHTILSLFFWDQLRSLYYTDTK

SEQ ID NO: 17545 - protein, 144 aa, Homo sapiens
MNLAISIALLLTVDQSLRLDCRHENTSSSPIQYEFSLTRETKKHVLFGTVGVPEHTYRSRTNFTSKYNMKVLYLSAFTSKDEGTYTCALHHSGHSPPISSQNVTVLRDKLVKCEGISLLAQNTSWLLLLLLSLSLLQATDFMSL

SEQ ID NO: 17546 - protein, 103 aa, Homo sapiens
MALRHLALLAGLLVGVASKSMENTAQLPECCVDVVGVNASCPGASLCGPGCYRRWNADGSASCVRCGNGTLPAYNGSECRSFAGPGAPFPMNRSSGTPGRPHP

SEQ ID NO: 17547 - protein, 457 aa, Homo sapiens
MEFLLGNPFSTPVGQCLEKATDGSLQSEDWTLNMEICDIINETEEGPKDAIRALKKRLNGNRNYREVMLALTAWADAFRSSPDLTGVVHIYEELKRKGVEFPMADLDALSPIHTPQRSVPEVDPAATMPRSQSQQRTSAGSYSSPPPAPYSAPQAPALSVTGPITANSEQIARLRSELDVVRGNTKVMSEMLTEMVPGQEDSSDLELLQELNRTCRAMQQRIVELISRVSNEEVTEELLHVNDDLNNVFLRYERFERYRSGRSVQNASNGVLNEVTEDNLIDLGPGSPAVVSPMVGNTAPPSSLSSQLAGLDLGTESVSGTLSSLQQCNPRDGFDMFAQTRGNSLAEQRKTVTYEDPQAVGGLASALDNRKQSSEGIPVAQPSVMDDIEVWLRTDLKGDDLEEGVTSEEFDKFLEERAKAAEMVPDLPSPPMEAPAPASNPSGRKKPERSEDALFAL

SEQ ID NO: 17548 - protein, 181 aa, Homo sapiens
MISPVLILFSSFLCHVAIAGRTCPKPDDLPFSTVVPLKTFYEPGEEITYSCKPGYVSRGGMRKFICPLTGLWPINTLKCTPRVCPFAGILENGAVRYTTFEYPNTISFSCNTGFYLNGADSAKCTEEGKWSPELPVCAPIICPPPSIPTFATLRVYKPSAGNNSLYRDTAVFECLPQHAMF

SEQ ID NO: 17549 - protein, 44 aa, Homo sapiens
SFLNGLASLVMLCRYRTFVPASSPMYHTCVAFAWMRKLRHSKAK

SEQ ID NO: 17550 - protein, 216 aa, Homo sapiens
MSSFGYRTLTVALFTLICCPGSDEKVFEVHVRPKKLAVEPKGSLEVNCSTTCNQPEVGGLETSLDKILLDEQAQWKHYLVSNISHDTVLQCHFTCSGKQESMNSNVSVYQPPRQVILTLQPTLVAVGKSFTIECRVPTVEPLDSLTLFLFRGNETLHYETFGKAAPAPQEATATFNSTADREDGHRNFSCLAVLDLMSRGGNIFHKHSAPKMLEIY

SEQ ID NO: 17551 - protein, 132 aa, Homo sapiens
MDYPTLLLALLHVYRALCEEVLWHTSVPFAENMSLECVYPSMGILTQVEWFKIGTQQDSIAIFSPTHGMVIRKPYAERVYFLNSTMASNNMTLFFRNASEDDVGYYSCSLYTYPQGTWQKVIQVVQSDSFEA

SEQ ID NO: 17552 - protein, 148 aa, Homo sapiens
MLPWTALGLALSLRLALARSGAERGPLGEGKHPLKESWGPGGPCLAVGLSGGPTPEAEHSSFPPGPPASAPRGDLMFLLDSSASVSHYEFSRVREFVGQLVAPLPLGTGALRASLVHVGSRPYTEFPFGQHSSGEAAQDAVRASAQRM

SEQ ID NO: 17553 - protein, 151 aa, Homo sapiens
MLDVLQELRGTVAQQVTGSSGTVKVVVVDSVTAVVSPLLGGQQREGLALMMQLARELKTLARDLGMAVVVTNHITRDRDSGRLKPALGRSWSFVPSTRILLDTIEGAGASGGRRMACLAKSSRQPTGFQEMVDIGTWGTSEQSATLQGDQT

SEQ ID NO: 17554 - protein, 251 aa, Homo sapiens
MSSFGYRTLTVALFTLICCPGSDEKVFEVHVRPKKLATSLDKILLDEQAQWKHYLVSNISHDTVLQCHFTCSGKQESMNSNVSVYQPPRQVILTLQPTLVAVGKSFTIECRVPTVEPLDSLTLFLFRGNETLHYETFGKAAPAPQEATATFNSTADREDGHRNFSCLAVLDLMSRGGNIFHKHSAPKMLEIYEPVSDSQMVIIVTVVSVLLSLFVTSVLLCFIFGQHLRQQRMGTYGVRAAWRRLPQAFRP

SEQ ID NO: 17555 - protein, 44 aa, Homo sapiens
MQTCPLAFPGHVSQALGTLLFLAASLSAQNEGWDSPICTEGVVS

SEQ ID NO: 17556 - protein, 1077 aa, Homo sapiens
MPRRKQQAPRRSAAYVPEEELKAAEIDEEHVEDDGLSLDIQESEYMCNEETEIKEAQSYQNSPVSSATNQDAGYGSPFSESSDQLAHFKGSSSREEKEDPQCPDSVSYPQDSLAQIKAVYANLFSESCWSSLALDLKKSGSTTSTNDASQKESSAPTPTPPTCPVSTTGPTTSTPSTSCSSSTSHSSTTSTSSSSGYDWHQAALAKTLQQTSSYGLLPEPSLFSTVQLYRQNNKLYGSVFTGASKFRCKDCSAAYDTLVELTVHMNETGHYRDDNRDKDSEKTKRWSKPRKRSLMEMEGKEDAQKVLKCMYCGHSFESLQDLSVHMIKTKHYQKVPLKEPVPAITKLVPSTKKRALQDLAPPCSPEPAGMAAEVALSESAKDQKAANPYVTPNNRYGYQNGASYTWQFEARKAQILKCMECGSSHDTLQQLTAHMMVTGHFLKVTTSASKKGKQLVLDPVVEEKIQSIPLPPTTHTRLPASSIKKQPDSPAGSTTSEEKKEPEKEKPPVAGDAEKIKEESEDSLEKFEPSTLYPYLREEDLDDSPKGGLDILKSLENTVSTAISKAQNGAPSWGGYPSIHAAYQLPGTVKPLPAAVQSVQVQPSYAGGVKSLSSAEHNALLHSPGSLTPPPHKSNVSAMEELVEKVTGKVNIKKEERPPEKEKSSLAKAASPIAKENKDFPKTEEVSGKPQKKGPEAETGKAKKEGPLDVHTPNGTEPLKAKVTNGCNNLGIIMDHSPEPSFINPLSALQSIMNTHLGKVSKPVSPSLDPLAMLYKISNSMLDKPVYPATPVKQADAIDRYYYENSDQPIDLTKSKNKPLVSSVADSVASPLRESALMDISDMVKNLTGRLTPKSSTPSTVSEKSDADGSSFEEALDELSPVHKRKGRQSNWNPQHLLILQAQFASSLRETTEGKYIMSDLGPQERVHISKFTGLSMTTISHWLANVKYQLRRTGGTKFLKNLDTGHPVFFCNDCASQFRTASTYISHLETHLGFSLKDLSKLPLNQIQEQQNVSKVLTNKTLGPLGATEEDLGSTFQCKLCNRTFASKHAVKLHLSKTHGKSPEDHLIYVTELEKQ

SEQ ID NO: 17557 - protein, 155 aa, Homo sapiens
MAGPATQSPMKLMALQLLLWHSALWTVQEATPLGPASSLPQSFLLKCLEQVRKIQGDGAALQEKLAGCLSQLHSGLFLYQGLLQALEGISPELGPTLDTLQLDVADFATTIWQQMEELGMAPALQPTQGAMPAFASAFQRRAGGVLVASHLQSFL

SEQ ID NO: 17558 - protein, 459 aa, Homo sapiens
MPLYSVTVKWGKEKFEGVELNTDEPPMVFKAQLFALTGVQPARQKVMVKGGTLKDDDWGNIKIKNMELPCGLTNLGNTCYMNATVQCIRSVPELKDALKRYAGALRASGEMASAQYITAALRDLFDSMDKTSSSIPPIILLQFLHMAFPQFAEKGEQGQYLQQDANECWIQMMRVLQQKLEAIEDDSVKETDSSSASAATPSKKKSLIDQFFGVEFETTMKCTESEEEEVTKGKENQLQLSCFINQEVKYLFTGLKLRLQEEITKQSPTLQRNALYIKSSKISRLPAYLTIQMVRFFYKEKESVNAKVLKDVKFPLMLDMYELCTPELQEKMVSFRSKFKDLEDKKVNQQPNTSDKKSSPQKEVKYEPFSFADDIGSNNCGYYDLQAVLTHQGRSSSSGHYVSWVKRKQDEWIKFDDDKVSIVTPEDILRLSGGGDWHIAYVLLYGPRRVEIMEEESEQ

SEQ ID NO: 17559 - protein, 184 aa, Homo sapiens
MKLHYVAVLTLAILMFLTWLPESLSCNKALCASDVSKCLIQELCQCRPGEGNCSCCKECMLCLGALWDECCDCVGMCNPRNYSDTPPTSKSTVEELHEPIPSLFRALTEGDTQLNWNIVSFPVAEELSHHENLVSFLETVNQPHHQNVSVPSNNVHAPYSSDKGNCQQLTFSIPPPHVVCPCNL

SEQ ID NO: 17560 - protein, 37 aa, Homo sapiens
MAGKKNVLSSLAVYAEDSEPESDGEAGIEAVGSAAGR

SEQ ID NO: 17561 - protein, 65 aa, Homo sapiens
MNCYLLLRFMLGIPLLWPCLGATENSQTKKVKQPVRSHLRVKRGWVWNQFFVPEEMNTTSHHIGQ

SEQ ID NO: 17562 - protein, 209 aa, Homo sapiens
MEGGGGSGNKTTGGLAGFFGAGGAGYSHADLAGVPLTGMNPLSPYLNVDPRYLVQDTDEFILPTGANKTRGRFELAFFTIGGCCMTGAAFGAMNGLRLGLKETQNMAWSKPRNVQILNMVTRQGALWANTLGSLALLYSAFGVIIEKTRGAEDDLNTVAAGTMTGMLYKCTGGLRGIARGGLTGLTLTSLYALYNNWEHMKGSLLQQSL

SEQ ID NO: 17563 - protein, 45 aa, Homo sapiens
EKRFADAASLLLSLMTSRIAPRSFWMTLLTDALPLLEQKQNRLMS

SEQ ID NO: 17564 - protein, 35 aa, Homo sapiens
MAGPPRLLLLPLLLALARGLPGALAAQAGACVGST

SEQ ID NO: 17565 - protein, 266 aa, Homo sapiens
MSFLVSKPERIRTNDASSESIASFSKQEVMSSFLPEGGCYELLTVIGKGFEDLMTVNLARYKPTGEYVTVRRINLEACSNEMVTFLQGELHVSKLFNHPNIVPYRATFIADNELWVVTSFMAYGSAKDLICTHFMDGMNELAIAYILQGVLKALDYIHHMGYVHRSVKASHILISVDGKVYLSGLRSNLSMISHGQRQRVVHDFPKYSVKVLPWLSPEVLQQNLQGYDAKSDIYSVGITACELANGHVPFKDMPATQGEDSTVKGI

SEQ ID NO: 17566 - protein, 94 aa, Homo sapiens
MALRYPMAVGLNKGHKVTKNVSKPRHSRRRGRLTKHTKFVRDMIREVCGFAPYERRAMELLKVSKDKRALKFIKKRVGGRCRPRGGVGWESGPG

SEQ ID NO: 17567 - protein, 143 aa, Homo sapiens
MKVLLLTGLGALFFAYYWDDNFDPASLQGARVLLTGANAGVGEELAYHYARLGSHLVLTAHTEALLQKVVGNCRKLGAPKVFYIAADMASPEAPESVVQFALDKLGGLDYLVLNHIGGAPAGTRARSPQATRWLMQVNFVSYV

SEQ ID NO: 17568 - protein, 14 aa, Homo sapiens
MALRHLALLAGLLV

SEQ ID NO: 17569 - protein, 40 aa, Homo sapiens
KSFVMLYAWYMMSAIPNPLNTVPGFLRKKLEIIKMANNGR

SEQ ID NO: 17570 - protein, 235 aa, Homo sapiens
MDLSTFDFRTGKMLMSKMNKSRQRVRYDSSNQVKGKPDLNTALPVRQTASIFKQPVTKITNHPSNKVKSDPQKAVDQPRQLFWEKKLSGLNAFDIAEELVKTMDLPKGLQGVGPGCTDETLLSAIASALHTSTMPITGQLSAAVEKNPGVWLNTTQPLCKAFMVTDEDIRKQEELVQQVRKRLEEALMADMLAHVEELARDGEAPLDKACAEDDDEEDEEEEEEEPDPDPEMEHV

SEQ ID NO: 17571 - protein, 137 aa, Homo sapiens
MGPLQFRDVAIEFSLEEWHCLDAAQRNLYRDVMLENYRNLIFLGIVVSKPNLITCLEQGKKPLTMKRHEMIAKPPDGVSVFHPGWSAVARSRLTATSTSQVDCLRSGVQDHPGQHSETPSEEALLSRGHSLWMNKVH

SEQ ID NO: 17572 - protein, 210 aa, Homo sapiens
MDDEEETYRLWKIRKTIMQLCHDRGYLVTQDELDQTLEEFKAQSGDKPSEGRPRRTDLTVLVAHNDDPTDQMFVFFPEEPKVGIKTIKVYCQRMQEENITRALIVVQQGMTPSAKQSLVDMAPKYILEQFLQQELLINITEHELVPEHVVMTKEEVTELLARYKLRENQLPRIQAGDPVARYFGIKRGQVVKIIRPSETAGRYITYRLVQ

SEQ ID NO: 17573 - protein, 304 aa, Homo sapiens
MEEEASSPGLGCSKPHLEKLTLGITRILESSPGVTEVTIIEKPPAERHMISSWEQKNNCVMPEDVKNFYLMTNGFHMTWSVKLDEHIIPLGSMAINSISKLTQLTQSSMYSLPNAPTLADLEDDTHEASDDQPEKPHFDSRSVIFELDSCNGSGKVCLVYKSGKPALAEDTEIWFLDRALYWHFLTDTFTAYYRLLITHLGLPQWQYAFTSYGISPQAKITYNIKMNRRKCVHWKLAVEPLQWELRSCVSAGMGTGHKQRVSSMKPRSCSVCSRRQSNSMGTTVSQSFLSYGKNVLFFTVRCCF

SEQ ID NO: 17574 - protein, 52 aa, Homo sapiens
MDMWTALLILQALLLPSLADGATPALRFVAVGDWGGVPNAPFHTAREMANAK

SEQ ID NO: 17575 - protein, 62 aa, Homo sapiens
MLLPLLLLLPMCWAVEVKRPRGVSLTNHHFYDESKPFTCLDGSATIPFDQVNDDYCDCKDGS

SEQ ID NO: 17576 - protein, 88 aa, Homo sapiens
MVARVWSLMRFLIKGSVAGGAVYLVYDQELLGPSDKSQAALQKAGEVVPPAMYQFSQYVCQQTGLQIPQLPAPPKIYFPIRDSWNAGI

SEQ ID NO: 17577 - protein, 214 aa, Homo sapiens
MDCRVHMRPIGLTWVLQLTLAWILLEACGGSRPLQARSQQHHGLAADLGKGKLHLAGPCCPSEMDTTETSGPGNHPERCGVPSPECESFLEHLQRALRSRFRLRLLGVRQAQPLCEELCQAWFANCEDDITCGPTWLPLSEKRGCEPSCLTYGQTFADGTDLCRSALGHALPVAAPGARHCFNISISAVPRPRPGRRGREAPSRRSRSPRTSIL

SEQ ID NO: 17578 - protein, 810 aa, Homo sapiens
MSKGPGPGGSAASSAPPAATAQVLQAQPEKPQHYTYLKEFRTEQCPLFVQHKCTQHRPYTCFHWHFVNQRRRRSIRRRDGTFNYSPDVYCTKYDEATGLCPEGDECPFLHRTTGDTERRYHLRYYKTGICIHETDSKGNCTKNGLHCAFAHGPHDLRSPVYDIRELQAMEALQNGQTTVEGSIEGQSAGAASHAMIEKILSEEPRWQETAYVLGNYKTEPCKKPPRLCRQGYACPYYHNSKDRRRSPRKHKYRSSPCPNVKHGDEWGDPGKCENGDACQYCHTRTEQQFHPEIYKSTKCNDMQQSGSCPRGPFCAFAHVEQPPLSDDLQPSSAVSSPTQPGPVLYMPSAAGDSVPVSPSSPHAPDLSALLCRNSSLGSPSNLCGSPPGSIRKPPNLEGIVFPGESGLAPGSYKKAPGFEREDQVGAEYLKNFKCQAKLKPHSLEPRSQEQPLLQPKQDMLGILPAGSPLTSSISSSITSSLAATPPSPVGTSSVPGMNANALPFYPTSDTVESVIESALDDLDLNEFGVAALEKTFDNSTVPHPGSITIGGSLLQSSAPVNIPGSLGSSASFHSASPSPPVSLSSHFLQQPQGHLSQSENTFLGTSASHGSLGLNGMNSSIWEHFASGSFSPGTSPAFLSGPGAAELARLRQELDEANSTIKQWEESWKQAKQACDAWKKEAEEAGERASAAGAECELAREQRDALEVQVKKLQEELERLHAGPEPQALPAFSDLEALSLSTLYSLQKQLRAHLEQVDKAVFHMQSVKCLKCQEQKRAVLPCQHAALCELCAEGSECPICQPGRAHTLQS

SEQ ID NO: 17579 - protein, 168 aa, Homo sapiens
MASDEGKLFVGGLSFDTNEQSLEQVFSKYGQISEVVVVKDRETQRSRGFGFVTFENIDDAKDAMMAMNGKSVDGRQIRVDQAGKSSDNRSRGYRGGSAGGRGFFRGGRGRGRGFSRGGGDRGYGGNRFESRSGGYGGSRDYYSSRSQSGGYSDRSSGGSYRDSYDSYG

SEQ ID NO: 17580 - protein, 150 aa, Homo sapiens
MRYNEKELQALSRQPAEMAAELGMRGPKKGSVLKRRLVKLVVNFLFYFRTDEAEVGASRARGRVPGWAPRRPGAHCPVPAPVSPPARRSPAAGALQSRPGRARHLLHHYEFMRRSLIFYRNEIRKVTGKDPLEQFGISEEARFQLSGLQA

SEQ ID NO: 17581 - protein, 146 aa, Homo sapiens
MYVWPCAVVLAQYLWFHRRSLPGKAILEIGAGVSLPGILAAKCGAEVILSDSSELPHCLEVCRQSCQMNNLPHLQVVGLTWGHISWDLLALPPQDIILASDVFFEPEDFEDILATIYFLMHKNPKVQLWSTYQVRRQVWMTLTFYM

SEQ ID NO: 17582 - protein, 85 aa, Homo sapiens
MARVAWGLLWLLLGSAGAQYEKYSFRGFPPEDLMPLAAAYGHALEQYEGESWRESARYLEAALRLHRLLRDSEAFCHANCSGPAP

SEQ ID NO: 17583 - protein, 136 aa, Homo sapiens
MVLAELYVSDREGSDATGDGTKEKPFKTGLKALMTVGKEPFPTIYVDSQKENERWNVISKSQLKNIKKMWHREQMKSESREKKEAEDSLRREKNLEEAKKITIKNDPSLPEPKCVKIGALEITSLIGGTMKLLLQH

SEQ ID NO: 17584 - protein, 72 aa, Homo sapiens
MGTRLLPALFLVLLVLGFEVQGTQQPQQDEMPSPTFLTQVKESLSSYWESAKTAAQNLYEKTYLPAVDEKLR

SEQ ID NO: 17585 - protein, 168 aa, Homo sapiens
MYCVFNRNEDACRYGSAIGVLAFLASAFFLVVDAYFPQISNATDRKYLVIGDLLFSALWTFLWFVGFCFLTNQWAVTNPKDVLVGADSVRAAITFSFFSIFSWGVLASLAYQRYKAGVDDFIQNYVDPTPDPNTAYASYPGASVDNYQQPPFTQNAETTEGYQPPPVY

SEQ ID NO: 17586 - protein, 163 aa, Homo sapiens
MADVAGPSRPSAAAFWSRDFSDEEQSVVYVPGISAEGNVRSRHKLMSPKADVKLKTSRVTDASISMESLKGTGDSVDEQNSCRGEIKSASLKDLCLEDKRRIANLIKELARVSEEKEVTEERLKAEQESFEKKIRQLEEQNELIIKEREDILLKVLFFNVQEV

SEQ ID NO: 17587 - protein, 104 aa, Homo sapiens
MREIVHIQAGQCGNQIGTKFWEVISDEHGIDPAGGYVGDSALQLERINVYYNESSSQKYVPRAALVDLEPGTMDSVRSGPFGQLFRPDNFIFAHLHRGTEEKQE

SEQ ID NO: 17588 - protein, 144 aa, Homo sapiens
MLLPLLLLLPMCWAVEVKRPRGVSLTNHHFYDESKPFTCLDGSATIPFDQVNDDYCDCKDGSDEPGTAACPNGSFHCTNTGYKPLYIPSNRVNDGVCDCCDGTDEYNSGVICENTCKEKGRKERESLQQMAEVTREGFRLKKIL

SEQ ID NO: 17589 - protein, 35 aa, Homo sapiens
MGGLEPCSRLLLLPLLLAVSVLSRPRPRAIAVALR

SEQ ID NO: 17590 - protein, 494 aa, Homo sapiens
MADLANEEKPAIAPPVFVFQKDKGQKRSAGGSSPEGGEDSDREDGNYCPPVKRERTSSLTQFPPSQSEERSSGFRLKPPTLIHGQAPSAGLPSQKPKEQQRSVLRPAVLQAPQPKALSQTVPSSGTNGVSLPADCTGAVPAASPDTAAWRSPSEAADEEKEPQKNESSNASEEEACEKKDPATQQAFVFGQNLRDRVKLINESVDEADMENAGHPSADTPTATNYFLQYISSSLENSTNSADASSNKFVFGQNMSERVLSPPKLNEVSSDANRENAAAESGSESSSQEATPEKESLAESAAAYTKATARKCLLEKVEVITGEEAESNVLQMQCKLFVFDKTSQSWVERGRGLLRLNDMASTDDGTLQSRLVMRTQGSLRLILNTKLWAQMQIDKASEKSIRITAMDTEDQGVKVFLISASSKDTGQLYAALHHRILALRSRVEQEQEAKMPAPEPGAAPSNEEDDSDDDDVLAPSGATAAGAGDEGDGQTTGST

SEQ ID NO: 17591 - protein, 317 aa, Homo sapiens
PIALWLRLVLALALVRPRAVGWAPVRAPIYVSSWAVQVSQGNREVERLARKFGFVNLGPIFPDGQYFHLRHRGVVQQSLTPHWGHRLHLKKNPKVQWFQQQTLQRRVKRSVVVPTDPWFSKQWYMNSEAQPDLSILQAWSQGLSGQGIVVSVLDDGIEKDHPDLWANYDPLASYDFNDYDPDPQPRYTPSKENRRTDAGRYHHRCHRGPVAEPAAAAHPHLQRQLGSRGRRPHGGRPRHPHPRGLPAWCDQASTRFPWAAPPSRAACPGTAKPAPPPSPPPTAAAWPPTPRSSPRTCITGAQTSTRAPRPQPHWRPA

SEQ ID NO: 17592 - protein, 247 aa, Homo sapiens
MLLSVPLLLGLLGLAVAEPAVYFKEQFLDGDGWTSRWIESKHKSDFGKFVLSSGKFYGDEEKDKGPDICGPGTKKVHVIFNYKGKNVLINKDIRCKDDEFTHLYTLIVRPDNTYEVKIDNSQVESGSLEDDWDFLPPKKIKDPDASKPEDWDERAKIDDPTDSKPEDWDKPEHIPDPDAKKPEDWDEEMDGEWEPPVIQNPEYKGEWKPRQIDNPDYKGTWIHPEIDNPEYSPDPSIYAYDNFGVLG

SEQ ID NO: 17593 - protein, 236 aa, Homo sapiens
MAAGTSSYWEDLRKQARQLENELDLKLVSFSKLCTSYSHSSTRDGRRDRYSSDTTPLLNGSSQDRMFETMAIEIEQLLARLTGVNDKMAEYTNSAGVPSLNAALMHTLQRHRDILQDYTHEFHKTKANFMAIRERENLMGSVRKDIDGSGVNNRRTELFLKEHDHLRNIAMATKENMTSQRGMLKSIHSKMNTLANRFPAVNSLIQRINLRKRRDSLILGGVIGICTILLLLYAFH

SEQ ID NO: 17594 - protein, 205 aa, Homo sapiens
MTPPRLFWVWLLVAGTQGVNDGDMRLADGGATNQGRVEIFYRGQWGTVCDNLWDLTDASVVCRALGFENATQALGRAAFGQGSGPIMLDEVQCTGTEASLADCKSLGWLKSNCRHERDAGVVCTNGTSTPEGLTSPCRQSSASTSWPLPMGPGSCRATAQASLPSSSPRTPRSRCPWTCMPMQWPQGTPCWRSSAYSSWPGTSRP

SEQ ID NO: 17595 - protein, 124 aa, Homo sapiens
MDMWTALLILQALLLPSLADGATPALRFVAVGDWGGVPNAPFHTAREMANAKEIARTVQILGADFILSLGDNFYFTGVQDINDKRFQETFEDVFSDRSLRKVPWYVLAGNHDHLGNVSAQIAYS

SEQ ID NO: 17596 - protein, 1133 aa, Homo sapiens
MAPKTKKGCKVTLPEKPVKLASHTRDTTGVSQMFPSSKARTKSLLGDDVFSTMAGLEEADAEVSGISEADPQALLQAMKDLDGMDADILGLKKSNSAPSKKAAKDPGKGELPNHPKPAGGAIPTKKSLPSPSSSGHQNRRFSSEDLEDPLRGLLSYDEGGITKQPPVTQSKTASDKSPSTVRDQGPSIPLTPGDTPIRKKEELLFDDGDDIMATLGFGDSPKAEKRQIGDQEGPRPARSTLDELLGRGMATKLLARPGTGEHREFKLDKKYQRPQDSEDMWGDEDFTFGAYQPTVVSSEGRQSRRQSVSRFFADSGADPKGEPGSKQSPPMASSPIQPRKGGADWLGLKDEDLDLFPASPTREAHRESSVPVTPSVPPPASQHSTPAGLPPSRAKPPTEGAGSPAKASQASKLRASKEEKEDWLSHALSRKKSQGLAREQHAGTSEGLHLAGTAGHPPSGSQPLTSTQGLEHAAAGGSSGTTARERPCVRPGVSGSPVTQNHAASALPTGSPKRGTAPGDLSATEPATCFPSTQKPTEPSVPVQPLLPESLARSLLPSTEYQKQLLAAQVQLQCSPAELQAELLHSQARLAELEAQVRKLELERAQHELLLGSLQQQHQADLELIESAHRSRIKVLETSYQQREERLRRENEELSARYLSQCQEAEQARAELTAQHQRRLAAIAQEKDQEMERLRELQRASILDMRRDHEEQLQRLKLLKDREVDAATSATSHTRSLNSIIHQMEKFSSSLHELSSRVEASHLTTSQERELGIRQRDEQLRALQERLGQQQRDMEEERSRQQEVIGKMEARLNEQSRLLEQERWRVTAEQSKAESMQRALEEQRKVTAQQMAMERAELERAKSALLEEQKSVMLKCGEERRRLAAEWAEFSAQQKLSKERAEREAERALQVDTQREGTLISLAKQAELKIRASELRAEEKQLAAERAALEQERQELRLEKERINATALRVKLRAEEVESMSKVASEKYEEGERALREAQQVQAEQQARLQAVQQQQERLRKQEQHMHQEHLSLAQQRLQLDRARQDLPSSLVGLFPRAQGPAASSQSALMPPAPTTRWCSQPPTGLDPSPLHLHARLALLRHMAEQDRDFLENEQFFLETLKKGSYNLTSHSA

SEQ ID NO: 17597 - protein, 263 aa, Homo sapiens
MLQFVRAGARAWLRPTGSQGLSSLAEEAARATENPEQVASEGLPEPVLRKVELPVPTHRRPVQAWVESLRGFEQERVGLADLHPDVFATAPRLDILHQVAMWQKNFKRISYAKTKTRAEVRGGGRKPWPQKGTGRARHGSIRSPLWRGGGVAHGPRGPTSYYYMLPMKVRALGLKVALTVKLAQDDLHIMDSLELPTGDPQYLTELAHYRRWGDSVLLVDLTHEEMPQSIVEATSRLKTFNLIPAVGEQRAQAPRVRMCRLRC

SEQ ID NO: 17598 - protein, 123 aa, Homo sapiens
MSPSGRLCLLTIVGLILPTRGQTLKDTTSSSSADSTIMDIQVPTRAPGEERDTSIKILSLQITTATKIPNLDQTREFMDLCNEKVQMQSTQNSSPPLQPQPGLLMKHHNPRPRPSNWKERMGL

SEQ ID NO: 17599 - protein, 128 aa, Homo sapiens
MAPTWGPGMVSVVGPMGLLVVLLVGGCAAEEPPRFIKEPKDQIGVSGGVASFVCQATGDPKPRVTWNKKGKKVNSQRFETIEFDESAGAVLRIQPLRTPRDENVYECVAQNSVGEITVHAKLTVLRGP

SEQ ID NO: 17600 - protein, 83 aa, Homo sapiens
MRLFLSLPVLVVVLSIVLEGPAPAQGTPDVSSALDKLKEFGNTLEDKARELISRIKQSELSAKMREDDISPCCPGWSRTPDLK

SEQ ID NO: 17601 - protein, 220 aa, Homo sapiens
MKSVIYHALSQKEANDSDVQPSGAQRAEAFVRAFLKRSTPRMSPQAREDQLQRKAVVLEYFTRHKRKEKKKKAKGLSARQRRELRLFDIKPEQQRYSLFLPLHELWKQYIRDLCSGLKPDTQPQMIQAKLLKADLHGAIISVTKSKCPSYVGITGILLQETKHIFKIITKEDRLKVIPKLNCVFTVETDGFISYIYGSKFQLRSSERSAKKFKAKGTIDL

SEQ ID NO: 17602 - protein, 40 aa, Homo sapiens
MAVLGVQLVVTLLTATLMHRLAPHCSFARWLLCNGRLPSN

SEQ ID NO: 17603 - protein, 702 aa, Homo sapiens
MRPMRIFVNDDRHVMAKHSSVYPTQEELEAVQNMVSHTERALKAVSDWIDEQEKGSSEQAESDNMDVPPEDDSKEGAGEQKTEHMTRTLRGVMRVGLVAKGLLLKGDLDLELVLLCKEKPTTALLDKVADNLAIQLAAVTEDKYEILQSVDDAAIVIKNTKEPPLSLTIHLTSPVVREEMEKVLAGETLSVNDPPDVLDRQKCLAALASLRHAKWFQARANGLKSCVIVIRVLRDLCTRVPTWGPLRGWPLELLCEKSIGTANRPMGAGEALRRVLECLASGIVMPDGSGIYDPCEKEATDAIGHLDRQQREDITQSAQHALRLAAFGQLHKVLGMDPLPSKMPKKPKNENPVDYTVQIPPSTTYAITPMKRPMEEDGEEKSPSKKKKKIQKKEEKAEPPQAMNALMRLNQLKPGLQYKLVSQTGPVHAPIFTMSVEVDGNSFEASGPSKKTAKLHVAVKVLQDMGLPTGAEGRDSSKGEDSAEETEAKPAVVAPAPVVEAVSTPSAAFPSDATAEQGPILTKHGKNPVMELNEKRRGLKYELISETGGSHDKRFVMEVEVDGQKFQGAGSNKKVAKAYAALAALEKLFPDTPLALDANKKKRAPVPVRGGPKFAAKPHNPGFGMGGPMHNEVPPPPNLRGRGRGGSIRGRGRGRGFGGANHGGYMNAGAGYGSYGYGGNSATAGYSDFFTDCYGYHDFGSS

SEQ ID NO: 17604 - protein, 34 aa, Homo sapiens
MASRVLAALIVASVVGLAELYVMVRAMEGELGEL

SEQ ID NO: 17605 - protein, 197 aa, Homo sapiens
MAAQIPIVATTSTPGIVRNSKKRPASPSHNGSSGGGYGASKKKKASASSFAQGISMEAMSENKMVPSEFSTGPVEKAAKPLPFKDPNFVHSGHGGAVAGKKNRTWKNLKQILASERALPWQLNDPNYFSIDAPPSFKPAKKYSDVSGLLEPPNCFPQRLHQLTFPLAMDEGSNFSRCSPTLVNFGFVFIMAILVGVK

SEQ ID NO: 17606 - protein, 673 aa, Homo sapiens
MLRMRVPALLVLLFCFRGRAGPSPHFLQQPEDLVVLLGEEARLPCALGAYWGLVQWTKSGLALGGQRDLPGWSRYWISGNAANGQHDLHIRPVELEDEASYECQATQAGLRSRPAQLHVLVPPEAPQVLGGPSVSLVAGVPANLTCRSRGDARPTPELLWFRDGVLLDGATFHQTLLKEGTPGSVESTLTLTPFSHDDGATFVCRARSQALPTGRDTAITLSLQYPPEVTLSASPHTVQEGEKVIFLCQATAQPPVTGYRWAKGGSPVLGARGPRLEVVADASFLTEPVSCEVSNAVGSANRSTALDVLFGPILQAKPEPVSVDVGEDASFSCAWRGNPLPRVTWTRRGGAQVLGSGATLRLPSVGPEDAGDYVCRAEAGLSGLRGGAAEARLTVNAPPVVTALHSAPAFLRGPARLQCLVFASPAPDAVVWSWDEGFLEAGSQGRFLVETFPAPESRGGLGPGLISVLHISGTQESDFSRSFNCSARNRLGEGGAQASLGRRASASFSEQKNLMRIPGSSDGSSSRGPEEEETGSREDRGPIVHTDHSDLVLEEEGTLETKDPTNGYYKVRGVSVSLSLGEAPGGGLFLPPPSPLGPPGTPTFYDFNPHLGMVPPCRLYRARAGYLTTPHPRAFTSYIKPTSFGPPDLAPGTPPFPYAAFPTPSHPRLQTHV

SEQ ID NO: 17607 - protein, 112 aa, Homo sapiens
MLLWPLLLLLLLLPTLALLRQQRSQDARLSWLAGLQHRVAWGALVWAATWQRRRLEQSTLHVHQSQQQALRWCLQGAQRPHCSLRRSTGSHQSCLKLLGNWLPEAFLLSLGL

SEQ ID NO: 17608 - protein, 123 aa, Homo sapiens
MEIPNPPTSKCITYWKRKVKSEYMRLRQLKRLQANMGAKALYVANFAKVQEKTQILNEEWKKLRVQPVQSMKPVSGHPFLKKCTIESIFPGFASQHMLMRSLNTVALVPIMYSWSPLQQNFMR

SEQ ID NO: 17609 - protein, 225 aa, Homo sapiens
MRKTRLWGLLWMLFVSELRAATKLTEEKYELKEGQTLDVKCDYTLEKFASSQKAWQIIRDGEMPKTLACTERPSKNSHPVQVGRIILEDYHDHGLLRVRMVNLQVEDSGLYQCVIYQPPKEPHMLFDRIRLVVTKGFSGTPGSNENSTQNVYKIPPTTTKALCPLYTSPRTVTQAPPKSTADVSTPDSEINLTNVTDIIRYSFQVPGPLVWTLSPLFPSLCAERM

SEQ ID NO: 17610 - protein, 83 aa, Homo sapiens
MRLFLSLPVLVVVLSIVLEGPAPAQGTPDVSSALDKLKEFGNTLEDKARELISRIKQSELSAKMREWFSETFQKVKEKLKIDS

SEQ ID NO: 17611 - protein, 163 aa, Homo sapiens
MWTLVSWVALTAGLVAGTRCPDGQFCPVACCLDPGGASYSCCRPLLDKWPTTLSRHLGGPCQVDAHCSAGHSCIFTVSGTSSCCPFPEAVACGDGHHCCPRGFHCSADGRSCFQRSGNNSVGAIQCPDSQFECPDFSTCCVMVDGSWGCCPMPQASCCEDRVH

SEQ ID NO: 17612 - protein, 833 aa, Homo sapiens
MAVEDSTLQVVVRVRPPTPRELDSQRRPVVQVVDERVLVFNPEEPDGGFPGLKWGGTHDGPKKKGKDLTFVFDRVFGEAATQQDVFQHTTHSVLDSFLQGYNCSVFAYGATGAGKTHTMLGREGDPGIMYLTTVELYRRLEARQQEKHFEVLISYQEVYNEQIHDLLEPKGPLAIREDPDKGVVVQGLSFHQPASAEQLLEILTRGNRNRTQHPTDANATSSRSHAIFQIFVKQQDRVPGLTQAVQVAKMSLIDLAGSERASSTHAKGERLREGANINRSLLALINVLNALADAKGRKTHVPYRDSKLTRLLKDSLGGNCRTVMIAAISPSSLTYEDTYNTLKYADRAKEIRLSLKSNVTSLDCHISQYATICQQLQAEVAALRKKLQVYEGGGQPPPQDLPGSPKSGPPPEHLPSSPLPPHPPSQPCTPELPAGPRALQEESLGMEAQVERAMEGNSSDQEQSPEDEDEGPAEEVPTQMPEQNPTHALPESPRLTLQPKPVVGHFSARELDGDRSKQLALKVLCVAQRQYSLLQAANLLTPDMITEFETLQQLVQEEKIEPGAEALRTSGLARGAPLAQELCSESIPVPSPLCPEPPGYTGPVTRTMARRLSGPLHTLGIPPGPNCTPAQGSRWPMEKKRRRPSALEADSPMAPKRGTKRQRQSFLPCLRRGSLPDTQPSQGPSTPKGERASSPCHSPRVCPATVIKSRVPLGPSAMQNCSTPLALPTRDLNATFDLSEEPPSKPSFHECIGWDKIPQELSRLDQPFIPRAPVPLFTMKGPKPTSSLPGTSACKKKRVASSSVSHGRSRIARLPSSTLKRPAGPLVLPGDWH

SEQ ID NO: 17613 - protein, 144 aa, Homo sapiens
MTPPRLFWVWLLVAGTQGSGPIMLDEVQCTGTEASLADCKSLGWLKSNCRHERDAGVVCTNETRSTHTLDLSRELSEALGQIFDSQRGCDLSISVNVQGEDALGFCGHTVILTANLEAQALWKEPGSNVTMSVDAECVPMVRDL

SEQ ID NO: 17614 - protein, 45 aa, Homo sapiens
MFWVQVLLAGLVVPLLLGATLTYTYRHCWPHKPLVTDEAGMEALT

SEQ ID NO: 17615 - protein, 123 aa, Homo sapiens
MNNLPHLQVVGLTWGHISWDLLALPPQDIILASDVFFEPEDFEDILATIYFLMHKNPKVQLWSTYQVRSADWSLEALLYKWDMKCVHIPLESFDADKEDIAESTLPGRHTVEMLVISFAKDSL

SEQ ID NO: 17616 - protein, 1910 aa, Homo sapiens
MAPTWGPGMVSVVGPMGLLVVLLVGGCAAEEPPRFIKEPKDQIGVSGGVASFVCQATGDPKPRVTWNKKGKKVNSQRFETIEFDESAGAVLRIQPLRTPRDENVYECVAQNSVGEITVHAKLTVLREDQLPSGFPNIDMGPQLKVVERTRTATMLCAASGNPDPEITWFKDFLPVDPSASNGRIKQLRSGALQIESSEETDQGKYECVATNSAGVRYSSPANLYVRVRRVAPRFSILPMSHEIMPGGNVNITCVAVGSPMPYVKWMQGAEDLTPEDDMPVGRNVLELTDVKDSANYTCVAMSSLGVIEAVAQITVKSLPKAPGTPMVTENTATSITITWDSGNPDPVSYYVIEYKSKSQDGPYQIKEDITTTRYSIGGLSPNSEYEIWVSAVNSIGQGPPSESVVTRTGEQAPASAPRNVQARMLSATTMIVQWEEPVEPNGLIRGYRVYYTMEPEHPVGNWQKHNVDDSLLTTVGSLLEDETYTVRVLAFTSVGDGPLSDPIQVKTQQGVPGQPMNLRAEARSETSITLSWSPPRQESIIKYELLFREGDHGREVGRTFDPTTSYVVEDLKPNTEYAFRLAARSPQGLGAFTPVVRQRTLQSKPSAPPQDVKCVSVRSTAILVSWRPPPPETHNGALVGYSVRYRPLGSEDPEPKEVNGIPPTTTQILLEALEKWTQYRITTVAHTEVGPGPESSPVVVRTDEDVPSAPPRKVEAEALNATAIRVLWRSPAPGRQHGQIRGYQVHYVRMEGAEARGPPRIKDVMLADAQEMVITNLQPETAYSITVAAYTMKGDGARSKPKVVVTKGAVLGRPTLSVQQTPEGSLLARWEPPAGTAEDQVLGYRLQFGREDSTPLATLEFPPSEDRYTASGVHKGATYVFRLAARSRGGLGEEAAEVLSIPEDTPRGHPQILEAAGNASAGTVLLRWLPPVPAERNGAIVKYTVAVREAGALGPARETELPAAAEPGAENALTLQGLKPDTAYDLQVRAHTRRGPGPFSPPVRYRTFLRDQVSPKNFKVKMIMKTSVLLSWEFPDNYNSPTPYKIQYNGLTLDVDGRTTKKLITHLKPHTFYNFVLTNRGSSLGGLQQTVTAWTAFNLLNGKPSVAPKPDADGFIMVYLPDGQSPVPVQSYFIVMVPLRKSRGGQFLTPLGSPEDMDLEELIQDISRLQRRSLRHSRQLEVPRPYIAARFSVLPPTFHPGDQKQYGGFDNRGLEPGHRYVLFVLAVLQKSEPTFAASPFSDPFQLDNPDPQPIVDGEEGLIWVIGPVLAVVFIICIVIAILLYKNKPDSKRKDSEPRTKCLLNNADLAPHHPKDPVEMRRINFQTPGMLSHPPIPIADMAEHTERLKANDSLKLSQEYESIDPGQQFTWEHSNLEVNKPKNRYANVIAYDHSRVILQPIEGIMGSDYINANYVDGYRCQNAYIATQGPLPETFGDFWRMVWEQRSATIVMMTRLEEKSRIKCDQYWPNRGTETYGFIQVTLLDTIELATFCVRTFSLHKNGSSEKREVRQFQFTAWPDHGVPEYPTPFLAFLRRVKTCNPPDAGPIVVHCSAGVGRTGCFIVIDAMLERIKPEKTVDVYGHVTLMRSQRNYMVQTEDQYSFIHEALLEAVGCGNTEVPARSLYAYIQKLAQVEPGEHVTGMELEFKRLANSKAHTSRFISANLPCNKFKNRLVNIMPYESTRVCLQPIRGVEGSDYINASFIDGYRQQKAYIATQGPLAETTEDFWRMLWENNSTIVVMLTKLREMGREKCHQYWPAERSARYQYFVVDPMAEYNMPQYILREFKVTDARDGQSRTVRQFQFTDWPEQGVPKSGEGFIDFIGQVHKTKEQFGQDGPISVHCSAGVGRTGVFITLSIVLERMRYEGVVDIFQTVKMLRTQRPAMVQTEDEYQFCYQAALEYLGSFDHYAT

SEQ ID NO: 17617 - protein, 276 aa, Homo sapiens
MRNSNWRFCQTGIYSKPNRKLTFLYLANDVIQNSKRKGPEFTKDFAPVIVEAFKHVSSETDESCKKHLGRVLSIWEERSVYENDVLEQLKQALYGDKKPRKRTYEQIKVDENENCSSLGSPSEPPQTLDLVRALQDLENAASGDAAVHQRIASLPVEVQEVSLLDKITDKESGERLSKMVEDACMLLADYNGRLAAEIDDRKQLTRMLADFLRCQKEALAEKEHKLEEYKRKLARVSLVRKELRSRIQSLPDLSRLPNVTGSHMHLPFAGDIYSED

SEQ ID NO: 17618 - protein, 191 aa, Homo sapiens
MEVTGVSAPTVTVFISSSLNTFRSEKRYSRSLTIAEFKCKLELLVGSPASCMELELYGVDDKFYSKLDQEDALLGSYPVDDGCRIHVIDHSGARLGEYEDVSRVEKYTISQEAYDQRQDTVRSFLKRSKLGRYNEEERAQQEAEAAQRLAEEKAQASSIPVGSRCEVSQISSLATGLVSAMMSHWGKMMAV

SEQ ID NO: 17619 - protein, 528 aa, Homo sapiens
MLLPLLLLLPMCWAVEVKRPRGVSLTNHHFYDESKPFTCLDGSATIPFDQVNDDYCDCKDGSDEPGTAACPNGSFHCTNTGYKPLYIPSNRVNDGVCDCCDGTDEYNSGVICENTCKEKGRKERESLQQMAEVTREGFRLKKILIEDWKKAREEKQKKLIELQAGKKSLEDQVEMLRTVKEEAEKPEREAKEQHQKLWEEQLAAAKAQQEQELAADAFKELDDDMDGTVSVTELQTHPELDTDGDGALSEAEAQALLSGDTQTDATSFYDRVWAAIRDKYRSEALPTDLPAPSAPDLTEPKEEQPPVPSSPTEEEEEEEEEEEEEAEEEEEEEDSEEAPPPLSPPQPASPAEEDKMPPYDEQTQAFIDAAQEARNKFEEAERSLKDMEESIRNLEQEISFDFGPNGEFAYLYSQCYELTTNEYVYRLCPFKLVSQKPKLGGSPTSLGTWGSWIGPDHDKFSAMKYEQGTGCWQGPNRSTTVRLLCGKETMVTSTTEPSRCEYLMELMTPAACPEPPPEAPTEDDHDEL

SEQ ID NO: 17620 - protein, 525 aa, Homo sapiens
MLLPLLLLLPMCWAVEVKRPRGVSLTNHHFYDESKPFTCLDGSATIPFDQVNDDYCDCKDGSDEPGTAACPNGSFHCTNTGYKPLYIPSNRVNDGVCDCCDGTDEYNSGVICENTCKEKGRKERESLQQMAEVTREGFRLKKILIEDWKKAREEKQKKLIELQAGKKSLEDQVEMLRTVKEEAEKPEREAKEQHQKLWEEQLAAAKAQQEQELAADAFKELDDDMDGTVSVTELQTHPELDTDGDGALSEAEAQALLSGDTQTDATSFYDRVWAAIRDKYRSEALPTDLPAPSAPDLTEPKEEQPPVPSSPTEEEEEEEEEEEEEAEEEEEEEDSEVQGEQPKPASPAEEDKMPPYDEQTQAFIDAAQEARNKFEEAERSLKDMEESIRNLEQEISFDFGPNGEFAYLYSQCYELTTNEYVYRLCPFKLVSQKPKLGGSPTSLGTWGSWIGPDHDKFSAMKYEQGTGCWQGPNRSTTVRLLCGKETMVTSTTEPSRCEYLMELMTPAACPEPPPEAPTEDDHDEL

SEQ ID NO: 17621 - protein, 616 aa, Homo sapiens
MAPRARRRRPLFALLLLCALLARLQVALQIAPPCTSEKHYEHLGRCCNKCEPGKYMSSKCTTTSDSVCLPCGPDEYLDSWNEEDKCLLHKVCDTGKALVAVVAGNSTTPRRCACTAGYHWSQDCECCRRNTECAPGLGAQHPLQLNKDTVCKPCLAGYFSDAFSSTDKCRPWTNCTFLGKRVEHHGTEKSDAVCSSSLPARKPPNEPHVYLPGLIILLLFASVALVAAIIFGVCYRKKGKALTANLWHWINEACGRLSGDKESSGDSCVSTHTANFGQQGACEGVLLLTLEEKTFPEDMCYPDQGGVCQGTCVGGGPYAQGEDARMLSLVSKTEIEEDSFRQMPTEDEYMDRPSQPTDQLLFLTEPGSKSTPPFSEPLEVGENDSLSQCFTGTQSTVGSESCNCTEPLCRTDWTPMSSENYLQKEVDSGHCPHWAASPSPNWADVCTGCRNPPGEDCEPLVGSPKRGPLPQCAYGMGLPPEEEASRTEARDQPEDGADGRLPSSARAGAGSGSSPGGQSPASGNVTGNSNSTFISSGQVMNFKGDIIVVYVSQTSQEGAAAAAEPMGRPVQEETLARRDSFAGNGPRFPDPCGGPEGLREPEKASRPVQEQGGAKA

SEQ ID NO: 17622 - protein, 220 aa, Homo sapiens
MRQKHYLEAAARGLHDSCPGQARYLLWAYTSSHDDKSTFEETCPYCFQLLVLDNSRVRLKPKARLTPKIQKLLNREARNYTLSFKEAKMVKKFKDSKSVLLITCKTCNRTVKHHGKSRSFVSTLKSNPATPTSKLSLKTPERRTANPNHDMSGSKGKSPASVFRTPTSGQSVSTCSSKNTSKTKKHFSQLKMLLSQNESQKIPKVDFRNFLSSLKGGLLK

SEQ ID NO: 17623 - protein, 136 aa, Homo sapiens
MWTLVSWVALTAGLVAGTRCPDGQFCPVACCLDPGGASYSCCRPLLDKWPTTLSRHLGGPCQVDAHCSAGHSCIFTVSGTSSCCPFPEAVACGDGHHCCPRGFHCSADGRSCFQRSGNNSVGAIQCPDSQFECPDF

SEQ ID NO: 17624 - protein, 563 aa, Homo sapiens
MANSSFIGDHVHGAPHAVMPEVEFPDQFFTVLTMDHELVTLRDVVINFSQEEWEYLDSAQRNLYWDVMMENYSNLLSLDLESRNETKHLSVGKDIIQNTGSQWEVMESSKLCGLEGSIFRNDWQSKSKIDLQGPEVGYFSQMKIISENVPSYKTHESLTLPRRTHDSEKPYEYKEYEKVFSCDLEFDEYQKIHTGGKNYECNQCWKTFGIDNSSMLQLNIHTGVKPCKYMEYGNTCSFYKDFNVYQKIHNEKFYKCKEYRRTFERVGKVTPLQRVHDGEKHFECSFCGKSFRVHAQLTRHQKIHTDEKTYKCMECGKDFRFHSQLTEHQRIHTGEKPYKCMHCEKVFRISSQLIEHQRIHTGEKPYACKECGKAFGVCRELARHQRIHTGKKPYECKACGKVFRNSSSLTRHQRIHTGEKPYKCKECEKAFGVGSELTRHERIHSGQKPYECKECGKFFRLTSALIQHQRIHSGEKPYECKVCGKAFRHSSALTEHQRIHTGEKPYECKACGKAFRHSSSFTKHQRIHTDDKPYECKECGNSFSVVGHLTCQPKIYTGEKSFD

SEQ ID NO: 17625 - protein, 845 aa, Homo sapiens
MTIPDVFPHLPLIAITRNPVFPRFIKIIEVKNKKLVELLRRKVRLAQPYVGVFLKRDDSNESDVVESLDEIYHTGTFAQIHEMQDLGDKLRMIVMGHRRVHISRQLEVEPEEPEAENKHKPRRKSKRGKKEAEDELSARHPAELAMEPTPELPAEVLMVEVENVVHEDFQVTEEVKALTAEIVKTIRDIIALNPLYRESVLQMMQAGQRVVDNPIYLSDMGAALTGAESHELQDVLEETNIPKRLYKALSLLKKEFELSKLQQRLGREVEEKIKQTHRKYLLQEQLKIIKKELGLEKDDKDAIEEKFRERLKELVVPKHVMDVVDEELSKLGLLDNHSSEFNVTRNYLDWLTSIPWGKYSNENLDLARAQAVLEEDHYGMEDVKKRILEFIAVSQLRGSTQGKILCFYGPPGVGKTSIARSIARALNREYFRFSVGGMTDVAEIKGHRRTYVGAMPGKIIQCLKKTKTENPLILIDEVDKIGRGYQGDPSSALLELLDPEQNANFLDHYLDVPVDLSKVLFICTANVTDTIPEPLRDRMEMINVSGYVAQEKLAIAERYLVPQARALCGLDESKAKLSSDVLTLLIKQYCRESGVRNLQKQVEKVLRKSAYKIVSGEAESVEVTPENLQDFVGKPVFTVERMYDVTPPGVVMGLAWTAMGGSTLFVETSLRRPQDKDAKGDKDGSLEVTGQLGEVMKESARIAYTFARAFLMQHAPANDYLVTSHIHLHVPEGATPKDGPSAGCTIVTALLSLAMGRPVRQNLAMTGEVSLTGKILPVGGIKEKTIAAKRAGVTCIVLPAENKKDFYDLAAFITEGLEVHFVEHYREIFDIAFPDEQAEALAVER

SEQ ID NO: 17626 - protein, 433 aa, Homo sapiens
MSADGAEADGSTQVTVEEPVQQPSVVDRVASMPLISSTCDMVSAAYASTKESYPHIKTVCDAAEKGVRTLTAAAVSGAQPILSKLEPQIASASEYAHRGLDKLEENLPILQQPTEKVLADTKELVSSKVSGAQEMVSSAKDTVATQLSEAVDATRGAVQSGVDKTKSVVTGGVQSVMGSRLGQMVLSGVDTVLGKSEEWADNHLPLTDAELARIATSLDGFDVASVQQQRQEQSYFVRLGSLSERLRQHAYEHSLGKLRATKQRAQEALLQLSQVLSLMETVKQGVDQKLVEGQEKLHQMWLSWNQKQLQGPEKEPPKPEVESRALTMFRDIAQQLQATCTSLGSSIQGLPTNVKDQVQQARRQVEDLQATFSSIHSFQDLSSSILAQSRERVASAREALDHMVEYVAQNTPVTWLVGPFAPGITEKAPEEKK

SEQ ID NO: 17627 - protein, 430 aa, Homo sapiens
MGKPWLRALQLLLLLGASWARAGAPRCTYTFVLPPQKFTGAVCWSGPASTRATPEAANASELAALRMRVGRHEELLRELQRLAAADGAVAGEVRALRKESRGLSARLGQLRAQLQHEAGPGAGPGADLGAEPAAALALLGERVLNASAEAQRAAARFHQLDVKFRELAQLVTQQSSLIARLERLCPGGAGGQQQVLPPPPLVPVVPVRLVGSTSDTSRMLDPAPEPQRDQTQRQQEPMASPMPAGHPAVPTKPVGPWQDCAEARQAGHEQSGVYELRAGFGRPDGEYWLGLEPVYQLTSRGDHELLVLLEDWGGRGARAHYDGFSLEPESDHYRLRLGQYHGDAGDSLSWHNDKPFSTVDRDRDSYSGNCALYQRGGWWYHACAHSNLNGVWHHGGHYRSRYQDGVYWAEFRGGAYSLRKAAMLIRPLKL

SEQ ID NO: 17628 - protein, 851 aa, Homo sapiens
MAQVLHVPAPFPGTPGPASPPAFPAKDPDPPYSVETPYGYRLDLDFLKYVDDIEKGHTLRRVAVQRRPRLSSLPRGPGSWWTSTESLCSNASGDSRHSAYSYCGRGFYPQYGALETRGGFNPRVERTLLDARRRLEDQAATPTGLGSLTPSAAGSTASLVGVGLPPPTPRSSGLSTPVPPSAGHLAHVREQMAGALRKLRQLEEQVKLIPVLQVKLSVLQEEKRQLTVQLKSQKFLGHPTAGRGRSELCLDLPDPPEDPVALETRSVGTWVRERDLGMPDGEAALAAKVAVLETQLKKALQELQAAQARQADPQPQAWPPPDSPVRVDTVRVVEGPREVEVVASTAAGAPAQRAQSLEPYGTGLRALAMPGRPESPPVFRSQEVVETMCPVPAAATSNVHMVKKISITERSCDGAAGLPEVPAESSSSPPGSEVASLTQPEKSTGRVPTQEPTHREPTRQAASQESEEAGGTGGPPAGVRSIMKRKEEVADPTAHRRSLQFVGVNGGYESSSEDSSTAENISDNDSTENEAPEPRERVPSVAEAPQLRPAGTAAAKTSRQECQLSRESQHIPTAEGASGSNTEEEIRMELSPDLISACLALEKYLDNPNALTERELKVAYTTVLQEWLRLACRSDAHPELVRRHLVTFRAMSARLLDYVVNIADSNGNTALHYSVSHANFPVVQQLLDSGVCKVDKQNRAGYSPIMLTALATLKTQDDIETVLQLFRLGNINAKASQAGQTALMLAVSHGRVDVVKALLACEADVNVQDDDGSTALMCACEHGHKEIAGLLLAVPSCDISLTDRDGSTALMVALDAGQSEIASMLYSRMNIKCSFAPMSDDESPTSSSAEE

SEQ ID NO: 17629 - protein, 499 aa, Homo sapiens
MDEFHPFIEALLPHVRAFAYTWFNLQARKRKYFKKHEKRMSKDEERAVKDELLGEKPEVKQKWASRLLAKLRKDIRPECREDFVLSITGKKAPGCVLSNPDQKGKMRRIDCLRQADKVWRLDLVMVILFKGIPLESTDGERLVKAAQCGHPVLCVQPHHIGVAVKELDLYLAYFVRERDAEQSGSPRTGMGSDQEDSKPITLDTTDFQESFVTSGVFSVTELIQVSRTPVVTGTGPNFSLGELQGHLAYDLNPASTGLRRTLPSTSSSGSKRHKSGSMEEDVDTSPGGDYYTSPSSPTSSSRNWTEDMEGGISSPVKKTEMDKSPFNSPSPQDSPRLSSFTQHHRPVIAVHSGIARSPHPSSALHFPTTSILPQTASTYFPHTAIRYPPHLNPQDPLKDLVSLACDPASQQPGPLNGSGQLKMPSHCLSAQMLAPPPPGLPRLALPPATKPATTSEGGATSPTSPSYSPPDTSPANRSFVGLGPRDPAGIYQAQSWYLG

SEQ ID NO: 17630 - protein, 397 aa, Homo sapiens
MEEDDSYVPSDLTAEERQELENIRRRKQELLADIQRLKDEIAEVANEIENLGSTEERKNMQRNKQVAMGRKKFNMDPKKGIQFLIENDLLKNTCEDIAQFLYKGEGLNKTAIGDYLGERDEFNIQVLHAFVELHEFTDLNLVQALRQFLWSFRLPGEAQKIDRMMEAFAQRYCQCNNGVFQSTDTCYVLSFAIIMLNTSLHNPNVKDKPTVERFIAMNRGINDGGDLPEELLRNLYESIKNEPFKIPEDDGNDLTHTFFNPDREGWLLKLGGRVKTWKRRWFILTDNCLYYFEYTTDKEPRGIIPLENLSIREVEDSKKPNCFELYIPDNKDQVIKACKTEADGRVVEGNHTVYRISAPTPEEKEEWIKCIKAAISRDPFYEMLAARKKKVSSTKRH

SEQ ID NO: 17631 - protein, 621 aa, Homo sapiens
MADFEELRNMVSSFRVSELQVLLGFAGRNKSGRKHDLLMRALHLLKSGCSPAVQIKIRELYRRRYPRTLEGLSDLSTIKSSVFSLDGGSSPVEPDLAVAGIHSLPSTSVTPHSPSSPVGSVLLQDTKPTFEMQQPSPPIPPVHPDVQLKNLPFYDVLDVLIKPTSLVQSSIQRFQEKFFIFALTPQQVREICISRDFLPGGRRDYTVQVQLRLCLAETSCPQEDNYPNSLCIKVNGKLFPLPGYAPPPKNGIEQKRPGRPLNITSLVRLSSAVPNQISISWASEIGKNYSMSVYLVRQLTSAMLLQRLKMKGIRNPDHSRALIKEKLTADPDSEIATTSLRVSLMCPLGKMRLTIPCRAVTCTHLQCFDAALYLQMNEKKPTWICPVCDKKAAYESLILDGLFMEILNDCSDVDEIKFQEDGSWCPMRPKKEAMKVSSQPCTKIESSSVLSKPCSVTVASEASKKKVDVIDLTIESSSDEEEDPPAKRKCIFMSETQSSPTKGVLMYQPSSVRVPSVTSVDPAAIPPSLTDYSVPFHHTPISSMSSDLPGLDFLSLIPVDPQYCPPMFLDSLTSPLTASSTSVTTTSSHESSTHVSSSSSRSETGVITSSGSNIPDIISLD

SEQ ID NO: 17632 - protein, 180 aa, Homo sapiens
MAPSSPRPALPALLVLLGALFPGPGNAQTSVSPSKVILPRGGSVLVTCSTSCDQPKLLGIETPLPKKELLLPGNNRKVYELSNVQEDSQPMCYSNCPDGQSTAKTFLTVYWTPERVEGGAPRANLTVVLLRGEKELKREPAVGEPAEVTTTVLVRRDHHGANFSCRTELDLRPQGLELFE

SEQ ID NO: 17633 - protein, 250 aa, Homo sapiens
MRKTRLWGLLWMLFVSELRAATKLTEEKYELKEGQTLDVKCDYTLEKFASSQKAWQIIRDGEMPKTLACTERPSKNSHPVQVGRIILEDYHDHGLLRVRMVNLQVEDSGLYQCVIYQPPKEPHMLFDRIRLVVTKGFSGTPGSNENSTQNVYKIPPTTTKALCPLYTSPRTVTQAPPKSTADVSTPDSEINLTNVTDIIREKSMTFGIRRLDVESHPLPPLHTGHFRISQFFSQAGTQSLHSCYKGKPTP

SEQ ID NO: 17634 - protein, 53 aa, Homo sapiens
MRLFLSLPVLVVVLSIVLEGPAPAQGTPDVSSALDKLKEFGNTLEDKARELIS

SEQ ID NO: 17635 - protein, 105 aa, Homo sapiens
MAAARLCLSLLLLSTCVALLLQPLLGAQGAPLEPVYPGDNATPEQMAQYAADLRRYINMLTRPSACPCCLFPPRYGKRHKEDTLAFSEWGSPHAAVPRELSPLDL

SEQ ID NO: 17636 - protein, 174 aa, Homo sapiens
MAQLCGLRRSRAFLALLGSLLLSGVLAADRERSIHDFCLVSKVVGRCRASMPRWWYNVTDGSCQLFVYGGCDGNSNNYLTKEECLKKCATVTAPRRQDSEDHSSDMFNYEEYCTANAVTGPCRASFPRWYFDVERNSCNNFIYGGCRGNKNSYRSEEACMLRCFRQQENPPLPL

SEQ ID NO: 17637 - protein, 677 aa, Homo sapiens
MQTPRASPPRPALLLLLLLLGGAHGLFPEEPPPLSVAPRDYLNHYPVFVGSGPGRLTPAEGADDLNIQRVLRVNRTLFIGDRDNLYRVELEPPTSTELRYQRKLTWRSNPSDINVCRMKGKQEGECRNFVKVLLLRDESTLFVCGSNAFNPVCANYSIDTLQPVGDNISGMARCPYDPKHANVALFSDGMLFTATVTDFLAIDAVIYRSLGDRPTLRTVKHDSKWFKEPYFVHAVEWGSHVYFFFREIAMEFNYLEKVVVSRVARVCKNDVGGSPRVLEKQWTSFLKARLNCSVPGDSHFYFNVLQAVTGVVSLGGRPVVLAVFSTPSNSIPGSAVCAFDLTQVAAVFEGRFREQKSPESIWTPVPEDQVPRPRPGCCAAPGMQYNASSALPDDILNFVKTHPLMDEAVPSLGHAPWILRTLMRHQLTRVAVDVGAGPWGNQTVVFLGSEAGTVLKFLVRPNASTSGTSGLSVFLEEFETYRPDRCGRPGGGETGQRLLSLELDAASGGLLAAFPRCVVRVPVARCQQYSGCMKNCIGSQDPYCGWAPDGSCIFLSPGTRAAFEQDVSGASTSGLGDCTGLLRASLSEDRAGLVSVNLLVTSSVAAFVVGAVVSGFSVGVCVRASEGCCGRVCQVGHACRVCVHERRSWWPQRPGRWLSRRWGFQKARGSPRCRLGV

SEQ ID NO: 17638 - protein, 210 aa, Homo sapiens
MTPPRLFWVWLLVAGTQGVNDGDMRLADGGATNQGRVEIFYRGQWGTVCDNLWDLTDASVVCRALGFENATQALGRAAFGQGSGPIMLDEVQCTGTEASLADCKSLGWLKSNCRHERDAGVVCTNETRSTHTLDLSRELSEALGQIFDSQRGCDLSISVNVQGEDALGFCGHTVILTANLEAQALWKEPGSNVTMSVDAECVPMVRDLLR

SEQ ID NO: 17639 - protein, 539 aa, Homo sapiens
MALQSQASEEAKGPWQEADQEQQEPVGSPEPESEPEPEPEPEPVPVPPPEPQPEPQPLPDPAPLPELEFESERVHEPEPTPTVETRGTARGFQPPEGGFGWVVVFAATWCNGSIFGIHNSVGILYSMLLEEEKEKNRQVEFQAAWVGALAMGMIFFCSPIVSIFTDRLGCRITATAGAAVAFIGLHTSSFTSSLSLRYFTYGILFGCGCSFAFQPSLVILGHYFQRRLGLANGVVSAGSSIFSMSFPFLIRMLGDKIKLAQTFQVLSTFMFVLMLLSLTYRPLLPSSQDTPSKRGVRTLHQRFLAQLRKYFNMRVFRQRTYRIWAFGIAAAALGYFVPYVHLMKYVEEEFSEIKETWVLLVCIGATSGLGRLVSGHISDSIPGLKKIYLQVLSFLLLGLMSMMIPLCRDFGGLIVVCLFLGLCDGFFITIMAPIAFELVGPMQASQAIGYLLGMMALPMIAGPPIAGLLRNCFGDYHVAFYFAGVPPIIGAVILFFVPLMHQRMFKKEQRDSSKDKMLAPDPDPNGELLPGSPNPEEPI

SEQ ID NO: 17640 - protein, 78 aa, Homo sapiens
FESLAIQLLQFNILFLWLSSQALTLRPCTTSGTSISQPPGSCFAPWDRTHRTWFRPLSTSSARLDHPCADRPTSATRR

SEQ ID NO: 17641 - protein, 186 aa, Homo sapiens
MDCRVHMRPIGLTWVLQLTLAWILLEACGGSRPLQARSQQHHGLAADLGKGKLHLAGPCCPSEMDTTETSGPGNHPERCGVPSPECESFLEHLQRALRSRFRLRLLGVRQAQPLCEELCQAWFANCEDDITCGPTWLPLSEKRGCEPSCLTYGQTFADGTDLCRSALGHALPVAAPGARHCFNISI

SEQ ID NO: 17642 - protein, 154 aa, Homo sapiens
MGGRVFLAFCVWLTLPGAETQDSRGCARWCPQNSSCVNATACRCNPGFSSFSEIITTPTETCDDINECATPSKVSCGKFSDCWNTEGSYDCVCSPGYEPVSGAKTFKNESENTCQGKNHPTSSDFPSMRFGVTRAILAASREQGLGCRVSAWRL

SEQ ID NO: 17643 - protein, 335 aa, Homo sapiens
MSVPLLKIGAVLSTMAMVTNWMSQTLPSLVGLNGTVSRAGASEKITLFQNPEEGWQLYTSAQAPDGKCICTAVIPAQSTCSRDGRSRELRQLMEKVQNVSQSMEVLELRTYRDLQYVRGMETLMRSLDARLRAADGSLSAKSFQELKDRMTELLPLSSVLEQYKADTRTIVRLREEVRNLSGSLAAIQEEMGAYGYEDLQQRVMALEARLHACAQKLGCGKLTGVSNPITVRAMGSRFGSWMTDTMAPSADSRVWYMDGYYKGRRVLEFRTLGDFIKGQNFIQHLLPQPWAGTGHVVYNGSLFYNKYQSNVVVKYHFRSRSVLVQRSLPGAGYNN

SEQ ID NO: 17644 - protein, 77 aa, Homo sapiens
MPDEINIDELLELESEEERSRKIQGLLKSCGKPVEDFIQELLAKLQGLHRQPGLRQPSPSHDGSLSPLQDRARTAHP

SEQ ID NO: 17645 - protein, 140 aa, Homo sapiens
MLLPLLLLLPMCWAVEVKRPRGVSLTNHHFYDESKPFTCLDGSATIPFDQVNDDYCDCKDGSDEPGTAACPNGSFHCTNTGYKPLYIPSNRVNDGVCDCCDGTDEYNSGVICENTCKEKGRKERESLQQMAEVTREGFRL

SEQ ID NO: 17646 - protein, 150 aa, Homo sapiens
MRLLVLLWGCLLLPGYEALEGPEEISGFEGDTVSLQCTYREELRDHRKYWCRKGGILFSRCSGTIYAEEEGQETMKGRVSIRDSRQELSLIVTLWNLTLQDAGEYWCGVEKRGPDESLLISLFVFPGNRYLSFPRLGTGAAEGRGRGGGA

SEQ ID NO: 17647 - protein, 132 aa, Homo sapiens
MLLPLLLLLPMCWAVEVKRPRGVSLTSESSCSPSRQAGGGRGQHWALGIGIYSLLTQFPGSAPLVGMGGQRWYLVEKALTCPGLSFLYPADHHFYDESKPFTCLDGSATIPFDQVNDDYCDCKDGSDEPGTA

SEQ ID NO: 17648 - protein, 536 aa, Homo sapiens
MAEDWLDCPALGPGWKRREVFRKSGATCGRSDTYYQSPTGDRIRSKVELTRYLGPACDLTLFDFKQGILCYPAPKAHPVAVASKKRKKPSRPAKTRKRQVGPQSGEVRKEAPRDETKADTDTAPASFPAPGCCENCGISFSGDGTQRQRLKTLCKDCRAQRIAFNREQRMFKRVGCGECAACQVTEDCGACSTCLLQLPHDVASGLFCKCERRRCLRIVERSRGCGVCRGCQTQEDCGHCPICLRPPRPGLRRQWKCVQRRCLRGKHARRKGGCDSKMAARRRPGAQPLPPPPPSQSPEPTEPQPYTNRRQNRKCGACAACLRRMDCGRCDFCCDKPKFGGSNQKRQKCRWRQCLQFAMKRLLPSVWSESEDGAGSPPPYRRRKRPSSARRHHLGPTLKPTLATRTAQPDHTQAPTKQEAGGGFVLPPPGTDLVFLREGASSPVQVPGPVAASTEALLQAVDPGLPSVKQEPPDPEEDKEENKDDSASKLAPEEEAGGAGTPVITEIFSLGGTRFRDTAVWLPRSKDLKKPGARKQ

SEQ ID NO: 17649 - protein, 146 aa, Homo sapiens
MLLWPLLLLLLLLPTLALLRQQRSQDARLSWLAGLQHRVAWGALVWAATWQRRRLEQSTLHVHQSQQQALRWCLQGAQRPHCSLRRSTDISTFRNHLPLTKASQTQQEDSGEQPLPPTSNQDLGEASLQATLLGLAALNKAYPEVL

SEQ ID NO: 17650 - protein, 54 aa, Homo sapiens
MCTTLFLLSTLAMLWRRRFANRVQPEPSDVDGAARGSSLDADPQSSGREKEPLK

SEQ ID NO: 17651 - protein, 325 aa, Homo sapiens
MSDEREVAEAATGEDASSPPPKTEAASDPQHPAASEGAAAAAASPPLLRCLVLTGFGGYDKAGDRVMVLNRSGMWQEEVTVPSVQTFLIPEAMTFEEAAALLVNYITAYMVLFDFGNLQPGHSVLVHMAAGGVGMAAVQLCRTVENVTVFGTASASKHEALKENGVTHPIDYHTTDYVDEIKKISPKGVDIVMDPLGGSDTAKGYNLLKPMGKVVTYGMANLLTGPKRNLMALARTWWNQFSVTALQLLQANRAVCGFHLGYLDGEVELVSGVVARLLALYNQGHIKPHIDSVWPFEKVADAMKQMQEKKNVGKVLLVPGPEKEN

SEQ ID NO: 17652 - protein, 71 aa, Homo sapiens
MHKNPKVQLWSTYQVRSADWSLEALLYKWDMKCVHIPLESFDADKEDIAESTLPGRHTVEMLVISFAKDSL

SEQ ID NO: 17653 - protein, 187 aa, Homo sapiens
MGPGRCLLTALLLLALAPPPEASQYCGRLEYWNPDNKCCSSCLQRFGPPPCPGALETGDTWKEASLLPLLSRELSSLASQPLSRLLDELEVLEELIVLLDPEPGPGGGMAHGTTRHLAARYGLPAAWSTFAYSLRPSRSPLRALIEMVVAREPSASLGQLGTHLAQLGRADALRVLSKLGSSGVCWA

SEQ ID NO: 17654 - protein, 140 aa, Homo sapiens
MANSGLQLLGFSMALLGWVGLVACTAIPQWQMSSYAGDNIITAQAMYKGLWMDCVTQSTGMMSCKIGLAGHSSPNGGLPGAGLPGHVCGHDGHEVHALWGRRQSEEGPYSHGWRHNFHRGRSCRLGSLLLVWPSDCHRLL

SEQ ID NO: 17655 - protein, 92 aa, Homo sapiens
MSFSRKKKKKDKDKAKLLEAMGTSKKNEEEKRRGLDKRTPAQAAFEKMQEKRQMERILKKASKTHKQRVEDFNRHLDTLTEHYDIPKVSWTK

SEQ ID NO: 17656 - protein, 293 aa, Homo sapiens
MDRAKQQQALLLLPVCLALTFSLTAVVSSHWCEGTRRVVKPLCQDQPGGQHCIHFKRDNSSNGRMDNNSQAVLYIWELGDDKFIQRGFHVGLWQSCEESLNGEDEKCRSFRSVVPAEEQGVLWLSIGGEVLDIVLILTSAILLGSRVSCRSPGFHWLRVDALVAIFMVLAGLLGMVAHMMYTTIFQITVNLGPEDWKPQTWDYGWSYCLAWGSFALCLAVSVSAMSRFTAARLEFTEKQQAQNGSRHSQHSFLEPEASESIWKTGAAPCPAEQAFRNVSGHLPPGAPGKVSIC

SEQ ID NO: 17657 - protein, 18 aa, Homo sapiens
MTPPRLFWVWLLVAGTQA

SEQ ID NO: 17658 - protein, 165 aa, Homo sapiens
MRRRLWLGLAWLLLARAPDAAGTPSASRGPRSYPHLEGDVRWRRLFSSTHFFLRVDPGGRVQGTRWRHGQDSILEIRSVHVGVVVIKAVSSGFYVAMNRRGRLYGSVPGAHRRERPQHLRLTALAPPRPAHVPGAGQEGGAPARRPDAAVPPVRPLPARPGLLRP

SEQ ID NO: 17659 - protein, 152 aa, Homo sapiens [sequence omitted]

SEQ ID NO: 17660 - protein, 163 aa, Homo sapiens
MKPSGEDQAALAAGPWEECFQAAVQLALRAGQIIRKALTEEKRVSTKTSAADLVTETDHLVEDLIISELRERFPSHRFIAEEAAASGAKCVLTHSPTWIIDPIDGTCNFVHRFPTVAVSIGFAVRQEVRVWPRSPGPLPGLPLAILPFWLQPLCAWFAVCPVP

SEQ ID NO: 17661 - protein, 237 aa, Homo sapiens
MKGILVAGITAVLVAAVESLSCVQCNSWEKSCVNSIASECPSHANTSCISSSASSSLETPVRLYQNMFCSAENCSEETHITAFTVHVSAEEHFHFVSQCCQGKECSNTSDALDPPLKNVSSNAECPACYESNGTSCHGKPWKCYEEEQCVFLVAELKNDIESKSLVLKGCSNVSNATCQFLSGENKTLGGVIFRKFECANVNSLTPTSAPTTSHNVGSKASLYLLALASLLLRGLLP

SEQ ID NO: 17662 - protein, 567 aa, Homo sapiens
MAEDWLDCPALGPGWKRREVFRKSGATCGRSDTYYQSPTGDRIRSKVELTRYLGPACDLTLFDFKQGILCYPAPKAHPVAVASKKRKKPSRPAKTRKRQVGPQSGEVRKEAPRDETKADTDTAPASFPAPGCCENCGISFSGDGTQRQRLKTLCKDCRAQRIAFNREQRMFKSRGCGVCRGCQTQEDCGHCPICLRPPRPGLRRQWKCVQRRCLRGKHARRKGGCDSKMAARRRPGAQPLPPPPPSQSPEPTEPHPRALAPSPPAEFIYYCVDEDELPYTNRRQNRKCGACAACLRRMDCGRCDFCCDKPKFGGSNQKRQKCRWRQCLQFAMKRLLPSVWSESEDGAGSPPPYRRRKRPSSARRHHLGPTLKPTLATRTAQPDHTQAPTKQEAGGGFVLPPPGTDLVFLREGASSPVQVPGPVAASTEALLQEAQCSGLSWVVALPQVKQEKADTQDEWTPGTAVLTSPVLVPGCPSKAVDPGLPSVKQEPPDPEEDKEENKDDSASKLAPEEEAGGAGTPVITEIFSLGGTRFRDTAVWLPRYYHLALDWKCNCGYHLCCRSVLVP

SEQ ID NO: 17663 - protein, 171 aa, Homo sapiens
MFPAGPPSHSLLRLPLLQLLLLVVQAVGRGLGRASPAGGPLEDVVIERYHIPRACPREVQMGDFVRYHYNGTFEDGKKFDSSYDRNTLVAIVVGVGRLITGMDRGLMGMCVNERRRLIVPPHLGYGSIGLAGLIPPDATLYFDVVLLDVWNKEDTVQVSTLLRPPHCPRMV

SEQ ID NO: 17664 - protein, 52 aa, Homo sapiens
MAAVSLRLGDLVWGKLGRYPPWPGKIVNPPKDLKKPRGKKCFFVKFFGTEDQ

SEQ ID NO: 17665 - protein, 535 aa, Homo sapiens
MLLPLLLLLPMCWAVEVKRPRGVSLTNHHFYDESKPFTCLDGSATIPFDQVNDDYCDCKDGSDEPGTAACPNGSFHCTNTGYKPLYIPSNRVNDGVCDCCDGTDEYNSGVICENTCKEKGRKERESLQQMAEVTREGFRLKKILIEDWKKAREEKQKKLIELQAGKKSLEDQVEMLRTVKEEAEKPEREAKEQHQKLWEEQLAAAKAQQEQELAADAFKELDDDMDGTVSVTELQTHPELDTDGDGALSEAEAQALLSGDTQTDATSFYDRVWAAIRDKYRSEALPTDLPAPSAPDLTEPKEEQPPVPSSPTEEEEEEEEEEEEEAEEEEEEEDSEVQGEQPKEAPPPLSPPQPASPAEEDKMPPYDEQTQAFIDAAQEARNKFEEAERSLKDMEESIRNLEQEISFDFGPNGEFAYLYSQCYELTTNEYVYRLCPFKLVSQKPKLGGSPTSLGTWGSWIGPDHDKFSAMKYEQGTGCWQGPNRSTTVRLLCGKETMVTSTTEPSRCEYLMELMTPAACPEPPPEAPTEDDHDEL

SEQ ID NO: 17666 - protein, 92 aa, Homo sapiens
MRLFLSLPVLVVVLSIVLEGPAPAQGTPDVSSALDKLKEFGNTLEDKARELISRIKQSELSAKMRLEPFPGHGRAGGVVFRDISESEGETQD

SEQ ID NO: 17667 - protein, 159 aa, Homo sapiens
MPPASGPSVLARLLPLLGLLLGSASRAPGKSPPEPPSPQEILIKVQVYVSGELVPLARASVDVFGNRTLLAAGTTDSEGVATLPLSYRLGTWVLVTAARPGFLTNSVPWRVDKLPLYASVSLYLLPERPATLILYEDLVHILLGSPGCARHCGWCWEPR

SEQ ID NO: 17668 - protein, 125 aa, Homo sapiens
MADEELEALRRQRLAELQAKHGDPGDAAQQEAKHREAEMRNSILAQVLDQSARARLSNLALVKPEKTKAVENYLIQMARYGQLSEKVSEQGLIEILKKVSQQTEKTTTVKFNRRKVMDSDEDDDY

SEQ ID NO: 17669 - protein, 116 aa, Homo sapiens
MAGCAARAPPGSEARLSLATFLLGASVLALPLLTRAGLQGRTGLALYVAGLNALLLLLYRPPRYQIAIRACFLGFVFGCGTLLSFSQSSWSHFGWSHLVHPHSHCRIFPYTMISVP

SEQ ID NO: 17670 - protein, 39 aa, Homo sapiens
MRLFLSLPVLVVVLSIVLEGSPRLSPAGAKSAQESTSNR

SEQ ID NO: 17671 - protein, 205 aa, Homo sapiens
VTISSLVFSMDSQFLCASSNTETVHIFKLEQVTNSRPEEPSTWSGYMGKMFMAATNYLPTQVSDMMHQDRAFATARLNFSGQRNICTLSTIQKLPRLLVASSSGHLYMYNLDPQDGGECVLIKTHSLLGSGTTEENKENDLRPSLPQSYAATVARPSASSASTVPGYSEDGGALRGEVIPEHEFATGPVCLDDENEFPPVSIRNP

SEQ ID NO: 17672 - protein, 62 aa, Homo sapiens
MWTLVSWVALTAGLVAGTRCPDGQFCPVACCLDPGGASYSCCRPLLDKWPTTLSRHLGGPCQ

SEQ ID NO: 17673 - protein, 249 aa, Homo sapiens
MSLEDPFFVVRGEVQKAVNTARGLYQRWCELLQESAAVGREELDWTTNELRNGLRSIEWDLEDLEETIGIVEANPGKFKLPAGDLQERKVFVERMREAVQEMKDHMVSPTAVAFLERNNREILAGKPAAQKSPSDLLDASAVSATSRYIEEQQATQQLIMDEQDQQLEMVSGSIQVLKHMSGRVGEELDEQGIMLDAFAQEMDHTQSRMDGVLRKLAKVSHMTSDRRQWCAIAVLVGVLLLVLILLFSL

SEQ ID NO: 17674 - protein, 207 aa, Homo sapiens
MAVESGVISTLIPQDPPEQELILVKVEDNFSWDEKFKQNGSTQSCQELFRQQFRKFCYQETPGPREALSRLQELCYQWLMPELHTKEQILELLVLEQFLSILPEELQIWVQQHNPESGEEAVTLLEDLEREFDDPGQQVPASPQGPAVPWKDLTCLRASQESTDIHLQPLKTQLKSWKPCLSPKSGEEWEIIWKLLTLRPLFLRMQN

SEQ ID NO: 17675 - protein, 62 aa, Homo sapiens
MTPPRLFWVWLLVAGTQGELSPWEIPKAEVWKAGAPWGCSELQGDILPGARGPAVSQIFSPA

SEQ ID NO: 17676 - protein, 121 aa, Homo sapiens
MSAIQNLHSFDPFADASKGDDLLPAGTEDYIHIRIQQRNGRKTLTTVQGIADDYDKKKLVKAFKKKFACNGTVIEHPEYGEVIQLQGDQRKNICQFLVEIGLAKDDQLKVHGFKNLTACIM

SEQ ID NO: 17677 - protein, 41 aa, Homo sapiens
MTPPRLFWVWLLVAGTQAPGIPSDDDLEVPGGSPGFRRERW

SEQ ID NO: 17678 - protein, 147 aa, Homo sapiens
MFPAGPPSHSLLRLPLLQLLLLVVQAVGRGLGRASPAGGPLEDVVIERYHIPRACPREVQMGDFVRYHYNGTFEDGKKFDSSGAHSTGCHPLLRCGSAGCVEQGRHRAGEHIAAPAPLPPHGPGRRLCPLPLQWHPAGRHLLRHQLQ

SEQ ID NO: 17679 - protein, 193 aa, Homo sapiens
MDCRVHMRPIGLTWVLQLTLAWILLEACGGSRPLQARSQQHHGLAADLGKGKLHLAEMDTTETSGPGNHPERCGVPSPECESFLEHLQRALRSRFRLRLLGVRQAQPLCEELCQAWFANCEDDITCGPTWLPLSEKRGCEPSCLTYGQTFADGTDLCRSALGHALPVAAPGARHCFNISISAVPRPRPGRRGR

SEQ ID NO: 17680 - protein, 433 aa, Homo sapiens
MDEFHPFIEALLPHVRAFSYTWFNLQARKRKYFKKHEKRMSKDEERAVKDELLGEKPEIKQKWASRLLAKLRKDIRPEFREDFVLTITGKKPPCCVLSNPDQKGKIRRIDCLRQADKVWRLDLVMVILFKGIPLESTDGERLYKSPQCSNPGLCVQPHHIGVTIKELDLYLAYFVHTPESGQSDSSNQQGDADIKPLPNGHLSFQDCFVTSGVWNVTELVRVSQTPVATASGPNFSLADLESPSYYNINQVTLGRRSITSPPSTSTTKRPKSIDDSEMESPVDDVFYPGTGRSPAAGSSQSSGWPNDVDAGPASLKKSGKLDFCSALSSQGSSPRMAFTHHPLPVLAGVRPGSPRATASALHFPSTSIIQQSSPYFTHPTIRYHHHHGQDSLKEFVQFVCSDGSGQATGQHSQRQAPPLPTGLSASDPGTATF

SEQ ID NO: 17681 - protein, 149 aa, Homo sapiens
MWTLVSWVALTAGLVAGTRCPDGQFCPVACCLDPGGASYSCCRPLLDKWPTTLSRHLGGPCQVDAHCSAGHSCIFTVSGTSSCCPFPEAVACGDGHHCCPRGFHCSADGRSCFQRSGNNSVGAIQCPDSQFECPDFSTCCVMVDGSWGC

SEQ ID NO: 17682 - protein, 56 aa, Homo sapiens
MVTRFLGPRYRELVKNWVPTAYTWGAVGAVGLVWATDWRLILDWVPYINGKFKKDN

SEQ ID NO: 17683 - protein, 254 aa, Homo sapiens
LLLAAALGALLSFALLAAAVASDYWYILEVADAGNGSAWPGRAELLSSHSGLWRICEGQNGCIPLVDPFASESLDVSTSVQHLICSSQLGWILRALQTPGSPFRTRFFQMACCLPGWHLPPVLHRAVIVVLPLSLVLLVCGWICGLLSSLAQSVSLLLFTGCYFLLGSVLTLAGVSIYISYSHLAFAETVQQYGPQHMQGVRVSFGWSMALAWGSCALEAFSGTLLLSAAWTLSLSPPICGHLSPQQVGGRGGD

SEQ ID NO: 17684 - protein, 73 aa, Homo sapiens
MSLLRNRLQALPALCLCVLVLACIGACQPEAQEGTLSPPPKLKMSRWSLVRGRMKELLETVVNRTRDGWQWFW

SEQ ID NO: 17685 - protein, 350 aa, Homo sapiens
MAEAPSSVRDDLKDVSSQRASSVNQMRPGEGQAHRELQILPRVPALSRRQGEDFLLHKSIDVTGDPKSLRPKQTLEKDLKENREENPGLTSPEPQLPKSPTDLVRAKEGKDPPKIASVENVDADTPSACVVEREASTHSGNRGDALNLSSPKRSKPDASSISQEEPQGEATPVGNRESPGQAGMNSIHSPGPASPVSHPDGQEAKALPPFACDVCEKRFTCNSKLVIHKRSHTGERLFQCNLCGKRFMQLISLQFHQRTHTGERPYTCDVCQKQFTQKSYLKCHKRSHTGEKPFECKDCKKVFTYRGSLKEHQRIHSGEKPYKCSKCPRAFSRLKLLRRHQKTHPEATSQ

SEQ ID NO: 17686 - protein, 257 aa, Homo sapiens
MALNKNHSEGGGVIVNNTESILMSYDHVELTFNDMKNVPEAFKGTKKGTVYLTPYRVIFLSKGKDAMQSFMMPFYLMKDCEIKQPVFGANYIKGTVKAEAGGGWEGSASYKLTFTAGGAIEFGQRMLQVASQASRGEVPSGAYGYSYMPSGAYVYPPPVANGMYPCPPGYPYPPPPPGPPMMDGAMGYVQPPPPPYPGPMEPPVSGPDVPSTPAAEAKAAEAAASAYYNPGNPHNVYMPTSQPPPPPYYPPEDKKTQ

SEQ ID NO: 17687 - protein, 191 aa, Homo sapiens
MLRMRVPALLVLLFCFRGRAGPSPHFLQQPEDLVVLLGEEARLPCALGAYWGLVQWTKSGLALGGQRDLPGWSRYWISGNAANGQHDLHIRPVELEDEASYECQATQAGLRSRPAQLHVLVPPEAPQVLGGPSVSLVAGVPANLTCRSRGDARPTPELLWFRDGVLLDGATFHQTLLKEGTPGSVESTLTL

SEQ ID NO: 17688 - protein, 342 aa, Homo sapiens
MGNVLQSSSDAIYLARHVGLRVGIPKETPALTINRLCGSGFQSIVNGCQEICVKEAEVVLCGGTESMSQAPYCVRNVRFGTKLGSDIKLEDSLWVSLTDQHVQLPMAMTAENLAVKHKISREECDKYALQSQQRWKAANDAGYFNDEMAPIEVKTKKGKQTMQVDEHARPQTTLEQLQKLPPVFKKDGTVTAGNASGVADGAGAVIIASEDAVKKHNFTPLARIVGYFVSGCDPSIMGIGPVPAISGALKKAGLSLKDMDLVEVNEAFAPQYLAVERSLDLDISKTNVNGGAIALGHPLGGSGSRITAHLVHELRRRGGKYAVGSACIGGGQGIAVIIQSTA

SEQ ID NO: 17689 - protein, 185 aa, Homo sapiens
MAAPWASLRLVAPMWNGRIRGIHRLGAAVAPEGNQKKKRTILQFLTNYFYDVEALRDYLLQREMYKVHEKNRSYTWLEKQHGPYGAGAFFILKQGGAVKFRDKEWIRPDKYGHFSQEFWNFCEVPVEAVDAGDCDINYEGLDNLRTSAGWTSRTSLPCPTLASLRYWWRRCCPIARLWESTGLRA

SEQ ID NO: 17690 - protein, 79 aa, Homo sapiens
MAAARLCLSLLLLSTCVALLLQPLLGAQGAPLEPVYPGDNATPEQMAQYAADLRRYINMLTRPRPRPMCPGQDGAYRQI

SEQ ID NO: 17691 - protein, 1668 aa, Homo sapiens
MPPAVRRSACSMGWLWIFGAALGQCLGYSSQQQRVPFLQPPGQSQLQASYVEFRPSQGCSPGYYRDHKGLYTGRCVPCNCNGHSNQCQDGSGICVNCQHNTAGEHCERCQEGYYGNAVHGSCRACPCPHTNSFATGCVVNGGDVRCSCKAGYTGTQCERCAPGYFGNPQKFGGSCQPCSCNSNGQLGSCHPLTGDCINQEPKDSSPAEECDDCDSCVMTLLNDLATMGEQLRLVKSQLQGLSASAGLLEQMRHMETQAKDLRNQLLNYRSAISNHGSKIEGLERELTDLNQEFETLQEKAQVNSRKAQTLNNNVNRATQSAKELDVKIKNVIRNVHMLNRIRTWQKTHQGENNGLANSIRDSLNEYEAKLSDLRARLQEAAAQAKQANGLNQENERALGAIQRQVKEINSLQSDFTKYLTTADSSLLQTNIALQLMEKSQKEYEKLAASLNEARQELSDKVRELSRSAGKTSLVEEAEKHARSLQELAKQLEEIKRNASGDELVRCAVDAATAYENILNAIKAAEDAANRAASASESALQTVIKEDLPRKAKTLSSNSDKLLNEAKMTQKKLKQEVSPALNNLQQTLNIVTVQKEVIDTNLTTLRDGLHGIQRGDIDAMISSAKSMVRKANDITDEVLDGLNPIQTDVERIKDTYGRTQNEDFKKALTDADNSVNKLTNKLPDLWRKIESINQQLLPLGNISDNMDRIRELIQQARDAASKVAVPMRFNGKSGVEVRLPNDLEDLKGYTSLSLFLQRPNSRENGGTENMFVMYLGNKDASRDYIGMAVVDGQLTCVYNLGDREAELQVDQILTKSETKEAVMDRVKFQRIYQFARLNYTKGATSSKPETPGVYDMDGRNSNTLLNLDPENVVFYVGGYPPDFKLPSRLSFPPYKGCIELDDLNENVLSLYNFKKTFNLNTTEVEPCRRRKEESDKNYFEGTGYARVPTQPHAPIPTFGQTIQTTVDRGLLFFAENGDRFISLNIEDGKLMVRYKLNSELPKERGVGDAINNGRDHSIQIKIGKLQKRMWINVDVQNTIIDGEVFDFSTYYLGGIPIAIRERFNISTPAFRGCMKNLKKTSGVVRLNDTVGVTKKCSEDWKLVRSASFSRGGQLSFTDLGLPPTDHLQASFGFQTFQPSGILLDHQTWTRNLQVTLEDGYIELSTSDSGGPIFKSPQTYMDGLLHYVSVISDNSGLRLLIDDQLLRNSKRLKHISSSRQSLRLGGSNFEGCISNVFVQRLSLSPEVLDLTSNSLKRDVSLGGCSLNKPPFLMLLKGSTRFNKTKTFRINQLLQDTPVASPRSVKVWQDACSPLPKTQANHGALQFGDIPTSHLLFKLPQELLKPRSQFAVDMQTTSSRGLVFHTGTKNSFMALYLSKGRLVFALGTDGKKLRIKSKEKCNDGKWHTVVFGHDGEKGRLVVDGLRAREGSLPGNSTISIRAPVYLGSPPSGKPKSLPTNSFVGCLKNFQLDSKPLYTPSSSFGVSSCLGGPLEKGIYFSEEGGHVVLAHSVLLGPEFKLVFSIRPRSLTGILIHIGSQPGKHLCVYLEAGKVTASMDSGAGGTSTSVTPKQSLCDGQWHSVAVTIKQHILHLELDTDSSYTAGQIPFPPASTQEPLHLGGAPANLTTLRIPVWKSFFGCLRNIHVNHIPVPVTEALEVQGPVSLNGCPDQ

SEQ ID NO: 17692 - protein, 740 aa, Homo sapiens
MMHLRLFCILLAAVSGAEGWGYYGCDEELVGPLYARSLGASSYYSLLTAPRFARLHGISGWSPRIGDPNPWLQIDLMKKHRIRAVATQGSFNSWDWVTRYMLLYGDRVDSWTPFYQRGHNSTFFGNVNESAVVRHDLHFHFTARYIRIVPLAWNPRGKIGLRLGLYGCPYKADILYFDGDDAISYRFPRGVSRSLWDVFAFSFKTEEKDGLLLHAEGAQGDYVTLELEGAHLLLHMSLGSSPIQPRPGHTTVSAGGVLNDQHWHYVRVDRFGRDVNFTLDGYVQRFILNGDFERLNLDTEMFIGGLVGAARKNLAYRHNFRGCIENVIFNRVNIADLAVRRHSRITFEGKVAFRCLDPVPHPINFGGPHNFVQVPGFPRRGRLAVSFRFRTWDLTGLLLFSRLGDGLGHVELTLSEGQVNVSIAQSGRKKLQFAAGYRLNDGFWHEVNFVAQENHAVISIDDVEGAEVRVSYPLLIRTGTSYFFGGCPKPASRWDCHSNQTAFHGCMELLKVDGQLVNLTLVEGRRLGFYAEVLFDTCGITDRCSPNMCEHDGRCYQSWDDFICYCELTGYKGETCHTPLYKESCEAYRLSGKTSGNFTIDPDGSGPLKPFVVYCDIRENRAWTVVRHDRLWTTRVTGSSMERPFLGAIQYWNASWEEVSALANASQHCEQWIEFSCYNSRLLNTAAFGLAEMRSSTSTGEAPSLGSSAVPVVWTGAVWTLPCTATVTLTSPSGELTRDC

SEQ ID NO: 17693 - protein, 193 aa, Homo sapiens
MALSTDYALRTGAFEPAEASVNPQDLQGSLQELKERALSRYNLVRGQGPERLVSGSDDFTLFLWSPAEDKKPLTRMTGHQALINQVLFSPDSRIVASASFDKSIKLWDGRTGKYLASLRGHVAAVYQIAWSADSRLLVSGSSDSTLKVWDVKAQKLAMDLPGHADEVYAVDWSPDGQRVASGGKDKCLRIWRR

SEQ ID NO: 17694 - protein, 172 aa, Homo sapiens
MWTLVSWVALTAGLVAGTRCPDGQFCPVACCLDPGGASYSCCRPLLDKWPTTLSRHLGGPCQVDAHCSAGHSCIFTVSGTSSCCPFPEASCCEDRVHCCPHGAFCDLVHTRCITPTGTHPLAKKLPAQRTNRAVALSSSVMCPDARSRCPDGSTCCELPSGKYGCCPMPNAT

SEQ ID NO: 17695 - protein, 646 aa, Homo sapiens
MACSLQKLFAVEEEFEDEDFLSAVEDAENRFTGSLPVNAGRLRPVSSRPQETVQAQSSRLLLLHPTAPSEALGLPDLDLCLPASSTPSADSRPSCIGAAPLRPVSTSSSWIGNQRRVTVTEVLRETARPQSSALHPLLTFESQQQQVGGFEGPEQDEFDKVLASMELEEPGMELECGVSSEAIPILPAQQREGSVLAKKARVVDLSGSCQKGPVPAIHKAGIMSAQDESLDPVIQCRTPRPPLRPGAVGHLPVPTALTVPTQQLHWEVCPQRSPVQALQPLQAARGTIQSSPQNRFPCQPFQSPSSWLSGKAHLPRPRTPNSSCSTPSRTSSGLFPRIPLQPQAPVSSIGSPVGTPKGPQGALQTPIVTNHLVQLVTAASRTPQQPTHPSTRAKTRRFPGPAGILPHQQSGRSLEDIMVSAPQTPTHGALAKFQTEIVASSQASVEEDFGRGPWLTMKSTLGLDERDPSCFLCTYSIVMVLRKAALKQLPRNKVPNMAVMIKSLTRSTMDASVVFKDPTGEMQGTVHRLLLETCQNELKPGSVLLLKQIGVFSPSLRNHYLNVTPNNLVHIYSPDSGDGSFLKPSQPFPKDSGSFQHDVAAKPEEGFRTAQNLEAEASPEEELPEADDLDGLLSELPEDFFCGTSS

SEQ ID NO: 17696 - protein, 271 aa, Homo sapiens
MEWLKTSLLLAVYKTVPILELSPPLWTAIGWVQRGPTPPTPVLRVLLKWAKSPRSSGVPSLSLGADMGSKVADLLYWKDTRTSGVVFTGLMVSLLCLLHFSIVSVAAHLALLLLCGTISLRVYRKVLQAVHRGDGANPFQAYLDVDLTLTREQTERLSHQITSRVVSAATQLRHFFLVEDLVDSLKLALLFYILTFVGAIFNGLTLLILGVIGLFTIPLLYRQHQAQIDQYVGLVTNQLSHIKAKIRAKIPGTGALASAAAAVSGSKAKAE

SEQ ID NO: 17697 - protein, 118 aa, Homo sapiens
MGPASPAARGLSRRPGQPPLPLLLPLLLLLLRAQPAIGSLAGGSPGAAETHSALDAVSGTRSACWSTADRCTRSCRLHVWSRLRRPSPWSAGAGVPGAAAAPTPTTRLCPSAACLVNL

SEQ ID NO: 17698 - protein, 110 aa, Homo sapiens
AVQLFLCDLLLVVRTSLWRQQQPPAPAPAAQGTSSRPQASALELRGFQRDLSSLRRLAQSFRPAMRRVFLHEATARLMAGASPTRTHQLLDRSLRRRAGPGGKGADGCAD

SEQ ID NO: 17699 - protein, 439 aa, Homo sapiens
MYSSPLCLTQDEFHPFIEALLPHVRAFAYTWFNLQARKRKYFKKHEKRMSKDEERAVKDELLGEKPEVKQKWASRLLAKLRKDIRPECREDFVLSITGKKAPGCVLSNPDQKGKMRRIDCLRQADKVWRLDLVMVILFKGIPLESTDGERLVKAAQCGHPVLCVQPHHIGVAVKELDLYLAYFVRERDAEQSGSPRTGMGSDQEDSKPITLDTTDFQESFVTSGVFSVTELIQVSRTPVVTGTGPNFSLGELQGHLAYDLNPASTGLRRTLPSTSSSGSKRHKSGSMEEDVDTSPGGDYYTSPSSPTSSSRNWTEDMEGGISSPVKKTEMDKSPFNSPSPQDSPRLSSFTQHHRPVIAVHSGIARSPHPSSALHFPTTSILPQTASTYFPHTAIRYPPHLNPQDPLKDLVSLACDPASQQPGPPTLRPTRPLQTVPLWD

SEQ ID NO: 17700 - protein, 123 aa, Homo sapiens
MGRPTQWPSLLLLLLLPGPPPVAGLEDAAFPHLGESLQPLPRACPLRCSCPRVDTVDCDGLDLRVFPDNITRAAQHLSLQNNQLQELPYNELSRLSGLRTLNLHNNLISSEEQSHLQGAPRSP

SEQ ID NO: 17701 - protein, 76 aa, Homo sapiens
MGRRKSKRKPPPKKKMTGTLETQFTCPFCNHEKSCDVKMDRARNTGVISCTVCLEEFQTPITSQICQNPWMCTVIG

SEQ ID NO: 17702 - protein, 229 aa, Homo sapiens
MRPAPIALWLRLVLALALVRPRAVGWAPVRAPIYVSSWAVQVSQGNREVERLARKFGFVNLGPIFPDGQYFHLRHRGVVQQSLTPHWGHRLHLKKNPKVQWFQQQTLQRRVKRSVVVPTDPWFSKQWYMNSEAQPDLSILQAWSQGLSGQGIVVSVLDDGIEKDHPDLWANYDPLASYDFNDYDPDPQPRYTPSKENRRTDAGRYHHRCHRGPVAEPAAAAHPHLQRQL

SEQ ID NO: 17703 - protein, 119 aa, Homo sapiens
MDHLGASLWPQVGSLCLLLAGAAWAPPPNLPDPKFESKAALLAARGPEELLCFTERLEDLVCFWEEAASAGVGPGNYSFSYQLEAGTPSMGRGANTPAITAGTRPQTSGWDNNASKSRG

SEQ ID NO: 17704 - protein, 254 aa, Homo sapiens
MASLLKVDQEVKLKVDSFRERITSEAEDLVANFFPKKLLELDSFLKEPILNIHDLTQIHSDMNLPVPDPILLTNSHDGLDGPTYKKRRLDECEEAFQGTKVFVMPNGMLKSNQQLVDIIEKVKPEIRLLIEKCNTVKMWVQLLIPRIEDGNNFGVSIQEETVAELRTVESEAASYLDQISRYYITRAKLVSKIAKYPHVEDYRRTVTEIDEKEYISLRLIISELRNQYVTLHDMILKNIEKIKRPRSSNAETLY

SEQ ID NO: 17705 - protein, 130 aa, Homo sapiens
MDCRVHMRPIGLTWVLQLTLAWILLEACGGSRPLQARSQQHHGLAADLGKGKLHLAGPCCPSEMDTTETSGPGNHPERCGVPSPECESFLEHLQRALRSRFRLRLLGVRQAQPLCEELCQAWFANCEDDI

SEQ ID NO: 17706 - protein, 262 aa, Homo sapiens
MGKTFSQLGSWREDENKSILSSKPAIGSKAVNYSSTGSSKSFCSCVPCEGTADASFVTCPTCQGSGKIPQELEKQLVALIPYGDQRLKPKHTKLFVFLAVLICLVTSSFIVFFLFPRSVIVQPAGLNSSTVAFDEADIYLNITNILNISNGNYYPIMVTQLTLEVLHLSLVVGQVSNNLLLHIGPLASEQMFYAVATKIRDENTYKICTWLEIKVHHVLLHIQGTLTCSYLSHSEQLVFQSYEYVDCRGNASVPHQLTPHPP

SEQ ID NO: 17707 - protein, 548 aa, Homo sapiens
MGRKAIVLAIANTSLAFPLCQHLVTFCLGEDDGVHTVEDASRKLAVMDSQGRVWAQEMLLRVSPDHVTLLDPASKEELESYPLGAIVRCDAVMPPGRSRSLLLLVCQEPERAQPDVHFFQGLRLGAELIREDIQGALHNYRSGRGERRAAALRATQEELQRDRSPAAETPPLQRRPSVRAVISTVERGAGRGRPQAKPIPEAEEAQRPEPVGTSSNADSASPDLGPRGPDLAVLQAEREVDILNHVFDDVESFVSRLQKSAEAARVLEHRERGRRSRRRAAGEGLLTLRAKPPSEAEYTDVLQKIKYAFSLLARLRGNIADPSSPELLHFLFGPLQMIVNTSGGPEFASSVRRPHLTSDAVALLRDNVTPRENELWTSLGDSWTRPGLELSPEEGPPYRPEFFSGWEPPVTDPQSRAWEDPVEKQLQHERRRRQVTQATQQGRGWEVRGRGRSAWPRLTRLSYFLQQSAPQVAVNGHRDLEPESEPQLESETAGKWVLCNYDFQARNSSELSVKQRDVLEDKEKVSELEAVMEKQKKKVEGEVEMEVI

SEQ ID NO: 17708 - protein, 112 aa, Homo sapiens
MSLPPEKASELKQLIHQQLSKMDVHGRIREILAETIREELAPDQQHLSTEDLIKALRRRGIIDDVMKELNFVTDSVEQELPSSPKQPICFDRQSTLKKSFGWKSFLGTSART

SEQ ID NO: 17709 - protein, 219 aa, Homo sapiens
MAVFRSGLLVLTTPLASLAPRLASILTSAARLVNHTLYVHLQPGMSLEGPAQPQSSPVQATFEVLDFITHLYAGADVHRHLDVRILLTNIRTKSTFLPPLPTSVQNLAHPPEVVLTDFQTLDGSQYNPVKQQLVRYATSCYSCCPRLASVLLYSDYGIGEVPVEPLDVPLPSTIRPASPVAGSPKQPVRGYYRGAVGGTFDRLHNAHKVLLSVACILAQ

SEQ ID NO: 17710 - protein, 113 aa, Homo sapiens
MTPPRLFWVWLLVAGTQGVNDGDMRLADGGATNQGRVEIFYRGQWGTVCDNLWDLTDASVVCRALGFENATQALGRAAFGQGRACCLTGRLQVPGLAEEQLQARERRWCGLHQ

SEQ ID NO: 17711 - protein, 174 aa, Homo sapiens
MDCRVHMRPIGLTWVLQLTLAWILLEACGGSRPLQARSQQHHGLAADLGKGKLHLAGDPQASVPKPYLNIQDPSSQGSPLPGPCCPSEMDTTETSGPGNHPERCGVPSPECESFLEHLQRALRSRFRLRLLGVRQAQPLCEELCQAWFANCEDDITCGPTWLPLSEKRGCEPSC

SEQ ID NO: 17712 - protein, 179 aa, Homo sapiens
MSLGRLCRLLKPALLCGALAAPGLAGTMCASRDDWRCARSMHEFSAKDIDGHMVNLDKYRGFVCIVTNVASQUGKTEVNYTQLVDLHARYAECGLRILAFPCNQFGKQEPGSNEEIKEFAAGYNVKFDMFSKICVNGDDAHPLWKWMKIQPKGKGILGNSSSTRTAAWUSATDPWRSPW

SEQ ID NO: 17713 - protein, 427 aa, Homo sapiens
MAGGRPHLKRSFSIIPCFVFVEGFFCYDSTYAKPYPGPEAASRVPPALVYALVTAGPTLTILLGELARAFFPAPPSAVPVIGESTIVSGACCRFSPPVRRLVRFLGVYSFGLFTTTIFANAGQVVTGNPTPHFLSVCRPNYTALGCLPPSPDRPGPDRFVTDQGACAGSPSLVAAARRAFPCKDAALCAYAVTYTAMYVTLVFRVKGSRLVKPSLCLALLCPAFLVGVVRVAEYRNHWSDVLAGFLTGAAIATFLVTCVVHNFQSRPPSGRRLSPWEDLGQAPTMDSPLEKLSVAQEPEVCRPHSTPARLTPSKSQNCARRGHLIPSCVSSRAPAMCSSPRVPRPRLRSEPTPLPLPLPLPAPTPSQGPSPSSPGPGGPGGGGGRGRKLLLPTPLLRDLYTLSGLYPSPFHRDNFSPYLFASRDHLL

SEQ ID NO: 17714 - protein, 218 aa, Homo sapiens
MIPLLLAALLCVPAGALTCYGDSGQPVDWFVVYKLPALRGSGEAAQRGLQYKYLDESSGGWRDGRALINSPEGAVGRSLQPLYRSNTSQLAFLLYNDQPPQPSKAQDSSMRGHTKGKQLTYTYPWVYNYQLEGIFAQEFPDLENVVKGHHVSQEPWNSSITLTSQAGAVFQSFAKFSKFGDDLYSGWLAAALGTNLQVQFWHKTVGILPSNCSDIWQV

SEQ ID NO: 17715 - protein, 410 aa, Homo sapiens
MPTTIEREFEELDTQRRWQPLYLEIRNESHDYPHRVAKFPENRNRNRYRDVSPYDHSRVKLQNAENDYINASLVDIEEAQRSYILTQGPLPNTCCHFWLMVWQQKTKAVVMLNRIVEKESVKCAQYWPTDDQEMLFKETGFSVKLLSEDVKSYYTVHLLQLENINYIENLWITLYLKLLMLDVKRSLKSGETRTISHFHYTTWPDFGVPESPASFLNFLFKVRESGSLNPDHGPAVIHCSAGIGRSGTFSLVDTCLVLMEKGDDINIKQVLLNMRKYRMGLIQTPDQLRFSYMAIIEGAKCIKGDSSIQKRWKELSKEDLSPAFDHSPNKIMTEKYNGNRIGLEEEKLTGDRCTGLSSKMQDTMEENSESALRKRIREDRKATTAQKVQQMKQRLNENERKRKRPRLTDT

SEQ ID NO: 17716 - protein, 138 aa, Homo sapiens
MYVWPCAVVLAQYLWFHRRSLPGKAILEIGAGVSLPGILAAKCGAEVILSDSSELPHCLEVCRQSCQMNNLPHLQVVGLTWGHISWDLLALPPQDIILASDVFFEPEDFEDILATIYFLMHKNPKVQLWSTYQVRRQC

SEQ ID NO: 17717 - protein, 430 aa, Homo sapiens
MQRSRAGADEAALLLAGLALRELEPGCGSPGRGRRGPRPGPGDEAAPALGRRGKGSGGPEAGADGLSRGERGPRRAAVPELSAQPAGSPRASLAGSDGGGGGGSARSSGISLGYDQRHGSPRSGRSDPRPGPGPPSVGSARSSVSSLGSRGSAGAYADFLPPGACPAPARSPEPAGPAPFPLPALPLPPGREGGPSAAERRLEALTRELERALEARTARDYFGICIKCGLGIYGAQQACQAMGSLYHTDCFTCDSCGRRLRGKAFYNVGEKVYCQEDFLYSGFQQTADKCSVCGHLIMEMILQALGKSYHPGCFRCSVCNECLDGVPFTVDVENNIYCVRDYHTVFAPKCASCARPILPAQGCETTIRVVSMDRDYHVACYHCEDCGLQLSGEEGRRCYPLAGHLLCRRCHLRRLQPGPLPSPTVHVTEL

SEQ ID NO: 17718 - protein, 111 aa, Homo sapiens
MWTLVSWVALTAGLVAGTRCPDGQFCPVACCLDPGGASYSCCRPLLDKWPTTLSRHLGGPCQVDAHCSAGHSCIFTVSGTSSCCPFPEAVACGDGHHCCPRGFHCSADGRS

SEQ ID NO: 17719 - protein, 1614 aa, Homo sapiens
MSTPDPPLGGTPRPGPSPGPGPSPGAMLGPSPGPSPGSAHSMMGPSPGPPSAGHPIPTQGPGGYPQDNMHQMHKPMESMHEKGMSDDPRYNQMKGMGMRSGGHAGMGPPPSPMDQHSQGYPSPLGGSEHASSPVPASGPSSGPQMSSGPGGAPLDGADPQALGQQNRGPTPFNQNQLHQLRAQIMAYKMLARGQPLPDHLQMAVQGKRPMPGMQQQMPTLPPPSVSATGPGPGPGPGPGPGPGPAPPNYSRPHGMGGPNMPPPGPSGVPPGMPGQPPGGPPKPWPEGPMANAAAPTSTPQKLIPPQPTGRPSPAPPAVPPAASPVMPPQTQSPGQPAQPAPMVPLHQKQSRITPIQKPRGLDPVEILQEREYRLQARIAHRIQELENLPGSLAGDLRTKATIELKALRLLNFQRQLRQEVVVCMRRDTALETALNAKAYKRSKRQSLREARITEKLEKQQKIEQERKRRQKHQEYLNSILQHAKDFKEYHRSVTGKIQKLTKAVATYHANTEREQKKENERIEKERMRRLMAEDEEGYRKLIDQKKDKRLAYLLQQTDEYVANLTELVRQHKAAQVAKEKKKKKKKKKAENAEGQTPAIGPDGEPLDETSQMSDLPVKVIHVESGKILTGTDAPKAGQLEAWLEMNPGYEVAPRSDSEESGSEEEEEEEEEEQPQAAQPPTLPVEEKKKIPDPDSDDVSEVDARHIIENAKQDVDDEYGVSQALARGLQSYYAVAHAVTERVDKQSALMVNGVLKQYQIKGLEWLVSLYNNNLNGILADEMGLGKTIQTIALITYLMEHKRINGPFLIIVPLSTLSNWAYEFDKWAPSVVKVSYKGSPAARRAFVPQLRSGKFNVLLTTYEYIIKDKHILAKIRWKYMIVDEGHRMKNHHCKLTQVLNTHYVAPRRLLLTGTPLQNKLPELWALLNFLLPTIFKSCSTFEQWFNAPFAMTGEKVDLNEEETILIIRRLHKVLRPFLLRRLKKEVEAQLPEKVEYVIKCDMSALQRVLYRHMQAKGVLLTDGSEKDKKGKGGTKTLMNTIMQLRKICNHPYMFQHIEESFSEHLGFTGGIVQGLDLYRASGKFELLDRILPKLRATNHKVLLFCQMTSLMTIMEDYFAYRGFKYLRLDGTTKAEDRGMLLKTFNEPGSEYFIFLLSTRAGGLGLNLQSADTVIIFDSDWNPHQDLQAQDRAHRIGQQNEVRVLRLCTVNSVEEKILAAAKYKLNVDQKVIQAGMFDQKSSSHERRAFLQAILEHEEQDEEEDEVPDDETVNQMIARHEEEFDLFMRMDLDRRREEARNPKRKPRLMEEDELPSWIIKDDAEVERLTCEEEEEKMFGRGSRHRKEVDYSDSLTEKQWLKAIEEGTLEEIEEEVRQKKSSRKRKRDSDAGSSTPTTSTRSRDKDDESKKQKKRGRPPAEKLSPNPPNLTKKMKKIVDAVIKYKDSSSGRQLSEVFIQLPSRKELPEYYELIRKPVDFKKIKERIRNHKYRSLNDLEKDVMLLCQNAQTFNLEGSLIYEDSIVLQSVFTSVRQKIEKEDDSEGEESEEEEEGEEEGSESESRSVKVKIKLGRKEKAQDRLKGGRRRPSRGSRAKPVVSDDDSEEEQEEDRSGSGSEED

SEQ ID NO: 17720 - protein, 188 aa, Homo sapiens
MADQIPLYPVRSAAAAAANRKRAAYYSAAGPRPGADRHSRYQLEDESAHLDEMPLMMSEEGFENEESDYHTLPRARIMQRKRGLEWFVCDGWKFLCTSCCGWLINICRRKKELKARTVWLGCPEKCEEKHPRNSIKNQKYNVFTFIPGVLYEQFKFFLNLYFLVISCSQFVPALKIGYLYTYWAPLMT

SEQ ID NO: 17721 - protein, 722 aa, Homo sapiens
MAQWNQLQQLDTRYLEQLHQLYSDSFPMELRQFLAPWIESQDWAYAASKESHATLVFHNLLGEIDQQYSRFLQESNVLYQHNLRRIKQFLQSRYLEKPMEIARIVARCLWEESRLLQTAATAAQQGGQANHPTAAVVTEKQQMLEQHLQDVRKRVQDLEQKMKVVENLQDDFDFNYKTLKSQGDMQDLNGNNQSVTRQKMQQLEQMLTALDQMRRSIVSELAGLLSAMEYVQKTLTDEELADWKRRQQIACIGGPPNICLDRLENWITSLAESQLQTRQQIKKLEELQQKVSYKGDPIVQHRPMLEERIVELFRNLMKSAFVVERQPCMPMHPDRPLVIKTGVQFTTKVRLLVKFPELNYQLKIKVCIDKDSGDVAALRGSRKFNILGTNTKVMNMEESNNGSLSAEFKHLTLREQRCGNGGRANCDASLIVTEELHLITFETEVYHQGLKIDLETHSLPVVVISNICQMPNAWASILWYNMLTNNPKNVNFFTKPPIGTWDQVAEVLSWQFSSTTKRGLSIEQLTTLAEKLLGPGVNYSGCQITWAKFCKENMAGKGFSFWVWLDNIIDLVKKYILALWNEGYIMGFISKERERAILSTKPPGTFLLRFSESSKEGGVTFTWVEKDISGKTQIQSVEPYTKQQLNNMSFAEIIMGYKIMDATNILVSPLVYLYPDIPKEEAFGKYCRPESQEHPEADPGSAAPYLKTKFICVTPFIDAVWK

SEQ ID NO: 17722 - protein, 135 aa, Homo sapiens
MWTLVSWVALTAGLVAGTRCPDGQFCPVACCLDPGGASYSCCRPLLDKWPTTLSRHLGGPCQVDAHCSAGHSCIFTVSGTSSCCPFPEAVACGDGHHCCPRGFHCSADGRSCFQRSGNNSVGAIQCPDSQFECPD

SEQ ID NO: 17723 - protein, 363 aa, Homo sapiens
MAVTITLKTLQQQTFKIRMEPDETVKVLKEKIEAEKGRDAFPVAGQKLIYAGKILSDDVPIRDYRIDEKNFVVVMVTKTKAGQGTSAPPEASPTAAPESSTSFPPAPTSGMSHPPPAAREDKSPSEESAPTTSPESVSGSVPSSGSSGREEDAASTLVTGSEYETMLTEIMSMGYERERVVAALRASYNNPHRAVEYLLTGIPGSPEPEHGSVQESQVSEQPATEAAGENPLEFLRDQPQFQNMRQVIQQNPALLPALLQQLGQENPQLLQQISRHQEQFIQMLNEPPGELADISDVEGEVGAIGEEAPQMNYIQVTPQEKEAIERLKALGFPESLVIQAYFACEKNENLAANFLLSQNFDDE

SEQ ID NO: 17724 - protein, 841 aa, Homo sapiens
MAQVLHVPAPFPGTPGPASPPAFPAKDPDPPYSVETPYGYRLDLDFLKYVDDIEKGHTLRRVAVQRRPRLSSLPRGPGSWWTSTESLCSNASGDSRHSAYSYCGRGFYPQYGALETRGGFNPRVERTLLDARRRLEDQAATPTGLGSLTPSAAGSTASLVGVGLPPPTPRSSGLSTPVPPSAGHLAHVREQMAGALRKLRQLEEQVKLIPVLQVKLSVLQEEKRQLTVQLKSQKFLGHPTAGRGRSELCLDLPDPPEDPVALETRSVGTWVRERDLGMPDGEAALAAKVAVLETQLKKALQELQAAQARQADPQPQAWPPPDSPVRVDTVRVVEGPREVEVVASTAAGAPAQRAQSLEPYGTGLRALAMPGRPESPPVFRSQEVVETMCPVPAAATSNVHMVKKISITERSCDGAAGLPEVPAESSSSPPGSEVASLTQPEKSTGRVPTQEPTHREPTRQAASQESEEAGGTGGPPAGVRSIMKRKEEVADPTAHRRSLQFVGVNGGYESSSEDSSTAENISDNDSTENEAPEPRERVPSVAEAPQLRPAGTAAAKTSRQECQLSRESQHIPTAEGASGSNTEEEIRMELSPDLISACLALEKYLDNPNALTERELKVAYTTVLQEWLRLACRSDAHPELVRRHLVTFRAMSARLLDYVVNIADSNGNTALHYSVSHANFPVVQQLLDSGVCKVDKQNRAGYSPIMLTALATLKTQDDIETVLQLFRLGNINAKASQAGQTALMLAVSHGRVDVVKALLACEADVNVQDDDGSTALMCACEHGHKEIAGLLLAVPSCDISLTDRDGSTALMVALDAGQSEIASMLYSRMNIKCSVSLNPAG

SEQ ID NO: 17725 - protein, 123 aa, Homo sapiens
MAAQIPIVATTSTPGIVRNSKKRPASPSHNGSSGGGYGASKKKKASASSFAQVPGLGEPGGEGTDYLKITWRRSLIQAQAPRKGHARTQGEGQLSVSQKEPSLETKSARTFILDFPAFRDVKK

SEQ ID NO: 17726 - protein, 710 aa, Homo sapiens
MADAKYVLCRWEKRLWPAKVLARTATSTKNKRRKEYFLAVQILSLEEKIKVKSTEVEILEKSQIEAIASSLASQNEVPAAPLEELAYRRSLRVALDVLSEGSIWSQESSAGTGRADRSLRGKPMEHVSSPCDSNSSSLPRGDVLGSSRPHRRRPCVQQSLSSSFTCEKDPECKVDHKKGLRKSENPRGPLVLPAGGGAQDESGSRIHHKNWTLASKRGGNSAQKASLCLNGSSLSEDDTERDMGSKGGSWAAPSLPSGVREDDPCANAEGHDPGLPLGSLTAPPAPEPSACSEPGECPAKKRPRLDGSQRPPAVQLEPMAAGAAPSPGPGPGPRESVTPRSTARLGPPPSHASADATRCLPCPDSQKLEKECQSSEESMGSNSMRSILEEDEEDEEPPRVLLYHEPRSFEVGMLVWHKHKKYPFWPAVVKSVRQRDKKASVLYIEGHMNPKMKGFTVSLKSLKHFDCKEKQTLLNQAREDFNQDIGWCVSLITDYRVRLGCGSFAGSFLEYYAADISYPVRKSIQQDVLGTKLPQLSKGSPEEPVVGCPLGQRQPCRKMLPDRSRAARDRANQKLVEYIVKAKGAESHLRAILKSRKPSRWLQTFLSSSQYVTCVETYLEDEGQLDLVVKYLQGVYQEVGAKVLQRTNGDRIRFILDVLLPEAIICAISAVDEVDYKTAEEKYIKGPSLSYREKEIFDNQLLEERNRRRR

SEQ ID NO: 17727 - protein, 469 aa, Homo sapiens
MLASPATETTVLMSQTEADLALRPPPPLGTAGQPRLGPPPRRARRFSGKAEPRPRSSRLSRRSSVDLGLLSSWSLPASPAPDPPDPPDSAGPGPARSPPPSSKEPPEGTWTEGAPVKAAEDSARPELPDSAVGPGSREPLRVPEAVALERRREQEEKEDMETQAVATSPDGRYLKFDIEIGRGSFKTVYRGLDTDTTVEVAWCELQTRKLSRAERQRFSEEVEMLKGLQHPNIVRFYDSWKSVLRGQVCIVLVTELMTSGTLKTYLRRFREMKPRVLQRWSRQILRGLHFLHSRVPPILHRDLKCDNVFITGPTGSVKIGDLGLATLKRASFAKSVIGTPEFMAPEMYEEKYDEAVDVYAFGMCMLEMATSEYPYSECQNAAQIYRKVTSVHHPGPPGPRLLPRGARCARGTSGGGRRREAGPQALAAHGGRAARGAPTGQPGHRVPVPAGPGRGRGGGTGDGGSGLGL

SEQ ID NO: 17728 - protein, 286 aa, Homo sapiens
MEPPDAPAQARGAPRLLLLAVLLAAHPDAQAEVRLSVPPLVEVMRGKSVILDCTPTGTHDHYMLEWFLVTMHDTRGRSPPYQLDSQGRLVLAEAQVGDERDYVCVVRAGAAGTAEATARLNVFAKPEATEVSPNKGTLSVMEDSAQEIATCNSRNGNPAPKITWYRNGQRLEVPVEMNPEGYMTSRTVREASGLLSLTSTLYLRLRKDDRDASFHCAAHYSLPEGRHGRLDSPTFHLTLHYPTEHVQFWVGSPSTPAGWVREGDTVQLLCRGDGSPSPEYTLFRLQ

SEQ ID NO: 17729 - protein, 109 aa, Homo sapiens
MARYMLLLLLAVWVLTGELWPGAEARAAPYGVRLCGREFIRAVIFTCGGSRWRRSDILAHEAMEKNIEAPRSKFTCSRLEKLDSCSVSPAPKCTRSSINKERYLPGCRC

SEQ ID NO: 17730 - protein, 298 aa, Homo sapiens
MKSVLIGEFLEKVRQKKKRDITVLDLGCGKGGDLLKWKKGRINKLVCTDIADVSVKQCQQRYEDMKNRRDSEYIFSAEFITADSSKELLIDKFRDPQMCFDICSCQFVCHYSFESYEQADMMLRNACERLSPGGYFIGTTPNSFELIRRLEASETESFGNEIYTVKFQKKGDYPLFGCKYDFNLEGVVDVPEFLVYFPLLNEMAKKYNMKLVYKKTFLEFYEEKIKNNENKMLLKRMQALEPYPANESSKLVSEKVDDYEHAAKYMKNSQVRLPLGTLSKSEWEATSIYLVFAFEKQQ

SEQ ID NO: 17731 - protein, 90 aa, Homo sapiens
MAVFRSGLLVLTTPLASLAPRLASILTSAARLVNHTLYVHLQPGMSLEGPAQPQSSPVQATFEVLDFITHLYAGADVHRHLDVRILLTNI

SEQ ID NO: 17732 - protein, 127 aa, Homo sapiens
MSLLRNRLQALPALCLCVLVLACIGACQPEAQEGTLSPPPKLKMSRWSLVRGRMKELLETVVNRTRDGWQWFWSPSTFRGFMQTYYDDHLRDLGPLTKAWFLESKDSLLKKTHSLCPRLVCGDKDQG

SEQ ID NO: 17733 - protein, 230 aa, Homo sapiens
MAAPWASLRLVAPMWNGRIRGIHRLGAAVAPEGNQKKKRTILQFLTNYFYDVEALRDYLLQREMYKVHEKNRFRDKEWIRPDKYGHFSQEFWNFCEVPVEAVDAGDCDINYEGLDNLLRLKELQSLSLQRCCHVDDWCLSRLYPLADSLQELSLAGCPRISERGLACLHHLQNLRRLDISDLPAVSNPGLTQILVEEMLPNCEVVGVDWAEGLKSGPEEQPRDTASPVPA

SEQ ID NO: 17734 - protein, 35 aa, Homo sapiens
MSRYLLPLSALGTVAGAAVLLKRQHHPGLPRHGEV

SEQ ID NO: 17735 - protein, 259 aa, Homo sapiens
MTPPRLFWVWLLVAGTQGVNDGDMRLADGGATNQGRVEIFYRGQWGTVCDNLWDLTDASVVCRALGFENATQALGRAAFGQGSGPIMLDEVQCTGTEASLADCKSLGWLKSNCRHERDAGVVCTNETRSTHTLDLSRELSEALGQIFDSQRGCDLSISVNVQGEDALGFCGHTVILTANLEAQALWKEPGSNVTMSVDAECVPMVRDLLRYFYSRRIDITLSSVKCFHKLASAYGARQLQGYCASLFAILLPQDPSFQM

SEQ ID NO: 17736 - protein, 592 aa, Homo sapiens
MCMYLFFLDFSIVGSGLRSGVWVSGSSSQAICVTPVRVESSEATAISQEKSQEEERMAVGLLKAMYQELVTFRDVAVDFSQEEWDCLDSSQRHLYSNVMLENYRILVSLGLCFSKPSVILLLEQGKAPWMVKRELTKGLCSGWEPICETEELTPKQDFYEEHQSQKIIETLTSYNLEYSSLREEWKCEGYFERQPGNQKACFKEEIITHEEPLFDEREQEYKSWGSFHQNPLLCTQKIIPKEEKVHKHDTQKRSFKKNLMAIKPKSVCAEKKLLKCNDCEKVFSQSSSLTLHQRIHTGEKPYKCIECGKAFSQRSNLVQHQRIHTGEKPYECKECRKAFSQNAHLVQHLRVHTGEKPYECKVCRKAFSQFAYLAQHQRVHTGEKPYECIECGKAFSNRSSIAQHQRVHTGEKPYECNVCGKAFSLRAYLTVHQRIHTGERPYECKECGKAFSQNSHLAQHQRIHTGEKPYKCQECRKAFSQIAYLAQHQRVHTGEKPYECIECGKAFSNDSSLTQHQRVHTGEKPYECTVCGKAFSYCGSLAQHQRIHTGERPYECKECKKTFRQHAHLAHHQRIHIGESLSPPNPVNHQVL

SEQ ID NO: 17737 - protein, 130 aa, Homo sapiens
MDHLGASLWPQVGSLCLLLAGAAWAPPPNLPDPKFESKAALLAARGPEELLCFTERLEDLVCFWEEAASAGVGPGNYSFSYQLDRGHWRETCGSRAGTPSMGRGANTPAITAGTRPQTSGWDNNASKSRG

SEQ ID NO: 17738 - protein, 951 aa, Homo sapiens
MRVLACLLAALVGIQAVERLRLADGPHGCAGRLEVWHGGRWGTVCDDGWDLRDAAVACRQLGCGGALAAPGGAFFGEGAGPVWLSELACRGNEGQLGLCHHRGWKAHICSHEEDAGVVCAGQRVANSRDDSTSPLDGAPWPGLLLELSPSTEEPLVTHAPRPAGNPQNASRKKSPRPKQAKSTRAPLLTTGAPRQERLRLVSGPHRCAGRLEVWHGGRWGTVCDDGWDLRDAAVACRELGCGGALAAPGGARFGPGAGPVWMDDVGCGGGEQALRDCPRSPWGRSNCDHSEDAGLVCTGPAPRLRLADGPHGCAGRLEVWHGGRWGSVCDDAWDLRDAAVACRELGCGGALAAPGGAFFGEGSGPIILDDLRCRGNETALRFCPARPWGQHDCHHREDAGAVCDGMPLGYVPPTAPTDSNNSTPREAASRPPSTMTSQAPGTAGVSPPPASPTVLWEPGPEAGSPQLRLVAGPSKCSGRLEVWHDQRWGTVCDDSWDMRDSAVVCRELGCGGPQQPDPAAGRFGWGAGPIWLDDVGCVGTEASLSDCPAAPWGKHNCAHNEDVGVTCTGPPGLDSISDPFSWSWIPGLGRDRDAWLPGELATKPSASVTASVLEKTTTKAPGKMPKSTKKWVTKNAKRPTTQPPVMPTTKHSRAQSPPDLTSQTTAALTTEASRRPTSEFTRRPTTEAPQRWTSHTTATLTPQAPRERTTKTMAMLTTQGPQEMTSESTIKSIPQASLEPSAEIPEGSPESPKDPAPSPSVSTTGESGLFRVRLADGPNRCAGRLEVWHAGRWGTVCDDNWDLRDATVACWELGCGKVRPRVGKTHYGPGTGPIWLDDMGCKGSEASLSDCPSGAWGKHNCDHEEDVGLTCTGYTDYDDYPPWTWDPTSREDLAKGTTTAGVPGHTLPWRTTRRPGSSSPAIRRLPDTEPEAGAPRGDAPRSRTARVAAPP

SEQ ID NO: 17739 - protein, 1621 aa, Homo sapiens
MRKRKISVCQQTWALLCKNFLKKWRMKRESLMEWLNSLLLLLCLYIYPHSHQVNDFSSLLTMDLGRVDTFNESRFSVVYTPVTNTTQQIMNKVASTPFLAGKEVLGLPDEESIKEFTANYPEEIVRVTFTNTYSYHLKFLLGHGMPAKKEHKDHTAHCYETNEDVYCEVSVFWKEGFVALQAAINAAIIEITTNHSVMEELMSVTGKNMKMHSFIGQSGVITDLYLFSCIISFSSFIYYASVNVTRERKRMKALMTMMGLRDSAFWLSWGLLYAGFIFIMALFLALVIRSTQFIILSGFMVVFSLFLLYGLSLVALAFLMSILVKKSFLTGLVVFLLTVFWGCLGFTSLYRHLPASLEWILSLLSPFAFMLGMAQLLHLDYDLNSNAFPHPSDGSNLIVATNFMLAFDTCLYLALAIYFEKILPNEYGHRRPPLFFLKSSFWSQTQKTDHVALEDEMDADPSFHDSFEQAPPEFQGKEAIRIRNVTKEYKGKPDKIEALKDLVFDIYEGQITAILGHSGAGKSTLLNILSGLSVPTKGSVTIYNNKLSEMADLENLSKLTGVCPQSNVQFDFLTVRENLRLFAKIKGILPQEVDKEIQRVLLELEMKNIQDVLAQNLSGGQKRKLTFGIAILGDPQIFLLDEPTAGLDPFSRHQVWNLLKERKTDRVILFSTQFMDEADILADRKVFLSQGKLKCAGSSLFLKKKWGIGYHLSLQLNEICVEENITSLVKQHIPDAKLSAKSEGKLIYTLPLERTNKFPELYKDLDSYPDLGIENYGVSMTTLNEVFLKLEGKSTINESDIAILGEVQAEKADDTERLVEMEQVLSSLNKMRKTIGGVALWRQQICAIARVRLLKLKHERKALLALLLILMAGFCPLLVEYTMVKIYQNSYTWELSPHLYFLAPGQQPHDPLTQLLIINKTGASIDDFIQSVEHQNIALEVDAFGTRNGTDDPSYNGAITVCCNEKNYSFSLACNAKRLNCFPVLMDIVSNGLLGMVKPSVHIRTERSTFLENGQDNPIGFLAYIMFWLVLTSSCPPYIAMSSIDDYKNRARSQLRISGLSPSAYWFGQALVDVSLYFLVFVFIYLMSYISNFEDMLLTIIHIIQIPCAVGYSFSLIFMTYVISFIFRKGRKNSGIWSFCFYVVTVFSVAGFAFSIFESDIPFIFTFLIPPATMIGCLFLSSHLLFSSLFSEERMDVQPFLVFLIPFLHFIIFLFTLRCLEWKFGKKSMRKDPFFRISPRSSDVCQNPEEPEGEDEDVQMERVRTANALNSTNFDEKPVIIASCLRKEYAGKRKGCFSKRKNKIATRNVSFCVRKGEVLGLLGHNGAGKSTSIKVITGDTKPTAGQVLLKGSGGGDALEFLGYCPQENALWPNLTVRQHLEVYAAVKGLRKGDAEVAITRLVDALKLQDQLKSPVKTLSEGIKRKLCFVLSILGNPSVVLLDEPSTGMDPEGQQQMWQAIRATFRNTERGALLTTHYMAEAEAVCDRVAIMVSGRLRCIGSIQHLKSKFGKDYLLEMKVKNLAQVEPLHAEILRLFPQAARQERYSSLMVYKLPVEDVQPLAQAFFKLEKVKQSFDLEEYSLSQSTLEQVFLELSKEQELGDFEEDFDPSVKWKLLPQEEP

SEQ ID NO: 17740 - protein, 888 aa, Homo sapiens
MQTPRASPPRPALLLLLLLLGGAHGLFPEEPPPLSVAPRDYLNHYPVFVGSGPGRLTPAEGADDLNIQRVLRVNRTLFIGDRDNLYRVELEPPTSTELRYQRKLTWRSNPSDINVCRMKGKQEGECRNFVKVLLLRDESTLFVCGSNAFNPVCANYSIDTLQPVGDNISGMARCPYDPKHANVALFSDGMLFTATVTDFLAIDAVIYRSLGDRPTLRTVKHDSKWFKEPYFVHAVEWGSHVYFFFREIAMEFNYLEKVVVSRVARVCKNDVGGSPRVLEKQWTSFLKARLNCSVPGDSHFYFNVLQAVTGVVSLGGRPVVLAVFSTPSNSIPGSAVCAFDLTQVAAVFEGRFREQKSPESIWTPVPEDQVPRPRPGCCAAPGMQYNASSALPDDILNFVKTHPLMDEAVPSLGHAPWILRTLMRHQLTRVAVDVGAGPWGNQTVVFLGSEAGTVLKFLVRPNASTSGTSGLSVFLEEFETYRPDRCGRPGGGETGQRLLSLELDAASGGLLAAFPRCVVRVPVARCQQYSGCMKNCIGSQDPYCGWAPDGSCIFLSPGTRAAFEQDVSGASTSGLGDCTGLLRASLSEDRAGLVSVNLLVTSSVAAFVVGAVVSGFSVGWFVGLRERRELARRKDKEAILAHGAGEAVLSVSRLGERRAQGPGGRGGGGGGGAGVPPEALLAPLMQNGWAKATLLQGGPHDLDSGLLPTPEQTPLPQKRLPTPHPHPHALGPRAWDHGHPLLPASASSSLLLLAPARAPEQPPAPGEPTPDGRLYAARPGRASHGDFPLTPHASPDRRRVVSAPTGPLDPASAADGLPRPWSPPPTGSLRRPLGPHAPPAATLRRTHTFNSGEARPGDRHRGCHARPGTDLAHLLPYGGADRTAPPVP

SEQ ID NO: 17741 - protein, 454 aa, Homo sapiens
MAVLGVQLVVTLLTATLMHRLAPHCSFARWLLCNGSLFRYKHPSEEELRALAGKPRPRGRKERWANGLSEEKPLSVPRDAPFQLETCPLTTVDALEAYYYMLGPAKETNIAVFWCLLTVTFSIKMFLTVTRLYFSAEEGGERSVCLTFAFLFLLLAMLVQVVREETLELGLEPGLASMTQNLEPLLKKQGWDWALPVAKLAIRVGLAVVGSVLGAFLTFPGLRLAQTHRDALTMSEDRPMLQFLLHTSFLSPLFILWLWTKPIARDFLHQPPFGETRFSLLSDSAFDSGRLWLLVVLCLLRLAVTRPHLQAYLCLAKARVEQLRREAGRIEAREIQQRVVRVYCYVTVVSLQYLTPLILTLNCTLLLKTLGGYSWGLGPAPLLSPDPSSASAAPIGSGEDEVQQTAARIAGALGGLLTPLFLRGVLAYLIWWTAACQLLASLFGLYFHQHLAGS

SEQ ID NO: 17742 - protein, 90 aa, Homo sapiens
MVFVRRPWPALTTVLLALLVCLGALVDAYPIKPEAPREDASPEELNRYYASLRHYLNLVTRQRYGKRDGPDTLLSKTFFPDGEDRPVRSR

SEQ ID NO: 17743 - protein, 83 aa, Homo sapiens
MFESCSGFSGFCASPIEESHGALISSCNSRTMTDGLVTFRDVAIDFSQEEWECLDPAQRDLYVDVMLENYSNLVSLGKVICLK

SEQ ID NO: 17744 - protein, 265 aa, Homo sapiens
MTTSPILQLLLRLSLCGLLLQRAETGSKGQTAGELYQRWERYRRECQETLAAAEPPSGLACNGSFDMYVCWDYAAPNATARASCPWYLPWHHHVAAGFVLRQCGSDGQWGLWRDHTQCENPEKNEAFLDQRLILERLQVMYTVGYSLSLATLLLALLILSLFRRLHCTRNYIHINLFTSFMLRAAAILSRDRLLPRPGPYLGDQALALWNQALAACRTAQIVTQYCVGANYTWLLVEGVYLHSLLVLVGGSEEGHFRYYLLLGWD

SEQ ID NO: 17745 - protein, 129 aa, Homo sapiens
MRLFLSLPVLVVVLSIVLEGPAPAQGTPDVSSALDKLKEFGNTLEDKARELISRIKQSELSAKMRLEPFPGHGRAGVCFWVEPWQMVQDEQIEKKTSPGEADNIPLVTQLDLKGVVFRDISESEGETQD

SEQ ID NO: 17746 - protein, 574 aa, Homo sapiens
MWPSLLLLLLLPGPPPVAGLEDAAFPHLGESLQPLPRACPLRCSCPRVDTVDCDGLDLRVFPDNITRAAQHLSLQNNQLQELPYNELSRLSGLRTLNLHNNLISSEGLPDEAFESLTQLQHLCVAHNKLSVAPQFLPRSLRVADLAANQVMEIFPLTFGEKPALRSVYLHNNQLSNAGLPPDAFRGSEAIATLSLSNNQLSYLPPSLPPSLERLHLQNNLISKVPRGALSRQTQLRELYLQHNQLTDSGLDATTFSKLHSLEYLDLSHNQLTTVPAGLPRTLAILHLGRNRIRQVEAARLHGARGLRYLLLQHNQLGSSGLPAGALRPLRGLHTLHLYGNGLDRVPPALPRRLRALVLPHNHVAALGARDLVATPGLTELNLAYNRLASARVHHRAFRRLRALRSLDLAGNQLTRLPMGLPTGLRTLQLQRNQLRMLEPEPLAGLDQLRELSLAHNRLRVGDIGPGTWHELQALQMLDLSHNELSFVPPDLPEALEELHLEGNRIGHVGPEAFLSTPRLRALFLRANRLHMTSIAAEAFLGLPNLRVVDTAGNPEQVLIRLPPTTPRGPRAGGP

SEQ ID NO: 17747 - protein, 1501 aa, Homo sapiens
MAPTWGPGMVSVVGPMGLLVVLLVGGCAAEEPPRFIKEPKDQIGVSGGVASFVCQATGDPKPRVTWNKKGKKVNSQRFETIEFDESAGAVLRIQPLRTPRDENVYECVAQNSVGEITVHAKLTVLREDQLPSGFPNIDMGPQLKVVERTRTATMLCAASGNPDPEITWFKDFLPVDPSASNGRIKQLRSGALQIESSEETDQGKYECVATNSAGVRYSSPANLYVRVRRVAPRFSILPMSHEIMPGGNVNITCVAVGSPMPYVKWMQGAEDLTPEDDMPVGRNVLELTDVKDSANYTCVAMSSLGVIEAVAQITVKSLPKAPGTPMVTENTATSITITWDSGNPDPVSYYVIEYKSKSQDGPYQIKEDITTTRYSIGGLSPNSEYEIWVSAVNSIGQGPPSESVVTRTGEQAPASAPRNVQARMLSATTMIVQWEEPVEPNGLIRGYRVYYTMEPEHPVGNWQKHNVDDSLLTTVGSLLEDETYTVRVLAFTSVGDGPLSDPIQVKTQQGVPGQPMNLRAEARSETSITLSWSPPRQESIIKYELLFREGDHGREVGRTFDPTTSYVVEDLKPNTEYAFRLAARSPQGLGAFTPVVRQRTLQSISPKNFKVKMIMKTSVLLSWEFPDNYNSPTPYKIQYNGLTLDVDGRTTKKLITHLKPHTFYNFVLTNRGSSLGGLQQTVTAWTAFNLLNGKPSVAPKPDADGFIMVYLPDGQSPVPVQSYFIVMVPLRKSRGGQFLTPLGSPEDMDLEELIQDISRLQRRSLRHSRQLEVPRPYIAARFSVLPPTFHPGDQKQYGGFDNRGLEPGHRYVLFVLAVLQKSEPTFAASPFSDPFQLDNPDPQPIVDGEEGLIWVIGPVLAVVFIICIVIAILLYKNKPDSKRKDSEPRTKCLLNNADLAPHHPKDPVEMRRINFQTPGMLSHPPIPIADMAEHTERLKANDSLKLSQEYESIDPGQQFTWEHSNLEVNKPKNRYANVIAYDHSRVILQPIEGIMGSDYINANYVDGYRCQNAYIATQGPLPETFGDFWRMVWEQRSATIVMMTRLEEKSRIKCDQYWPNRGTETYGFIQVTLLDTIELATFCVRTFSLHKNGSSEKREVRQFQFTAWPDHGVPEYPTPFLAFLRRVKTCNPPDAGPIVVHCSAGVGRTGCFIVIDAMLERIKPEKTVDVYGHVTLMRSQRNYMVQTEDQYSFIHEALLEAVGCGNTEVPARSLYAYIQKLAQVEPGEHVTGMELEFKRLANSKAHTSRFISANLPCNKFKNRLVNIMPYESTRVCLQPIRGVEGSDYINASFIDGYRQQKAYIATQGPLAETTEDFWRMLWENNSTIVVMLTKLREMGREKCHQYWPAERSARYQYFVVDPMAEYNMPQYILREFKVTDARDGQSRTVRQFQFTDWPEQGVPKSGEGFIDFIGQVHKTKEQFGQDGPISVHCSAGVGRTGVFITLSIVLERMRYEGVVDIFQTVKMLRTQRPAMVQTEDEYQFCYQAALEYLGSFDHYAT

SEQ ID NO: 17748 - protein, 1162 aa, Homo sapiens
MASLLPLLCLCVVAAHLAGARDATPTEEPMATALGLERRSVYTGQPSPALEDWEARAVPAEASEWTSWFNVDHPGGDGDFESLAAIRFYYGPARVCPRPLALEARTTDWALPSAVGERVHLNPTRGFWCLNREQPRGRRCSNYHVRFRCPLEASWGAWGPWGPCSGSCGPGRRLRRRHCPSPAGDACPGRPLEAQKCVRPRCPGCSLDTCECPDHILLGSVVTPSGQPLLGARVSLRDQPGTVATSDAHGTFRVPGVCADSRANIRAQMDGFSAGEAQAQANGSISVVTIILDKLEKPYLVKHPESRVREAGQNVTFCCKASGTPMPKKYSWFHNGTLLDRRAHGYGAHLELRGLRPDQAGIYHCKAWNEAGAVRSGTARLTVLAPGQPACDPRPREYLIKLPEDCGQPGSGPAYLDVGLCPDTRCPSLAGSSPRCGDASSRCCSVRRLERREIHCPGYVLPVKVVAECGCQKCLPPRGLVRGRVVAADSGEPLRFARILLGQEPIGFTAYQGDFTIEVPPSTQRLVVTFVDPSGEFMDAVRVLPFDPRGAGVYHEVKAMRKKAPVILHTSQSNTIPLGELEDEAPLGELVLPSGAFRRADGKPYSGPVEARVTFVDPRDLTSAASAPSDLRFVDSDGELAPLRTYGMFSVDLRAPGSAEQLQVGPVAVRVAASQIHMPGHVEALKLWSLNPETGLWEEESGFRREGSSGPRVRREERVFLVGNVEIRERRLFNLDVPERRRCFVKVRAYANDKFTPSEQVEGVVVTLVNLEPAPGFSANPRAWGRFDSAVTGPNGACLPAFCDADRPDAYTALVTATLGGEELEPAPSLPRPLPATVGVTQPYLDRLGYRRTDHDDPAFKRNGFRINLAKPRPGDPAEANGPVYPWRSLRECQGAPVTASHFRFARVEADKYEYNVVPFREGTPASWTGDLLAWWPNPQEFRACFLKVKIQGPQEYMVRSHNAGGSHPRTRGQLYGLRDARSVRDPERPGTSAACVEFKCSGMLFDQRQVDRTLVTIMPQGSCRRVAVNGLLRDYLTRHPPPVPAEDPAAFSMLAPLDPLGHNYGVYTVTDQSPRLAKEIAIGRCFDGSSDGFSREMKADAGTAVTFQCREPPAGRPSLFQRLLESPATALGDIRREMSEAAQAQARASGPLRTRRGRVRQ

SEQ ID NO: 17749 - protein, 191 aa, Homo sapiens
MWTLVSWVALTAGLVAGTRCPDGQFCPVACCLDPGGASYSCCRPLLDKWPTTLSRHLGGPCQVDAHCSAGHSCIFTVSGTSSCCPFPEIKGPCQCRFLCVPQAVACGDGHHCCPRGFHCSADGRSCFQRSGNNSVGAIQCPDSQFECPDFSTCCVMVDGSWGCCPMPQASCCEDRVHCCPHGAFCDLVHTR

SEQ ID NO: 17750 - protein, 100 aa, Homo sapiens
MDPIEKDWCDWAMISRPYSTLRDCLEHFAELFDLGFPNPLAERIIFETHQIHFANCSLVQPTFSDPPEDVLLAMIIAPICLIPFLITLVVWRSKDSEAQA

SEQ ID NO: 17751 - protein, 106 aa, Homo sapiens
MRMLLALLALSAARPSASAESHWCYEVQAESSNYPCLVPVKWGGNCQKDRQSPINIVTTKAKVDKKLGRFFFSGYDKKQTWTVQNNGHSGWNPGERGLPATGGGTV

SEQ ID NO: 17752 - protein, 145 aa, Homo sapiens [sequence omitted]

SEQ ID NO: 17753 - protein, 164 aa, Homo sapiens
MGGRVFLAFCVWLTLPGAETQDSRGCARWCPQNSSCVNATACRCNPGFSSFSEIITTPTETCDDINECATPSKVSCGKFSDCWNTEGSYDCVCSPGYEPVSGAKTFKNESENTCQDVNECTSGQNPCHSSTHCLNNVGSYQCRCRPGWQPIPGSPNGPNNTVCE

SEQ ID NO: 17754 - protein, 466 aa, Homo sapiens
MTTSPILQLLLRLSLCGLLLQRAETGSKGQTAGELYQRWERYRRECQETLAAAEPPSGLACNGSFDMYVCWDYAAPNATARASCPWYLPWHHHVAAGFVLRQCGSDGQWGLWRDHTQCENPEKNEAFLDQRLILERLQVMYTVGYSLSLATLLLALLILSLFRRLHCTRNYIHINLFTSFMLRAAAILSRDRLLPRPGPYLGDQALALWNQALAACRTAQIVTQYCVGANYTWLLVEGVYLHSLLVLVGGSEEGHFRYYLLLGWGAPALFVIPWVIVRYLYENTQCWERNEVKAIWWIIRTPILMTILINFLIFIRILGILLSKLRTRQMRCRDYRLRLARSTLTLVPLLGVHEVVFAPVTEEQARGALRFAKLGFEIFLSSFQGFLVSVLYCFINKEVQSEIRRGWHHCRLRRSLGEEQRQLPERAFRALPSGSGPGEVPTSRGLSSGTLPGPGNEASRELESYC

SEQ ID NO: 17755 - protein, 176 aa, Homo sapiens
MYVWPCAVVLAQYLWFHRRSLPGKAILEIGAGVSLPGILAAKCGAEVILSDSSELPHCLEVCRQSCQMNNLPHLQVVGLTWGHISWDLLALPPQDIILASDVFFEPEDFEDILATIYFLMHKNPKVQLWSTYQVRSADWSLEALLYKWDMKCVHIPLESFDADKEDIAESTLPGRH

SEQ ID NO: 17756 - protein, 29 aa, Homo sapiens
MRLFLSLPVLVVVLSIVLEGSGFQRHFRK

SEQ ID NO: 17757 - protein, 502 aa, Homo sapiens
MYSPYCLTQDEFHPFIEALLPHVRAFSYTWFNLQARKRKYFKKHEKRMSKDEERAVKDELLGEKPEIKQKWASRLLAKLRKDIRPEFREDFVLTITGKKPPCCVLSNPDQKGKIRRIDCLRQADKVWRLDLVMVILFKGIPLESTDGERLYKSPQCSNPGLCVQPHHIGVTIKELDLYLAYFVHTPESGQSDSSNQQGDADIKPLPNGHLSFQDCFVTSGVWNVTELVRVSQTPVATASGPNFSLADLESPSYYNINQVTLGRRSITSPPSTSTTKRPKSIDDSEMESPVDDVFYPGTGRSPAAGSSQSSGWPNDVDAGPASLKKSGKLDFCSALSSQGSSPRMAFTHHPLPVLAGVRPGSPRATASALHFPSTSIIQQSSPYFTHPTIRYHHHHGQDSLKEFVQFVCSDGSGQATGQPNGSGQGKVPGSFLLPPPPPVARPVPLPMPDSKSTSTAPDGAALTPPSPSFATTGASSANRFVSIGPRDGNFLNIPQQSQSWFL

SEQ ID NO: 17758 - protein, 150 aa, Homo sapiens
MYVWPCAVVLAQYLWFHRRSLPGKAILEIGAGVSLPGILAAKCGAEVILSDSSELPHCLEVCRQSCQMNNLPHLQVVGLTWGHISWDLLALPPQDIILASDVFFEPEDFEDILATIYFLMHKNPKVQLWSTYQVRSADWSLEALLYKWDM

SEQ ID NO: 17759 - protein, 1948 aa, Homo sapiens
MAPTWGPGMVSVVGPMGLLVVLLVGGCAAEEPPRFIKEPKDQIGVSGGVASFVCQATGDPKPRVTWNKKGKKVNSQRFETIEFDESAGAVLRIQPLRTPRDENVYECVAQNSVGEITVHAKLTVLREDQLPSGFPNIDMGPQLKVVERTRTATMLCAASGNPDPEITWFKDFLPVDPSASNGRIKQLRSETFESTPIRGALQIESSEETDQGKYECVATNSAGVRYSSPANLYVRELREVRRVAPRFSILPMSHEIMPGGNVNITCVAVGSPMPYVKWMQGAEDLTPEDDMPVGRNVLELTDVKDSANYTCVAMSSLGVIEAVAQITVKSLPKAPGTPMVTENTATSITITWDSGNPDPVSYYVIEYKSKSQDGPYQIKEDITTTRYSIGGLSPNSEYEIWVSAVNSIGQGPPSESVVTRTGEQAPASAPRNVQARMLSATTMIVQWEEPVEPNGLIRGYRVYYTMEPEHPVGNWQKHNVDDSLLTTVGSLLEDETYTVRVLAFTSVGDGPLSDPIQVKTQQGVPGQPMNLRAEARSETSITLSWSPPRQESIIKYELLFREGDHGREVGRTFDPTTSYVVEDLKPNTEYAFRLAARSPQGLGAFTPVVRQRTLQSKPSAPPQDVKCVSVRSTAILVSWRPPPPETHNGALVGYSVRYRPLGSEDPEPKEVNGIPPTTTQILLEALEKWTQYRITTVAHTEVGPGPESSPVVVRTDEDVPSAPPRKVEAEALNATAIRVLWRSPAPGRQHGQIRGYQVHYVRMEGAEARGPPRIKDVMLADAQWETDDTAEYEMVITNLQPETAYSITVAAYTMKGDGARSKPKVVVTKGAVLGRPTLSVQQTPEGSLLARWEPPAGTAEDQVLGYRLQFGREDSTPLATLEFPPSEDRYTASGVHKGATYVFRLAARSRGGLGEEAAEVLSIPEDTPRGHPQILEAAGNASAGTVLLRWLPPVPAERNGAIVKYTVAVREAGALGPARETELPAAAEPGAENALTLQGLKPDTAYDLQVRAHTRRGPGPFSPPVRYRTFLRDQVSPKNFKVKMIMKTSVLLSWEFPDNYNSPTPYKIQYNGLTLDVDGRTTKKLITHLKPHTFYNFVLTNRGSSLGGLQQTVTAWTAFNLLNGKPSVAPKPDADGFIMVYLPDGQSPVPVQSYFIVMVPLRKSRGGQFLTPLGSPEDMDLEELIQDISRLQRRSLRHSRQLEVPRPYIAARFSVLPPTFHPGDQKQYGGFDNRGLEPGHRYVLFVLAVLQKSEPTFAASPFSDPFQLDNPDPQPIVDGEEGLIWVIGPVLAVVFIICIVIAILLYKNKPDSKRKDSEPRTKCLLNNADLAPHHPKDPVEMRRINFQTPDSGLRSPLREPGFHFESMLSHPPIPIADMAEHTERLKANDSLKLSQEYESIDPGQQFTWEHSNLEVNKPKNRYANVIAYDHSRVILQPIEGIMGSDYINANYVDGYRCQNAYIATQGPLPETFGDFWRMVWEQRSATIVMMTRLEEKSRIKCDQYWPNRGTETYGFIQVTLLDTIELATFCVRTFSLHKNGSSEKREVRQFQFTAWPDHGVPEYPTPFLAFLRRVKTCNPPDAGPIVVHCSAGVGRTGCFIVIDAMLERIKPEKTVDVYGHVTLMRSQRNYMVQTEDQYSFIHEALLEAVGCGNTEVPARSLYAYIQKLAQVEPGEHVTGMELEFKRLANSKAHTSRFISANLPCNKFKNRLVNIMPYESTRVCLQPIRGVEGSDYINASFIDGYRQQKAYIATQGPLAETTEDFWRMLWENNSTIVVMLTKLREMGREKCHQYWPAERSARYQYFVVDPMAEYNMPQYILREFKVTDARDGQSRTVRQFQFTDWPEQGVPKSGEGFIDFIGQVHKTKEQFGQDGPISVHCSAGVGRTGVFITLSIVLERMRYEGVVDIFQTVKMLRTQRPAMVQTEDEYQFCYQAALEYLGSFDHYAT

SEQ ID NO: 17760 - protein, 168 aa, Homo sapiens
MLLPLLLLLPMCWAVEVKRPRGVSLTNHHFYDESKPFTCLDGSATIPFDQVNDDYCDCKDGSDEPGTAACPNGSFHCTNTGYKPLYIPSNRVNDGVCDCCDGTDEYNSGVICENTCKEKGRKERESLQQMAEVTREGFRLKKILIEDWKKAREEKQKKLIELQAGKKS

SEQ ID NO: 17761 - protein, 82 aa, Homo sapiens
MALSCTLNRYLLLMAQEHLEFRLPEIKSLLLLFGGQFASSQETYGKSPFWILSIPSEDIARNLMKRTVCAKFHFYIRTLHIK

SEQ ID NO: 17762 - protein, 436 aa, Homo sapiens
MWTLVSWVALTAGLVAGTRCPDGQFCPVACCLDPGGASYSCCRPLLDKWPTTLSRHLGGPCQVDAHCSAGHSCIFTVSGTSSCCPFPEAVACGDGHHCCPRGFHCSADGRSCFQRSGNNSVGAIQCPDSQFECPDFSTCCVMVDGSWGCCPMPQAVCCEDHIHCCPAGFTCDTQKGTCEQGPHQVPWMEKAPAHLSLPDPQALKRDVPCDNVSSCPSSDTCCQLTSGEWGCCPIPEAVCCSDHQHCCPQGYTCVAEGQCQRGSEIVAGLEKMPARRASLSHPRDIGCDQHTSCPVGQTCCPSLGGSWACCQLPHAVCCEDRQHCCPAGYTCNVKARSCEKEVVSAQPATFLARSPHVGVKDVECGEGHFCHDNQTCCRDNRQGWACCPYRQGVCCADRRHCCPAGFRCAARGTKCLRREAPRWDAPLRDPALRQLL

SEQ ID NO: 17763 - protein, 130 aa, Homo sapiens
MLLWPLLLLLLLLPTLALLRQQRSQDARLSWLAGLQHRVAWGALVWAATWQRRRLEQSTLHVHQSQQQALRWCLQGAQRPHCSLRRSTDISTFRNHLPLTKASQTQQEDSGEQPLPPTSNQDLGEASLQA

SEQ ID NO: 17764 - protein, 191 aa, Homo sapiens
MMAAGAALALALWLLMPPVEVGGAGPPPIQDGEFTFLLPAGRKQCFYQSAPANASLETEYQVIGGAGLDVDFTLESPQGVLLVSESRKADGVHTTISEKLVFFELIFDSLQDDEEVEGWAEAVEPEEMLDVKMEDIKESIETMRTRLERSIQMLTLLRAFEARDRNLQEGNLERVNFWSAVNVAVLLLVAV

SEQ ID NO: 17765 - protein, 87 aa, Homo sapiens
MRNSILAQVLDQSARARLSNLALVKPEKTKAVENYLIQMARYGQLSEKVSEQGLIEILKKVSQQTEKTTTVKFNRRKVMDSDEDDDY

SEQ ID NO: 17766 - protein, 37 aa, Homo sapiens
MWTLVSWVALTAGLVAGTRCPDGQFCPVACCLDPGGA

SEQ ID NO: 17767 - protein, 125 aa, Homo sapiens
MSEEAKRGAPNPWLFEEPEETRGLGFDEIRQQQQKIIQEQDAGLDALSSIISRQKQMGQEIGNELDEQNEIIDDLANLVENTDEKLRNETRRVNMVDRKSASCGMIMVILLLLVAIVVVAVWPTN

SEQ ID NO: 17768 - protein, 167 aa, Homo sapiens
MGPGRCLLTALLLLALAPPPEASQYCGRLEYWNPDNKCCSSCLQRFGPPPCPELSSLASQPLSRLLDELEVLEELIVLLDPEPGPGGGMAHGTTRHLAARYGLPAAWSTFAYSLRPSRSPLRALIEMVVAREPSASLGQLGTHLAQLGRADALRVLSKLGSSGVCWA

SEQ ID NO: 17769 - protein, 592 aa, Homo sapiens
MTCWLCVLSLPLLLLPAAPPPAGGCPARCECTVQTRAVACTRRRLTAVPDGIPAETRLLELSRNRIRCLNPGDLAALPALEELDLSENAIAHVEPGAFANLPRLRVLRLRGNQLKLIPPGVFTRLDNLTLLDLSENKLVILLDYTFQDLHSLRRLEVGDNDLVFVSRRAFAGLLALEELTLERCNLTALSGESLGHLRSLGALRLRHLAIASLEDQNFRRLPGLLHLEIDNWPLLEEVAAGSLRGLNLTSLSVTHTNITAVPAAALRHQAHLTCLNLSHNPISTVPRGSFRDLVRLRELHLAGALLAVVEPQAFLGLRQIRLLNLSNNLLSTLEESTFHSVNTLETLRVDGNPLACDCRLLWIVQRRKTLNFDGRLPACATPAEVRGDALRNLPDSVLFEYFVCRKPKIRERRLQRVTATAGEDVRFLCRAEGEPAPTVAWVTPQHRPVTATSAGRARVLPGGTLEIQDARPQDSGTYTCVASNAGGNDTYFATLTVRPEPAANRTPGEAHNETLAALRAPLDLTTILVSTAMGCITFLGVVLFCFVLLFVWSRGRGQHKNNFSVEYSFRKVDGPAAAAGQGGARKFNMKMI

SEQ ID NO: 17770 - protein, 29 aa, Homo sapiens
MSRYLLPLSALGTVAGAAVLLKDYVTGGA

SEQ ID NO: 17771 - protein, 261 aa, Homo sapiens
MGGAGILLLLLAGAGVVVAWRPPKGKCPLRCSCSKDSALCEGSPDLPVSFSPTLLSLSLVRTGVTQLKAGSFLRIPSLHLLLFTSNSFSVIEDDAFAGLSHLQYLFIEDNEIGSISKNALRGLRSLTHLSLANNHLETLPRFLFRGLDTLTHVDLRGNPFQCDCRVLWLLQWMPTVNASVGTGACAGPASLSHMQLHHLDPKTFKCRAIGGGLSRWGGRREIWGKGCQGQEARLTPCPAISRSGKTLSKQHCLPEPQFSHL

SEQ ID NO: 17772 - protein, 440 aa, Homo sapiens
MLPACRLQDEFHPFIEALLPHVRAFSYTWFNLQARKRKYFKKHEKRMSKDEERAVKDELLGEKPEIKQKWASRLLAKLRKDIRPEFREDFVLTITGKKPPCCVLSNPDQKGKIRRIDCLRQADKVWRLDLVMVILFKGIPLESTDGERLYKSPQCSNPGLCVQPHHIGVTIKELDLYLAYFVHTPESGQSDSSNQQGDADIKPLPNGHLSFQDCFVTSGVWNVTELVRVSQTPVATASGPNFSLADLESPSYYNINQVTLGRRSITSPPSTSTTKRPKSIDDSEMESPVDDVFYPGTGRSPAAGSSQSSGWPNDVDAGPASLKKSGKLDFCSALSSQGSSPRMAFTHHPLPVLAGVRPGSPRATASALHFPSTSIIQQSSPYFTHPTIRYHHHHGQDSLKEFVQFVCSDGSGQATGQHSQRQAPPLPTGLSASDPGTATF

SEQ ID NO: 17773 - protein, 328 aa, Homo sapiens
MDHLGASLWPQVGSLCLLLAGAAWAPPPNLPDPKFESKAALLAARGPEELLCFTERLEDLVCFWEEAASAGVGPGNYSFSYQLEDEPWKLCRLHQAPTARGAVRFWCSLPTADTSSFVPLELRVTAASGAPRYHRVIHINEVVLLDAPVGLVARLADESGHVVLRWLPPPETPMTSHIRYEVDVSAGNGAGSVQRVEILEGRTECVLSNLRGRTRYTFAVRARMAEPSFGGFWSAWSEPVSLLTPSDLDPLILTLSLILVVILVLLTVLALLSHRRALKQKIWPGIPSPESEFEGLFTTHKGNFQVGGLVVPSVPGLPCFLQPNCRPL

SEQ ID NO: 17774 - protein, 16 aa, Homo sapiens
MGPGRCLLTALLLLAL

SEQ ID NO: 17775 - protein, 369 aa, Homo sapiens
MIIVCIDQWKNKIWPEIKVPRPDALDNESWGFVHPRLLSVPELCHHVAEVWVSGTIFIRNVLLFKKQNPGKFCLLSCGILTFLAVLGRYVPGLLLSYLMLVTVMMWPLAVYHRLWDRAYVRLKPALQRLDFSVRGYMMSKQRERQLRRRALHPERAMDNHSDSEEELAAFCPQLDDSTVARELAITDSEHSDAEVSCTDNGTFNLSRGQTPLTEGSEDLDGHSDPEESFARDLPDFPSINMDPAGLDDEDDTSIGMPSLMYRSPPGAEEPQAPPASRDEAALPELLLGALPVGSNLTSNLASLVSQGMIQLALSGASQPGPSGAPAQRATRGFLRSPSSDLDTDAEGDDFELLDQSELSQLDPASSRSH

SEQ ID NO: 17776 - protein, 678 aa, Homo sapiens
MADKVRRQRPRRRVCWALVAVLLADLLALSDTLAVMSVDLGSESMKVAIVKPGVPMEIVLNKESRRKTPVIVTLKENERFFGDSAASMAIKNPKATLRYFQHLLGKQADNPHVALYQARFPEHELTFDPQRQTVHFQISSQLQFSPEEVLGMVLNYSRSLAEDFAEQPIKDAVITVPVFFNQAERRAVLQAARMAGLKVLQLINDNTATALSYGVFRRKDINTTAQNIMFYDMGSGSTVCTIVTYQMVKTKEAGMQPQLQIRGVGFDRTLGGLEMELRLRERLAGLFNEQRKGQRAKDVRENPRAMAKLLREANRLKTVLSANADHMAQIEGLMDDVDFKAKVTRVEFEELCADLFERVPGPVQQALQSAEMSLDEIEQVILVGGATRVPRVQEVLLKAVGKEELGKNINADEAAAMGAVYQAAALSKAFKVKPFVVRDAVVYPILVEFTREVEEEPGIHSLKHNKRVLFSRMGPYPQRKVITFNRYSHDFNFHINYGDLGFLGPEDLRVFGSQNLTTVKLKGVGDSFKKYPDYESKGIKAHFNLDESGVLSLDRVESVFETLVEDSAEEESTLTKLGNTISSLFGGGTTPDAKENGTDTVQEEEESPAEGSKDEPGEQVELKEEAEAPVEDGSQPPPPEPKGDATPEGEKATEKENGDKSEAQKPVVCRASVTRFGF

SEQ ID NO: 17777 - protein, 142 aa, Homo sapiens
MWTLVSWVALTAGLVAGTRCPDGQFCPVACCLDPGGASYSCCRPLLDKWPTTLSRHLGGPCQVDAHCSAGHSCIFTVSGTSSCCPFPEAVACGDGHHCCPRGFHCSADGRSCFQRSGNNSVGAIQCPDSQFECPDFSTCCVM

SEQ ID NO: 17778 - protein, 184 aa, Homo sapiens
MDCRVHMRPIGLTWVLQLTLAWILLEACGGSRPLQARSQQHHGLAADLGKGKLHLAGPCCPSEMDTTETSGPGNHPERCGVPSPECESFLEHLQRALRSRFRLRLLGVRQAQPLCEELCQAWFANCEDDITCGPTWLPLSEKRGCEPSCLTYGQTFADGTDLCRSALGHALPVAAPGARHCFNI

SEQ ID NO: 17779 - protein, 155 aa, Homo sapiens
MLLLAAAFLVAFVLLLYMVSPLISPKPLALPGAHVVVTGGSSGIGKCIAIECYKQGAFITLVARNEDKLLQAKKEIEMHSINDKQVVLCISVDVSQDYNQVENVIKQAQEKLGPVDMLVNCAGMAVSGKFEDLERLMSINYLGSVYPSRAVITTM

SEQ ID NO: 17780 - protein, 48 aa, Homo sapiens
MTPPRLFWVWLLVAGTQGVNDGDMRLADGGATNQGRVEIFYRGPWPDL

SEQ ID NO: 17781 - protein, 724 aa, Homo sapiens
MFQDPVAFEDVAVNFTQEEWTLLDISQKNLFREVMLETFRNLTSIGKKWSDQNIEYEYQNPRRSFRSLIEEKVNEIKEDSHCGETFTQVPDDRLNFQEKKASPEVKSCDSFVCAEVGIGNSSFNMSIRGDTGHKAYEYQEYGPKPYKCQQPKNKKAFRYRPSIRTQERDHTGEKPYACKVCGKTFIFHSSIRRHMVMHSGDGTYKCKFCGKAFHSFSLYLIHERTHTGEKPYECKQCGKSFTYSATLQIHERTHTGEKPYECSKCDKAFHSSSSYHRHERSHMGEKPYQCKECGKAFAYTSSLRRHERTHSGKKPYECKQYGEGLSYLISFQTHIRMNSGERPYKCKICGKGFYSAKSFQTHEKTHTGEKRYKCKQCGKAFNLSSSFRYHERIHTGEKPYECKQCGKAFRSASQLRVHGGTHTGEKPYECKECGKAFRSTSHLRVHGRTHTGEKPYECKECGKAFRYVKHLQIHERTEKHIRMPSGERPYKCSICEKGFYSAKSFQTHEKTHTGEKPYECNQCGKAFRCCNSLRYHERTHTGEKPYECKQCGKAFRSASHLRMHERTHTGEKPYECKQCGKAFSCASNLRKHGRTHTGEKPYECKQCGKAFRSASNLQMHERTHTGEKPYECKECEKAFCKFSSFQIHERKHRGEKPYECKHCGNGFTSAKILQIHARTHIGEKHYECKECGKAFNYFSSLHIHARTHMGEKPYECKDCGKAFS

SEQ ID NO: 17782 - protein, 71 aa, Homo sapiens
MGSKAKKRVLLPTRPAPPTVEQILEDVRGAPAEDPVFTILAPEGWSAVARSRLTAGSDSPVQAILLPQPPE

SEQ ID NO: 17783 - protein, 859 aa, Homo sapiens
MAQVLHVPAPFPGTPGPASPPAFPAKDPDPPYSVETPYGYRLDLDFLKYVDDIEKGHTLRRVAVQRRPRLSSLPRGPGSWWTSTESLCSNASGDSRHSAYSYCGRGFYPQYGALETRGGFNPRVERTLLDARRRLEDQAATPTGLGSLTPSAAGSTASLVGVGLPPPTPRSSGLSTPVPPSAGHLAHVREQMAGALRKLRQLEEQVKLIPVLQVKLSVLQEEKRQLTVQLKSQKFLGHPTAGRGRSELCLDLPDPPEDPVALETRSVGTWVRERDLGMPDGEAALAAKVAVLETQLKKALQELQAAQARQADPQPQAWPPPDSPVRVDTVRVVEGPREVEVVASTAAGAPAQRAQSLEPYGTGLRALAMPGRPESPPVFRSQEVVETMCPVPAAATSNVHMVKKISITERSCDGAAGLPEVPAESSSSPPGSEVASLTQPEKSTGRVPTQEPTHREPTRQAASQESEEAGGTAPPLSSPPGGPPAGVRSIMKRKEEVADPTAHRRSLQFVGVNGGYESSSEDSSTAENISDNDSTENEAPEPRERVPSVAEAPQLRPAGTAAAKTSRQECQLSRESQHIPTAEGASGSNTEEEIRMELSPDLISACLALEKYLDNPNALTERELKVAYTTVLQEWLRLACRSDAHPELVRRHLVTFRAMSARLLDYVVNIADSNGNTALHYSVSHANFPVVQQLLDSGVCKVDKQNRAGYSPIMLTALATLKTQDDIETVLQLFRLGNINAKASQAGQTALMLAVSHGRVDVVKALLACEADVNVQDDDGSTALMCACEHGHKEIAGLLLAVPSCDISLTDRDGSTALMVALDAGQSEIASMLYSRMNIKCSFAPMSDDESPTSSSAEE

SEQ ID NO: 17784 - protein, 724 aa, Homo sapiens
MVLTLLLSAYKLCRFFAMSGPRPGAERLAVPGPDGGGGTGPWWAAGGRGPREVSPGAGTEVQDALERALPELQQALSALKQAGGARAVGAGLAEVFQLVEEAWLLPAVGREVAQGLCDAIRLDGGLDLLLRLLQAPELETRVQAARLLEQILVAENRDRVARIGLGVILNLAKEREPVELARSVAGILEHMFKHSEETCQRLVAAGGLDAVLYWCRRTDPALLRHCALALGNCALHGGQAVQRRMVEKRAAEWLFPLAFSKEDELLRLHACLAVAVLATNKEVEREVERSGTLALVEPLVASLDPGRFARCLVDASDTSQGRGPDDLQRLVPLLDSNRLEAQCIGAFYLCAEAAIKSLQGKTKVFSDIGAIQSLKRLVSYSTNGTKSALAKRALRLLGEEVPRPILPSVPSWKEAEVQTWLQQIGFSKYCESFREQQVDGDLLLRLTEEELQTDLGMKSGITRKRFFRELTELKTFANYSTCDRSNLADWLGSLDPRFRQYTYGLVSCGLDRSLLHRVSEQQLLEDCGIHLGVHRARILTAAREMLHSPLPCTGGKPSGDTPDVFISYRRNSGSQLASLLKVHLQLHGFSVFIDVEKLEAGKFEDKLIQSVMGARNFVLVLSPGALDKCMQDHDCKDWVHKEIVTALSCGKNIVPIIDGFEWPEPQVLPEDMQAVLTFNGIKWSHEYQEATIEKIIRFLQGRSSRDSSAGSDTSLEGAAPMGPT

SEQ ID NO: 17785 - protein, 44 aa, Homo sapiens
MCMYLFFLDFSIVSVTVLLDFMTRDRERKVVWPDRLTSKQTWPY

SEQ ID NO: 17786 - protein, 74 aa, Homo sapiens
MMAAGAALALALWLLMPPVEVGGAGPPPIQDGEFTFLLPAGRKQCFYQSAPANASLETEYQGGANGGRGLQAVL

SEQ ID NO: 17787 - protein, 326 aa, Homo sapiens
MEVAVPVKQEAEGLALDSPWHRFRRFHLGDAPGPREALGLLRALCRDWLRPEVHTKEQMLELLVLEQFLSALPADTQAWVCSRQPQSGEEAVALLEELWGPAASPDGSSATRVPQDVTQGPGATGGKEDSGMIPLGTAPGAEGPAPGDSQAVRPYKQEPSSPPLAPGLPAFLAAPGTTSCPECGKTSLKPAHLLRHRQSHSGEKPHACPECGKAFRRKEHLRRHRDTHPGSPGSPGPALRPLPAREKPHACCECGKTFYWREHLVRHRKTHSGARPFACWECGKGFGRREHVLRHQRIHGRAAASAQGAVAPGPDGGGPFPPWPLG

SEQ ID NO: 17788 - protein, 516 aa, Homo sapiens
MDSVTFDDVAVDFTQEEWTLLDSTQRSLYSDVMLENYKNLATVGGQIIKPSLISWLEQEESRTVQGGVLQGWEMRLETQWSILQQDFLRGQTSIGIQLEGKHNGRELCDCEQCGEVFSEHSCLKTHVRTQSTGNTHDCNQYGKDFLTLCEKTSTGEKLSEFNQSEKIFSLTPNIVYQRTSTQEKSFECSHCGKSFINESYLQAHMRTHNGEKLYEWRNYGPGFIDSTSLSVLIETLNAKKPYKCKECGKGYRYPAYLSIHMRTHTGEKPYECKECGKAFNYSNSFQIHGRTHTGEKPYVCKECGKAFTQYSGLSMHVRSHSGDKPYECKECGKSFLTSSRLIQHIRTHTGEKPFVCVECGKAFAVSSNLSGHLRTHTEEKACECKICGKVFGYPSCLNNHMRTHSAQKPYTCKECGKAFNYSTHLKIHMRIHTGEKPYECKQCGKAFSHSSSFQIHERTHTGEKPYECKECGKAFTCSSSFRIHEKTHTEEKPYKCQQCGKAYSHPRSLRRHEQIH

SEQ ID NO: 17789 - protein, 337 aa, Homo sapiens
MESGSTAASEEARSLRECELYVQKHNIQALLKDSIVQLCTARPERPMAFLREYFERLEKEEAKQIQNLQKAGTRTDSREDEISPPPPNPVVKGRRRRGAISAEVYTEEDAASYVRKVIPKDYKTMAALAKAIEKNVLFSHLDDNERSDIFDAMFSVSFIAGETVIQQGDEGDNFYVIDQGETDVYVNNEWATSVGEGGSFGELALIYGTPRAATVKAKTNVKLWGIDRDSYRRILMGSTLRKRKMYEEFLSKVSILESLDKWERLTVADALEPVQFEDGQKIVVQGEPGDEFFIILEGSAAVLQRRSENEEFVEVGRLGPSDYFGHLIISRRSIPLG

SEQ ID NO: 17790 - protein, 469 aa, Homo sapiens
MLPPWTLGLLLLATVRGKEVCYGQLGCFSDEKPWAGTLQRPVKLLPWSPEDIDTRFLLYTNENPNNFQLITGTEPDTIEASNFQLDRKTRFIIHGFLDKAEDSWPSDMCKKMFEVEKVNCICVDWRHGSRAMYTQAVQNIRVVGAETAFLIQALSTQLGYSLEDVHVIGHSLGAHTAAEAGRRLGGRVGRITGLDPAGPCFQDEPEEVRLDPSDAVFVDVIHTDSSPIVPSLGFGMSQKVGHLDFFPNGGKEMPGCKKNVLSTITDIDGIWEGIGGFVSCNHLRSFEYYSSSVLNPDGFLGYPCASYDEFQESKCFPCPAEGCPKMGHYADQFKGKTSAVEQTFFLNTGESGNFTSWRYKISVTLSGKEKVNGYIRIALYGSNENSKQYEIFKGSLKPDASHTCAIDVDFNVGKIQKVKFLWNKRGINLSEPKLGASQITVQSGEDGTEYNFCSSDTVEENVLQSLYPC

SEQ ID NO: 17791 - protein, 213 aa, Homo sapiens
MDPGKDKEGVPQPSGPPARKKFVIPLDEDEVPPGVAKPLFRSTQSLPTVDTSAQAAPQTYAEYAISQPLEGAGATCPTGSEPLAGETPNQALKPGAKSNSIIVSPRQRGNPVLKFVRNVPWEFGDVIPDYVLGQSTCALFLSLRYHNLHPDYIHGRLQSLGKNFALRVLLVQVDVKDPQQALKELAKMCILADCTLILAWRPGGCLMSCTSPS

SEQ ID NO: 17792 - protein, 894 aa, Homo sapiens
MRPMRIFVNDDRHVMAKHSSVYPTQEELEAVQNMVSHTERALKAVSDWIDEQEKGSSEQAESDNMDVPPEDDSKEGAGEQKTEHMTRTLRGVMRVGLVAKGLLLKGDLDLELVLLCKEKPTTALLDKVADNLAIQLAAVTEDKYEILQSVDDAAIVIKNTKEPPLSLTIHLTSPVVREEMEKVLAGETLSVNDPPDVLDRQKCLAALASLRHAKWFQARANGLKSCVIVIRVLRDLCTRVPTWGPLRGWPLELLCEKSIGTANRPMGAGEALRRVLECLASGIVMPDGSGIYDPCEKEATDAIGHLDRQQREDITQSAQHALRLAAFGQLHKVLGMDPLPSKMPKKPKNENPVDYTVQIPPSTTYAITPMKRPMEEDGEEKSPSKKKKKIQKKEEKAEPPQAMNALMRLNQLKPGLQYKLVSQTGPVHAPIFTMSVEVDGNSFEASGPSKKTAKLHVAVKVLQDMGLPTGAEGRDSSKGEDSAEETEAKPAVVAPAPVVEAVSTPSAAFPSDATAEQGPILTKHGKNPVMELNEKRRGLKYELISETGGSHDKRFVMEVEVDGQKFQGAGSNKKVAKAYAALAALEKLFPDTPLALDANKKKRAPVPVRGGPKFAAKPHNPGFGMGGPMHNEVPPPPNLRGRGRGGSIRGRGRGRGFGGANHGGYMNAGAGYGSYGYGGNSATAGYSQFYSNGGHSGNASGGGGGGGGGSSGYGSYYQGDNYNSPVPPKHAGKKQPHGGQQKPSYGSGYQSHQGQQQSYNQSPYSNYGPPQGKQKGYNHGQGSYSYSNSYNSPGGGGGSDYNYESKFNYSGSGGRSGGNSYGSGGASYNPGSHGGYGGGSGGGSSYQGKQGGYSQSNYNSPGSGQNYSGPPSSYQSSQGGYGRNADHSMNYQYR

SEQ ID NO: 17793 - protein, 1199 aa, Homo sapiens
FRLVVKTALKLLLVFVEYSESNAPLLIQAVTAVDTKRGVKPWSNIMEILEEKDGVDTELLVYAMTLVNKTLSGLPDQDTFYDVVDCLEELGIAAVSQRHLNKKGTDLDLVEQLNIYEVALRHEDGDETTEPPPSGCRDRRRASVCSSGGGEHRGLDRRRSRRHSVQSIKSTLSAPTSPCSQSAPSFKPNQVRDLREKSSPSGLLTSSFRQHQESLAAERERRRQEREERLQRIEREERNKFSRDYLDKREEQRQAREERYKYLEQLAAEEHEKELRSRSVSRGRADLSLDLTSPAAPACLAPLSHSPSSSDSQEALTVSASSPGTPHHPQASAGDPEPESEAEPEAEAGAGQVADEAGQDIASAHEGAETEVEQALEQEPEERASLSEKERQNEGVNERDNCSASSVSSSSSTLEREEKEDKLSRDRTTGLWPAGVQDAGVNGQCGDILTNKRFMLDMLYAHNRKSPDDEEKGDGEAGRTQQEAEAVASLATRISTLQANSQTQDESVRRVDVGCLDNRGSVKAFAEKFNSGDLGRGSISPDAEPNDKVPETAPVQPKTESDYIWDQLMANPRELRIQDMDFTDLGEEDDIDVLDVDLGHREAPGPPPPPPPTFLGLPPPPPPPLLDSIPPPPVPGNLLVPPPPVFNAPQGLGWSQVPRGQPTFTKKKKTIRLFWNEVRPFDWPCKNNRRCREFLWSKLEPIKVDTSRLEHLFESKSKELSVSKKTAADGKRQEIIVLDSKRSNAINIGLTVLPPPRTIKIAILNFDEYALNKEGIEKILTMIPTDEEKQKIQEAQLANPEIPLGSAEQFLLTLSSISELSARLHLWAFKMDYETTEKEVAEPLLDLKEGIDQLENNKTLGFILSTLLAIGNFLNGTNAKAFELSYLEKVPEVKDTVHKQSLLHHVCTMVVENFPDSSDLYSEIGAITRSAKVDFDQLQDNLCQMERRCKASWDHLKAIAKHEMKPVLKQRMSEFLKDCAERIIILKIVHRRIINRFHSFLLFMGHPPYAIREVNINKFCRIISEFALEYRTTRERVLQQKQKRANHRERNKTRGKMITDSGKFSGSSPAPPSQPQGLSYAEDAAEHENMKAVLKTSSPSVEDATPALGVRTRSRASRGSTSSWTMGTDDSPNVTDDAADEIMDRIVKSATQVPSQRVVPRERKRSRANRKSLRRTLKSGLTPEEARALGLVGTSELQL

SEQ ID NO: 17794 - protein, 67 aa, Homo sapiens
MSPSGRLCLLTIVGLILPTRGWNRLWGRRQEQGAQEGGCWDVQAGGYRGRTRMGAVELSSTDHMDRR

SEQ ID NO: 17795 - protein, 276 aa, Homo sapiens
MDHLGASLWPQVGSLCLLLAGAAWAPPPNLPDPKFESKGWGGAGSPELEVLNAAPSSAGRWVGRCAPVVTAGDTALLAARGPEELLCFTERLEDLVCFWEEAASAGVGPGNYSFSYQLEDEPWKLCRLHQAPTARGAVRFWCSLPTADTSSFVPLELRVTAASGAPRYHRVIHINEVVLLDAPVGLVARLADESGHVVLRWLPPPETPMTSHIRYEVDVSAGNGAGSVQRGTVFLSPDWLSSTRARPHVIYFCLLRVPRPDSAPRWRSWRAAPSVC

SEQ ID NO: 17796 - protein, 298 aa, Homo sapiens
MLLLAAAFLVAFVLLLYMVSPLISPKPLALPGAHVVVTGGSSGIGKCIAIECYKQGAFITLVARNEDKLLQAKKEIEMHSINDKQVVLCISVDVSQDYNQVENVIKQAQEKLGPVDMLVNCAGMAVSGKFEDLEVSTFERLMSINYLGSVYPSRAVITTMKERRVGRIVFVSSQAGQLGLFGFTAYSASKFAIRGLAEALQMEVKPYNVYITVAYPPDTDTPGFAEENRTKPLETRLISETTSVCKPEQVAKQIVKDAIVVTMGLFRTIALFYLGSFDSIVRRCMMQREKSENADKTA

SEQ ID NO: 17797 - protein, 192 aa, Homo sapiens
MAMFEQMRANVGKLLKGIDRYNPENLATLERYVETQAKENAYDLEANLAVLKLYQFNPAFFQTTVTAQILLKALTNLPHTDFTLCKCMIDQAHQEERPIRQILYLGDLLETCHFQAFWQALDENMDLLEGITGFEDSVRKYSQLKVWMSKYGWSADESGQIFICSQEESIKPKNIVEKIDFDSVSSIMASSQ

SEQ ID NO: 17798 - protein, 260 aa, Homo sapiens
MHSWERLAVLVLLGAAACGEEAWAWAAPPRGRILGGREAEAHARPYMASVQLNGAHLCGGVLVAEQWVLSAAHCLEDAADGKVQVLLGAHSLSQPEPSKRLYDVLRAVPHPDSQPDTIDHDLLLLQLSEKATLGPAVRPLPWQRVDRDVAPGTLCDVAGWGIVNHAGRRPDSLQHVLLPVLDRATCNRRTHHDGAITERLMCAESNRRDSCKGDSGGPLVCGGVLEGVVTSGSRVCGNRKKPGIYTRVASYAAWIDSVLA

SEQ ID NO: 17799 - protein, 94 aa, Homo sapiens
MRYNEKELQALSRQPAEMAAELGMRGPKKGSVLKRRLVKLVVNFLFYFRTDEAEPVGALLLERCRVVREEPGTFSITTSSCGEASSSTGTKSGR

SEQ ID NO: 17800 - protein, 77 aa, Homo sapiens
MRLFLSLPVLVVVLSIVLEGPAPAQGTPDVSSALDKLKEFGNTLEDKARELISRIKQSELSAKMREWFSETFQKVKE

SEQ ID NO: 17801 - protein, 185 aa, Homo sapiens
MMAAGAALALALWLLMPPVEVGGAGPPPIQDGEFTFLLPAGRKQCFYQSAPANASLETEYQVIGGAGLDVDFTLESPQGVLLVSESRKADGVHTSPLRPCGPGWSAASRCSRYCGPSRHVTATCKRATWSGSTSGQLSTWRCCCWWLCCRSARSSASSRTSARCPRSPCHGRKNGTKEGQQGVCI

SEQ ID NO: 17802 - protein, 541 aa, Homo sapiens
MPGLRRDRLLTLLLLGALLSADLYFHLWPQVQRQLRPRERPRGCPCTGRASSLARDSAAAASDPGTIVHNFSRTEPRTEPAGGSHSGSSSKLQALFAHPLYNVPEEPPLLGAEDSLLASQEALRYYRRKVARWNRRHKMYREQMNLTSLDPPLQLRLEASWVQFHLGINRHGLYSRSSPVVSKLLQDMRHFPTISADYSQDEKALLGACDCTQIVKPSGVHLKLVLRFSDFGKAMFKPMRQQRDEETPVDFFYFIDFQRHNAEIAAFHLDRILDFRRVPPTVGRIVNVTKEILEVTKNEILQSVFFVSPASNVCFFAKCPYMCKTEYAVCGNPHLLEGSLSAFLPSLNLAPRLSVPNPWIRSYTLAGKEEWEVNPLYCDTVKQIYPYNNSQRLLNVIDMAIFDFLIGNMDRHHYEMFTKFGDDGFLIHLDNARGFGRHSHDEISILSPLSQCCMIKKKTLLHLQLLAQADYRLSDVMRESLLEDQLSPVLTEPHLLALDRRLQTILRTVEGCIVAHGQQSVIVDGPVEQLAPDSGQANLTS

SEQ ID NO: 17803 - protein, 576 aa, Homo sapiens
MAAAARPRGRALGPVLPPTPLLLLVLRVLPACGATARDPGAAAGLSLHPTYFNLAEAARIWATATCGERGPGEGRPQPELYCKLVGGPTAPGSGHTIQGQFCDYCNSEDPRKAHPVTNAIDGSERWWQSPPLSSGTQYNRVNLTLDLGQLFHVAYILIKFANSPRPDLWVLERSVDFGSTYSPWQYFAHSKVDCLKEFGREANMAVTRDDDVLCVTEYSRIVPLENGEVVVSLINGRPGAKNFTFSHTLREFTKATNIRLRFLRTNTLLGHLISKAQRDPTVTRRYYYSIKDISIGGQCVCNGHAEVCNINNPEKLFRCECQHHTCGETCDRCCTGYNQRRWRPAAWEQSHECEACNCHGHASNCYYDPDVERQQASLNTQGIYAGGGVCINCQHNTAGVNCEQCAKGYYRPYGVPVDAPDGCIPCSCDPEHADGCEQGSGRCHCKPNFHGDNCEKCAIGYYNFPFCLRIPIFPVSTPSSEDPVAGDIKGCDCNLEGVLPEICDAHGRCLCRPGVEGPRCDTCRSGFYSFPICQGPSEKVAIYKPESRPSAETEPASTWILDFPASRTGEINFYCL

SEQ ID NO: 17804 - protein, 120 aa, Homo sapiens
MAASKVKQDMPPPGGYGPIDYKRNLPRRGLSGYSMLAIGIGTLIYGHWSIMKWNRERRRLQIEDFEARIALLPLLQAETDRRTLQMLRENLEEEAIIMKDVPDWKDYRREPPYLVQPCQL

SEQ ID NO: 17805 - protein, 189 aa, Homo sapiens
MWTLVSWVALTAGLVAGTRCPDGQFCPVACCLDPGGASYSCCRPLLDKWPTTLSRHLGGPCQVDAHCSAGHSCIFTVSGTSSCCPFPEAVACGDGHHCCPRGFHCSADGRSCFQRSGNNSVGAIQCPDSQFECPDFSTCCVMVDGSWGCCPMPQGALLSARCLLRPGSHPLHHTHGHPPPGKEAPCPED

SEQ ID NO: 17806 - protein, 192 aa, Homo sapiens
MSTAAVPELKQISRVEAMRLGPGWSHSCHAMLYAANPGQLFGRIPMRFSVLMQMRFDGLLGFPGGFVDRRFWSLEDGLNRVLGLGLGCLRLTEADYLSSHLTEGPHRVVAHLYARQLTLEQLHAVEISAVHSRDHGLEVGPPPGPRPPPRGLALAPWKAPMGAGPRAGPAVHPEGPSRRLPQLPEQRLREHG

SEQ ID NO: 17807 - protein, 132 aa, Homo sapiens
MEAEGLDWLLVPLHQLVSWGAAAAMVFGGVVPYVPQYRDIRRTQNADGFSTYVCLVLLVANILRILFWFGRRFESPLLWQSAIMILTMLLMLKLCTEVRVANELNARRRSFTAADSKDEEVKVAPRRSFLVL

SEQ ID NO: 17808 - protein, 79 aa, Homo sapiens
MAPTWGPGMVSVVGPMGLLVVLLVGGCAAEEPPRFIKEPKDQIGVSGGVASFVCQATGDPKPRVTWNKKGKKVNSQRFE

SEQ ID NO: 17809 - protein, 131 aa, Homo sapiens
MTPPRLFWVWLLVAGTQGVNDGDMRLADGGATNQGRVEIFYRGQWGTVCDNLWDLTDASVVCRALGFENATQALGRAAFGQGSGPIMLDEVQCTGTEASLADCKSLGWLKSNCRHERDAGVVCTNGAFQSE

SEQ ID NO: 17810 - protein, 651 aa, Homo sapiens
MNQPQRMAPVGTDKELSDLLDFSMMFPLPVTNGKGRPASLAGAQFGGSGLEDRPSSGSWGSGDQSSSSFDPSRTFSEGTHFTESHSSLSSSTFLGPGLGGKSGERGAYASFGRDAGVGGLTQAGFLSGELALNSPGPLSPSGMKGTSQYYPSYSGSSRRRAADGSLDTQPKKVRKVPPGLPSSVYPPSSGEDYGRDATAYPSAKTPSSTYPAPFYVADGSLHPSAELWSPPGQAGFGPMLGGGSSPLPLPPGSGPVGSSGSSSTFGGLHQHERMGYQLHGAEVNGGLPSASSFSSAPGATYGGVSSHTPPVSGADSLLGSRGTTAGSSGDALGKALASIYSPDHSSNNFSSSPSTPVGSPQGLAGTSQWPRAGAPGALSPSYDGGLHGLQSKIEDHLDEAIHVLRSHAVGTAGDMHTLLPGHGALASGFTGPMSLGGRHAGLVGGSHPEDGLAGSTSLMHNHAALPSQPGTLPDLSRPPDSYSGLGRAGATAAASEIKREEKEDEENTSAADHSEEEKKELKAPRARTSSTDEVLSLEEKDLRDRERRMANNARERVRVRDINEAFRELGRMCQMHLKSDKAQTKLLILQQAVQVILGLEQQVRERNLNPKAACLKRREEEKVSGVVGDPQMVLSAPHPGLSEAHNPAGHM

SEQ ID NO: 17811 - protein, 95 aa, Homo sapiens
MMAAGAALALALWLLMPPVEVGGAGPPPIQDGEFTFLLPAGRKQCFYQSAPANASLETEYQVIGGAGLDVDFTLESPQGVLLGGANGGRGLQAVL

SEQ ID NO: 17812 - protein, 59 aa, Homo sapiens
MDMWTALLILQALLLPSLGISWTPQSGTSARSPTAICASTMGLKTHWVALPMWRSAPKR

SEQ ID NO: 17813 - protein, 132 aa, Homo sapiens
MGPGRCLLTALLLLALAPPPEASQYCGRLEYWNPDNKCCSSCLQRFGPPPCPDYEFRENCGLNDHGDFVTPPFRKCSSGQCNPDGAELCSPCGGGAVTPTPAAGGGRTPWRCREAGPCQGALPPHTWKPRRP

SEQ ID NO: 17814 - protein, 398 aa, Homo sapiens
MDPVVGCGRGLFGFVFSAGGPRGVLPRPCRVLVLLNPRGGKGKALQLFRSHVQPLLAEAEISFTLMLTERRNHARELVRSEELGRWDALVVMSGDGLMHEVVNGLMERPDWETAIQKPLCSLPAGSGNALAASLNHYAGYEQVTNEDLLTNCTLLLCRRLLSPMNLLSLHTASGLRLFSVLSLAWGFIADVDLESEKYRRLGEMRFTLGTFLRLAALRTYRGRLAYLPVGRVGSKTPASPVVVQQGPVDAHLVPLEEPVPSHWTVVPDEDFVLVLALLHSHLGSEMFAAPMGRCAAGVMHLFYVRAGVSRAMLLRLFLAMEKGRHMEYECPYLVYVPVVAFRLEPKDGKGVFAVDGELMVSEAVQGQVHPNYFWMVSGCVEPPPSWKPQQMPPPEEPL

SEQ ID NO: 17815 - protein, 70 aa, Homo sapiens
MDCRVHMRPIGLTWVLQLTLAWILLEACGGSRPLQARSQQHHGLAADLGKGKLHLAEMDTTETSGPGNHP

SEQ ID NO: 17816 - protein, 147 aa, Homo sapiens
MAVFRSGLLVLTTPLASLAPRLASILTSAARLVNHTLYVHLQPGMSLEGPAQPQSSPVQATFEVLDFITHLYAGADVHRHLDVRILLTNIRTKSTFLPPLPTSVQNLAHPPEVVLTDFQTLDGSQYNPVKQQLVRYATSCYSCCPRL

SEQ ID NO: 17817 - protein, 88 aa, Homo sapiens
MTPPRLFWVWLLVAGTQGVNDGDMRLADGGATNQGRVEIFYRGQWGTVCDNLWDLTDASVVCRALGFENATQALGRAAFGQGSGPIML

SEQ ID NO: 17818 - protein, 192 aa, Homo sapiens
MVRAGAVGAHLPASGLDIFGDLKKMNKRQLYYQVLNFAMIVSSALMIWKGLIVLTGSESPIVVVLSGSMEPAFHRGDLLFLTNFREDPIRAGEIVVFKVEGRDIPIVHRVIKVHEKDNGDIKFLTKGDNNEVDDRGLYKEGQNWLEKKDVVGRARGFLPYVGMVTIIMNDYPKFKYALLAVMGAYVLLKRES

SEQ ID NO: 17819 - protein, 138 aa, Homo sapiens
MGPGRCLLTALLLLALAPPPEASQYCGRLEYWNPDNKCCSSCLQRFGPPPCPDYEFRENCGLNDHGDFVTPPFRKCSSGQCNPDGAELCSPCGGGAVTPTPAAGGGRTPWRCRERPVPAKGHCPLTPGNPGAPSSQER

SEQ ID NO: 17820 - protein, 74 aa, Homo sapiens
MDMWTALLILQALLLPSLADGATPALRFVAVGDWGGVPNAPFHTAREMANAKEIARTVQILGADFILSLGDNFY

SEQ ID NO: 17821 - protein, 140 aa, Homo sapiens
MRSECVLGAASDSGQEAPRDTWFLQGWKASRRFLIKGSVAGGAVYLVYDQELLGPSDKSQAALQKAGEVVPPAMYQFSQYVCQQTGLQIPQLPAPPKIYFPIRDSWNAGIMTVMSALSVAPSKAREYSKEGWEYVKARTK

SEQ ID NO: 17822 - protein, 869 aa, Homo sapiens
MGNRGMEELIPLVNKLQDAFSSIGQSCHLDLPQIAVVGGQSAGKSSVLENFVGRDFLPRGSGIVTRRPLILQLIFSKTEHAEFLHCKSKKFTDFDEVRQEIEAETDRVTGTNKGISPVPINLRVYSPHVLNLTLIDLPGITKVPVGDQPPDIEYQIKDMILQFISRESSLILAVTPANMDLANSDALKLAKEVDPQGLRTIGVITKLDLMDEGTDARDVLENKLLPLRRGYIGVVNRSQKDIEGKKDIRAALAAERKFFLSHPAYRHMADRMGTPHLQKTLNQQLTNHIRESLPALRSKLQSQLLSLEKEVEEYKNFRPDDPTRKTKALLQMVQQFGVDFEKRIEGSGDQVDTLELSGGARINRIFHERFPFELVKMEFDEKDLRREISYAIKNIHGVRTGLFTPDLAFEAIVKKQVVKLKEPCLKCVDLVIQELINTVRQCTSKLSSYPRLREETERIVTTYIREREGRTKDQILLLIDIEQSYINTNHEDFIGFANAQQRSTQLNKKRAIPNQGEILVIRRGWLTINNISLMKGGSKEYWFVLTAESLSWYKDEEEKEKKYMLPLDNLKIRDVEKGFMSNKHVFAIFNTEQRNVYKDLRQIELACDSQEDVDSWKASFLRAGVYPEKDQAENEDGAQENTFSMDPQLERQVETIRNLVDSYVAIINKSIRDLMPKTIMHLMINNTKAFIHHELLAYLYSSADQSSLMEESADQAQRRDDMLRMYHALKEALNIIGDISTSTVSTPVPPPVDDTWLQSASSHSPTPQRRPVSSIHPPGRPPAVRGPTPGPPLIPVPVGAAASFSAPPIPSRPGPQSVFANSDLFPAPPQIPSRPVRIPPGIPPGVPRRPPAAPSRPTIIRPAEPSLLD

SEQ ID NO: 17823 - protein, 209 aa, Homo sapiens
MTPPRLFWVWLLVAGTQGVNDGDMRLADGGATNQGRVEIFYRGQWGTVCDNLWDLTDASVVCRALGFENATQALGRAAFGQGSGPIMLDEVQCTGTEASLADCKSLGWLKSNCRHERDAGVVCTNETRSTHTLDLSRELSEALGQIFDSQRGCDLSISVNVQGEDALGFCGHTVILTANLEAQALWKEPGSNVTMSVDAECVPMVRDLL

SEQ ID NO: 17824 - protein, 655 aa, Homo sapiens
MAEDWLDCPALGPGWKRREVFRKSGATCGRSDTYYQSPTGDRIRSKVELTRYLGPACDLTLFDFKQGILCYPAPKAHPVAVASKKRKKPSRPAKTRKRQVGPQSGEVRKEAPRDETKADTDTAPASFPAPGCCENCGISFSGDGTQRQRLKTLCKDCRAQRIAFNREQRMFKRVGCGECAACQVTEDCGACSTCLLQLPHDVASGLFCKCERRRCLRIVERSRGCGVCRGCQTQEDCGHCPICLRPPRPGLRRQWKCVQRRCLRGKHARRKGGCDSKMAARRRPGAQPLPPPPPSQSPEPTEPHPRALAPSPPAEFIYYCVDEDELQPYTNRRQNRKCGACAACLRRMDCGRCDFCCDKPKFGGSNQKRQKCRWRQCLQFAMKRLLPSVWSESEDGAGSPPPYRRRKRPSSARRHHLGPTLKPTLATRTAQPDHTQAPTKQEAGGGFVLPPPGTDLVFLREGASSPVQVPGPVAASTEALLQEAQCSGLSWVVALPQVKQEKADTQDEWTPGTAVLTSPVLVPGCPSKAVDPGLPSVKQEPPDPEEDKEENKDDSASKLAPEEEAGGAGTPVITEIFSLGGTRFRDTAVWLPSLQGRHSGREDGCKVWETEDTVEPTSTSWNPRGWPGTHVSLSPPPASMMWVSCRRSWCPSSQS

SEQ ID NO: 17825 - protein, 479 aa, Homo sapiens
MLLWPLLLLLLLLPTLALLRQQRSQDARLSWLAGLQHRVAWGALVWAATWQRRRLEQSTLHVHQSQQQALRWCLQGAQRPHCSLRRSTDISTFRNHLPLTKASQTQQEDSGEQPLPPTSNQDLGEASLQATLLGLAALNKAYPEVLAQGRTARVTLTSPWPRPLPWPGNTLGQVGTPGTKDPRALLLDALRSPGLRALEAGTAVELLDVFLGLETDGEELAGAIAAGNPGAPLRERAAELREALEQGPRGLALRLWPKLQVVVTLDAGGQAEAVAALGALWCQGLAFFSPAYAASGGVLGLNLQPEQPHGLYLLPPGAPFIELLPVKEGTQEEAASTLLLAEAQQGKEYELVLTDRASLTRCRLGDVVRVVGAYNQCPVVRFICRLDQTLSVRGEDIGEDLFSEALGRAVGQWAGAKLLDHGCVESSILDSSAGSAPHYEVFVALRGLRNLSEENRDKILASGSALGKREWTPAQPFPH

SEQ ID NO: 17826 - protein, 494 aa, Homo sapiens
MDEFHPFIEALLPHVRAFSYTWFNLQARKRKYFKKHEKRMSKDEERAVKDELLGEKPEIKQKWASRLLAKLRKDIRPEFREDFVLTITGKKPPCCVLSNPDQKGKIRRIDCLRQADKVWRLDLVMVILFKGIPLESTDGERLYKSPQCSNPGLCVQPHHIGVTIKELDLYLAYFVHTPESGQSDSSNQQGDADIKPLPNGHLSFQDCFVTSGVWNVTELVRVSQTPVATASGPNFSLADLESPSYYNINQVTLGRRSITSPPSTSTTKRPKSIDDSEMESPVDDVFYPGTGRSPAAGSSQSSGWPNDVDAGPASLKKSGKLDFCSALSSQGSSPRMAFTHHPLPVLAGVRPGSPRATASALHFPSTSIIQQSSPYFTHPTIRYHHHHGQDSLKEFVQFVCSDGSGQATGQPNGSGQGKVPGSFLLPPPPPVARPVPLPMPDSKSTSTAPDGAALTPPSPSFATTGASSANRFVSIGPRDGNFLNIPQQSQSWFL

SEQ ID NO: 17827 - protein, 222 aa, Homo sapiens
MRLLVLLWGCLLLPGYEALEGPEEISGFEGDTVSLQCTYREELRDHRKYWCRKGGILFSRCSGTIYAEEEGQETMKGRVSIRDSRQELSLIVTLWNLTLQDAGEYWCGVEKRGPDESLLISLFVFPGSSRPPMQLDSTSAEDTSPALSSGSSKPRVSIPMVRILAPVLVLLSLLSAAGLIAFCSHLLLWRKEAQQATETQRNEKFCLSRLNSLMFSLSLPWL

SEQ ID NO: 17828 - protein, 90 aa, Homo sapiens
MAPTWGPGMVSVVGPMGLLVVLLVGGCAAEEPPRFIKEPKDQIGVSGGVASFVCQATGDPKPRVTWNKKGKKVNSQRFETIEFDESAGAV

SEQ ID NO: 17829 - protein, 554 aa, Homo sapiens
MGSILSRRIAGVEDIDIQANSAYRYPPKSGNYFASHFFMGGEKFDTPHPEGYLFGENMDLNFLGSRPVQFPYVTPAPHEPVKTLRSLVNIRKDSLRLVRYKDDADSPTEDGDKPRVLYSLEFTFDADARVAITIYCQASEEFLNGRAVYSPKSPSLQSETVHYKRGVSQQFSLPSFKIDFSEWKDDELNFDLDRGVFPVVIQAVVDEGDVVEVTGHAHVLLAAFEKHMDGSFSVKPLKQKQIVDRVSYLLQEIYGIENKNNQETKPSDDENSDNSNECVVCLSDLRDTLILPCRHLCLCTSCADTLRYQANNCPICRLPFRALLQIRAVRKKPGALSPVSFSPVLAQSLEHDEHSNSDSVPPGYEPISLLEALNGLRAVSPAIPSAPLYEEITYSGISDGLSQASCPLAAIDHILDSSRQKGRPQSKAPDSTLRSPSSPIHEEDEEKLSEDVDAPPPLGGAELALRESSSPESFITEEVDESSSPQQGTRAASIENVLQDSSPEHCGRGPPADIYLPGRPTSMETAHGLATTSPTWPPLGGPSPDPSAAELTPL

SEQ ID NO: 17830 - protein, 96 aa, Homo sapiens
MREIVHIQAGQCGNQIGTKFWEVISDEHGIDPAGGYVGDSALQLERINVYYNESSSQKYVPRAALVDLEPGTMDSVRSGPFGQLFRPDNFIFELPL

SEQ ID NO: 17831 - protein, 67 aa, Homo sapiens
MEPLVTWVVPLLFLFLLSRQGAACRTSECCFQDPPYPDADSGSASGPRDLRCYRISSDRYECSWQYE

SEQ ID NO: 17832 - protein, 147 aa, Homo sapiens
MGRLLALVVGAALVSSACGGCVEVDSETEAVYGMTFKILCISCKRRSETNAETFTEWTFRQKGTEEFVKKIHIEVVDKANRDMASIVSEIMMYVLIVVLTIWLVAEMIYCYKKIAAATETAAQENASEYLAITSESKENCTGVQVAE

SEQ ID NO: 17833 - protein, 120 aa, Homo sapiens
MWLLLTLSFLLASTAQDGDKLLEGDECAPHSQPWQVALYERGRFNCGASLISPHWVLSAAHCQSRFMRVRLGEHNLRKRDGPEQLRTTSRVIPHPRYEARSHRNDIMLLRLVQPARLNPQ

SEQ ID NO: 17834 - protein, 146 aa, Homo sapiens
MSQAPGAQPSPPTVYHERQRLELCAVHALNNVLQQQLFSQEAADEICKRPLSQLALPQVLGLILNLPSPVSLGLLSLPLRRRHWVALRQVDGVYYNLDSKLRAPEALGDEDGVRAFLAAALAQGLCEVLLVVTKEVEEKGSWLRTD

SEQ ID NO: 17835 - protein, 241 aa, Homo sapiens
MDDFISISLLSLAMLVGCYVAGIIPLAVNFSEERLKLVTVLGAGLLCGTALAVIVPEGVHALYEDILEDPEAARSSNSKITTTLGLVVHAAADGVALGAAASTSQTSVQLIVFVAIMLHKAPAAFGLVSFLMHAGLERNRIRKHLLVFALAAPVMSMVTYLGLSKSSKEALSEVNATGVAMLFSAGTFLYVATVHVLPEVGGIGHSHKPDATGGRGLSRLEVAALVLGCLIPLILSVGHQH

SEQ ID NO: 17836 - protein, 124 aa, Homo sapiens
MWVPVVFLTLSVTWIGAAPLILSRIVGGWECEKHSQPWQVLVASRGRAVCGGVLVHPQWVLTAAHCIRNKSVILLGRHSLFHPEDTGQVFQVSHSFPHPLYDMSLLKNRFLRPGDDSTLNQRSS

SEQ ID NO: 17837 - protein, 98 aa, Homo sapiens
MASLLCCGPKLAACGIVLSAWGVIMLIMLGIFFNVHSAVLIEDVPFTEKDFENGPQNIYNLYEQVSYNCFIAAGLYLLLGGFSFCQVRLNKRKEYMVR

SEQ ID NO: 17838 - protein, 106 aa, Homo sapiens
MSTNNMSDPRRPNKVLRYKPPPSECNPALDDPTPDYMNLLGMIFSMCGLMLKLKWCAWVAVYCSFISFANSRSSEDTKQMMSSFMLSISAVVMSYLQNPQPMTPPW

SEQ ID NO: 17839 - protein, 235 aa, Homo sapiens
MTVLAPAWSPTTYLLLLLLLSSGLSGTQDCSFQHSPISSDFAVKIRELSDYLLQDYPVTVASNLQDEELCGGLWRLVLAQRWMERLKTVAGSKMQGLLERVNTEIHFVTKCAFQPPPSCLRFVQTNISRLLQETSEQLVALKPWITRQNFSRCLELQCQPDSSTLPPPWSPRPLEATAPTAPQPPLLLLLLLPVGLLLLAAAWCLHWQRTRRRTPRPGEQVPPVPSPQDLLLVEH

SEQ ID NO: 17840 - protein, 367 aa, Homo sapiens
MHPLPGYWSCYCLLLLFSLGVQGSLGAPSAAPEQVHLSYPGEPGSMTVTWTTWVPTRSEVQFGLQPSGPLPLRAQGTFVPFVDGGILRRKLYIHRVTLRKLLPGVQYVYRCGSAQGWSRRFRFRALKNGAHWSPRLAVFGDLGADNPKAVPRLRRDTQQGMYDAVLHVATSLTTRLASACRGIMRACGTGNVGVLGDWPSPLKDGRCRGALVPDPCPLTPPAGIWVPPTSSPSPPRSISFSIMAATWYRGSFAGWRATSRKPIRTGQPGRGSSLWGTGPCTAPTQIWTTAHDMKARSAKASKASCTGWRIFSTNMEWICSCGLMSTRMNDCGQFTTTRYLTAAERCPTPTREGLSTSSQDLLAVRSG

SEQ ID NO: 17841 - protein, 268 aa, Homo sapiens
MSPPPLLQPLLLLLPLLNVEPSGATLIRIPLHRVQPGRRILNLLRGWREPAELPKLGAPSPGDKPIFVPLSNYRDVQYFGEIGLGTPPQNFTVAFDTGSSNLWVPSRRCHFFSVPCSSSSFQANGTKFAIQYGTGRVDGILSEDKLTIGGIKGASVIFGEALWEPSLVFAFAHFDGILGLGFPILSVEGVRPPMDVLVEQGLLDKPVFSFYLNRDPEEPDGGELVLGGSDPAHYIPPLTFVPVTVPAYWQIHMERVKVGPGLTLCAKG

SEQ ID NO: 17842 - protein, 721 aa, Homo sapiens
MLFGLVRQGLKCDGCGLNYHKRCAFSIPNNCSGARKRRLSSTSLASGHSVRLGTSESLPCTAEELSRSTTELLPRRPPSSSSSSSASSYTGRPIELDKMLLSKVKVPHTFLIHSYTRPTVCQACKKLLKGLFRQGLQCKDCKFNCHKRCATRVPNDCLGEALINGDVPMEEATDFSEADKSALMDESEDSGVIPGSHSENALHASEEEEGEGGKAQSSLGYIPLMRVVQSVRHTTRKSSTTLREGWVVHYSNKDTLRKRHYWRLDCKCITLFQNNTTNRYYKEIPLSEILTVESAQNFSLVPPGTNPHCFEIVTANATYFVGEMPGGTPGGPSGQGAEAARGWETAIRQALMPVILQDAPSAPGHAPHRQASLSISVSNSQIQENVDIATVYQIFPDEVLGSGQFGVVYGGKHRKTGRDVAVKVIDKLRFPTKQESQLRNEVAILQSLRHPGIVNLECMFETPEKVFVVMEKLHGDMLEMILSSEKGRLPERLTKFLITQILVALRHLHFKNIVHCDLKPENVLLASADPFPQVKLCDFGFARIIGEKSFRRSVVGTPAYLAPEVLLNQGYNRSLDMWSVGVIMYVSLSGTFPFNEDEDINDQIQNAAFMYPASPWSHISAGAIDLINNLLQVKMRKRYSVDKSLSHPWLQEYQTWLDLRELEGKMGERYITHESDDARWEQFAAEHPLPGSGLPTDRDLGGACPPQDHDMQGLAERISVL

SEQ ID NO: 17843 - protein, 110 aa, Homo sapiens
MPAELLLLLIVAFASPSCQVLSSLRMAAILDDQTVCGRGERLALALAREQINGIIEVPAKARVEVDIFELQRDSQYETTDTIAMARRMEFCDSPRPASGASQSWEPWTEG

SEQ ID NO: 17844 - protein, 753 aa, Homo sapiens
MTMYLWLKLLAFGFAFLDTEVFVTGQSPTPSPTGLTTAKMPSVPLSSDPLPTHTTAFSPASTFERENDFSETTTSLSPDNTSTQVSPDSLDNASAFNTTGVSSVQTPHLPTHADSQTPSAGTDTQTFSGSAANAKLNPTPGSNAISDAYLNASETTTLSPSGSAVISTTTIATTPSKPTCDEKYANITVDYLYNKETKLFTAKLNVNENVECGNNTCTNNEVHNLTECKNASVSISHNSCTAPDKTLILDVPPGVEKFQLHDCTQVEKADTTICLKWKNIETFTCDTQNITYRFQCGNMIFDNKEIKLENLEPEHEYKCDSEILYNNHKFTNASKIIKTDFGSPGEPQIIFCRSEAAHQGVITWNPPQRSFHNFTLCYIKETEKDCLNLDKNLIKYDLQNLKPYTKYVLSLHAYIIAKVQRNGSAAMCHFTTKSAPPSQVWNMTVSMTSDNSMHVKCRPPRDRNGPHERYHLEVEAGNTLVRNESHKNCDFRVKDLQYSTDYTFKAYFHNGDYPGEPFILHHSTSYNSKALIAFLAFLIIVTSIALLVVLYKIYDLHKKRSCNLDEQQELVERDDEKQLMNVEPIHADILLETYKRKIADEGRLFLAEFQSIPRVFSKFPIKEARKPFNQNKNRYVDILPYDYNRVELSEINGDAGSNYINASYIDGFKEPRKYIAAQGPRDETVDDFWRMIWEQKATVIVMVTRCEEGNRNKCAEYWPSMEEGTRAFGDVVVKINQHKRCPDYIIQKLNIVN

SEQ ID NO: 17845 - protein, 145 aa, Homo sapiens [sequence omitted]

SEQ ID NO: 17846 - protein, 98 aa, Homo sapiens
MRGHPSLLLLYMALTTCLDTSPSEETDQEVFLGPPEAQSFLSSHTRIPRANHWDLELLTPGNLERECLEERCSWEEAREYFEDNTLTERFWESYIYNG

SEQ ID NO: 17847 - protein, 365 aa, Homo sapiens
MVSNNPLCVCLCRNIFPSNLVSAAFRSYSTTYEERNITGTRVKVPVGQEVEGMNILGLVVFAIVFGVALRKLGPEGELLIRFFNSFNEATMVLVSWIMWYAPVGIMFLVAGKIVEMEDVGLLFARLGKYILCCLLGHAIHGLLVLPLIYFLFTRKNPYRFLWGIVTPLATAFGTSSSSATLPLMMKCVEENNGVAKHISRFILPIGATVNMDGAALFQCVAAVFIAQLSQQSLDFVKIITILVTATASSVGAAGIPAGGVLTLAIILEAVNLPVDHISLILAVDWLVDRSCTVLNVEGDALGAGLLQNYVDRTESRSTEPELIQVKSELPLDPLPVPTEEGNPLLKHYRGPAGDATVASEKESVM

SEQ ID NO: 17848 - protein, 681 aa, Homo sapiens
MGGRVFLVFLAFCVWLTLPGAETQDSRGCARWCPQDSSCVNATACRCNPGFSSFSEIITTPMETCDDINECATLSKVSCGKFSDCWNTEGSYDCVCSPGYEPVSGAKTFKNESENTCQDMTFSTWTPPPGVHSQTLSRFFDKVQDLGRDYKPGLANNTIQSILQALDELLEAPGDLETLPRLQQHCVASHLLDGLEDVLRGLSKNLSNGLLNFSYPAGTELSLEVQKQVDRSVTLRQNQAVMQLDWNQAQKSGDPGPSVVGLVSIPGMGKLLAEAPLVLEPEKQMLLHETHQGLLQDGSPILLSDVISAFLSNNDTQNLSSPVTFTFSHRSVIPRQKVLCVFWEHGQNGCGHWATTGCSTIGTRDTSTICRCTHLSSFAVLMAHYDVQEEDPVLTVITYMGLSVSLLCLLLAALTFLLCKAIQNTSTSLHLQLSLCLFLAHLLFLVAIDQTGHKVLCSIIAGTLHYLYLATLTWMLLEALYLFLTARNLTVVNYSSINRFMKKLMFPVGYGVPAVTVAISAASRPHLYGTPSRCWLQPEKGFIWGFLGPVCAIFSVNLVLFLVTLWILKNRLSSLNSEVSTLRNTRMLAFKATAQLFILGCTWCLGILQVGPAARVMAYLFTIINSLQGVFIFLVYCLLSQQVREQYGKWSKGIRKLKTESEMHTLSSSAKADTSKPSTVN

SEQ ID NO: 17849 - protein, 70 aa, Homo sapiens
DPRLPAWALVLLGPALVFALGPAPTPEMREKLCGHHFVRALVRVCGGPRWSTEARRPATGGDPEFHSVPR

SEQ ID NO: 17850 - protein, 256 aa, Homo sapiens
MWLLLTLSFLLASTAAQDGDKLLEGDECAPHSQPWQVALYERGRFNCGASLISPHWVLSAAHCQSRFMRVRLGEHNLRKRDGPEQLRTTSRVIPHPRYEARSHRNDIMLLRLVQPARLNPQVRPAVLPTRCPHPGEACVVSGWGLVSHNEPGTAGSPRSQVSLPDTLHCANISIISDTSCDKSYPGRLTNTMVCAGAEGRGAESCEGDSGGPLVCGGILQGIVSWGDVPCDNTTKPGVYTKVCHYLEWIRETMKRN

SEQ ID NO: 17851 - protein, 122 aa, Homo sapiens
MWDLVLSIALSVGCTGAVPLIQSRIVGGWECEKHSQPWQVAVYSHGWAHCGGVLVHPQWVLTAAHCLKKACQDHRCCEGPGPAHPGASTGDHLLRLRLGQHRTRGVLAPQESSVCEPPSPVQ

SEQ ID NO: 17852 - protein, 632 aa, Homo sapiens [sequence omitted]

SEQ ID NO: 17853 - protein, 441 aa, Homo sapiens
MAAATLRDPAQGYVTFEDVAVYFSQEEWRLLDDAQRLLYRNVMLENFTLLASLGLASSKTHEITQLESWEEPFMPAWEVVTSAILRGSWQGAKAEAAAEQSASVEVPSSNVQQHQKQHCGEKPLKRQEGRVPVLRSCRVHLSEKSLQSREVGKDLLTSSGVLKHQVTHTGEKSHRSSKSREAFHAGKRHYKCSECGKAFGQKYLLVQHQRLHTGEKPYECSECGKLFSHKSNLFIHQIVHTGERPYGCSDCGKSFSRNADLIQHQRVHTGEKPFTCSECGKAFRHNSTLVQHHRIHTGVRPYECSECGKLFSFNSSLMKHQRVHTGERPYKCSECGKFYSHKSSLINHWRVHTGERPYECSECGKFFSQSSSLMQHRKVHTGEKPFKCNECGRFFSENSSLVKHQRVHTGAKPYECRECGKFFRHSSSLVKHRRIHTGEIQ

SEQ ID NO: 17854 - protein, 205 aa, Homo sapiens
MATARPPWMWVLCALITALLLGVTEHVLANNDVSCDHPSNTVPSGSNQDLGAGAGEDARSDDSSSRIINGSDCDMHTQPWQAALLLRPNQLYCGAVLVHPQWLLTAAHCRKKVFRVRLGHYSLSPVYESGQQMFQGVKSIPHPGYSHPGHSNDLMLIKLNRRIRPTKDVRPINVSSHCPSAGTKCLVSGWGTTKSPQVHFPKVLQ

SEQ ID NO: 17855 - protein, 43 aa, Homo sapiens
MVLAVGVGVVGMVMGLRIRCDEGESLRGQTTSAFLFLGDPSEA

SEQ ID NO: 17856 - protein, 210 aa, Homo sapiens
MLPLPSCSLPILLLFLLPSVPIESQPPPSTLPPFLAPEWDLLSPRVVLSRGAPAGPPLLFLLEAGAFRESAGAPANRSRRGVSETAPASRRGELAVCDAVSGWVTDRRTAVDLRGREVEVLGEVPAAGGSPLRQYFFETRCKADNAEEGGPGAGGGGCRGVDRRHWVSECKAKQSYVRALTADAQGRVGWRWIRIDTACVCTLLSRTGRA

SEQ ID NO: 17857 - protein, 139 aa, Homo sapiens
MLPLSLLKTAQNHPMLVELKNGETYNGHLVSCDNWMNINLREVICTSRDGDKFWRMPECYIRGSTIKYLRIPDEIIDMVKEEVVAKGRGRGGLQQQKQQKGRGMGGAGRGVFGGRGRGGIPGTGRGQPEKKPGRQAGKQ

SEQ ID NO: 17858 - protein, 541 aa, Homo sapiens
MGSSEVSIIPGLQKEEKAAVERRRLHVLKALKKLRIEADEAPVVAVLGSGGGLRAHIACLGVLSEMKEQGLLDAVTYLAGVSGSTWAISSLYTNDGDMEALEADLKHRFTRQEWDLAKSLQKTIQAARSENYSLTDFWAYMVISKQTRELPESHLSNMKKPVEEGTLPYPIFAAIDNDLQPSWQEARAPETWFEFTPHHAGFSALGAFVSITHFGSKFKKGRLVRTHPERDLTFLRGLWGSALGNTEVIREYIFDQLRNLTLKGLWRRAVANAKSIGHLIFARLLRLQESSQGEHPPPEDEGGEPEHTWLTEMLENWTRTSLEKQEQPHEDPERKGSLSNLMDFVKKTGICASKWEWGTTHNFLYKHGGIRDKIMSSRKHLHLVDAGLAINTPFPLVLPPTREVHLILSFDFSAGDPFETIRATTDYCRRHKIPFPQVEEAELDLWSKAPASCYILKGETGPVVMHFPLFNIDACGGDIEAWSDTYDTFKLADTYTLDVVVLLLALAKKNVRENKKKILRELMNVAGLYYPKDSARSCCLA

SEQ ID NO: 17859 - protein, 144 aa, Homo sapiens
MHLLGPWLLLLEYLAFSDSSKWVFEHPETLYAWEGACVWIPCTYRALDGDLESFILFHNPEYNKNTSKFDGTRLYESTKDGKVPSEQKRVQFLGDKNKNCTLSIHPVHLNDSGQLGLRMESKTEKWMERIHLNVSERPFPPHIQ

SEQ ID NO: 17860 - protein, 164 aa, Homo sapiens
MHLLGPWLLLLVLEYLAFSDSSKWVFEHPETLYAWEGACVWIPCTYRALDGDLESFILFHNPEYNKNTSKFDGTRLYESTKDGKVPSEQKRVQFLGDKNKNCTLSIHPVHLNDSGQLGLRMESKTEKWMERIHLNVSDPPKKVTTVIQNPMPIREGDTVTLSCN

SEQ ID NO: 17861 - protein, 289 aa, Homo sapiens
MAPACQILRWALALGLGLMFEVTHAFRSQDEFLSSLESYEIAFPTRVDHNGALLAFSPPPPRRQRRGTGATAESRLFYKVASPSTHFLLNLTRSSRLLAGHVSVEYWTREGLAWQRAARPHCLYAGHLQGQASSSHVAISTCGGLHGLIVADEEEYLIEPLHGGPKGSRSPEESGPHVVYKRSSLRHPHLDTACGVRDEKPWKGRPWWLRTLKPPPARPLGNETERGQPGLKRSVSRERYVETLVVADKMMVAYHGRRDVEQYVLAIMNIVRLPNFSRTRVWEAPLTSS

SEQ ID NO: 17862 - protein, 863 aa, Homo sapiens
MATTGTPTADRGDAAATDDPAARFQVQKHSWDGLRSIIHGSRKYSGLIVNKAPHDFQFVQKTDESGPHSHRLYYLGMPYGSRENSLLYSEIPKKVRKEALLLLSWKQMLDHFQATPHHGVYSREEELLRERKRLGVFGITSYDFHSESGLFLFQASNSLFHCRDGGKNGFMVSPMKPLEIKTQCSGPRMDPKICPADPAFFSFINNSDLWVANIETGEERRLTFCHQGLSNVLDDPKSAGVATFVIQEEFDRFTGYWWCPTASWEGSEGLKTLRILYEEVDESEVEVIHVPSPALEERKTDSYRYPRTGSKNPKIALKLAEFQTDSQGKIVSTQEKELVQPFSSLFPKVEYIARAGWTRDGKYAWAMFLDRPQQWLQLVLLPPALFIPSTENEEQRLASARAVPRNVQPYVVYEEVTNVWINVHDIFYPFPQSEGEDELCFLRANECKTGFCHLYKVTAVLKSQGYDWSEPFSPGEDEFKCPIKEEIALTSGEWEVLARHGSKIWVNEETKLVYFQGTKDTPLEHHLYVVSYEAAGEIVRLTTPGFSHSCSMSQNFDMFVSHYSSVSTPPCVHVYKLSGPDDDPLHKQPRFWASMMEAASCPPDYVPPEIFHFHTRSDVRLYGMIYKPHALQPGKKHPTVLFVYGGPQVQLVNNSFKGIKYLRLNTLASLGYAVVVIDGRGSCQRGLRFEGALKNQMGQVEIEDQVEGLQFVAEKYGFIDLSRVAIHGWSYGGFLSLMGLIHKPQVFKVAIAGAPVTVWMAYDTGYTERYMDVPENNQHGYEAGSVALHVEKLPNEPNRLLILHGFLDENVHFFHTNFLVSQLIRAGKPYQLQIYPNERHSIRCPESGEHYEVTLLHFLQEYL

SEQ ID NO: 17863 - protein, 185 aa, Homo sapiens
MLLLLLLPLLWGRERVEGQKSNRKDYSLTMQSSVTVQEGMCVHVRCSFSYPVDSQTDSDPVHGYWFRAGNDISWKAPVATNNPAWAVQEETRDRFHLLGDPQTKNCTLSIRDARMSDAGRYFFRMEKGNIKWNYKYDQLSVNVTAPAPRHQPHLSGDLAWGRRDHEQDHPTQCVLSPCLSVPDPP

SEQ ID NO: 17864 - protein, 451 aa, Homo sapiens
MGEPRAGAALDDGSGWTGSEEGSEEGTGGSEGAGGDGGPDAEGVWSPDIEQSFQEALAIYPPCGRRKIILSDEGKMYGRNELIARYIKLRTGKTRTRKQVSSHIQVLARRKSREIQSKLKALNVDQVSKDKAFQTMATMSSAQLISAPSLQAKLGPTGPQASELFQFWSGGSGPPWNVPDVKPFSQTPFTLSLTPPSTDLPGYEPPQALSPLPPPTPSPPAWQARGLGTARLQLVEFSAFVEPPDAVDSYQRHLFVHISQHCPSPGAPPLESVDVRQIYDKFPEKKGGLRELYDRGPPHAFFLVKFWADLNWGPSGEEAGAGGSISSGGFYGVSSQYESLEHMTLTCSSKVCSFGKQVVEKVETERAQLEDGRFVYRLLRSPMCEYLVNFLHKLRQLPERYMMNSVLENFTILQVVTNRDTQELLLCTAYVFEVSTSERGAQHHIYRLVRD

SEQ ID NO: 17865 - protein, 150 aa, Homo sapiens
MMWRPSVLLLLLLLRHGAQGKPSPDAGPHGQGRVHQAAPLSDAPHDDAHGNFQYDHEAFLGREVAKEFDQLTPEESQARLGRIVDRMDRAGDGDGWVSLAELRAWIAHTQQRHIRDSVKNFMTWRMQRPTKRCWLGTSGVSGWPTRMGTR

SEQ ID NO: 17866 - protein, 679 aa, Homo sapiens
MHLFACLCIVLSFLEGVGCLCPSQCTCDYHGRNDGSGSRLVLCNDMDMNELPTNLPVDTVKLRIEKTVIRRISAEAFYYLVELQYLWVTYNSVASIDPSSFYNLKQLHELRLDGNSLAAFPWASLLDMPLLRTLDLHNNKITSVPNEALRYLKNLAYLDLSSNRLTTLPPDFLESWTHLVSTPSGVLDLSPSRIILGLQDNPWFCDCHISKMIELSKVVDPAIVLLDPLMTCSEPERLTGILFQRAELEHCLKPSVMTSATKIMSALGSNVLLRCDATGFPTPQITWTRSDSSPVNYTVIQESPEEGVRWSIMSLTGISSKDAGDYKCKAKNLAGMSEAVVTVTVLGITTTPIPPDTSERTGDHPEWDVQPGSGRSTSVSSASSYLWSSSFSPTSSFSASTLSPPSTASFSLSPFSSSTVSSTTTLSTSISASTTMANKRSFQLHQGGKRNLKVAKNGSKLPPASTSKKEELALLDQTMLTETNAAIENLRVVSETKESVTLTWNMINTTHNSAVTVLYSKYGGKDLLLLNADSSKNQVTIDGLEPGGQYMACVCPKGVPPQKDQCITFSTERVEGDDSQWSLLLVVTSTACVVILPLICFLLYKVCKLQCKSEPFWEDDLAKETYIQFETLFPRSQSVGELWTRSHRDDSEKLLLCSRSSVESQVTFKSEGSRPEYYC

SEQ ID NO: 17867 - protein, 104 aa, Homo sapiens
MSPPPLLQPLLLLLPLLNVEPSGATLIRIPLHRVQPGRRILNLLRGWREPAELPKLGAPSPGDKPIFVPLSNYRDGYTTDLIPKPLAPSRPMGPSLPFNMELGG

SEQ ID NO: 17868 - protein, 154 aa, Homo sapiens
MLLLLLLLPPLLCGRVGAKEQKDYLLTMQKSVTVQEGLCVSVLCSFSYPQNGWTASDPVHGYWFRAGDHVSRNIPVATNNPARAVQEETRDRFHLLGDPQNKDCTLSIRDTRESDAGTYVFCVERGNMKWNYKYDQLSVNVTGGERKQEMELHI

SEQ ID NO: 17869 - protein, 223 aa, Homo sapiens
AVSERRGLGRGSPAEWGQRLLLVLLLGGCSGRIHQLALTGEKRADIQLNSFGFYTNGSLEVELSVLRLGLREAEEKSLLTRDFQDCPLQKNSSSFLVLFLINTKDLQVQVRKYGEQKTLFIFPGLLPEAPSKPGLPKPQATVPRKVDGGGTSAASKPKSTPAVIQGPSGKDKDLVLGLSHLNNSYNFSFHVVIGSQAEEGQYSLNFHNCNNSVPGKEHPFDIT

SEQ ID NO: 17870 - protein, 206 aa, Homo sapiens
MARGGWRRLRRLLSAGQLLFQGRALLVTNTLGCGALMAAGDGVRQSWEIRARPGQVFDPRRSASMFAVGCSMGPFLHYWYLSLDRLFPASGLRGFPNVLKKVLVDQLVASPLLGVWYFLGLGCLEGQTVGESCQELREKFWEFYKADWCVWPAAQFVNFLFVPPQFRVTYINGLTLGWDTYLSYLKYRSPVPLTPPGCVALDTRAD

SEQ ID NO: 17871 - protein, 71 aa, Homo sapiens
MAPLALHLLVLVPILLSLVASQDWKAERSQDPFEKCMQDPDYEQLLKVVTWGLNRTLKPQRVIVVGAGVAG

SEQ ID NO: 17872 - protein, 224 aa, Homo sapiens
MRAPGAGAASVVSLALLWLLGLPWTWSAAAALGVYVGSGGWRFLRIVCKTARRDLFGLSVLIRVRLELRRHQRAGHTIPRIFQAVVQRQPERLALVDAGTGECWTFAQLDAYSNAVANLFRQLGFAPGDVVAIFLEGRPEFVGLWLGLAKAGMEAALLNVNLRREPLAFCLGTSGAKALIFGGEMVAGEARRGHQVGGDPGLAPGRAGRCCAPGLGRRPPWTWA

SEQ ID NO: 17873 - protein, 164 aa, Homo sapiens
MAVGKFLLGSLLLLSLQLGQGWGPDARGVPVADGEFSSEQVAKAGGTWLGKDFQGPSVTSQLSPALTLLTVSALPSHRHPPPPCPPAPSPVWSMPAVEPDPVRGRARPGLRLRGEGHLPLLRRQLPPWCPHPAWPGAGPAAGPGPSPRRALLPAHSLHRRGLPR

SEQ ID NO: 17874 - protein, 204 aa, Homo sapiens
MRLSRRPETFLLAFVLLCTLLGLGCPLHCEICTAAGSRCHGQMKTCSSDKDTCVLLVGKATSKGKELVHTYKGCIRSQDCYSGVISTTMGPKDHMVTSSFCCQSDGCNSAFLSVPLTNLTENGLMCPACTASFRDKCMGPMTHCTGKENHCVSLSGHVQAGIFKPRFAMRGCATESMCFTKPGAEVPTGTNVLFLHHIECTHSP

SEQ ID NO: 17875 - protein, 167 aa, Homo sapiens
MGVPRPQPWALGLLLFLLPGSLGAESHLSLLYHLTAVSSPAPGTPAFWVSGWLGPQQYLSYNSLRGEAEPCGAWVWENQVSWYWEKETTDLRIKEKLFLEAFKALGGKGPYTLQGLLGCELGPDNTSVPTAKFALNGEEFMNFDLKQGTWGGDWPEALAISQRWQQQ

SEQ ID NO: 17876 - protein, 217 aa, Homo sapiens
MTVLAPAWSPTTYLLLLLLLSSGLSGTQDCSFQHSPISSDFAVKIRELSDYLLQDYPVTVASNLQDEELCGGLWRLVLAQRWMERLKTVAGSKMQGLLERVNTEIHFVTKCAFQETSEQLVALKPWITRQNFSRCLELQCQPDSSTLPPPWSPRPLEATAPTAPQPPLLLLLLLPVGLLLLAAAWCLHWQRTRRRTPRPGEQVPPVPSPQDLLLVEH

SEQ ID NO: 17877 - protein, 189 aa, Homo sapiens
MAAPSGGWNGVGASLWAALLLGAVALRPAEAVSEPTTVAFDVRPGGVVHSFSHNVGPGDKYTCMFTYASQGGTNEQWQMSLGTSEDHQHFTCTIWRPQGKSYLYFTQFKAEVRGAEIEYAMAYSKAAFERESDVPLKTEEFEVTKTAGTERWGWGRGDATPIQGWAIGAVWRGGSAIGVLETVDQASTN

SEQ ID NO: 17878 - protein, 57 aa, Homo sapiens
MQGPLLLPGLCFLLSLFGAVTQKTKSECSEPEQRTCGPRAGPGATHGLQWAGEKCLF

SEQ ID NO: 17879 - protein, 225 aa, Homo sapiens
MGVPRPQPWALGLLLFLLPGSLGAESHLSLLYHLTAVSSPAPGTPAFWVSGWLGPQQYLSYNSLRGEAEPCGAWVWENQVSWYWEKETTDLRIKEKLFLEAFKALGGKGPYTLQGLLGCELGPDNTSVPTAKFALNGEEFMNFDLKQGTWGGDWPEALAISQRWQQQDKAANKELTFLLFSCPHRLREHLERGRGNLEWKDTVSHYVAQAGLELLGSSDSPALVS

SEQ ID NO: 17880 - protein, 106 aa, Homo sapiens
MHLLGPWLLLLVLEYLAFSDSSKWVFEHPETLYAWEGACVWIPCTYRALDGDLESFILFHNPEYNKNTSKFDGTRLYESTKDGKVPSEQKRVQFLGDKNKNCTLSI

SEQ ID NO: 17881 - protein, 292 aa, Homo sapiens
MPLHVKWPFPAVPPLTWTLASSVVMGLVGTYSCFWTKYMNHLTVHNREVLYELIEKRGPATPLITVSNHQSCMDDPHLWGILKLRHIWNLKLMRWTPAAADICFTKELHSHFFSLGKCVPVCRGAEFFQAENEGKGVLDTGRHMPGAGKRREKGDGVYQKGMDFILEKLNHGDWVHIFPEGKVNMSSEFLRFKWGIGRLIAECHLNPIILPLWHVGMNDVLPNSPPYFPRFGQKITVLIGKPFSALPVLERLRAENKSAVEMRKALTDFIQEEFQHLKTQAEQLHNHLQPGR

SEQ ID NO: 17882 - protein, 301 aa, Homo sapiens
MTRHGKNCTAGAVYTYHEKKKDTAASGYGTQNIRLSRDAVKDFDCCCLSLQPCHDPVVTPDGYLYEREAILEYILHQKKEIARQMKAYEKQRGTRREEQKELQRAASQDHVRGFLEKESAIVSRPLNPFTAKALSGTSPDDVQPGPSVGPPSKDKDKVLPSFWIPSLTPEAKATKLEKPSRTVTCPMSGKPLRMSDLTPVHFTPLDSSVDRVGLITRSERYVCAVTRDSLSNATPCAVLRPSGAVVTLECVEKLIRKDMVDPVTGDKLTDRDIIVLQRGGTGFAGSGVKLQAEKSRPVMQA

SEQ ID NO: 17883 - protein, 69 aa, Homo sapiens
MATQGHLTFKDVAIEFSQEEWKCLEPVQKALYKDVMLENYRNLVFLGWRIMARSHLTATSVSQVSLLNV

SEQ ID NO: 17884 - protein, 62 aa, Homo sapiens
GDILLFGTLLMNAGAVLNFKLKKKDTQGFGEESREPSTDPEHGGGAGSHLQPGEIPYYQRGT

SEQ ID NO: 17885 - protein, 105 aa, Homo sapiens
MAQGVLWILLGLLLWSDPGTASLPLLMDSVIQALAELEQKVPAAKTRHTASAWLMSAPNSGPHNRLYHFLLGAWSLNATELDPCPLSPELLGLTKEVARHDVREG

SEQ ID NO: 17886 - protein, 150 aa, Homo sapiens
MAPLALHLLVLVPILLSLVASQDWKAERSQDPFEKCMQDPDYEQLLKVTILEADNRIGGRIFTYRDQNTGWIGELGAMRMPSSHRILHKLCQGLGLNLTKFTQYDKNTWTEVHEVKLRNYVVEKVPEKLGYALRPQEKGHSPEDIYQMAL

SEQ ID NO: 17887 - protein, 566 aa, Homo sapiens
MRRVGGRADEDATAAGSLWVLAPPEPTGHLVIPGTSPLEPPCPWLDSHIFQCRFGKMLPLEKAFASPRSSPAPPDLPTPGSAAGVQQEEPETIPERTPADLEFSRLRFREFVYQEAAGPHQTLARLHELCRQWLMPEARSKEQMLELLVLEQFLGILPDKVRPWVVAQYPESCKKAASLVEGLADVLEEPGMLLGSPAGSSSILSDGVYERHMDPLLLPGELASPSQALGAGEIPAPSETPWLSPDPLFLEQRRVREAKTEEDGPANTEQKLKSFPEDPQHLGEWGHLDPAEENLKSYRKLLLWGYQLSQPDAASRLDTEELRLVERDPQGSSLPEGGRRQESAGCACEEAAPAGVLPELPTEAPPGDALADPPSGTTEEEEEQPGKAPDPQDPQDAESDSATGSQRQSVIQQPAPDRGTAKLGTKRPHPEDGDGQSLEGVSSSGDSAGLEAGQGPGADEPGLSRGKPYACGECGEAFAWLSHLMEHHSSHGGRKRYACQGCWKTFHFSLALAEHQKTHEKEKSYALGGARGPQPSTREAQAGARAGGPPESVEGEAPPAPPEAQR

SEQ ID NO: 17888 - protein, 1129 aa, Homo sapiens
MSVEAYGPSSQTLTFLDTEEAELLGADTQGSEFEFTDFTLPSQTQTPPGGPGGPGGGGAGGPGGAGAGAAAGQLDAQVGPEGILQNGAVDDSVAKTSQLLAELNFEEDEEDTYYTKDLPIHACSYCGIHDPACVVYCNTSKKWFCNGRGNTSGSHIVNHLVRAKCKEVTLHKDGPLGETVLECYNCGCRNVFLLGFIPAKADSVVVLLCRQPCASQSSLKDINWDSSQWQPLIQDRCFLSWLVKIPSEQEQLRARQITAQQINKLEELWKENPSATLEDLEKPGVDEEPQHVLLRYEDAYQYQNIFGPLVKLEADYDKKLKESQTQDNITVRWDLGLNKKRIAYFTLPKTDSGNEDLVIIWLRDMRLMQGDEICLRYKGDLAPLWKGIGHVIKVPDNYGDEIAIELRSSVGAPVEVTHNFQVDFVWKSTSFDRMQSALKTFAVDETSVSGYIYHKLLGHEVEDVIIKCQLPKRFTAQGLPDLNHSQVYAVKTVLQRPLSLIQGPPGTGKTVTSATIVYHLARQGNGPVLVCAPSNIAVDQLTEKIHQTGLKVVRLCAKSREAIDSPVSFLALHNQIRNMDSMPELQKLQQLKDETGELSSADEKRYRALKRTAERELLMNADVICCTCVGAGDPRLAKMQFRSILIDESTQATEPECMVPVVLGAKQLILVGDHCQLGPVVMCKKAAKAGLSQSLFERLVVLGIRPIRLQVQYRMHPALSAFPSNIFYEGSLQNGVTAADRVKKGFDFQWPQPDKPMFFYVTQGQEEIASSGTSYLNRTEAANVEKITTKLLKAGAKPDQIGIITPYEGQRSYLVQYMQFSGSLHTKLYQEVEIASVDAFQGREKDFIILSCVRANEHQGIGFLNDPRRLNVALTRARYGVIIVGNPKALSKQPLWNHLLNYYKEQKVLVEGPLNNLRESLMQFSKPRKLVNTINPGARFMTTAMYDAREAIIPGSVYDRSSQGRPSSMYFQTHDQIGMISAGPSHVAAMNIPIPFNLVMPPMPPPGYFGQANGPAAGRGTPKGKTGRGGRQKNRFGLPGPSQTNLPNSQASQDVASQPFSQGALTQGYISMSQPSQMSQPGLSQPELSQDSYLGDEFKSQIDVALSQDSTYQGERAYQHGGVTGLSQY

SEQ ID NO: 17889 - protein, 194 aa, Homo sapiens
MGPHFTLLCAALAGCLLPAEGCVICDPSVVLALKSLEKDYLPGHLDAKHHKAMMERVENAVKDFQELSLNEDAYMGVVDEATLQKGSWSLLKDLKRITDSDVKGDLFVKELFWMLHLQKETFATYVARFQKEAYCPNKCGVMLQTLIWCKNCKKEVHACRKSYDCGGERTGPSRRNWCRAECGSSSNGRHDPGL

SEQ ID NO: 17890 - protein, 724 aa, Homo sapiens
MIEDSGKRGNTMAERRQLFAEMRAQDLDRIRLSTYRTACKLRFVQKKCNLHLVDIWNVIEALRENALNNLDPNTELNVSRLEAVLSTIFYQLNKRMPTTHQIHVEQSISLLLNFLLAAFDPEGHGKISVFAVKMALATLCGGKIMDKLRYIFSMISDSSGVMVYGRYDQFLREVLKLPTAVFEGPSFGYTEQSARSCFSQQKKVTLNGFLDTLMSDPPPQCLVWLPLLHRLANVENVFHPVECSYCHSESMMGFRYRCQQCHNYQLCQDCFWRGHAGGSHSNQHQMKEYTSWKSPAKKLTNALSKSLSCASSREPLHPMFPDQPEKPLNLAHIVPPRPVTSMNDTLFSHSVPSSGSPFITRSMLESSNRLDEEHRLIARYAARLAAESSSSQPPQQRSAPDISFTIDANKQQRQLIAELENKNREILQEIQRLRLEHEQASQPTPEKAQQNPTLLAELRLLRQRKDELEQRMSALQESRRELMVQLEGLMKLLKTQGAGSPRSSPSHTISRPIPMPIRSASACSTPTHTPQDSLTGVGGDVQEAFAQSSRRNLRNDLLVAADSITNTMSSLVKELNSEVGSETESNVDSEFARTQFEDLVPSPTSEKAFLAQIHARKPGYIHSGATTSTMRGDMVTEDADPYVQPEDENYENDSVRQLENELQMEEYLKQKLQDEAYQLHVSTETRLEHPCPVSETKWRVLFWGFVFFGGFLSLALQIYFWGLF

SEQ ID NO: 17891 - protein, 42 aa, Homo sapiens
MAAASAGATRLLLLLLMAVAAPSRARGSGCRAGTGARGVSAL

SEQ ID NO: 17892 - protein, 158 aa, Homo sapiens
MKLKGLGKRCKRREDLEIRFILIQNRAGKTRLAKWYMQFDDDEKQKLIEEVHAVVTVRDAKHTNFVEFRNFKIIYRRYAGLYFCICVDVNDNNLAYLEAIHNFVEVLNEYFHNVCELDLVFNFYKVYTVVDEMFLAGEIRETSQTKVLKQLLMLQSLE

SEQ ID NO: 17893 - protein, 191 aa, Homo sapiens
MHLLGPWLLLLEYLAFSDSSKWVFEHPETLYAWEGACVWIPCTYRALDGDLESFILFHNPEYNKNTSKFDGTRLYESTKDGKVPSEQKRVQFLGDKNKNCTLSIHPVHLNDSGQLGLRMESKTEKWMERIHLNVSVAPRGGSNEAGCCHLDLLDHQVCLHPERAQVLPTVESPWEDCDLPASGCRWEVPLQ

SEQ ID NO: 17894 - protein, 90 aa, Homo sapiens
MRVLACLLAALVGIQAVERLRLADGPHGCAGRLEVWHGGRWGTVCDDGWDLRDAAVACRQLGCGGALAAPGGAFFGEGAGPVWLSELACR

SEQ ID NO: 17895 - protein, 456 aa, Homo sapiens
MPKKRQALVEFEDVLGACNAVNYAADNQIYIAGHPAFVNYSTSQKISRPGDSDDSRSVNSVLLFTILNPIYSITTDVLYTICNPCGPVQRIVIFRKNGVQAMVEFDSVQSAQRAKASLNGADIYSGCCTLKIEYAKPTRLNVFKNDQDTWDYTNPNLSGQGDPGSNPNKRQRQPPLLGDHPAEYGGPHGGYHSHYHDEGYGPPPPHYEGRRMGPPVGGHRRGPSRYGPQYGHPPPPPPPPEYGPHADSPVLMVYGLDQSKMNCDRVFNVFCLYGNVEKVKFMKSKPGAAMVEMADGYAVDRAITHLNNNFMFGQKLNVCVSKQPAIMPGQSYGLEDGSCSYKDFSESRNNRFSTPEQAAKNRIQHPSNVLHFFNAPLEVTEENFFEICDELGVKRPSSVKVFSGKSERSSSGLLEWESKSDALETLGFLNHYQMKNPNGPYPYTLKLCFSTAQHAS

SEQ ID NO: 17896 - protein, 936 aa, Homo sapiens
MALTQGPLTFRDVAIEFSQEEWKSLDPVQKALYWDVMLENYRNLVFLGILPKCMTKELPPIGNSNTGEKCQTVTLERHECYDVENFYLREIQKNLQDLEFQWKDGEINYKEVPMTYKNNLNGKRGQHSQEDVENKCIENQLTLSFQSRLTELQKFQTEGKIYECNQSEKTVNNSSLVSPLQRILPSVQTNISKKYENEFLQLSLPTQLEKTHIREKPYMCKGCGKAFRVSSSLINHQMVHTTEKPYKCNECGKAFHRGSLLTIHQIVHTRGKPYQCGVCGKIFRQNSDLVNHRRSHTGEKPYKCNECGKSFSQSYNLAIHQRIHTGEKPYKCNECGKTFKQGSCLTTHQIIHTGEKPYQCDICGKVFRQNSNLVNHQRIHTGEKPYKCNICGKSFSQSSNLATHQTVHSGNKPYKCDECGKTFKRSSSLTTHQIIHTGEKPYTCDVCDKVFSQRSQLARHQRSHTGEKPYKCNECGKVFSQTSHLVGHRRIHTGEKPYKCDKCGKAFKQGSLLTRHKIIHTREKRYQCGECGKVFSENSCLVRHLRIHTGEQPYKCNVCGKVFNYSGNLSIHKRIHTGEKPFQCNECGTVFRNYSCLARHLRIHTGQKPYKCNVCGKVFNDSGNLSNHKRIHTGEKPFQCNECGKVFSYYSCLARHRKIHTGEKPYKCNDCGKAYTQRSSLTKHLIIHTGEKPYNCNEFGGAFIQSSKLARYHRNPTGEKPHKCSHCGRTFSHITGLTYHQRRHTGEMPYKCIECGQVFNSTSNLARHRRIHTGEKPYKCNECGKVFRHQSTLARHRSIHTGEKPYVCNECGKAFRVRSILVNHQKMHTGDKPYKCNECGKAFIERSKLVYHQRNHTGEKPYKCIECGKAFGRFSCLNKHQMIHSGEKPYKCNECGKSFISRSGLTKHQTKHTAESLKTKFNVEKPLDVLLTSGFK

SEQ ID NO: 17897 - protein, 204 aa, Homo sapiens
MWPLALVIASLTLALSGGVSQESSKVLNTNGTSGFLPGGYTCFPHSQPWQAALLVQGRLLCGGVLVHPKWVLTAAHCLKEGLKVYLGKHALGRVEAVNYPKTLQCANIQLRSDEECRQVYPGKITDNMLCAGTKEGGKDSCEGDSGGPLVCNRTLYGIVSWGDFPCGQPDRPGVYTRVSRYVLWIRETIRKYETQQQKWLKGPQ

SEQ ID NO: 17898 - protein, 615 aa, Homo sapiens
MFARGSRRRRSGRAPPEAEDPDRGQPCNSCREQCPGFLLHGWRKICQHCKCPREEHAVHAVPVDLERIMCRLISDFQRHSISDDDSGCASEEYAWVPPGLKPEQVYQFFSCLPEDKVPYVNSPGEKYRIKQLLHQLPPHDSEAQYCTALEEEEKKELRAFSQQRKRENLGRGIVRIFPVTITGAICEECGKQIGGGDIAVFASRAGLGACWHPQCFVCTTCQELLVDLIYFYHVGKVYCGRHHAECLRPRCQACDEIIFSPECTEAEGRHWHMDHFCCFECEASLGGQRYVMRQSRPHCCACYEARHAEYCDGCGEHIGLDQGQMAYEGQHWHASDRCFCCSRCGRALLGRPFLPRRGLIFCSRACSLGSEPTAPGPSRRSWSAGPVTAPLAASTASFSAVKGASETTTKGTSTELAPATGPEEPSRFLRGAPHRHSMPELGLRSVPEPPPESPGQPNLRPDDSAFGRQSTPRVSFRDPLVSEGGPRRTLSAPPAQRRRPRSPPPRAPSRRRHHHHNHHHHHNRHPSRRRHYQCDAGSGSDSESCSSSPSSSSSESSEDDGFFLGERIPLPPHLCRPMPAQDTAMETFNSPSLSLPRDSRAGMPRQARDKNCIVA

SEQ ID NO: 17899 - protein, 551 aa, Homo sapiens; identical to SEQ ID NO: 13939

SEQ ID NO: 17900 - protein, 676 aa, Homo sapiens
MGHHRPWLHASVLWAGVASLLLPPAMTQQLRGDGLGFRNRNNSTGVAGLSEEASAELRHHLHSPRDHPDENKDVSTENGHHFWSHPDREKEDEDVSKEYGHLLPGHRSQDHKVGDEGVSGEEVFAEHGGQARGHRGHGSEDTEDSAEHRHHLPSHRSHSHQDEDEDEVVSSEHHHHILRHGHRGHDGEDDEGEEEEEEEEEEEEASTEYGHQAHRHRGHGSEEDEDVSDGHHHHGPSHRHQGHEEDDDDDDDDDDDDDDDDVSIEYRHQAHRHQGHGIEEDEDVSDGHHHRDPSHRHRSHEEDDNDDDDVSTEYGHQAHRHQDHRKEEVEAVSGEHHHHVPDHRHQGHRDEEEDEDVSTERWHQGPQHVHHGLVDEEEEEEEITVQFGHYVASHQPRGHKSDEEDFQDEYKTEVPHHHHHRVPREEDEEVSAELGHQAPSHRQSHQDEETGHGQRGSIKEMSHHPPGHTVVKDRSHLRKDDSEEEKEKEEDPGSHEEDDESSEQGEKGTHHGSRDQEDEEDEEEGHGLSLNQEEEEEEDKEEEEEEEDEERREERAEVGAPLSPDHSEEEEEEEEGLEEDEPRFTIIPNPLDRREEAGGASSEEESGEDTGPQDAQEYGNYQPGSLCGYCSFCNHCQFCYLCPLVCETVCAPGSYVDYFSSSLYQALADMLETPEP

SEQ ID NO: 17901 - protein, 96 aa, Homo sapiens
MSGAPTAGAALMLCAATAVLLSAQGGPVQSKSPRFASWDEMNVLAHGLLQLGQGLREHAERTRSQLSALERRLSACGSACQGTEGSTDLPLAPESR

SEQ ID NO: 17902 - protein, 45 aa, Homo sapiens
VKLEIFRMIIYLTFPVAMFWVSNQAEWFEDDVIQRKRELWPPEKP

SEQ ID NO: 17903 - protein, 96 aa, Homo sapiens
MRGHPSLLLLYMALTTCLDTSPSEETDQVLPLPGVQDPAPSSFRPRNLDSQPLLLPPGPHCFPSPYDSSPRDPPFFCPSCLWVQKSSWVPQRPRAS

SEQ ID NO: 17904 - protein, 3266 aa, Homo sapiens
MPAPVGLLGLVLLWPLMAVTAEKIPDSQVGQVASCMTACTGSAGPHLPVGTRYTYHFSTNTSTSLQDVLVEGSGLGLQGLAVLDVLGLCQMALWLQDFQVTSILGAKVELLKESESLSATLGRNPLRFILHSGRVAHLCPHPTEPRWVLNVKRAVLSLLQGHPGAHSPKTFDEVDILGRCPTTYQHHGDWLHKTKDLARCSLRRGRSSLHSQALPGVAPGLTSRLTCVQSFRAGVLREASCTELDSAGPLPAKASAVQMRTLSSLSLLHEMPQDPAGTDPDDRDDEDMTPSSLLYEWEETPSQAMVATAATLVRRLCLAQTTSLEAMDLFLTLVSQLQGLSGGELMELWQYSSFKCRDNGQPLLDALPSCGTEHCVGLMKELIASAAVEADEVEAWLSSLAFLPQPTDAMVHMLLPLLQTPRASPGAFLGISALVHNLCASLDGPCGQLPGVGSLVRILGDALGENCTIQEPSDDDKLQLVLKAVGNAGLAAMALTPTLSACASLRSSTPEIRLGAIQAFRRVPCSADRSVLSRLYQSLEEDAEIRINAYLALMRCPSEEVFAQVRRTQAGELSTQVGSFVWSHILQLLETHDPLKRALRDTLPEDILSQEFHPEMWKHSSYSDVTFRSVSGSLGANLEGTLLFSPASFLPRSATVNLTIHTMGRAFNLLELGLRLENAEEIAHRLFGRKSFWGQEDGREPEPEEPPGPEPGPAPQPASPECPGDRDRRMRYLQQKVTRRRGARQALRCELSVKLLGQELSFVNCGATGSHVNHWPLNLAELAIKLMKGQEVQMNRRLSLAAQELVFPTVSGLPARLTLNASAAISIRVRGTTDFQQRSDFSVNGYVKPSALLQISAQMGTAGILGQAGLRWVTSVRSAASLDGGIQVQKGRVLKVHLNTPEEAVELLSFSSQLYLITRDGVRSLRHVPGPSEVQSCTGEEVSYTWGWRLCTGVTWPVPGQPYLLSLPVFAAVTLQKRDPGLRQYLLEAAYTLQPQKGSWFPQEATAHVFMGTPGSEVLRDVGVDMSYSLPQNKFRLKLLHPKKKIELDGKMEALGSAHTGHLELVLDDRDVYYIKGWSDLQPAMGGEAERFQAQLEVKLVTGGSPVVFTGNLTRQVGSKLAFSASLSHLLSDQANVTALLERKEENGRRVAALGAELFVPGLVGLRALGLLQQRGQLWTNSLRIQYSLLGQAKQAAHECSTSQKLRADSGSDGAYRLELRHELHCTQILAFSHKVQLWHEEDSGHLHSQLEVSYGKHWDKNSNKRHLRVSQTFKNDSGPALSNHFMEFVLQVPERQVDCRVQLYHLSLRLPYVESSSHLKVQYNGRPLFVAGGQWKDTSRATLWKWEGALNLDSPWLMVSAAHRLYWPHRAVFQAVLELTLGKAWTLKDLVVSVGCRSQGPNREGKIQVYTAATTYLRVSTVTVLAQSLFHSWSELESAWNAAVQGEIHAENSRDRKILNCWLKGPQQELNLTAAYRHLEWPRKTQVSLTAVRIGAQGQPRGLQLEGELEELRQDRTLYRKRGALLLRHPLHLPIPQSLLLQETFTADRRHQRYSLETRVVLNGREETLQTMVLGCQAGHPYVCAGLMHPYDGKVIPRNTEGCLVTWNQHTAKNREVEATLKVHRKVVLHLKGLHHDRSQHGEIRHSLALDLAHSYQLSFPQALSLDGGIIFRQSPQGTFNFGMDARAAVNHNVTSQASVQLNGSDSDFAFFFQLRHPHGPTFPPNFQVQAAAGRYRVRSLNGSLSVQMSGRELVLLEVDASQDTRRSSRGWGVSVLLHQAVLSAPRAVRLQLSAKITPARIWLFSKALLDQNTAQLLLKASEEWRGGRILTFQSQTRHTVAGWAAMPRLLTLTGRLKQKETLQEGTLSVTADSAVLGFLLRDQHEKAGNGTSVRSVTCVLAQNSSQALPGELQLKGRLQAQTRNLRAQASIRAHAASLALGGACSWGPRHGQLAGGPTHNISTLSDAGLPSEAGMLLSLTHVASNCSARLALWNAGAQLDGAIGLEDVTPESSGLQLHASLRHTHTMPSLKHWGLPFSLDGHGHFQVNCSGDASPTQLLGWCRGDIAGQPLEVSVDIHNGSSGFEHSGRILMGPTFLNYSVSCYYHDGHLELSGRSWHNSEALLWAGFPGEACLSAELQIHETQTQARVALHGGDSGVSMDLAALVARPRRGPLQLVASASHTVPALQRLGLPFTNQLVFQGLWEAEEMSSSLQLTCDSQATLVLDVRGQNQAVSKELLFSGRHRLPFLLGLCPSSASASAKLHYSKGEVQSMFALGVEERHFHISTRQVAAKAGLNNFIKLEQTFLQLSALPRELFLQTAYERAHGTRVLRQVVLWDGQEVALTGSLSGPFPKPTRNLSLQVELTHPLPLPLPRHCSLRLSSEHLGGSHRDGLVVGWDGRDQVLVSSSLWLGKSELAARLALAHPFNLPWRQAEASGLAESRGGRQSRQVQLTWNRGQPATLQLTWADGSLAHSTAWDGCLAASPGQLQETWGLNSLQACGAFTQTPAVFVEQLNVSWGQHRMRQNLTYERHWPSQPDKIIMEATLEHVLGASCTRQSFWGEVQTDYARWLRHSLHLGLCDLPRALLVVGEHTLGQGGLLLRSRCHLGLAPDPDHGLHLSLTLQNHSRPRSADFSGALELRGSKAQRVGLLGRVSTSTSQSLVRLEGSVDNREEKVRLSVFRAPSCLQASVAHEEGGREESVVLRACAHGRTAEAEVLFRDGRQPSQPLGRLTLQAANQSLLLAARGCQGGLLGHVESRIAAVGSQVQARLEEKVQGLGASVRRFQQLVQPAGTLDGVAGLLLQLSQAGREAMQASGWAVATLWARSQALTQHLPLYLEWLQVGLEQLREELEWPLATLKDAYLEVTLRPLEEVWRERAEEAMRRLQAWVPGMPGKGGPRPIRAALGAMKGALELAAQQMLSWAEATFSRALKRLCKPLLDLYSLSARNRSVVVMLPLLPAGDEPLDVARVTSYLMEEKLLRPLRELSGANVLAEYYWLRRRLLAGPWEYHALVAGAQHVVTFDGRVWDLSTQCGSILLAQDFAHNTFSLTLSRTGSGLTALFVELNHKTLILYPSLQAYRLYNSSLPGDSCPDLKLHPATTRKDVSRIELASEDGVSVSCDVPTGLCSLTLGLWQHGISAGLLGTNDNEAGNELMLPDGSMARSLEELSLAWQVGGDCRATEKPQQEQACPGQLPACWAFFEGPHSSLRDCFRVVDPTPFLSLCVQVPCGTQELQPACNLAAAYIHLCARGFVPLAPPPQCV

SEQ ID NO: 17905 - protein, 163 aa, Homo sapiens
QMGMAAAVLAMTLAPTVSGTTSKCSSRRWCPVPASSSCVSHLLGSAGGLTEQELMEQLEHCELAPPAPSAPSWGCLPSPSPRISLTSLHSASSNTSLSGHRGSPSPPQAEARRRGGGSFVERCQELVRSGPDLRRPPTPAPWPSSGLGTPLTPPKMKLNETSF

SEQ ID NO: 17906 - protein, 69 aa, Homo sapiens
RRLRDLLTRRESPLALWGCVALSCCYSRCRTGRAIRGHEGPESPKFRGLTGSNYPGLSISLRLTGSSAQ

SEQ ID NO: 17907 - protein, 172 aa, Homo sapiens
MWVPVVFLTLAVCGGVLVHPQWVLTAAHCIRNKSVILLGRHSLFHPEDTGQVFQVSHSFPHPLYDMSLLKNRFLRPGDDSSHDLMLLRLSEPAELTDAVKVMDLPTQEPALGTTCYASGWGSIEPEEFLTPKKLQCVDLHVISNDVCAQVHPQKVTKFMLCAGRWTGGKSTC

SEQ ID NO: 17908 - protein, 105 aa, Homo sapiens
MTLSPLLLFLPPLLLLLDVPTAAVQASPLQALDFFGNGPPVNYKTGNLYLRGPLKKSNAPLVNVTLYYEALCGGCRAFLIRELFPTWLLVMEILNVTLVPYGNAQ

SEQ ID NO: 17909 - protein, 113 aa, Homo sapiens
MPGQELRTVNGSQMLLVLLVLSWLPHGGALSLAEASRASFPGPSELHSEDSRFRELRKRYEDLLTRLRANQSWEDSNTDLVPAPAVRILTPEVRLGSGGHLHLRISRAALPEG

SEQ ID NO: 17910 - protein, 73 aa, Homo sapiens
MGVKLEIFRMIIYLTFPVAMFWVSNQAEWFEDDVIQRKRELWPPEKLQEIEEFKERLRKRREEKLLRDAQQNS

SEQ ID NO: 17911 - protein, 79 aa, Homo sapiens
MRLVHTQEPGEWLELLLEPGSLYILRGSARYDFSHEILRDEESFFGERRIPRGRRISVICRSLPEGMGPGESGQPPPAC

SEQ ID NO: 17912 - protein, 277 aa, Homo sapiens
MWPLALVIASLTLALSGGVSQESSKVLNTNGTSGFLPGGYTCFPHSQPWQAALLVQGRLLCGGVLVHPKWVLTAAHCLKEGLKVYLGKHALGRVEAGEQVREVVHSIPHPEYRRSPTHLNHDHDIMLLELQSPVQLTGYIQTLPLSHNNRLTPGTTCRVSGWGTTTSPQVNYPKTLQCANIQLRSDEECRQVYPGKITDNMLCAGTKEGGKDSCEGDSGGPLVCNRTLYGIVSWGDFPCGQPDRPGVYTRVSRYVLWIRETIRKYETQQQKWLKGPQ

SEQ ID NO: 17913 - protein, 244 aa, Homo sapiens
MAAPSDGFKPRERSGGEQAQDWDALPPKRPRLGAGNKIGGRRLIVVLEGASLETVKVGKTYELLNCDKHKSILLKNGRDPGEARPDITHQSLLMLMDSPLNRAGLLQVYIHTQKNVLIEVNPQTRIPRTFDRFCGLMVQLLHKLSVRAADGPQKLLKVIKNPVSDHFPVGCMKVGTSFSIPVVSDVRELVPSSDPIVFVVGAFAHGKVSVEYTEKMVSISNYPLSAALTCAKLTTAFEEVWGVI

SEQ ID NO: 17914 - protein, 278 aa, Homo sapiens
MGSPGMVLGLLVQIWALQEASSLSVQQGPNLLQVRQGSQATLVCQVDQATAWERLRVKWTKDGAILCQPYITNGSLSLGVCGPQGRLSWQAPSHLTLQLDPVSLNHSGAYVCWAAVEIPELEEAEGNITRLFVDPDDPTQNRNRIASFPGFLFVLLGVGSMGVAAIVWGAWFWGRRSCQQRDSGNAFYSNVLYRPRGAPKKSEDCSGEGKDQRGQSIYSTSFPQPAPRQPHLASRPCPSPRPCPSPRPGHPVSMVRVSPRPSPTQQPRPKGFPKVGEE

SEQ ID NO: 17915 - protein, 170 aa, Homo sapiens
MRILQLILLALATGLVGGETRIIKGFECKPHSQPWQAALFEKTRLLCGATLIAPRWLLTAAHCLKPRYIVHLGQHNLQKEEGCEQTRTATESFPHPGFNNSLPNKDHRNDIMLVKMASPVSITWAVRPLTLSSRCVTAGTSCLISGWGSTSSPQLRLPHTLRCANITIIE

SEQ ID NO: 17916 - protein, 17 aa, Homo sapiens
MYASILLLATISADRFL

SEQ ID NO: 17917 - protein, 103 aa, Homo sapiens
MNKSNLNSLDEQEGVKSGMYVVIEVKVATQEGKEITCRSYLMTNYESAPPSPQYKKIICMGAKENGLPLEYQEKLKAIEPNDYTGKVSEEIEDIIKKGETQTL

SEQ ID NO: 17918 - protein, 33 aa, Homo sapiens
LLVFTSFNFCVLGFWATVITHRCCESRDRVSPC

SEQ ID NO: 17919 - protein, 94 aa, Homo sapiens
RSLVCLGVIILLSAFSGPGVRGGPMPKLADRKLCADQECSHPISMAVALQDYMAPDCRFLTIHRGQVVFREITMEIWLLAWAISPVALSERTRP

SEQ ID NO: 17920 - protein, 410 aa, Homo sapiens
MAAAAVGAGHGAGGPGAASSSGGAREGARVAALCLLWYALSAGGNVVNKVILSAFPFPVTVSLCHILALCAGLPPLLRAWRVPPAPPVSGPGPSPHPSSGPLLPPRFYPRYVLPLAFGKYFASVSAHVSIWKVPVSYAHTVKATMPIWVVLLSRIIMKEKQSTKVYLSLIPIISGVLLATVTELSFDMWGLVSALAATLCFSLQNIFSKKVLRDSRIHHLRLLNILGCHAVFFMIPTWVLVDLSAFLVSSDLTYVYQWPWTLLLLAVSGFCNFAQNVIAFSILNLVSPLSYSVANATKRIMVITVSLIMLRNPVTSTNVLGMMTAILGVFLYNKTKYDANQQARKHLLPVTTADLSSKERHRSPLEKPHNGLLFPQHGDYQYGRNNILTDHFQYSRQSYPNSYSLNRYDV

SEQ ID NO: 17921 - protein, 38 aa, Homo sapiens
MHLLGPWLLLLVNGFLSTLKPSTPGRGPASGSPAPTEP

SEQ ID NO: 17922 - protein, 153 aa, Homo sapiens
MLPLPSCSLPILLLFLLPSVPIESQPPPSTLPPFLAPEWDLLSPRVVLSRGAPAGPPLLFLLEAGAFRESAGAPANRSRRGSTVADPLPPTAKQDSRIWAFDEVLSRWETTSGSAYVPKTHGGPCAQPRAPEPADPTRTVGIKDSGEKLRHRS

SEQ ID NO: 17923 - protein, 796 aa, Homo sapiens
MVPGSEGPARAGSVVADVVFVIEGTANLGPYFEGLRKHYLLPAIEYFNGGPPAETDFGGDYGGTQYSLVVFNTVDCAPESYVQCHAPTSSAYEFVTWLDGIKFMGGGGESCSLIAEGLSTALQLFDDFKKMREQIGQTHRVCLLICNSPPYLLPAVESTTYSGCTTENLVQQIGERGIHFSIVSPRKLPALRLLFEKAAPPALLEPLQPPTDVSQDPRHMVLVRGLVLPVGGGSAPGPLQSKQPVPLPPAAPSGATLSAAPQQPLPPVPPQYQVPGNLSAAQVAAQNAVEAAKNQKAGLGPRFSPITPLQQAAPGVGPPFSQAPAPQLPPGPPGAPKPPPASQPSLVSTVAPGSGLAPTAQPGAPSMAGTVAPGGVSGPSPAQLGAPALGGQQSVSNKLLAWSGVLEWQEKPKPASVDANTKLTRSLPCQVYVNHGENLKTEQWPQKLIMQLIPQQLLTTLGPLFRNSRMVQFHFTNKDLESLKGLYRIMGNGFAGCVHFPHTAPCEVRVLMLLYSSKKKIFMGLIPYDQSGFVNGIRQVITNHKQVQQQKLEQQQRGMGGQQAPPGLGPILEDQARPSQNLLQLRPPQPQPQGTVGASGATGQPQPQGTAQPPPGAPQGPPGAASGPPPPGPILRPQNPGANPQLRSLLLNPPPPQTGVPPPQASLHHLQPPGAPALLPPPHQGLGQPQLGPPLLHPPPAQSWPAQLPPRAPLPAAKRKREGEGRVFREKWERAYFFVEVKSMPMCLICKQIVSVLKEYNLKRHYESKHSKSYDQYTEQTRDAILNELKKGLKCQ

SEQ ID NO: 17924 - protein, 85 aa, Homo sapiens
MKIPVLPAVVLLSLLVLHSAQGATLGGPEEESTIENYASRPEAFKADEFLNWHALFESIKRKLPFLNWDAFPKLKGLRSATPDAQ

SEQ ID NO: 17925 - protein, 774 aa, Homo sapiens
MGGRVFLVFLAFCVWLTLPGAETQDSRGCARWCPQDSSCVNATACRCNPGFSSFSEIITTPMETCDDINECATLSKVSCGKFSDCWNTEGSYDCVCSPGYEPVSGAKTFKNESENTCQDVDECQQNPRLCKSYGTCVNTLGSYTCQCLPGFKLKPEDPKLCTDVDECSSGQHQCDSSTVCFNTVGSYSCRCRPGWKPRHGIPNNQKDTVCEDMTFSTWTPPPGVHSQTLSRFFDKVQDLGRDYKPGLANNTIQSILQALDELLEAPGDLETLPRLQQHCVASHLLDGLEDVLRGLSKNLSNGLLNFSYPAGTELSLEVQKQVDRSVTLRQNQAVMQLDWNQAQKSGDPGPSVVGLVSIPGMGKLLAEAPLVLEPEKQMLLHETHQGLLQDGSPILLSDVISAFLSNNDTQNLSSPVTFTFSHRSVIPRQKVLCVFWEHGQNGCGHWATTGCSTIGTRDTSTICRCTHLSSFAVLMAHYDVQEEDPVLTVITYMGLSVSLLCLLLAALTFLLCKAIQNTSTSLHLQLSLCLFLAHLLFLVAIDQTGHKVLCSIIAGTLHYLYLATLTWMLLEALYLFLTARNLTVVNYSSINRFMKKLMFPVGYGVPAVTVAISAASRPHLYGTPSRCWLQPEKGFIWGFLGPVCAIFSVNLVLFLVTLWILKNRLSSLNSEVSTLRNTRMLAFKATAQLFILGCTWCLGILQVGPAARVMAYLFTIINSLQGVFIFLVYCLLSQQVREQYGKWSKGIRKLKTESEMHTLSSSAKADTSKPSTVN

SEQ ID NO: 17926 - protein, 68 aa, Homo sapiens
MRILQLILLALATGLVGGETRIIKGFECKPHSQPWQAALFEKTRLLCGATLIAPRWLLTAAHCLKPRY

SEQ ID NO: 17927 - protein, 662 aa, Homo sapiens
MEPLVTWVVPLLFLFLLSRQGAACRTSECCFQDPPYPDADSGSASGPRDLRCYRISSDRYECSWQYEGPTAGVSHFLRCCLSSGRCCYFAAGSATRLQFSDQAGVSVLYTVTLWVESWARNQTEKSPEVTLQLYNSVKYEPPLGDIKVSKLAGQLRMEWETPDNQVGAEVQFRHRTPSSPWKLGDCGPQDDDTESCLCPLEMNVAQEFQLRRRQLGSQGSSWSKWSSPVCVPPENPPQPQVRFSVEQLGQDGRRRLTLKEQPTQLELPEGCQGLAPGTEVTYRLQLHMLSCPCKAKATRTLHLGKMPYLSGAAYNVAVISSNQFGPGLNQTWHIPADTHTEPVALNISVGTNGTTMYWPARAQSMTYCIEWQPVGQDGGLATCSLTAPQDPDPAGMATYSWSRESGAMGQEKCYYITIFASAHPEKLTLWSTVLSTYHFGGNASAAGTPHHVSVKNHSLDSVSVDWAPSLLSTCPGVLKEYVVRCRDEDSKQVSEHPVQPTETQVTLSGLRAGVAYTVQVRADTAWLRGVWSQPQRFSIEVQVSDWLIFFASLGSFLSILLVGVLGYLGLNRAARHLCPPLPTPCASSAIEFPGGKETWQWINPVDFQEEASLQEALVVEMSWDKGERTEPLEKTELPEGAPELALDTELSLEDGDRCKAKM

SEQ ID NO: 17928 - protein, 888 aa, Homo sapiens
MATAPSYPAGLPGSPGPGSPPPPGGLELQSPPPLLPQIPAPGSGVSFHIQIGLTREFVLLPAASELAHVKQLACSIVDQKFPECGFYGLYDKILLFKHDPTSANLLQLVRSSGDIQEGDLVEVVLSASATFEDFQIRPHALTVHSYRAPAFCDHCGEMLFGLVRQGLKCDGCGLNYHKRCAFSIPNNCSGARKRRLSSTSLASGHSVRLGTSESLPCTAEELSRSTTELLPRRPPSSSSSSSASSYTGRPIELDKMLLSKVKVPHTFLIHSYTRPTVCQACKKLLKGLFRQGLQCKDCKFNCHKRCATRVPNDCLGEALINGDVPMEEATDFSEADKSALMDESEDSGVIPGSHSENALHASEEEEGEGGKAQSSLGYIPLMRVVQSVRHTTRKSSTTLREGWVVHYSNKDTLRKRHYWRLDCKCITLFQNNTTNRYYKEIPLSEILTVESAQNFSLVPPGTNPHCFEIVTANATYFVGEMPGGTPGGPSGQGAEAARGWETAIRQALMPVILQDAPSAPGHAPHRQASLSISVSNSQIQENVDIATVYQIFPDEVLGSGQFGVVYGGKHRKTGRDVAVKVIDKLRFPTKQESQLRNEVAILQSLRHPGIVNLECMFETPEKVFVVMEKLHGDMLEMILSSEKGRLPERLTKFLITQILVALRHLHFKNIVHCDLKPENVLLASADPFPQVKLCDFGFARIIGEKSFRRSVVGTPAYLAPEVLLNQGYNRSLDMWSVGVIMYVSLSGTFPFNEDEDINDQIQNAAFMYPASPWSHISAGGAWGPPTPWAAIDLINNLLQVKMRKRYSVDKSLSHPWLQEYQTWLDLRELEGKMGERYITHESDDARWEQFAAEHPLPGSGLPTDRDLGGACPPQDHDMQGLAERISVL

SEQ ID NO: 17929 - protein, 488 aa, Homo sapiens
MEPLRAPALRRLLPPLLLLLLSLPPRARAKYVRGNLSSKEDWVFLTRFCFLSDYGRLDFRFRYPELPVPNISGLQAKCCQNILLYFDDPSQWPAVYKAGDKDCLAKESVIRPENNQVINLTTQYAWSGCQVVSEEGTRYLSCSSGRSFRSVRERWWYIALSKCGGDGLQLEYEMVLTNGKSFWTRHFSADEFGILETDVTFLLIFILIFFLSCYFGYLLKGRQLLHTTYKMFMAAAGVEVLSLLFFCIYWGQYATDGIGNESVKILAKLLFSSSFLIFLLMLILLGKGFTVTRGRISHAGSVKLSVYMTLYTLTHVVLLIYEAEFFDPGQVLYTYESPAGYGLIGLQVAAYVWFCYAVLVSLRHFPEKQPFYVPFFAAYTLWFFAVPVMALIANFGIPKWAREKIVNGIQLGIHLYAHGVFLILPFLFCIPTAFPTLLDLSTLPLPLPKFCHHRPLFRKKHLGWHRVKLLGSWVGNRRVQHHIFFFFF

SEQ ID NO: 17930 - protein, 150 aa, Homo sapiens
MTRWSSYLLGWTTFLLYSYESSGDYPRCIFPFIYRGKAYNSCISQGSFLGSLWCSVTSVFDEKQQWKFCETNEYGGNSLRKPCIFPSIYRNNVVSDCMEDESNKLWCPTTENMDKDGKWSFCADTRISALVPGFPCHFPFNYKNKNYFNC

SEQ ID NO: 17931 - protein, 43 aa, Homo sapiens
MAAASAGATRLLLLLLMAHSFEIDDSANFRKRGSLLWNQQDGT

SEQ ID NO: 17932 - protein, 334 aa, Homo sapiens
MHPLPGYWSCYCLLLLFSLGVQGSLGAPSAAPEQVHLSYPGEPGSMTVTWTTWVPTRSEVQFGLQPSGPLPLRAQGTFVPFVDGGILRRKLYIHRVTLRKLLPGVQYVYRCGSAQGWSRRFRFRALKNGAHWSPRLAVFGDLGADNPKAVPRLRRDTQQGMYDAVLHVATSLTTRLASACRGIMRACGTAGIWVPPTSSPSPPRSISFSIMAATWYRGSFAGWRATSRKPIRTGQPGRGSSLWGTGPCTAPTQIWTTAHDMKARSAKASKASCTGWRIFSTNMEWICSCGLMSTRMNDCGQFTTTRYLTAAERCPTPTREGLSTSSQDLLMGRS

SEQ ID NO: 17933 - protein, 141 aa, Homo sapiens
MAVSTVFSTSSLMLALSRHSLLSPLLSVTSFRRFYRGDSPTDSQKDMIEIPLPPWQERTDESIETKRARLLYESRKRGMLENCILLSLFAKEHLQHMTEKQLNLYDRLINEPSNDWDIYYWATGTGYDKQHNVKIGQFRLI

SEQ ID NO: 17934 - protein, 120 aa, Homo sapiens
MGDKIWLPFPVLLLAALPPVLLPGAAGFTPSLDSDFTFTLPAGQKECFYQPMPLKASLEIEYQVLDGAGLDIDFHLASPEGKTLVFEQRKSDGVHTCIRSKNGPGTAVHAYNPSTFRGQV

SEQ ID NO: 17935 - protein, 317 aa, Homo sapiens
MQAAWLLGALVVPQLLGFGHGARGAEREWEGGWGGAQEEEREREALMLKHLQEALGLPAGRGDENPAGTVEGKEDWEMEEDQGEEEEEEATPTPSSGPSPSPTPEDIVTYILGRLAGLDAGLHQLHVRLHALDTRVVELTQGLRQLRNAAGDTRDAVQALQEAQGRAEREHGRLEDSECMTPPPSLPGPAHRLPEGAAPGPQVLPALARLRSSGGGAGAVHGAGREPGAAGRPPADGGAHSVPARGARSLQLARVAGRARSARRGPLPLRKRPARVLLRLASLTPPRARRPAQRLAASAQPGPAQRWHARELRGAGL

SEQ ID NO: 17936 - protein, 376 aa, Homo sapiens
MLENFALVSSLGLAPSRSPVFTQLEDDEQSWVPSWVDVTPVSRAEARRGFGLDGLCRVEDERAHPEHLKSYRVIQHQDTHSEGKPRRHTEHGAAFPPGSSCGQQQEVHVAEKLFKCSDCGKVFLKAFALLDHLITHSEERPFRCPTGRSAFKKSAHINPRKIHTGETAHVCNECGKAFSYPSKLRKHQKVHTGIKPFKCSDCGKTFNRKDALVLHQRIHTGERPYECSKCGKTFSVLSTLIRHRKVHIGERPYECTECGKFFKYNNSFILHQRVHTGERPFECKQCGKGYVTRSGLYQHWKVHTGERPYECSLCGKTFTTRSYRNRHQQFHTEERSYECTECGKAFKHSSTLLQHKKVHTPERRQEDRAHGKVVSC

SEQ ID NO: 17937 - protein, 273 aa, Homo sapiens
MGVPRPQPWALGLLLFLLPGSLGAESHLSLLYHLTAVSSPAPGTPAFWVSGWLGPQQYLSYNSLRGEAEPCGAWVWENQVSWYWEKETTDLRIKEKLFLEAFKALGGKEPPSMRLKARPSSPGFSVLTCSAFSFYPPELQLRFLRNGLAAGTGQGDFGPNSDGSFHASSSLTVKSGDEHHYCCIVQHAGLAQPLRVELESPAKSSVLVVGIVIGVLLLTAAAVGGALLWRRMRSGLPAPWISLRGDDTGVLLPTPGEAQDADLKDVNVIPATA

SEQ ID NO: 17938 - protein, 549 aa, Homo sapiens
MAAQLLTDEALESVTFRDVTVDFTQEEWQQLEPAQKDLYRDVMLENYRNLVSLDWETRPEMKELDPKNDISEDKLSVVGEATGGPTRNGARGPGSEGVWEPGSWPERPRGDAGAEWEPLGIPQGNKLLGGSVPACHELKAFANQGCVLVPPRLDDPTEKGACPPVRRGKNFSSTSDLSKPPMPCEEKKTYDCSECGKAFSRSSSLIKHQRIHTGEKPFECDTCGKHFIERSSLTIHQRVHTGEKPYACGDCGKAFSQRMNLTVHQRTHTGEKPYVCDVCGKAFRKTSSLTQHERIHTGEKPYACGDCGKAFSQNMHLIVHQRTHTGEKPYVCPECGRAFSQNMHLTEHQRTHTGEKPYACKECGKAFNKSSSLTLHQRNHTGEKPYVCGECGKAFSQSSYLIQHQRFHIGVKPFECSECGKAFSKNSSLTQHQRIHTGEKPYECYICKKHFTGRSSLIVHQIVHTGEKPYVCGECGKAFSQSAYLIEHQRIHTGEKPYRCGQCGKSFIKNSSLTVHQRIHTGEKPYRCGECGKTFSRNTNLTRHLRIHT

SEQ ID NO: 17939 - protein, 179 aa, Homo sapiens
MGTRDDEYDYLFKVVLIGDSGVGKSNLLSRFTRNEFNLESKSTIGVEFATRSIQVDGKTIKAQIWDTAGQERYRAITSAYYRGAVGALLVYDIAKHLTYENVERWLKELRDHADSNIVIMLVGNKSDLRHLRAVPTDEARAFAEKNNLSFIETSALDSTNVEEAFKNILTGGRGPDGCG

SEQ ID NO: 17940 - protein, 218 aa, Homo sapiens
MWVPVVFLTLSVTWIGAAPLILSRIVGGWECEKHSQPWQVLVASRGRAVCGGVLVHPQWVLTAAHCIRKPGDDSSHDLMLLRLSEPAELTDAVKVMDLPTQEPALGTTCYASGWGSIEPEEFLTPKKLQCVDLHVISNDVCAQVHPQKVTKFMLCAGRWTGGKSTCSGDSGGPLVCNGVLQGITSWGSEPCALPERPSLYTKVVHYRKWIKDTIVANP

SEQ ID NO: 17941 - protein, 160 aa, Homo sapiens
MWLLLTLSFLLASTAQDGDKLLEGDECAPHSQPWQVALYERGRFNCGASLISPHWVLSAAHCQSRFMRVRLGEHNLRKRDGPEQLRTTSRVIPHPRYEARSHRNDIMLLRLVQPARLNPQVRPAVLPTRCPHPGEACVVSGWGLVSHNEPGTAGSPRSQG

SEQ ID NO: 17942 - protein, 618 aa, Homo sapiens
MAPPPPPLAASTPLLHGEFGSYPARGPRFALTLTSQALHIQRLRPKPEARPRGGLVPLAEVSGCCTLRSRSPSDSAAYFCIYTYPRGRRGARRRATRTFRADGAATYEENRAEAQRWATALTCLLRGLPLPGDGEITPDLLPRPPRLLLLVNPFGGRGLAWQWCKNHVLPMISEAGLSFNLIQTERQNHARELVQGLSLSEWDGIVTVSGDGLLHEVLNGLLDRPDWEEAVKMPVGILPCGSGNALAGAVNQHGGFEPALGLDLLLNCSLLLCRGGGHPLDLLSVTLASGSRCFSFLSVAWGFVSDVDIQSERFRALGSARFTLGTVLGLATLHTYRGRLSYLPATVEPASPTPAHSLPRAKSELTLTPDPAPPMAHSPLHRSVSDLPLPLPQPALASPGSPEPLPILSLNGGGPELAGDWGGAGDAPLSPDPLLSSPPGSPKAALHSPVSEGAPVIPPSSGLPLPTPDARVGASTCGPPDHLLPPLGTPLPPDWVTLEGDFVLMLAISPSHLGADLVAAPHARFDDGLVHLCWVRSGISRAALLRLFLAMERGSHFSLGCPQLGYAAARAFRLEPLTPRGVLTVDGEQVEYGPLQAQMHPGIGTLLTGPPGCPGREP

SEQ ID NO: 17943 - protein, 164 aa, Homo sapiens
MWDLVLSIALSVGCTGAVPLIQSRIVGGWECEKHSQPWQVAVYSHGWAHCGGVLVHPQWVLTAAHCLKKNSQVWLGRHNLFEPEDTGQRVPVSHSFPHPLYNMSLLKHQSLRPDEDSSHDLMLLRLSEPAKITDVVKVLGLPTQEPALGTTCYASGWGSIEPEE

SEQ ID NO: 17944 - protein, 332 aa, Homo sapiens
MANRYTMDLTAIYESLLSLSPDVPVPSDHGGTESSPGWGSSGPWSLSPSDSSPSGVTSRLPGRSTSLVEGRSCGWVPPPPGFAPLAPRLGPELSPSPTSPTATSTTPSRYKTELCRTFSESGRCRYGAKCQFAHGLGELRQANRHPKYKTELCHKFYLQGRCPYGSRCHFIHNPSEDLAAPGHPPVLRQSISFSGLPSGRRTSPPPPGLAGPSLSSSSFSPSSSPPPPGDLPLSPSAFSAAPGTPLARRDPTPVCCPSCRRATPISVWGPLGGLVRTPSVQSLGSDPDEYASSGSSLGGSDSPVFEAGVFAPPQPVAAPRRLPIFNRISVSE

SEQ ID NO: 17945 - protein, 1076 aa, Homo sapiens
MGEIEQRPTPGSRLGAPENSGISTLERGQKPPPTPSGKLVSIKIQMLDDTQEAFEVPQRAPGKVLLDAVCNHLNLVEGDYFGLEFPDHKKITVWLDLLKPIVKQIRRPKHVVVKFVVKFFPPDHTQLQEELTRYLFALQVKQDLAQGRLTCNDTSAALLISHIVQSEIGDFDEALDREHLAKNKYIPQQDALEDKIVEFHHNHIGQTPAESDFQLLEIARRLEMYGIRLHPAKDREGTKINLAVANTGILVFQGFTKINAFNWAKVRKLSFKRKRFLIKLRPDANSAYQDTLEFLMASRDFCKSFWKICVEHHAFFRLFEEPKPKPKPVLFSRGSSFRFSGRTQKQVLDYVKEGGHKKVQFERKHSKIHSIRSLASQPTELNSEVLEQSQQSTSLTFGEGAESPGGQSCRRGKEPKVSAGEPGSHPSPAPRRSPAGNKQADGAASAPTEEEEEVVKDRTQQSKPQPPQPSTGSLTGSPHLSELSVNSQGGVAPANVTLSPNLSPDTKQASPLISPLLNDQACPRTDDEDEGRRKRFPTDKAYFIAKEVSTTERTYLKDLEVITSWFQSTVSKEDAMPEALKSLIFPNFEPLHKFHTNFLKEIEQRLALWEGRSNAQIRDYQRIGDVMLKNIQGMKHLAAHLWKHSEALEALENGIKSSRRLENFCRDFELQKVCYLPLNTFLLRPLHRLMHYKQVLERLCKHHPPSHADFRDCRAALAEITEMVAQLHGTMIKMENFQKLHELKKDLIGIDNLVVPGRPGSFSLIRTPHLGQARRIPCAPERRPLLLVKEFIRLGSLSKLSGKGLQQRMFFLFNDVLLYTSRGLTASNQFKVHGQLPLYGMTIEESEDEWGVPHCLTLRGQRQSIIVAASSRSEMEKWVEDIQMAIDLAEKSSSPAPEFLASSPPDNKSPDEATAADQESEDDLSASRTSLERQAPHRGNTMVHVCWHRNTSVSMVDFSIAVENQLSGNLLRKFKNSNGWQKLWVVFTNFCLFFYKSHQDNHPLASLPLLGYSLTIPSESENIQKDYVFKLHFKSHVYYFRAESEYTFERWMEVIRSATSSASRPHVLSHKESLVY

SEQ ID NO: 17946 - protein, 63 aa, Homo sapiens
MNAGAVLNFKLKKKDTQGFGEESREPSTGDNIREFLLSLRYFRIFIALWNIFMMFCMIVLFGS

SEQ ID NO: 17947 - protein, 831 aa, Homo sapiens
MGGRVFLVFLAFCVWLTLPGAETQDSRGCARWCPQDSSCVNATACRCNPGFSSFSEIITTPMETCDDINECATLSKVSCGKFSDCWNTEGSYDCVCSPGYEPVSGAKTFKNESENTCQDVDECQQNPRLCKSYGTCVNTLGSYTCQCLPGFKLKPEDPKLCTDVNECTSGQNPCHSSTHCLNNVGSYQCRCRPGWQPIPGSPNGPNNTVCEDVDECSSGQHQCDSSTVCFNTVGSYSCRCRPGWKPRHGIPNNQKDTVCEDMTFSTWTPPPGVHSQTLSRFFDKVQDLGRDYKPGLANNTIQSILQALDELLEAPGDLETLPRLQQHCVASHLLDGLEDVLRGLSKNLSNGLLNFSYPAGTELSLEVQKQVDRSVTLRQNQAVMQLDWNQAQKSGDPGMGKLLAEAPLVLEPEKQMLLHETHQGLLQDGSPILLSDVISAFLSNNDTQNLSSPVTFTFSHRSVIPRQKVLCVFWEHGQNGCGHWATTGCSTIGTRDTSTICRCTHLSSFAVLMAHYDVQEEDPVLTVITYMGLSVSLLCLLLAALTFLLCKAIQNTSTSLHLQLSLCLFLAHLLFLVAIDQTGHKVLCSIIAGTLHYLYLATLTWMLLEALYLFLTARNLTVVNYSSINRFMKKLMFPVGYGVPAVTVAISAASRPHLYGTPSRCWLQPEKGFIWGFLGPVCAIFSVNLVLFLVTLWILKNRLSSLNSEVSTLRNTRMLAFKATAQLFILGCTWCLGILQVGPAARVMAYLFTIINSLQGVFIFLVYCLLSQQVREQYGKWSKGIRKLKTESEMHTLSSSAKADTSKPSTPGTVVQACNASTLGGQSRKIT

SEQ ID NO: 17948 - protein, 46 aa, Homo sapiens
MGHPPLLPLLLLLHTCVPAWATARDSISKKKKRKKKERRNLRRYNL

SEQ ID NO: 17949 - protein, 85 aa, Homo sapiens
MSGAPTAGAALMLCAATAVLLSAQGGPVQSKSPRFASWDEMNVLAHGLLQLGQGLREHAERTRSQLSALERRLSACGSACQGTEG

SEQ ID NO: 17950 - protein, 225 aa, Homo sapiens
MTEWETAAPAVAETPDIKLFGKWSTDDVQINDISLQMTTTSVMRGLLHQKEHHISHMDYIAVKEKYAKYLPHSAGRYAAKRFRKAQCPIVERLTNSMMMHGRNNGKKLMTVRIVKHAFEIIHLLTGENPLQVLVNAIINSGPREDSTRIGRAGTVRRQAVDVSPLRRVNQAIWLLCTGAREAAFRNIKTIAECLADELINAAKGSSNSYAIKKKDELERVAKSNR

SEQ ID NO: 17951 - protein, 158 aa, Homo sapiens
MHLLGPWLLLLEYLAFSDSSKWVFEHPETLYAWEGACVWIPCTYRALDGDLESFILFHNPEYNKNTSKFDGTRLYESTKDGKVPSEQKRVQFLGDKNKNCTLSIHPVHLNDSGQLGLRMESKTEKWMERIHLNVSDPPKKVTTVIQNPMPIREGDTVT

SEQ ID NO: 17952 - protein, 57 aa, Homo sapiens
SLVCLGVIILLSAFSGPGVRGGPMPKLADRKLCADQECSRSGRLLWRSGCSPGLFPQ

SEQ ID NO: 17953 - protein, 512 aa, Homo sapiens
MDQPAGLQVDYVFRGVEHAVRVMVSGQVLELEVEDRMTADQWRGEFDAGFIEDLTHKTGNFKQFNIFCHMLESALTQSSESVTLDLLTYTDLESLRNRKMGGRPGSLAPRSAQLNSKRYLILIYSVEFDRIHYPLPLPYQGKPDPVVLQGIIRSLKEELGRLQGLDGQNTRDTRENEIWHLREQVSRLASEKRELEAQLGRSREEALAGRAARQEAEALRGLVRGLELELRQERGLGHRVAGRRGQDCRRLAKELEEAKASERSLRARLKTLTSELALYKRGRRTPPVQPPPTREDRASSSRERSASRGRGAARSSSRESGRGSRGRGRPARPSPSPTGGRALRFDPTAFVKAKERKQREIQMKQQQRNRLGSGGSGDGPSVSWSRQTQPPAALTGRGDAPNRSRNRSSSVDSFRSRCSSASSCSDLEDFSESLSRGGHRRRGKPPSPTPWSGSNMKSPPVERSHHQKSLANSGGWVPIKEYSSEHQAADMAEIDARLKALQEYMNRLDMRS

SEQ ID NO: 17954 - protein, 374 aa, Homo sapiens
MRSPAVPTPARGQLGVAFVLLPPHSEGARVFGALGPIGPSSPGLTLGGLAVSEHRLSNKLLAWSGVLEWQEKRRPYSDSTAKLKRTLPCQAYVNQGENLETDQWPQKLIMQLIPQQLLTTLGPLFRNSQLAQFHFTNRDCDSLKGLCRIMGNGFAGCMLFPHISPCEVRVLMLLYSSKKKIFMGLIPYDQSGFVSAIRQVITTRKQAVGPGGVNSGPVQIVNNKFLAWSGVMEWQEPRPEPNSRSKRWLPSHVYVNQGEILRTEQWPRKLYMQLIPQQLLTTLVPLFRNSRLVQFHFTKDLETLKSLCRIMDNGFRRKSSLASSPMTRATLSTASGVSLPTSSRSCSGTWSRSNSNEGWGGSGYPGLGPSRSHR

SEQ ID NO: 17955 - protein, 107 aa, Homo sapiens
PATASALLLLLLGLAWTQGSHGWVGTAGCTGCGRVITAETCRQRRSELQLQPACVSHCLWWEVLSQDPCKGGSLTFFLGFPGATWPAAVGEVLVGNFLQPPPRPRKA

SEQ ID NO: 17956 - protein, 143 aa, Homo sapiens
MLPLPSCSLPILLLFLLPSVPIESQPPPSTLPPFLAPEWDLLSPRVVLSRGAPAGPPLLFLLEAGAFRESAGAPANRSRRGVSETAPASRRGELAVCDAVSGWVTDRRTAVDLRGREVEVLGEVPAAGGSPLRQYFFETRCKA

SEQ ID NO: 17957 - protein, 113 aa, Homo sapiens
MWGRLLLWPLVLGFSLSGGTQTPSVYDESGSTGGGDARPQSCLPPAATQAKSVPMTVTPWSSRTAHGHCFWAGCPPGWCPPSMGWSWWWGCRPMGWRCGCWPRRHLGCPPPCC

SEQ ID NO: 17958 - protein, 141 aa, Homo sapiens
LVQLWAICMLRVALATVYFQEEFLDGEHWRNRWLQSTNDSRFGHFRLSSGKFYGHKEKDKGPDICGFDIKKVHVILHFKNKYHENKKLIRCKVDGFTHLYTLILRPDLSYDVKIDGQSIESGSIEYDWNLTSLKKETSPAE

SEQ ID NO: 17959 - protein, 87 aa, Homo sapiens
QVGAWRTGALGLALLLLLGLGLGLEAAASPLSTPTSAQAAGPSSGSCPPTKFQCRTSGLCVPLTWRCDRDLDCSDGSDEEECTAWPA

SEQ ID NO: 17960 - protein, 29 aa, Homo sapiens
MNILGLVVFAIVFGVALRKLGPEGELLIR

SEQ ID NO: 17961 - protein, 109 aa, Homo sapiens
MRILQLILLALATVRLPHTLRCANITIIEHQKCENAYPGNITDTMVCASVQEGGKDSCQGDSGGPLVCNQSLQGIISWGQDPCAITRKPGVYTKVCKYVDWIQETMKNN

SEQ ID NO: 17962 - protein, 89 aa, Homo sapiens
MKSVLLLTTLLVPAHLVAAWSNNYAVDCPQHCDSSECKSSPRCKRTVLDDCGCCRVCAAGRGETCYRTVSGMDGMKCGPGLRCQPSNGE

SEQ ID NO: 17963 - protein, 95 aa, Homo sapiens
MKGSRALLLVALTLFCICRMATGEDNDEFFMDFLQTLLVGTPEELYEGTLGKYNVNEDAKAAMTELKSCRDGLQPMHKAELVKLLVQVLGSQDGA

SEQ ID NO: 17964 - protein, 104 aa, Homo sapiens
MWVPVVFLTLSVTWIGERGHGWGDAGEGASPDCQAEALSPPTQHPSPDRELGSFLSLPAPLQAHTPSPSILQQSSLPHQVPAPSHLPQNFLPIAQPAPCSQLLY

SEQ ID NO: 17965 - protein, 87 aa, Homo sapiens
MVHGSVTFRDVAIDFSQEEWECLQPDQRTLYRDVMLENYSHLISLAGSSISKPDVITLLEQEKEPWIVIWSQNMDLRKYLQKMIFLK

SEQ ID NO: 17966 - protein, 472 aa, Homo sapiens
MELQDPKMNGALPSDAVGYRQEREGFLPSRGPAPGSKPVQFMDFEGKTSFGMSVFNLSNAIMGSGILGLAYAMAHTGVIFFLALLLCIALLSSYSIHLLLTCAGIAGIRAYEQLGQRAFGPAGKVVVATVICLHNVGAMSSYLFIIKSELPLVIGTFLYMDPEGDWFLKGNLLIIIVSVLIILPLALMKHLGYLGYTSGLSLTCMLFFLVSVIYKKFQLGCAIGHNETAMESEALVGLPSQGLNSSCEAQMFTVDSQMSYTVPIMAFAFVCHPEVLPIYTELCRPSKRRMQAVANVSIGAMFCMYGLTATFGYLTFYSSVKAEMLHMYSQKDPLILCVRLAVLLAVTLTVPVVLFPIRRALQQLLFPGKAFSWPRHVAIALILLVLVNVLVICVPTIRDIFGVIGSTSAPSLIFILPSIFYLRIVPSEVEPFLSWPKIQALCFGVLGVLFMAVSLGFMFANWATGQSRMSGH

SEQ ID NO: 17967 - protein, 220 aa, Homo sapiens
MVSPRMSGLLSQTVILALIFLPQTRPAGVFELQIHSFGPGPGPGAPRSPCSARLPCRLFFRVCLKPGLSEEAAESPCALGAALSARGPVYTEQPGAPAPDLPLPDGLLQVPFRDAWPGTFSFIIETWREELGDQIGGGLCLDLGHALRCRCRAGFAGPRCEHDLDDCAGRACANGGTCVEGGGAHRCSCALGFGGRDCRERADPCAARPCAHGGRCYAHF

SEQ ID NO: 17968 - protein, 75 aa, Homo sapiens
MTRWSSYLLGWTTFLLYSYESSGGISALVPGFPCHFPFNYKNKNYFNCTNEGSKENLVWCATSYNYDQDHTWVYC

SEQ ID NO: 17969 - protein, 413 aa, Homo sapiens
MASCAEPSEPSAPLPAGVPPLEDFEVLDGVEDAEGEEEEEEEEEEEDDLSELPPLEDMGQPPAEEAEQPGALAREFLAAMEPEPAPAPAPEEWLDILGNGLLRKKTLVPGPPGSSRPVKGQVVTVHLQTSLENGTRVQEEPELVFTLGDCDVIQALDLSVPLMDVGETAMVTADSKYCYGPQGSRSPYIPPHAALCLEVTLKTAVDGPDLEMLTGQERVALANRKRECGNAHYQRADFVLAANSYDLAIKAITSSAKVDMTFEEEAQLLQLKVKCLNNLAASQLKLDHYRAALRSCSLVLEHQPDNIKALFRKGKVLAQQGEYSEAIPILRAALKLEPSNKTIHAELSKLVKKHAAQRSTETALYRKMLGNPSRLPAKCPGKGAWSIPWKWLFGATAVALGGVALSVVIAARN

SEQ ID NO: 17970 - protein, 501 aa, Homo sapiens
MAAPEPLSPAGGAGEEAPEEDEDEAEAEDPERPNAGAGGGRSGGGGSSVSGGGGGGGAGAGGCGGPGGALTRRAVTLRVLLKDALLEPGAGVLSIYYLGKKFLGDLQPDGRIMWQETGQTFNSPSAWATHCKKLVNPAKKSGCGWASVKYKGQKLDKYKATWLRLHQLHTPATAADESPASEGEEEELLMEEEEEDVLAGVSAEDKSRRPLGKSPSEPAHPEATTPGKRVDSKIRVPVRYCMLGSRDLARNPHTLVEVTSFAAINKFQPFNVAVSSNVLFLLDFHSHLTRSEVVGYLGGRWDVNSQMLTVLRAFPCRSRLGDAETAAAIEEEIYQSLFLRGLSLVGWYHSHPHSPALPSLQDIDAQMDYQLRLQGSSNGFQPCLALLCSPYYSGNPGPESKISPFWVMPPPEQRPSDYGIPMDVEMAYVQDSFLTNDILHEMMLLVEFYKGSPDLVRLQEPWSQEHTYLDKLKISLASRTPKDQSLCHVLEQVCGVLKQGS

SEQ ID NO: 17971 - protein, 58 aa, Homo sapiens
MVFGAMVLLVGLEELTNIRNVERLKKDLRASYCLIDSFLGDSELIGDLTQCVDCVIPP

SEQ ID NO: 17972 - protein, 68 aa, Homo sapiens
MGPHFTLLCAALAGCLLPAEGCVICDPSVVLALKSLEKDYLPGHLDAKHHKAMMERMRPHCKRGPGVC

SEQ ID NO: 17973 - protein, 261 aa, Homo sapiens
FLTLSVTWIGAAPLILSRIVGGWECEKHSQPWQVLVASRGRAVCGGVLVHPQWVLTAAHCIRNKSVILLGRHSLFHPEDTGQVFQVSHSFPHPLYDMSLLKNRFLRPGDDSSHDLMLLRLSEPAELTDAVKVMDLPTQEPALGTTCYASGWGSIEPEECTPGPDVLTPKKLQCVDLHVISNDVCAQVHPQKVTKFMLCAGRWTGGKSTCSGDSGGPLVCNGVLQGITSWGSEPCALPERPSLYTKVVHYRKWIKDTIVANP

SEQ ID NO: 17974 - protein, 330 aa, Homo sapiens
RGLGRGSPAEWGQRLLLVLLLGGCSGRIHQLALTGEKRADIQLNSFGFYTNGSLEVELSVLRLGLREAEEKSLLVGFSLSRVRSGRVRSYSTRDFQDCPLQKNSSSFLVLFLINTKDLQVQVRKYGEQKTLFIFPGLLPEAPSKPGLPKPQATVPRKVDGGGTSAASKPKSTPAVIQGPSGKDKDLVLGLSHLNNSYNFSFHVVIGSQAEEGQYSLNFHNCNNSVPGKEHPFDITVMIREKNPDGFLSAAEMPLFKLYMVMSACFLAAGIFWVSILCRNTYSVFKIHWLMAALAFTKSISLLFHSINYYFINSQGHPIEGLAVMYYIAHL

SEQ ID NO: 17975 - protein, 241 aa, Homo sapiens
MNGMANVNPASRPHYASAIPVPRASSQTRIPTPGASPQLRPRQAGLALSPQRAASPRLGKAAGPSRNSSPRAFRGRGSPKFAGAVRESAEDGEGPFSSPWNSPRTTPKAALSSRAGSGRIGERQGTQGKKKKAQEGTPVCQTRGRSPSRTSFHGETQIPGAPEGRKPPSCPGKDQRDINYKSSGTPRSLEPDEGAASWASSPVCSPVQGKRPSPSPGAISFSSVHQQSQPVTATVAPFQYR

SEQ ID NO: 17976 - protein, 58 aa, Homo sapiens
MTVLAPAWSPTTYLLLLLLLSSGLSGTQDCSFQHSPISSDFAVKIRELPGLILFSPAV

SEQ ID NO: 17977 - protein, 286 aa, Homo sapiens
MGHPPLLPLLLLLHTCVPASWGLRCMQCKTNGDCRVEECALGQDLCRTTIVRLWEEGEELELVEKSCTHSEKTNRTLSYRTGLKITSLTEVVCGLDLCNQGNSGRAVTYSRSRYLECISCGSSDMSCERGRHQSLQCRSPEEQCLDVVTHWIQEGEEGRPKDDRHLRGCGYLPGCPGSNGFHNNDTFHFLKCCNTTKCNEGPKPKNQSYMVRGCATASMCQHAHLGDAFSMNHIDVSCCTKSGCNHPDLDVQYRSGAAPQPGPAHLSLTITLLMTARLWGGTLLWT

SEQ ID NO: 17978 - protein, 452 aa, Homo sapiens
MGTPKPRILPWLVSQLDLGQLEGVAWVNKSRTRFRIPWKHGLRQDAQQEDFGIFQAWAEATGAYVPGRDKPDLPTWKRNFRSALNRKEGLRLAEDRSKDPHDPHKIYEFVNSGVGDFSQPDTSPDTNGGGSTSDTQEDILDELLGNMVLAPLPDPGPPSLAVAPEPCPQPLRSPSLDNPTPFPNLGPSENPLKRLLVPGEEWEFEVTAFYRGRQVFQQTISCPEGLRLVGSEVGDRTLPGWPVTLPDPGMSLTDRGVMSYVRHVLSCLGGGLALWRAGQWLWAQRLGHCHTYWAVSEELLPNSGHGPDGEVPKDKEGGVFDLGPFIVGSWAPRSDYLHGRKRTLTTLCPLVLCGGVMAPGPAVDQEARDGQGCAHVPQGLGRNGPGRGCLLPGEYCGPAHFQQPPTLPHLRPVQGLPAGLGGGHGFPGPWGELSPRSSWCASNPPVPHHLNQ

SEQ ID NO: 17979 - protein, 399 aa, Homo sapiens
MGHLSAPLHRVRVPWQGLLLTASLLTFWNPPTTAQLTTESMPFNVAEGKEVLLLVHNLPQQLFGYSWYKGERVDGNRQIVGYAIGTQQATPGPANSGRETIYPNASLLIQNVTQNDTGFYTLQVIKSDLVNEEATGQFHVYPELPKPSISSNNSNPVEDKDAVAFTCEPETQDTTYLWWINNQSLPVSPRLQLSNGNRTLTLLSVTRNDTGPYECEIQNPVSANRSDPVTLNVTYGPDTPTISPSDTYYRPGANLSLSCYAASNPPAQYSWLINGTFQQSTQELFIPNITVNNSGSYTCHANNSVTGCNRTTVKTIIVTEMAFHHVAKAGLKLLSSSNPPASTSQSAKITDNALPQENGLSPGAIAGIVIGVVALVALIAVALACFLHFGKTGSSGPLQ

SEQ ID NO: 17980 - protein, 350 aa, Homo sapiens
MNLRGLFQDFNPSKFLIYACLLLFSVLLALRLDGIIQWSYWAVFAPIWLWKLMVIVGASVGTGVWARNPQYRAEGETCVEFKAMLIAVGIHLLLLMFEVLVCDRIERGSHFWLLVFMPLFFVSPVSVAACVWGFRHDRSLELEILCSVNILQFIFIALRLDKIIHWPWLVVCVPLWILMSFLCLVVLYYIVWSVLFLRSMDVIAEQRRTHITMALSWMTIVVPLLTFEILLVHKLDGHNAFSCIPIFVPLWLSLITLMATTFGQKGGNHWWFGIRKDFCQFLLEIFPFLREYGNISYDLHHEDNEETEETPVPEPPKIAPMFRKKARVVITQSPGKYVLPPPKLNIEMPD

SEQ ID NO: 17981 - protein, 73 aa, Homo sapiens
ALLLLLLGLAWTQGSHGWGADASSLQKRAGRDDQNYNYNQHAYPTAYGGKYSVKTPAKASRVQPGLLQWVKFW

SEQ ID NO: 17982 - protein, 225 aa, Homo sapiens
MHLLGPWLLLLVLEYLAFSDSSKWVFEHPETLYAWEGACVWIPCTYRALDGDLESFILFHNPEYNKNTSKFDGTRLYESTKDGKVPSEQKRVQFLGDKNKNCTLSIHPVHLNDSGQLGLRMESKTEKWMERIHLNVSERPFPPHIQLPPEIQESQEVTLTCLLNFSCYGYPIQLQWLLEGVPMRQAAVTSTSLTIKSVFTRSELKFSPQWSHHGKIVTCQLQDAD

SEQ ID NO: 17983 - protein, 303 aa, Homo sapiens
MSSTLPALLCVGLCLSQRISAQQQTLPKPFIWAEPHFMVPKEKQVTICCQGNYGAVEYQLHFEGSLFAVDRPKPPERINKVQFYIPDMNSRMAGQYSCIYRVGELWSEPSNLLDLVVTEMYDTPTLSVHPGPEVISGEKVTFYCRLDTATSMFLLLKEGRSSHVQRGYGKVQAEFPLGPVTTAHRGTYRCFGSYNNHAWSFPSEPVKLLVTGDIENTSLAPEDPTFPDTWGTYLLTTETGLQKDHALWDHTAQNLLRMGLAFLVLVALVWFLVEDWLSRKRTRERASRASTWEGRRRLNTQTL

SEQ ID NO: 17984 - protein, 260 aa, Homo sapiens
MGRPRPRAAKTWMFLLLLGGAWAGHSRAQEDKVLGGHECQPHSQPWQAALFQGQQLLCGGVLVGGNWVLTAAHCKKPKYTVRLGDHSLQNKDGPEQEIPVVQSIPHPCYNSSDVEDHNHDLMLLQLRDQASLGSKVKPISLADHCTQPGQKCTVSGWGTVTSPRENFPDTLNCAEVKIFPQKKCEDAYPGQITDGMVCAGSSKGADTCQGDSGGPLVCDGALQGITSWGSDPCGRSDKPGVYTNICRYLDWIKKIIGSKG

SEQ ID NO: 17985 - protein, 144 aa, Homo sapiens
PAEWGQRLLLVLLLGGCSGRIHQLALTGEKRADIQLNSFGFYTNGSLEVELSVLRLGLREAEEKSLLVGFSLSRVRSGRVRSYSGPGAEVWRAEDVVYLSRAPPGSTLQTRAPEATGHSPPQGGWRRDLCSQQAQVNTRSDSGS

SEQ ID NO: 17986 - protein, 199 aa, Homo sapiens
MGEASPPAPARRHLLVLLLLLSTLVIPSAAAPIHDADAQESSLGLTGLQSLLQGFSRLFLKGNLLRGIDSLFSAPMDFRGLPGNYHKEENQEHQLGNNTLSSHLQIDKVPRMEEKEALVPIQKATDSFHTELHPRVAFWIIKLPRRRSHQDALEGGHWLSEKRHRLQAIRDGLRKGTHKDVLEEGTESSSHSRLSPRKT

SEQ ID NO: 17987 - protein, 75 aa, Homo sapiens
MATAGNPWGWFLGYLILGVAGSLVSGSCSQIINGEDCSPHSQPWQAALVMENELFCSGVLVHPQWVLSAAHCFQK

SEQ ID NO: 17988 - protein, 69 aa, Homo sapiens
MWDLVLSIALSVGCTGAVPLIQSRIVGGWECEKHSQPWQVAVYSHGWAHCGGVLVHPQWVLTAAHCLKK

SEQ ID NO: 17989 - protein, 54 aa, Homo sapiens
MLALLCSCLLLAAGASDAWTGEDSAEPNSDSAEWIRDMYAKVTEIWQEVMQRRD

SEQ ID NO: 17990 - protein, 145 aa, Homo sapiens
MVYMFLGVSIIADRFMAAIEVITSKEKEITITKANGETSVGTVRIWNETVSNLTLMALGSSAPEILLSVIEVCGHNFQAGELGPGTIVGSAAFNMFVVIAVCIYVIPAGESRKIKHLRVFFVTASWSIFAYVWLYLILAVFSPGV

SEQ ID NO: 17991 - protein, 172 aa, Homo sapiens
MWVPVVFLTLSVTWIAPPLQVLVASRGRAVCGGVLVHPQWVLTAAHCIRNKSVILLGRHSLFHPEDTGQVFQVSHSFPHPLYDMSLLKNRFLRPGDDSSHDLMLLRLSEPAELTDAVKVMDLPTQEPALGTTCYASGWGSIEPEEFLTPKKLQCVDLHVISNDVCAQVHPQK

SEQ ID NO: 17992 - protein, 171 aa, Homo sapiens
MFVYTKQYGLGAQEEDAFVRCVSVLGNLADQLYYPCEHVAWAADARVLHVDSSRWWTLSTTLWALSLLLGVARSLWMLLKLRQRLRSPTAPFTSPLPRGKRRAMEAQMQSEALSLLSNLADLANAVHWLPRGVLWAGRFPPWLVGLMGTISSILSMYQAARAGGQAEATTP

SEQ ID NO: 17993 - protein, 190 aa, Homo sapiens
MGPIDDSVASLVIAQLLFLQSESNKKPIHMYINSPGGVVTAGLAIYDTMQYILNPICTWCVGQAASMGSLLLAAGTPGMRHSLPNSRIMIHQPSGGARGQATDIAIQAEEIMKLKKQLYNIYAKHTKQSLQVIESAMERDRYMSPMEAQEFGILDKVLVHPPQDGEDEPTLVQKEPVEAAPAAEPVPAST

SEQ ID NO: 17994 - protein, 129 aa, Homo sapiens
MPSKGPLQSVQVFGRKKTATAVAHCKRGNGLIKLLEPVLLLGKERFAGVDIRVRVKGGGHVAQIYAIRQSISKALVAYYQKYVDEASKKEIKDILIQYDRTLLVADPRRCESKKFGGPGARARYQKSYR

SEQ ID NO: 17995 - protein, 180 aa, Homo sapiens
MWPLALVIASLTLALSGGVSQESSKVLNTNGTSGFLPGGYTCFPHSQPWQAALLVQGRLLCGGVLVHPKWVLTAAHCLKEGLKVYLGKHALGRVEAGEQVREVVHSIPHPEYRRSPTHLNHDHDIMLLELQSPVQLTGYIQTLPLSHNNRLTPGTTCRVSGWGTTTSPQGMHPHRWPEAP

SEQ ID NO: 17996 - protein, 601 aa, Homo sapiens
MAAPLIPLSQQIPTGNSLYESYYKQVDPAYTGRVGASEAALFLKKSGLSDIILGKIWDLADPEGKGFLDKQGFYVALRLVACAQSGHEVTLSNLNLSMPPPKFHDTSSPLMVTPPSAEAHWAVRVEEKAKFDGIFESLLPINGLLSGDKVKPVLMNSKLPLDVLGRVWDLSDIDKDGHLDRDEFAVAMHLVYRALEKEPVPSALPPSLIPPSKRKKTVFPGAVPVLPASPPPKDSLRSTPSHGSVSSLNSTGSLSPKHSLKQTQPTVNWVVPVADKMRFDEIFLKTDLDLDGYVSGQEVKEIFMHSGLTQNLLAHIWALADTRQTGKLSKDQFALAMYFIQQKVSKGIDPPQVLSPDMVPPSERGTPGPDSSGSLGSGEFTGVKELDDISQEIAQLQREKYSLEQDIREKEEAIRQKTSEVQELQNDLDRETSSLQELEAQKQDAQDRLDEMDQQKAKLRDMLSDVRQKCQDETQMISSLKTQIQSQESDLKSQEDDLNRAKSELNRLQQEETQLEQSIQAGRVQLETIIKSLKSTQDEINQARSKLSQLHESRQEAHRSLEQYDQVLDGAHGASLTDLANLSEGVSLAERGSFGAMVKVE

SEQ ID NO: 17997 - protein, 97 aa, Homo sapiens
MGRPRPRAAKTWMFLLLLGGAWAGHSRAQEDKVLGGHECQPHSQPWQAALFQGQQLLCGGVLVGGNWVLTAAHCKKPKYTVRLGDHSLQNKDGPEQE

SEQ ID NO: 17998 - protein, 812 aa, Homo sapiens
MGGRVFLVFLAFCVWLTLPGAETQDSRGCARWCPQDSSCVNATACRCNPGFSSFSEIITTPMETCDDINECATLSKVSCGKFSDCWNTEGSYDCVCSPGYEPVSGAKTFKNESENTCQDVDECQQNPRLCKSYGTCVNTLGSYTCQCLPGFKLKPEDPKLCTDVNECTSGQNPCHSSTHCLNNVGSYQCRCRPGWQPIPGSPNGPNNTVCEDVDECSSGQHQCDSSTVCFNTVGSYSCRCRPGWKPRHGIPNNQKDTVCEDMTFSTWTPPPGVHSQTLSRFFDKVQDLGRDYKPGLANNTIQSILQALDELLEAPGDLETLPRLQQHCVASHLLDGLEDVLRGLSKNLSNGLLNFSYPAGTELSLEVQKQVDRSVTLRQNQAVMQLDWNQAQKSGDPGMGKLLAEAPLVLEPEKQMLLHETHQGLLQDGSPILLSDVISAFLSNNDTQNLSSPVTFTFSHRSVIPRQKVLCVFWEHGQNGCGHWATTGCSTIGTRDTSTICRCTHLSSFAVLMAHYDVQEEDPVLTVITYMGLSVSLLCLLLAALTFLLCKAIQNTSTSLHLQLSLCLFLAHLLFLVAIDQTGHKVLCSIIAGTLHYLYLATLTWMLLEALYLFLTARNLTVVNYSSINRFMKKLMFPVGYGVPAVTVAISAASRPHLYGTPSRCWLQPEKGFIWGFLGPVCAIFSVNLVLFLVTLWILKNRLSSLNSEVSTLRNTRMLAFKATAQLFILGCTWCLGILQVGPAARVMAYLFTIINSLQGVFIFLVYCLLSQQVREQYGKWSKGIRKLKTESEMHTLSSSAKADTSKPSTVN

SEQ ID NO: 17999 - protein, 141 aa, Homo sapiens
MGVPRPQPWALGLLLFLLPGSLGAESHLSLLYHLTAVSSPAPGTPAFWVSGWLGPQQYLSYNSLRGEAEPCGAWVWENQVSWYWEKETTDLRIKEKLFLEAFKALGGKGPYTLQGLLGCELGPDNTSVPTAKFALNGEEFM

SEQ ID NO: 18000 - protein, 135 aa, Homo sapiens
MAASRLELNLVRLLSRCEAMAAEKRDPDEWRLEKYVGALEDMLQALKVHASKPASEVINEYSWKVDFLKGMLQAEKLTSSSEKALANQFLAPGRVPTTARERVPATKTVHLQSRARYTSEMRSELLGTDSAGESP

SEQ ID NO: 18001 - protein, 131 aa, Homo sapiens
MARSLVCLGVIILLSAFSGPGVRGGPMPKLADRKLCADQECSHPISMAVALQDYMAPDCRFLTIHRGQVVYVFSKLKGRGRLFWGGSVQGDYYGDLAARLGYFPSSIVREDQTLKPGKVDVKTDTSSSNSW

SEQ ID NO: 18002 - protein, 195 aa, Homo sapiens
MWVPVVFLTLSVTWIGAAPLILSRIVGGWECEKHSQPWQVLVASRGRAVCGGVLVHPQWVLTAAHCIRKPGDDSSHDLMLLRLSEPAELTDAVKVMDLPTQEPALGTTCYASGWGSIEPEEFLTPKKLQCVDLHVISNDVCAQVHPQKVTKFMLCAGRWTGGKSTCSWVILITELTMPALPMVLHGSLVPWRGGV

SEQ ID NO: 18003 - protein, 371 aa, Homo sapiens
MAAASAGATRLLLLLLMAVAAPSRARGSGCRAGTGARGAGAEGREGEACGTVGLLLEHSFEIDDSANFRKRGSLLWNQQDGTLSLSQRQLSEEERGRLRDVAALNGLYRVRIPRRPGALDGLEAGGYVSSFVPACSLVESHLSDQLTLHVDVAGNVVGVSVVTHPGGCRGHEVEDVDLELFNTSVQLQPPTTAPGPETAAFIERLEMEQAQKAKNPQEQKSFFAKYWMYIIPVVLFLMMSGAPDTGGQGGGGGGGGGGGSGRPLSSAFCWQRSSWTGAFGTAAGVSCARLPHGPMQPQGLPPCPWSRARDPGHYASSDLASPYPEPMQSGNMPPSLQPLCLCSRWSHPPVPGWARWSCPGSCSAPLTLTLD

SEQ ID NO: 18004 - protein, 119 aa, Homo sapiens
MKVLISSLLLLLPLMLMSMVSSSLNPGVARGHRDRGQASRRWLQEGGQECECKDWFLRAPRRKFMTVSGLPKKQCPCDHFKGNVKKTRHQRHHRKPNKHSRACQQFLKQCQLRSFALPL

SEQ ID NO: 18005 - protein, 416 aa, Homo sapiens
MSSPTTSSLDTPLPGNGPPQPGAPSSSPTVKEEGPEPWPGGPDPDVPGTDEASSACSTDWVIPDPEEEPERKRKKGPAPKMLGHELCRVCGDKASGFHYNVLSCEGCKGFFRRSVVRGGARRYACRGGGTCQMDAFMRRKCQQCRLRKCKEAGMREQCVLSEEQIRKKKIRKQQQESQSQSQSPVGPQGSSSSASGPGASPGGSEAGSQGSGEGEGVQLTAAQELMIQQLVAAQLQCNKRSFSDQPKVTLGREDQIALLKASTIEIMLLETARRYNHETECITFLKDFTYSKDDFHRAGLQVEFINPIFEFSRAMRRLGLDDAEYALLIAINIFSADRPNVQEPGRVEALQQPYVEALLSYTRIKRPQDQLRFPRMLMKLVSLRTLSSVHSEQVFALRLQDKKLPPLLSEIWDVHE

SEQ ID NO: 18006 - protein, 145 aa, Homo sapiens
MLLLLLLPLLWGRERVEGQKSNRKDYSLTMQSSVTVQEGMCVHVRCSFSYPVDSQTDSDPVHGYWFRAGNDISWKAPVATNNPAWAVQEETRDRFHLLGDPQTKNCTLSIRDARMSDAGRYFFRMEKGNIKWNYKYDQLSVNVTG

SEQ ID NO: 18007 - protein, 412 aa, Homo sapiens
MISFCPDCGKSIQAAFKFCPYCGNSLPVEEHVGSQTFVNPHVSSFQGSKRGLNSSFETSPKKVKWSSTVTSPRLSLFSDGDSSESEDTLSSSERSKGSGSRPPTPKSSPQKTRKSPQVTRGSPQKTSCSPQKTRQSPQTLKRSRVTTSLEALPTGTVLTDKSGRQWKLKSFQTRDNQGILYEAAPTSTLTCDSGPQKQKFSLKLDAKDGRLFNEQNFFQRAAKPLQVNKWKKLYSTPLLAIPTCMGFGVHQDKYRFLVLPSLGRSLQSALDVSPKHVLSERSVLQVACRLLDALEFLHENEYVHGNVTAENIFVDPEDQSQVTLAGYGFAFRYCPSGKHVAYVEGSRSPHEGDLEFISMDLHKGCGPSRRSDLQSLGYCMLKWLYGFLPWTNCLPNTEDIMKQKQKLPWDSF

SEQ ID NO: 18008 - protein, 211 aa, Homo sapiens
GVPRPQPWALGLLLFLLPGSLGAESHLSLLYHLTAVSSPAPGTPAFWVSGWLGPQQYLSYNSLRGEAEPCGAWVWENQVSWYWEKETTDLRIKEKLFLEAFKALGGKGPYTLQGLLGCELGPDNTSVPTAKFALNGEEFMNFDLKQGTWGGDWPEALAISQRWQQQDKAANKELTFLLFSCPHRLREHLERGRGNLEWKEPKARQIFCAWI

SEQ ID NO: 18009 - protein, 756 aa, Homo sapiens
MDNITRQNQFYDTQVIKQENESGYERRPLEMEQQQAYRPEMKTEMKQGAPTSFLPPEASQLKPDRQQFQSRKRPYEENRGRGYFEHREDRRGRSPQPPAEEDEDDFDDTLVAIDTYNCDLHFKVARDRSSGYPLTIEGFAYLWSGARASYGVRRGRVCFEMKINEEISVKHLPSTEPDPHVVRIGWSLDSCSTQLGEEPFSYGYGGTGKKSTNSRFENYGDKFAENDVIGCFADFECGNDVELSFTKNGKWMGIAFRIQKEALGGQALYPHVLVKNCAVEFNFGQRAEPYCSVLPGFTFIQHLPLSERIRGTVGPKSKAECEILMMVGLPAAGKTTWAIKHAASNPSKKYNILGTNAIMDKMRVMGLRRQRNYAGRWDVLIQQATQCLNRLIQIAARKKRNYILDQTNVYGSAQRRKMRPFEGFQRKAIVICPTDEDLKDRTIKRTDEEGKDVPDHAVLEMKANFTLPDVGDFLDEVLFIELQREEADKLVRQYNEEGRKAGPPPEKRFDNRGGGGFRGRGGGGGFQRYENRGPPGGNRGGFQNRGGGSGGGGNYRGGFNRSGGGGYSQNRWGNNNRDNNNSNNRGSYNRAPQQQPPPQQPPPPQPPPQQPPPPPSYSPARNPPGASTYNKNSNIPGSSANTSTPTVSSYSPPQPSYSQPPYNQGGYSQGYTAPPPPPPPPPAYNYGSYGGYNPAPYTPPPPPTAQTYPQPSYNQYQQYAQQWNQYYQNQGQWPPYYGNYDYGSYSGNTQGGTSTQ

SEQ ID NO: 18010 - protein, 133 aa, Homo sapiens
MHLLGPWLLLLVLEYLAFSDSSKWVFEHPETLYAWEGACVWIPCTYRALDGDLESFILFHNPEYNKNTSKFDGTRLYESTKDGKVPSEQKRVQFLGDKNKNCTLSIHPVHLNDSGQLGLRMESKTEKWMERIH

SEQ ID NO: 18011 - protein, 346 aa, Homo sapiens
MDLNLSLLAREATPGLLPGLNGLPRPTPPKVAKKPKKAVLFFEVEILDAKTREKLCFLDKVEPHATIAEIKNLFTKTHPQWYPARQSLRLDPKGKSLKDEDVLQKLPVGTTATLYFRDLGAQISWVTVFLTEYAGPLFIYLLFYFRVPFIYGHKYDFTSSRHTVVHLACICHSFHYIKRLLETLFVHRFSHGTMPLRNIFKNCTYYWGFAAWMAYYINHPLYTPPTYGAQQVKLALAIFVICQLGNFSIHMALRDLRPAGSKTRKIPYPTKNPFTWLFLLVSCPNYTYEVGSWIGFAIMTQCLPVALFSLVGFTQMTIWAKGKHRSYLKEFRDYPPLRMPIIPFLL

SEQ ID NO: 18012 - protein, 730 aa, Homo sapiens
MGGRVFLVFLAFCVWLTLPGAETQDSRGCARWCPQDSSCVNATACRCNPGFSSFSEIITTPMETCDDINECATLSKVSCGKFSDCWNTEGSYDCVCSPGYEPVSGAKTFKNESENTCQDVDECSSGQHQCDSSTVCFNTVGSYSCRCRPGWKPRHGIPNNQKDTVCEDMTFSTWTPPPGVHSQTLSRFFDKVQDLGRDYKPGLANNTIQSILQALDELLEAPGDLETLPRLQQHCVASHLLDGLEDVLRGLSKNLSNGLLNFSYPAGTELSLEVQKQVDRSVTLRQNQAVMQLDWNQAQKSGDPGPSVVGLVSIPGMGKLLAEAPLVLEPEKQMLLHETHQGLLQDGSPILLSDVISAFLSNNDTQNLSSPVTFTFSHRSVIPRQKVLCVFWEHGQNGCGHWATTGCSTIGTRDTSTICRCTHLSSFAVLMAHYDVQEEDPVLTVITYMGLSVSLLCLLLAALTFLLCKAIQNTSTSLHLQLSLCLFLAHLLFLVAIDQTGHKVLCSIIAGTLHYLYLATLTWMLLEALYLFLTARNLTVVNYSSINRFMKKLMFPVGYGVPAVTVAISAASRPHLYGTPSRCWLQPEKGFIWGFLGPVCAIFSVNLVLFLVTLWILKNRLSSLNSEVSTLRNTRMLAFKATAQLFILGCTWCLGILQVGPAARVMAYLFTIINSLQGVFIFLVYCLLSQQVREQYGKWSKGIRKLKTESEMHTLSSSAKADTSKPSTVN

SEQ ID NO: 18013 - protein, 137 aa, Homo sapiens
MHLLGPWLLLLEYLAFSDSSKWVFEHPETLYAWEGACVWIPCTYRALDGDLESFILFHNPEYNKNTSKFDGTRLYESTKDGKVPSEQKRVQFLGDKNKNCTLSIHPVHLNDSGQLGLRMESKTEKWMERIHLNVSER

SEQ ID NO: 18014 - protein, 249 aa, Homo sapiens
MGTPRIQHLLILLVLGASLLTSGLELYCQKGLSMTVEADPANMFNWTTEEVETCDKGALCQETILIIKAGTETAILATKGCIPEGEEAITIVQHSSPPGLIVTSYSNYCEDSFCNDKDSLSQFWEFSETTASTVSTTLHCPTCVALGTCFSAPSLPCPNGTTRCYQGKLEITGGGIESSVEVKGCTAMIGCRLMSGILAVGPMFVREACPHQLLTQPRKTENGATCLPIPVWGLQLLLPLLLPSFIHFS

SEQ ID NO: 18015 - protein, 32 aa, Homo sapiens
MAPLALHLLVLVPILLSLVASQDWKAERSQDP

SEQ ID NO: 18016 - protein, 88 aa, Homo sapiens
MAAAATAAEGVPSRGPPGEVIHLNVGGKRFSTSRQTLTWIPDSFFSSLLSGRISTLKDETGAIFIDRDPTVFAPILNFLRTKELDPRP

SEQ ID NO: 18017 - protein, 227 aa, Homo sapiens
MWVPVVFLTLSVTWIGAAPLILSRIVGGWECEKHSQPWQVLVASRGRAVCGGVLVHPQWVLTAAHCIRNKSVILLGRHSLFHPEDTGQVFQVSHSFPHPLYDMSLLKNRFLRPGDDSSHDLMLLRLSEPAELTDAVKVMDLPTQEPALGTTCYASGWGSIEPEEFLTPKKLQCVDLHVISNDVCAQVHPQKVTKFMLCAGRWTGGKSTCSVSHPYSQDLEGKGEWGP

SEQ ID NO: 18018 - protein, 535 aa, Homo sapiens
MTEKFLFLYLSLLPMPLLSQAQWNENSLVSFSKIIASGNHLSNCWICHNFITRSSSYQYILVRNFSLNLTFGSGIPEGQHKSVPLQVSLANSAHQVPCLDLTPPFNQSSKTSFYFYNCSSLNQTCCPCPEGHCDRKNTSEEGFPSPTIHPMSFSPAGCHPNLTHWCPAKQMNDYRDKSPQNRCAAWEGKELITWRVLYSLPKAHTVPTWPKSTVPLGGPLSPACNQTIPAGWKSQLHKWFDSHIPRWACTPPGYVFLCGPQKNKLPFDGSPKITYSTPPVANLYTCINNIQHTGECAVGLLGPRGIGVTIYNTTQPRQKRALGLILAGMGAAIGMIAPWGGFTYHDVTLRNLSRQIDNIAKSTRDSISKLKASIDSLANVVMDNRLALDYLLAEQGGVCAVINKSCCVYVNNSGAIEEDIKKIYDEATWLHDFGKGGASARAIWEAVKSALPSLNWFVPLLGPATVILLLFLFGPCFFNLLIKCVSSRIKQFHMKSPQMERYQLSVIGGPSTYKHISPLDASGQRFRETMEEFSL

SEQ ID NO: 18019 - protein, 808 aa, Homo sapiens
MAGTVVLDDVELREAQRDYLDFLDDEEDQGIYQSKVRELISDNQYRLIVNVNDLRRKNEKRANRLLNNAFEELVAFQRALKDFVASIDATYAKQYEEFYVGLEGSFGSKHVSPRTLTSCFLSCVVCVEGIVTKCSLVRPKVVRSVHYCPATKKTIERRYSDLTTLVAFPSSSVYPTKDEENNPLETEYGLSVYKDHQTITIQEMPEKAPAGQLPRSVDVILDDDLVDKAKPGDRVQVVGTYRCLPGKKGGYTSGTFRTVLIACNVKQMSKDAQPSFSAEDIAKIKKFSKTRSKDIFDQLAKSLAPSIHGHDYVKKAILCLLLGGVERDLENGSHIRGDINILLIGDPSVAKSQLLRYVLCTAPRAIPTTGRGSSGVGLTAAVTTDQETGERRLEAGAMVLADRGVVCIDEFDKMSDMDRTAIHEVMEQGRVTIAKAGIHARLNARCSVLAAANPVYGRYDQYKTPMENIGLQDSLLSRFDLLFIMLDQMDPEQDREISDHVLRMHRYRAPGEQDGDAMPLGSAVDILATDDPNFSQEDQQDTQIYEKHDNLLHGTKKKKEKMVSAAFMKKYIHVAKIIKPVLTQESATYIAEEYSRLRSQDSMSSDTARTSPVTARTLETLIRLATAHAKARMSKTVDLQDAEEAVELVQYAYFKKVLEKEKKRKKRSEDESETEDEEEKSQEDQEQKRKRRKTRQPDAKDGDSYDPYDFSDTEEEMPQVHTPKTADSQETKESQKVELSESRLKAFKVALLDVFREAHAQSIGMNRLTESINRDSEEPFSSVEIQAALSKMQDDNQVMVSEGIIFLI

SEQ ID NO: 18020 - protein, 45 aa, Homo sapiens
MARSLVCLGVIILLSAFSGPGVRGGPMPKLADRKLCADQECSHPI

SEQ ID NO: 18021 - protein, 437 aa, Homo sapiens
MTQFLPPNLLALFAPRDPIPYLPPLEKLPHEKHHNQPYCGIAPYIREFEDPRDAPPPTRAETREERMERKRREKIERRQQEVETELKMWDPHNDPNAQGDAFKTLFVARVNYDTTESKLRREFEVYGPIKRIHMVYSKRSGKPRGYAFIEYEHERDMHSAYKHADGKKIDGRRVLVDVERGRTVKGWRPRRLGGGLGGTRRGGADVNIRHSGRDDTSRYDERPGPSPLPHRDRDRDRERERRERSRERDKERERRRSRSRDRRRRSRSRDKEERRRSRERSKDKDRDRKRRSSRSRERARRERERKEELRGGGGDMAEPSEAGDAPPDDGPPGELGPDGPDGPEEKGRDRDRERRRSHRSERERRRDRDRDRDRDREHKRGERGSERGRDEARGGGGGQDNGLEGLGNDSRDMYMESEGGDGYLAPENGYLMEAAPE

SEQ ID NO: 18022 - protein, 128 aa, Homo sapiens
MSGAPTAGAALMLCAATAVLLSAQGGPVQSKSPRFASWDEMNVLAHGLLQLGQGLREHAERTRSQLSALERRLSACGSFTACRHNSRLRTAGSSNSSTRWPSSSGTWRSSTCEFSICKASLASWTTST

SEQ ID NO: 18023 - protein, 635 aa, Homo sapiens
MAMSLLQDWCRSLDVDAHRALLVTGIPEGLEQADVEAVLQPTLLPLGTFRLRHMKALMNEKAQAALVEFVEDVNHAAIPREIPGKDGVWRVLWKDRAQDTRVLRQMRRLLLDDGPTQAAEAGTPGEAPTPPASETQAQDSGEVTGQAGSLLGAARNPRRGRRGRRNRTRRNRLTQKGKKRSRGGRPSAPARSEAEDSSDESLGIVIEEIDQGDLSGEEDQSALYATLQAAARELVRQWAPCNSEGEEDGPREFLALVTVTDKSKKEEAEKEPAGAESIRLNTKEDKNGVPDLVALLAVRDTPDEEPVDSDTSESDSQESGDQETEELDNPEFVAIVAYTDPSDPWAREEMLKIASVIESLGWSDEKDKRDPLRQVLSVMSKDTNGTRVKVEEAGREVDAVVLRKAGDDGDLRECISTLAQPDLPPQAKKAGRGLFGGWSEHREDEGGLLELVALLAAQDMAEVMKEEKENAWEGGKYKYPKGKLGEVLALLAARENMGSNEGSEEASDEQSEEESEDTESEASEPEDRASRKPRAKRARTAPRGLTPAGAPPTASGARKTRAGGRGRGRGVTPEKKAGSRGSAQDDAAGSRKKKGSAGAGAHARAGEAKGQAPTGSKAARGKKARRGRRLPPKCR

SEQ ID NO: 18024 - protein, 51 aa, Homo sapiens
MEPLVTWVVPLLFLFLLSRQGAACRTSECCFQDPPYPDADSGSASGPRDLR

SEQ ID NO: 18025 - protein, 683 aa, Homo sapiens
MIEDSGKRGNTMAERRQLFAEMRAQDLDRIRLSTYRTACKLRFVQKKCNLHLVDIWNVIEALRENALNNLDPNTELNVSRLEAVLSTIFYQLNKRMPTTHQIHVEQSISLLLNFLLAAFDPEGHGKISVFAVKMALATLCGGKIMDKLRYIFSMISDSSGVMVYGRYDQFLREVLKLPTAVFEGPSFGYTEQSARSCFSQQKKVTLNGFLDTLMSDPPPQCLVWLPLLHRLANVENVFHPVECSYCHSESMMGFRYRCQQCHNYQLCQDCFWRGHAGGSHSNQHQMKEYTSWKSPAKKLTNALSKSLSCASSREPLHPMFPDQPEKPLNLAHIVPPRPVTSMNDTLFSHSVPSSGSPFITRSMLESSNRLDEEHRLIARYAARLAAESSSSQPPQQRSAPDISFTIDANKQQRQLIAELENKNREILQEIQRLRLEHEQASQPTPEKAQQNPTLLAELRLLRQRKDELEQRMSALQESRRELMVQLEGLMKLLKTQGAGSPRSSPSHTISRPIPMPIRSASACSTPTHTPQDSLTGVGGDVQEAFAQSSRRNLRNDLLVAADSITNTMSSLVKELNSEVGSETESNVDSEFARTQFEDLVPSPTSEKAFLAQIHARKPGYIHSGATTSTMRGDMVTEDADPYVQPEDENYENDSVRQLENELQMEEYLKQKLQDEAYQVSLQG

SEQ ID NO: 18026 - protein, 104 aa, Homo sapiens
MSGAPTAGAALMLCAATAVLLSAQGGPVQSKSPRFASWDEMNVLAHGLLQLGQGLREHAERTRSQLSALERRLSACGSACQGTEGSTDLPLAPESRVDPEVLHS

SEQ ID NO: 18027 - protein, 510 aa, Homo sapiens
MIEDSGKRGNTMAERRQLFAEMRAQDLDRIRLSTYRTACKLRFVQKKCNLHLVDIWNVIEALRENALNNLDPNTELNVSRLEAVLSTIFYQLNKRMPTTHQIHVEQSISLLLNFLLAAFDPEGHGKISVFAVKMALATLCGGKIMDKLRYIFSMISDSSGVMVYGRYDQFLREVLKLPTAVFEGPSFGYTEQSARSCFSQQKKVTLNGFLDTLMSDPPPQCLVWLPLLHRLANVENVFHPVECSYCHSESMMGFRYRCQQCHNYQLCQDCFWRGHAGGSHSNQHQMKEYTSWKSPAKKLTNALSKSLSCASSREPLHPMFPDQPEKPLNLAHIVPPRPVTSMNDTLFSHSVPSSGSPFITRSMLESSNRLDEEHRLIARYAARLAAESSSSQPPQQRSAPDISFTIDANKQQRQLIAELENKNREILQEIQRLRLEHEQASQPTPEKAQQNPTLLAELRLLRQRKDELEQRMSALQESRRELMVQLEGLMKLLKEEELKQGVSYVPYCRS

SEQ ID NO: 18028 - protein, 158 aa, Homo sapiens
MIFLTALPLFWIMISASRGGHWGAWMPSSISAFEGTCVSIPCRFDFPDELRPAVVHGVWYFNSPYPKNYPPVVFKSRTQVVHESFQGRSRLLGDLGLRNCTLLLSNVSPELGGKYYFRGDLGGYNQYTFSEHSVLDIVNTPNIVVPPEVVAGTEVEVS

SEQ ID NO: 18029 - protein, 477 aa, Homo sapiens
MTEKFLFLYLSLLPMPLLSQAQWNENSLVSFSKIIASGNHLSNCWICHNFITRSSSYQYILVRNFSLNLTFGSGIPEGQHKSVPLQVSLANSAHQVPCLDLTPPFNQSSKTSFYFYNCSSLNQTCCPCPEGHCDRKNTSEEGFPSPTIHPMSFSPAGCHPNLTHWCPAKQMNDYRDKSPQNRCAAWEGKELITWRVLYLLPKAHTVPTWPKSTVPLGGPLSPACNQTIPAGWKSQLHKWFDSHIPRWACTPPGYVFLCGPQKNKLPFDGSPKITYSTPPVANLYTCINNIQHTGECAVGLLGPRGIGVTIYNTTQPRQKRALGLILAGMGAAIGMIAPWGGFTYHDVTLRNLSRQIDNIAKSTRDSISKLKASIDSLANVVMNNRLALDYLLAEQGGVCAVISKSCCIYVNNSGAIEEDIKKIYDEVTWLHNFGKGDSAGSIWEAVKSALPSLTWFVPLLGPAALNSLLSPLWPLSL

SEQ ID NO: 18030 - protein, 463 aa, Homo sapiens
MATVTATTKVPEIRDVTRIERIGAHSHIRGLGLDDALEPRQASQGMVGQLAARRAAGVVLEMIREGKIAGRAVLIAGQPGTGKTAIAMGMAQALGPDTPFTAIAGSEIFSLEMSKTEALTQAFRRSIGVRIKEETEIIEGEVVEIQIDRPATGTGSKVGKLTLKTTEMETIYDLGTKMIESLTKDKVQAGDVITIDKATGKISKLGRSFTRARDYDAMGSQTKFVQCPDGELQKRKEVVHTVSLHEIDVINSRTQGFLALFSGDTGEIKSEVREQINAKVAEWREEGKAEIIPGVLFIDEVHMLDIESFSFLNRALESDMAPVLIMATNRGITRIRGTSYQSPHGIPIDLLDRLLIVSTTPYSEKDTKQILRIRCEEEDVEMSEDAYTVLTRIGLETSLRYAIQLITAASLVCRKRKGTEVQVDDIKRVYSLFLDESRSTQYMKEYQDAFLFNELKGETMDTS

SEQ ID NO: 18031 - protein, 551 aa, Homo sapiens; identical to SEQ ID NO: 13939

SEQ ID NO: 18032 - protein, 58 aa, Homo sapiens
MIFLTALPLFWIMISASRGGHWGAWMPSSISAFEGTCVSIPCRFDFPDELRPAVVHGV

SEQ ID NO: 18033 - protein, 167 aa, Homo sapiens
MNRPAPVEISYENMRFLITHNPTNATLNKFTEELKKYGVTTLVRVCDATYDKAPVEKEGIHVLDWPFDDGAPPPNQIVDDWLNLLKTKFREEPGCCVAVHCVAGLGRAPVLVALALIECGMKYEDAVQFIRQKRRGAFNSKQLLYLEKYRPKMRLRFRDTNGHCCVQ

SEQ ID NO: 18034 - protein, 365 aa, Homo sapiens
MNIMDFNVKKLAADAGTFLSRAVQFTEEKLGQAEKTELDAHLENLLSKAECTKIWTEKIMKQTEVLLQPNPNARIEEFVYEKLDRKAPSRINNPELLGQYMIDAGTEFGPGTAYGNALIKCGETQKRIGTADRELIQTSALNFLTPLRNFIEGDYKTIAKERKLLQNKRLDLDAAKTRLKKAKAAETRNSSEQELRITQSEFDRQAEITRLLLEGISSTHAHHLRCLNDFVEAQMTYYAQCYQYMLDLQKQLGSFPSNYLSNNNQTSVTPVPSVLPNAIGSSAMASTSGLVITSPSNLSDLKECSGSRKARVLYDYDAANSTELSLLADEVITVFSVVGMDSDWLMGERGNQKGKVPITYLELLN

SEQ ID NO: 18035 - protein, 1070 aa, Homo sapiens
MARRHERVTRRMWTWAPGLLMMTVVFWGHQGNGQGQGSRLRQEDFPPRIVEHPSDVIVSKGEPTTLNCKAEGRPTPTIEWYKDGERVETDKDDPRSHRMLLPSGSLFFLRIVHGRRSKPDEGSYVCVARNYLGEAVSRNASLEVALLRDDFRQNPTDVVVAAGEPAILECQPPRGHPEPTIYWKKDKVRIDDKEERISIRGGKLMISNTRKSDAGMYTCVGTNMVGERDSDPAELTVFERPTFLRRPINQVVLEEEAVEFRCQVQGDPQPTVRWKKDDADLPRGRYDIKDDYTLRIKKTMSTDEGTYMCIAENRVGKMEASATLTVRARPVAPPQFVVRPRDQIVAQGRTVTFPCETKGNPQPAVFWQKEGSQNLLFPNQPQQPNSRCSVSPTGDLTITNIQRSDAGYYICQALTVAGSILAKAQLEVTDVLTDRPPPIILQGPANQTLAVDGTALLKCKATGDPLPVISWLKEGFTFPGRDPRATIQEQGTLQIKNLRISDTGTYTCVATSSSGETSWSAVLDVTESGATISKNYDLSDLPGPPSKPQVTDVTKNSVTLSWQPGTPGTLPASAYIIEAFSQSVSNSWQTVANHVKTTLYTVRGLRPNTIYLFMVRAINPQGLSDPSPMSDPVRTQDISPPAQGVDHRQVQKELGDVLVRLHNPVVLTPTTVQVTWTVDRQPQFIQGYRVMYRQTSGLQATSSWQNLDAKVPTERSAVLVNLKKGVTYEIKVRPYFNEFQGMDSESKTVRTTEEAPSAPPQSVTVLTVGSYNSTSISVSWDPPPPDHQNGIIQEYKIWCLGNETRFHINKTVDAAIRSVIIGGLFPGIQYRVEVAASTSAGVGVKSEPQPIIIGRRNEVVITENNNSITEQITDVVKQPAFIAGIGGACWVILMGFSIWLYWRRKKRKGLSNYAVTFQRGDGGLMSNGSRPGLLNAGDPSYPWLADSWPATSLPVNNSNSGPNEIGNFGRGDVLPPVPGQGDKTATMLSDGAIYSSIDFTTKTSYNSSSQITQATPYATTQILHSNSIHELAVDLPDPQWKSSIQQKTDLMGFGYSLPDQNKGNNGGKGG

SEQ ID NO: 18036 - protein, 97 aa, Homo sapiens
MWLCPLALTLILMAASGAACEVKDVCVGSPGIPGTPGSHGLPGRDGRDGVKGDPGPPGPMGPPGETPCPPGNNGLPGAPGVPGERGEKGEAGERGPP

SEQ ID NO: 18037 - protein, 69 aa, Homo sapiens
MSRYLRPPNTSLFVRNVADDTRSEDLRREFGRYGPIVDVYVPLDFYTRRPRGFAYVQYPFFRWLISEGC

SEQ ID NO: 18038 - protein, 40 aa, Homo sapiens
MSRYLRPPNTSLFVRNVADDTSTKSDESQGREECVQFFTL

SEQ ID NO: 18039 - protein, 858 aa, Homo sapiens
MLSGKKAAAAAAAAAAAATGTEAGPGTAGGSENGSEVAAQPAGLSGPAEVGPGAVGERTPRKKEPPRASPPGGLAEPPGSAGPQAGPTVVPGSATPMETGIAETPEGRRTSRRKRAKVEYREMDESLANLSEDEYYSEEERNAKAEKEKKLPPPPPQAPPEEENESEPEEPSGVEGAAFQSRLPHDRMTSQEAACFPDIISGPQQTQKVFLFIRNRTLQLWLDNPKIQLTFEATLQQLEAPYNSDTVLVHRVHSYLERHGLINFGIYKRIKPLPTKKTGKVIIIGSGVSGLAAARQLQSFGMDVTLLEARDRVGGRVATFRKGNYVADLGAMVVTGLGGNPMAVVSKQVNMELAKIKQKCPLYEANGQAVPKEKDEMVEQEFNRLLEATSYLSHQLDFNVLNNKPVSLGQALEVVIQLQEKHVKDEQIEHWKKIVKTQEELKELLNKMVNLKEKIKELHQQYKEASEVKPPRDITAEFLVKSKHRDLTALCKEYDELAETQGKLEEKLQELEANPPSPLFFCSDVYLSSRDRQILDWHFANLEFANATPLSTLSLKHWDQDDDFEFTGSHLTVRNGYSCVPVALAEGLDIKLNTAVRQVRYTASGCEVIAVNTRSTSQTFIYKCDAVLCTLPLGVLKQQPPAVQFVPPLPEWKTSAVQRMGFGNLNKVVLCFDRVFWDPSVNLFGHVGSTTASRGELFLFWNLYKAPILLALVAGEAAGIMENISDDVIVGRCLAILKGIFGSSAVPQPKETVVSRWRADPWARGSYSYVAAGSSGNDYDLMAQPITPGPSIPGAPQPIPRLFFAGEHTIRNYPATVHGALLSGLREAGRIADQFLGAMYTLPRQATPGVPAQQSPSM

SEQ ID NO: 18040 - protein, 37 aa, Homo sapiens
MGSPRSALSCLLLHLLVLCLQAQVRRGARRRGPGAPV

SEQ ID NO: 18041 - protein, 287 aa, Homo sapiens
MAAAAVNGAAGFSSSGPAATSGAVLQAATGMYEQLKGEWNRKSPNLSKCGEELGRLKLVLLELNFLPTTGTKLTKQQLILARDILEIGAQWSILRKDIPSFERYMAQLKCYYFDYKEQLPESAYMHQLLGLNLLFLLSQNRVAEFHTELERLPAKDIQTNVYIKHPVSLEQYLMEGSYNKVFLAKGNIPAESYTFFIDILLDTIRDEIAGCIEKAYEKILFTEATRILFFNTPKKMTDYAKKRGWVLGPNNYYSFASQQQKPEDTTIPSTELAKQVIEYARQLEMIV

SEQ ID NO: 18042 - protein, 101 aa, Homo sapiens
MERPLCSHLCSCLAMLALLSPLSLAQYDSWPHYPEYFQQPAPEYHQPQAPANVAKIQLHLVLARRCQQQQSGHEWSEVLGNGAVPGALPPRRGGRGLPPGR

SEQ ID NO: 18043 - protein, 65 aa, Homo sapiens
MRGSQEVLLMWLLVLAVGGTEHAYRPGRRVCAVRAHGDPVSESFVQRVYQPFLTTCDGHRACSTY

SEQ ID NO: 18044 - protein, 171 aa, Homo sapiens
MWRSLGLALALCLLPSGGTESQDQSSLCKQPPAWSIRDQDPMLNSNGSVTVVALLQASUYLCILQASKLSKMKTFVNVYLWLLWIKQLKLHRLITIMSIITIMDISTLAAVSFQRISNQEHQMLLLILLLQAFITTISTRVSIGRVTQRTEICQQVKIYKIYKRSSVERDV

SEQ ID NO: 18045 - protein, 43 aa, Homo sapiens
MARGPLAARGLRLLLPLLPLLPLLPLPQVALGFADGSCDPSDQ

SEQ ID NO: 18046 - protein, 79 aa, Homo sapiens [sequence omitted]

SEQ ID NO: 18047 - protein, 40 aa, Homo sapiens
MAFTLYSLLQAALLCVNAIAVLHEERFLKNRNEGWQHAVH

SEQ ID NO: 18048 - protein, 3565 aa, Homo sapiens; identical to SEQ ID NO: 15345

SEQ ID NO: 18049 - protein, 116 aa, Homo sapiens
MTWRQAVLLSCFSAVVLLSNAKQKIFMQESDASNFLKRRGKRSPKSRDEVNVENRQKLRVDELRREYYEEQRNEFENFVEEQNDEQEERSREAVEQWRQWHYDGLHPSYLYNRHHT

SEQ ID NO: 18050 - protein, 228 aa, Homo sapiens
MVKSSLQRILNSHCFAREKEGDKPSATIHASRTMPLLSLHSRGGSSSESSRVSLHCCSNPGPGPRWCSDAPHPPLKIPGGRGNSQRDHNLSANLFYSDDRLNVTEELTSNDKTRILNVQSRLTDAKRINWRTVLSGGSLYIEIPGGALPEGSKDSFAVLLEFAEEQLRADHVFICFHKNREDRAALLRTFSFLGFEIVRPGHPLVPKRPDACFMAYTFERESSGEEEE

SEQ ID NO: 18051 - protein, 1640 aa, Homo sapiens
MPNVAETERSNDSGNGEHKSERKSPEENLQGAVKSFCTSASGAPLGPKGDGHYPWSCPVTHTREKIYAICSDYAFLNQATSIYKTPNPSRSPCLPDSTSLSAGNNSSRYIGIPTSTSEIIYNEENSLENLSNSLGKLPLAWEIDKSEFDGVTTNSKHKSGNAKKQVSKRKTSDKKGRYQKECPQHSPLEDIKQRKVLDLRRWYCISRPQYKTSCGISSLISCWNFLYSTMGAGNLPPITQEEALHILGFQPPFEDIRFGPFTGNTTLMRWFRQINDHFHVKGCSYVLYKPHGKNKTAGETASGALSKLTRGLKDESLAYIYHCQNHYFCPIGFEATPVKANKAFSRGPLSPQEVEYWILIGESSRKHPAIHCKKWADIVTDLNTQNPEYLDIRHLERGLQYRKTKKVGGNLHCIIAFQRLNWQRFGLWNFPFGTIRQESQPPTHAQGIAKSESEDNISKKQHGRLGRSFSASFHQDSAWKKMSNISIWLNQALKGVRDRHGNSIENPHLLTLFHRLCKLLFFRIRPIFVFDGDAPLLKKQTLVKRRQRKDLASSDSRKTTEKLLKTFLKRQAIKTAFRSKRDEALPSLTQVRRENDLYVLPPLQEEEKHSSEEEDEKEWQERMNQKQALQEEFFHNPQAIDIESEDFSSLPPEVKHEILTDMKEFTKRRRTLFEAMPEESDDFSQYQLKGLLKKNYLNQHIEHVQKEMNQQHSGHIRRQYEDEGGFLKEVESRRVVSEDTSHYILIKGIQAKTVAEVDSESLPSSSKMHGMSFDVKSSPCEKLKTEKEPDATPPSPRTLLAMQAALLGSSSEEELESENRRQARGRNAPAAVDEGSISPRTLSAIKRALDDDEDVKVCAGDDVQTGGPGAEEMRINSSTENSDEGLKVRDGKGIPFTATLASSSVNSAEEHVASTNEGREPTDSVPKEQMSLVHVGTEAFPISDESMIKDRKDRLPLESAVVRHSDAPGLPNGRELTPASPTCTNSVSKNETHAEVLEQQNELCPYESKFDSSLLSSDDETKCKPNSASEVIGPVSLQETSSIVSVPSEAVDNVENVVSFNAKEHENFLETIQEQQTTESAGQDLISIPKAVEPMEIDSEESESDGSFIEVQSVISDEELQAEFPETSKPPSEQGEEELVGTREGEAPAESESLLRDNSERDDVDGEPQEAEKDAEDSLHEWQDINLEELETLESNLLAQQNSLKAQKQQQERIAATVTGQMFLESQELLRLFGIPYIQAPMEAEAQCAILDLTDQTSGTITDDSDIWLFGARHVYRNFFNKNKFVEYYQYVDFHNQLGLDRNKLINLAYLLGSDYTEGIPTVGCVTAMEILNEFPGHGLEPLLKFSEWWHEAQKNPKIRPNPHDTKVKKKLRTLQLTPGFPNPAVAEAYLKPVVDDSKGSFLWGKPDLDKIREFCQRYFGWNRTKTDESLFPVLKQLDAQQTQLRIDSFFRLAQQEKEDAKRIKSQRLNRAVTCMLRKEKEAAASEIEAVSVAMEKEFELLDKAKGKTQKRGITNTLEESSSLKRKRLSDSKGKNTCGGFLGETCLSESSDGSSSEDAESSSLMNVQRRTAAKEPKTSASDSQNSVKEAPVKNGGATTSSSSDSDDDGGKEKMVLVTARSVFGKKRRKLRRARGRKRKT

SEQ ID NO: 18052 - protein, 469 aa, Homo sapiens
MELSESVQKGFQMLADPRSFDSNAFTLLLRAAFQSLLDAQADEAVLDHPDLKHIDPVVLKHCHAAAATYILEAGKHRADKSTLSTYLEDCKFDRERIELFCTEYQNNKNSLEILLGRTLIPHPIQRLVLVAAWNNYRIFYQAEMHRTTRIKITELNPHLMCVLCGGYFIDATTIIECLHSFCKTCIVRYLETSKYCPICDVQVHKTRPLLNIRSDKTLQDIVYKLVPGLFKNEMKRRRDFYAAHPSADAANGSNEDRGEVADEDKRIITDDEIISLSIEFFDQNRLDRKVNKDKEKSKEEVNDKRYLRCPAAMTVMHLRKFLRSKMDIPNTFQIDVMYEEEPLKDYYTLMDIAYIYTWRRNGPLPLKYRVRPTCKRMKISHQRDGLTNAGELESDSGSDKANSPAGGIPSTSSCLPSPSTPVQSPHPQFPHISSTMNGTSNSPSGNHQSSFANRPRKSSVNGSSATSSG

SEQ ID NO: 18053 - protein, 650 aa, Homo sapiens
MAAATADPGAGNPQPGDSSGGGAGGGLPSPGEQELSRRLQRLYPAVNQQETPLPRSWSPKDKYNYIGLSQGNLRVHYKGHGKNHKDAASVRATHPIPAACGIYYFEVKIVSKGRDGYMGIGLSAQGVNMNRLPGWDKHSYGYHGDDGHSFCSSGTGQPYGPTFTTGDVIGCCVNLINGTCFYTKNGHSLGIAFTDLPANLYPTVGLQTPGEIVDANFGQQPFLFDIEDYMREWRAKVQGTVHCFPISARLGEWQAVLQNMVSSYLVHHGYCATATAFARMTETPIQEEQASIKNRQKIQKLVLEGRVGEAIETTQRFYPGLLEHNPNLLFMLKCRQFVEMVNGTDSEVRSLSSRSPKSQDSYPGSPSLSPRHGPSSSHMHNTGADSPSCSNGVASTKSKQNHSKYPAPSSSSSSSSSSSSSSPSSVNYSESNSTDSTKSQHHSSTSNQETSNPWLQLERRPNQAAPTTPPGPTPTSTPPHSDSEMEMEAEHYPNGVLGSMSTRIVNGAYKHEDLQTDESSMDDRHPRRQLCGGNQAATERIILFGRELQALSEQLGREYGKNLAHTEMLQDAFSLLAYSDPWSCPVGQQLDPIQREPVCAALNSAILESQNLPKQPPLMLALGQASECLRLMARAGLGSCSFARVDDYLH

SEQ ID NO: 18054 - protein, 530 aa, Homo sapiens
MGRHVATSCHVAWLLVLISGCWGQVNRLPFFTNHFFDTYLLISEDTPVGSSVTQLLAQDMDNDPLVFGVSGEEASRFFAVEPDTGVVWLRQPLDRETKSEFTVEFSVSDHQGVITRKVNIQVGDVNDNAPTFHNQPYSVRIPENTPVGTPIFIVNATDPDLGAGGSVLYSFQPPSQFFAIDSARGIVTVIRELDYETTQAYQLTVNATDQDKTRPLSTLANLAIIITDVQDMDPIFINLPYSTNIYEHSPPGTTVRIITAIDQDKGRPRGIGYTIVSGNTNSIFALDYISGVLTLNGLLDRENPLYSHGFILTVKGTELNDDRTPSDATVTTTFNILVIDINDNAPEFNSSEYSVAITELAQVGFALPLFIQVVDKDENLGLNSMFEVYLVGNNSHHFIISPTSVQGKADIRIRVAIPLDYETVDRYDFDLFANESVPDHVGYAKVKITLINENDNRPIFSQPLYNISLYENVTVGTSVLTVLVSPRFTAGPLSSPGPTVVRHPEGFCPRDLSNQGRRHPQIPELCLLVY

SEQ ID NO: 18055 - protein, 606 aa, Homo sapiens
MATKDPTAVERANLLNMAKLSIKGLIESALSFGRTLDSDYPPLQQFFVVMEHCLKHGLKVRKSFLSYNKTIWGPLELVEKLYPEAEEIGASVRDLPGLKTPLGRARAWLRLALMQKKMADYLRCLIIQRDLLSEFYEYHALMMEEEGAVIVGLLVGLNVIDANLCVKGEDLDSQVGVIDFSMYLKNEEDIGNKERNVQIAAILDQKNYVEELNRQLNSTVSSLHSRVDSLEKSNTKLIEELAIAKNNIIKLQEENHQLRSENKLILMKTQQHLEVTKVDVETELQTYKHSRQGLDEMYNEARRQLRDESQLRQDVENELAVQVSMKHEIELAMKLLEKDIHEKQDTLIGLRQQLEEVKAINIEMYQKLQGSEDGLKEKNEIIARLEEKTNKITAAMRQLEQRLQQAEKAQMEAEDEDEKYLQECLSKSDSLQKQISQKEKQLVQLETDLKIEKEWRQTLQEDLQKEKDALSHLRNETQQIISLKKEFLNLQDENQQLKKIYHEQEQALQELGNKLSESKLKIEDIKEANKALQGLVWLKDKEATHCKLCEKEFSLSKRKHHCRNCGEIFCNACSDNELPLPSSPKPVRVCDSCHALLIQRCSSNLP

SEQ ID NO: 18056 - protein, 1958 aa, Homo sapiens
MIEDKGPRVTDYFVVAGLTDTSTLLDQEINRLDTKSTGPKAPITDIAIIIKSAGETVPEGYTCVEATPSALQANLNYGSLKSPELFLCYKRGRDKPPLTDIGVLYEGKERLIPGCEVILATPYGRCANVNNSSTTSQRIFITYRRAPPVRPQNSLAVTDICVIVTSKGETPPHTFCKVDKNLNCGMWGSSVFLCYKKSVPASNAIAYKAGLIFRYPEEDYESFPLSESDVPLFCLPMGATIECWDPETKYPLPVFSTFVLTGSSAKKVYGAAIQFYEPYSRELLSEKQLMHLGLLTPVERKMVSKSINTNKCICLLSHWPFFEAFRKFLMFIYKLSVSGPHPLPIEKHISHFMQNIPFPSPQRPRILVQLSVHDALILSQPVSTPLPLSGANFSTLLMNLGPENCATLLLFVLLESKILLHSLRPAVLTGVAEAVVAMIFPFQWQCPYIPLCPLSLAAVLSAPLPFIVGVDSRYFDLHDPPQDVVCIDLDTNMLYVSDEKKNMNWKQLPKKPCKNLLSTLKKLYPQLSSVHQKTQEGSAIDMTPIEADFSWQKKMTQLEMEIQEAFLRFMASILKGYRTYLRPITEAPSNKATAADSLFDRQGFLKSRDRAYAKFYTLLSKTQIFIRFIEECSFVSDKDTGLAFFDDCIEKLFPDKGTEKTDKVDFDSAEDTRLIELDDSQKSEHTVFIMPPEPPPDDGKDLSPKYSYKYFPRLDLKLFDRPQELKLCFSRHPTGNSITKSPPLMAKRTKQEIKTAHKLAKRCYTNPPQWAKCLFSHCYSLWFICLPAYVRVSHPKVRALQQAYDVLIKMRKTDVDPLDEVCYRVVMQLCGLWGHPVLAVRVLFEMKTARIKPNAITYGYYNKVVLESPWPSSTRSGIFLWTKVRNVVRGLAQFRQPLKKTVQRSQVSSISALQNVTGGSDGDTVSHGSVDSSNDANNGEHTVFVRDLIRLESIDNHSSTGGQSDQGYGSKDELIKDDAEIHVPEEQAARELITKTKMQTEEVCDASAIVAKHSQPSPEPHSPTEPPAWGSSIVKVPSGIFDVNSRKSSTGSISNVLFSTQDPVEDAVFGEATNLKKNGDRGEKRQKHFPERSCSFSSESRAGMLLKKSSLDSNSSEMAIMMGADAKILTAALTCPKTSLLHIARTHSFENVSCHLPDSRTCMSESTWNPEHRSSPVPEMLEESQELLEPVVDDVPKTTATVDTYESLLSDSNSNQSRDLKTVSKDLRNKRSSLYGIAKVVQREDVETGLDPLSLLATECTGGKTPDSEDKLFSPVIARNLADEIESYMNLKSPLGSKSSSMELHREENRESGMTTAFIHALERRSSLPLDHGSPAQENPESEKSSPAVSRSKTFTGRFKQQTPSRTHKERSTSLSALVRSSPHGSLGSVVNSLSGLKLDNILSGPKIDVLKSGMKQAATVASKMWVAVASAYSYSDDEEETNRDYSFPAGLEDHILGENISPNTSISGLVPSELTQSNTSLGSSSSSGDVGKLHYPTGEVPFPRGMKGQDFEKSDHGSSQNTSMSSIYQNCAMEVLMSSCSQCRACGALVYDEEIMAGWTADDSNLNTACPFCKSNFLPLLNIEFKDLRGSASFFLKPSTSGDSLQSGSIPLANESLEHKPVSSLAEPDLINFMDFPKHNQIITEETGSAVEPSDEIKRASGDVQTMKISSVPNSLSKRNVSLTRSHSVGGPLQNIDFTQRPFHGISTVSLPNSLQEVVDPLGKRPNPPPVSVPYLSPLVLRKELESLLENEGDQVIHTSSFINQHPIIFWNLVWYFRRLDLPSNLPGLILTSEHCNEGVQLPLSSLSQDSKLVYIQLLWDNINLHQEPREPLYVSWRNFNSEKKSSLLSEEQQETSTLVETIRQSIQHNNVLKPINLLSQQMKPGMKRQRSLYREILFLSLVSLGRENIDIEAFDNEYGIAYNSLSSEILERLQKIDAPPSASVEWCRKCFGAPLI

SEQ ID NO: 18057 - protein, 585 aa, Homo sapiens
MSATSVDQRPKGQGNKVSVQNGSIHQKDAVNDDDFEPYLSSQTNQSNSYPPMSDPYMPSYYAPSIGFPYSLGEAAWSTAGDQPMPYLTTYGQMSNGEHHYIPDGVFSQPGALGNTPPFLGQHGFNFFPGNADFSTWGTSGSQGQSTQSSAYSSSYGYPPSSLGRAITDGQAGFGNDTLSKVPGISSIEQGMTGLKIGGDLTAAVTKTVGTALSSSGMTSIATNSVPPVSSAAPKPTSWAAIARKPAKPQPKLKPKGNVGIGGSAVPPPPIKHNMNIGTWDEKGSVVKAPPTQPVLPPQTIIQQPQPLIQPPPLVQSQLPQQQPQPPQPQQQQGPQPQAQPHQVQPQQQQLQNRWVAPRNRGAGFNQNNGAGSENFGLGVVPVSASPSSVEVHPVLEKLKAINNYNPKDFDWNLKNGRVFIIKSYSEDDIHRSIKYSIWCSTEHGNKRLDAAYRSLNGKGPLYLLFSVNGSGHFCGVAEMKSVVDYNAYAGVWSQDKWKGKFEVKWIFVKDVPNNQLRHIRLENNDNKPVTNSRDTQEVPLEKAKQVLKIIATFKHTTSIFDDFAHYEKRQEEEEAMRRERNRNKQ

SEQ ID NO: 18058 - protein, 208 aa, Homo sapiens
MKQRFSALQLLKLLLLLQPPLPRALREALCPEPCNCVPDGALRCPGPTAGLTRLSLAYLPVKVIPSQAFRGLNEVIKILIQNTKNLRYIEPGAFINLPRLKYLSICNTGIRKFPDVTKVFSSESNFILEICDNLHITTIPGNAFQGMNNESVTLKLYGNGFEEVQSHAFNGTTLTSLELKENVHLEKMHNGAFRGATGPKTLPCRAMA

SEQ ID NO: 18059 - protein, 82 aa, Homo sapiens
MRTWDYSNSGNMKPPLLVFIVCLLWLKDSHCAPTWKDKTAISENLKSFSEVGEIDADEEVKKALTGIKQMKIMMERKEKEHT

SEQ ID NO: 18060 - protein, 969 aa, Homo sapiens
MRTAGRDPVPRRSPRWRRAVPLCETSAGRRVTQLRGDDLRRPATMKGKERSPVKAKRSRGGEDSTSRGERSKKLGGSGGSNGSSSGKTDSGGGSRRSLHLDKSSSRGGSREYDTGGGSSSSRLHSYSSPSTKNSSGGGESRSSSRGGGGESRSSGAASSAPGGGDGAEYKTLKISELGSQLSDEAVEDGLFHEFKRFGDVSVKISHLSGSGSGDERVAFVNFRRPEDARAAKHARGRLVLYDRPLKIEAVYVSRRRSRSPLDKDTYPPSASVVGASVGGHRHPPGGGGGQRSLSPGGAALGYRDYRLQQLALGRLPPPPPPPLPRDLERERDYPFYERVRPAYSLEPRVGAGAGAAPFREVDEISPEDDQRANRTLFLGNLDITVTESDLRRAFDRFGVITEVDIKRPSRGQTSTYGFLKFENLDMSHRAKLAMSGKIIIRNPIKIGYGKATPTTRLWVGGLGPWVPLAALAREFDRFGTIRTIDYRKGDSWAYIQYESLDAAHAAWTHMRGFPLGGPDRRLRVDFADTEHRYQQQYLQPLPLTHYELVTDAFGHRAPDPLRGARDRTPPLLYRDRDRDLYPDSDWVPPPPPVRERSTRTAATSVPAYEPLDSLDRRRDGWSLDRDRGDRDLPSSRDQPRKRRLPEESGGRHLDRSPESDRPRKRHCAPSPDRSPELSSSRDRYNSDNDRSSRLLLERPSPIRDRRGSLEKSQGDKRDRKNSASAERDRKHRTTAPTEGKSPLKKEDRSDGSAPSTSTASSKLKSPSQKQDGGTAPVASASPKLCLAWQGMLLLKNSNFPSNMHLLQGDLQVASSLLVEGSTGGKVAQLKITQRLRLDQPKLDEVTRRIKVAGPNGYAILLAVPGSSDSRSSSSSAASDTATSTQRPLRNLVSYLKQKQAAGVISLPVGGNKDKENTGVLHAFPPCEFSQQFLDSPAKALAKSEEDYLVMIIVRAKLVEQRMKIWNSKL

SEQ ID NO: 18061 - protein, 151 aa, Homo sapiens
MASMQKRLQKELLALQNDPPPGMTLNEKSVQNSITQWIVDMEGAPGTLYEGEKFQLLFKFSSRYPFDSPQVMFTGENIPVHPHVYSNGHICLSILTEDWSPALSVQSVCLSIISMLSSCKEKRRPPDNSFYVRTCNKNPKKTKWWYHDDTC

SEQ ID NO: 18062 - protein, 1909 aa, Homo sapiens
MIEDKGPRVTDYFVVAGLTDTSTLLDQEINRLDTKSTGPKAPITDIAIIIKSAGETVPEGYTCVEATPSALQANLNYGSLKSPELFLCYKRGRDKPPLTDIGVLYEGKERLIPGCEVILATPYGRCANVNNSSTTSQRIFITYRRAPPVRPQNSLAVTDICVIVTSKGETPPHTFCKVDKNLNCGMWGSSVFLCYKKSVPASNAIAYKAGLIFRYPEEDYESFPLSESDVPLFCLPMGATIECWDPETKYPLPVFSTFVLTGSSAKKVYGAAIQFYEPYSRELLSEKQLMHLGLLTPVERKMVSKSINTNKCICLLSHWPFFEAFRKFLMFIYKLSVSGPHPLPIEKHISHFMQNIPFPSPQRPRILVQLSVHDALILSQPVSTPLPLSGANFSTLLMNLGPENCATLLLFVLLESKILLHSLRPAVLTGVAEAVVAMIFPFQWQCPYIPLCPLSLAAVLSAPLPFIVGVDSRYFDLHDPPQDVVCIDLDTNMLYVSDEKKNMNWKQLPKKPCKNLLSTLKKLYPQLSSVHQKTQEGSAIDMTPIEADFSWQKKMTQLEMEIQEAFLRFMASILKGYRTYLRPITEAPSNKATAADSLFDRQGFLKSRDRAYAKFYTLLSKTQIFIRFIEECSFVSDKDTGLAFFDDCIEKLFPDKGTEKTDKVDFDSAEDTRLIELDDSQKSEHTVFIMPPEPPPDDGKDLSPKYSYKYFPRLDLKLFDRPQELKLCFSRHPTGNSITKSPPLMAKRTKQEIKTAHKLAKRCYTNPPQWAKCLFSHCYSLWFICLPAYVRVSHPKVRALQQAYDVLIKMRKTDVDPLDEVCYRVVMQLCGLWGHPVLAVRVLFEMKTARIKPNAITYGYYNKVVLESPWPSSTRSGIFLWTKVRNVVRGLAQFRQPLKKTVQRSQVSSISGGQSDQGYGSKDELIKDDAEIHVPEEQAARELITKTKMQTEEVCDASAIVAKHSQPSPEPHSPTEPPAWGSSIVKVPSGIFDVNSRKSSTGSISNVLFSTQDPVEDAVFGEATNLKKNGDRGEKRQKHFPERSCSFSSESRAGMLLKKSSLDSNSSEMAIMMGADAKILTAALTCPKTSLLHIARTHSFENVSCHLPDSRTCMSESTWNPEHRSSPVPEMLEESQELLEPVVDDVPKTTATVDTYESLLSDSNSNQSRDLKTVSKDLRNKRSSLYGIAKVVQREDVETGLDPLSLLATECTGGKTPDSEDKLFSPVIARNLADEIESYMNLKSPLGSKSSSMELHREENRESGMTTAFIHALERRSSLPLDHGSPAQENPESEKSSPAVSRSKTFTGRFKQQTPSRTHKERSTSLSALVRSSPHGSLGSVVNSLSGLKLDNILSGPKIDVLKSGMKQAATVASKMWVAVASAYSYSDDEEETNRDYSFPAGLEDHILGENISPNTSISGLVPSELTQSNTSLGSSSSSGDVGKLHYPTGEVPFPRGMKGQDFEKSDHGSSQNTSMSSIYQNCAMEVLMSSCSQCRACGALVYDEEIMAGWTADDSNLNTACPFCKSNFLPLLNIEFKDLRGSASFFLKPSTSGDSLQSGSIPLANESLEHKPVSSLAEPDLINFMDFPKHNQIITEETGSAVEPSDEIKRASGDVQTMKISSVPNSLSKRNVSLTRSHSVGGPLQNIDFTQRPFHGISTVSLPNSLQEVVDPLGKRPNPPPVSVPYLSPLVLRKELESLLENEGDQVIHTSSFINQHPIIFWNLVWYFRRLDLPSNLPGLILTSEHCNEGVQLPLSSLSQDSKLVYIQLLWDNINLHQEPREPLYVSWRNFNSEKKSSLLSEEQQETSTLVETIRQSIQHNNVLKPINLLSQQMKPGMKRQRSLYREILFLSLVSLGRENIDIEAFDNEYGIAYNSLSSEILERLQKIDAPPSASVEWCRKCFGAPLI

SEQ ID NO: 18063 - protein, 235 aa, Homo sapiens
AGSPTCLTLIYILWQLTGSAASGPVKELVGSVGGAVTFPLKSKVKQVDSIVWTFNTTPLVTIQPEGGTIIVTQNRNRERVDFPDGGYSLKLSKLKKNDSGIYYVGIYSSSLQQPSTQEYVLHVYEHLSKPKVTMGLQSNKNGTCVTNLTCCMEHGEEDVIYTWKALGQAANESHNGSILPISWRWGESDMTFICVARNPVSRNFSSPILARKLCEENNPKGRSSKYGLLHCGNTE

SEQ ID NO: 18064 - protein, 522 aa, Homo sapiens
MYVIESARQRPPKRKYLSSGRKSVFQKLYDLYIEECEKEPEVKKLRRNVNLLEKLVMQETLSCLVVNLYPGNEGYSLMLRGKNGSDSETIRLPYEEGELLEYLDAEELPPILVDLLEKSQVNIFHCGCVIAEIRDYRQSSNMKSPGYQSRHILLRPTMQTLICDVHSITSDNHKWTQEDKLLLESQLILATAEPLCLDPSIAVTCTANRLLYNKQKMNTRPMKRCFKRYSRSSLNRQQDLSHCPPPPQLRLLDFLQKRKERKAGQHYDLKISKAGNCVDMWKRSPCNLAIPSEVDVEKYAKVEKSIKSDDSQPTVWPAHDVKDDYVFECEAGTQYQKTKLTILQSLGDPLYYGKIQPCKADEESDSQMSPSHSSTDDHSNWFIIGSKTDAERVVNQYQELVQNEAKCPVKMSHSSSGSASLSQVSPGKETDQTETVSVQSSVLGKGVKHRPPPIKLPSSSGNSSSGNYFTPQQTSSFLKSPTPPPSSKPSSIPRKSSVDLNQVSMLSPAALSPASSSQRHES

SEQ ID NO: 18065 - protein, 260 aa, Homo sapiens
MLESSGCKALKEGVLEKRSDGLLQLWKKKCCILTEEGLLLIPPKQLQHQQQQQQQQQQQQQQQPGQGPAEPSQPSGPAVASLEPPVKLKELHFSNMKTVDCVERKGKYMYFTVVMAEGKEIDFRCPQDQGWNAEITLQMVQYKNRQAILAVKSTRQKQQHLVQQQPPSQPQPQPQLQPQPQPQPQPQPQPQSQPQPQPQPKPQPQQLHPYPHPHPHPHSHPHSHPHPHPHPHPHQIPHPHPQPHSQPHGHRLLRSTSNSA

SEQ ID NO: 18066 - protein, 3388 aa, Homo sapiens; identical to SEQ ID NO: 11705

SEQ ID NO: 18067 - protein, 272 aa, Homo sapiens
APWAPVLLLALGLRGLQAGARRAPDPGFQERFFQQRLDHFNFERFGNKTFPQRFLVSDRFWVRGEGPIFFYTGNEGDVWAFANNSAFVAELAAERGALLVFAEHRYYGKSLPFGAQSTQRGHTELLTVEQALADFAELLRALRRDLGAQDAPAIAFGGRKPSHLSSQPPAQLGCAATLAAFPSESCTRTWPRVGICGSQKCRPPCGTCGPLRRKRGNGVLGAAALTLCPSPSYGGMLSAYLRMKYPHLVAGALAASAPVLAVAGLGDSNQFF

SEQ ID NO: 18068 - protein, 504 aa, Homo sapiens
MVAPGSVTSRLGSVFPFLLVLVDLQYEGAECGVNADVEKHLELGKKLLAAGQLADALSQFHAAVDGDPDNYIAYYRRATVFLAMGKSKAALPDLTKVIQLKMDFTAARLQRGHLLLKQGKLDEAEDDFKKVLKSNPSENEEKEAQSQLIKSDEMQRLRSQALNAFGSGDYTAAIAFLDKILEVCVWDAELRELRAECFIKEGEPRKAISDLKAASKLKNDNTEAFYKISTLYYQLGDHELSLSEVRECLKLDQDHKRCFAHYKQVKKLNKLIESAEELIRDGRYTDATSKYESVMKTEPSIAEYTVRSKERICHCFSKDEKPVEAIRVCSEVLQMEPDNVNALKDRAEAYLIEEMYDEAIQDYETAQEHNENDQQIREGLEKAQRLLKQSQKRDYYKILGVKRNAKKQEIIKAYRKLALQWHPDNFQNEEEKKKAEKKFIDIAAAKEVLSDPEMRKKFDDGEDPLDAESQQGGGGNPFHRSWNSWQGFNPFSSGGPFRFKFHFN

SEQ ID NO: 18069 - protein, 957 aa, Homo sapiens
MRTAGRDPVPRRSPRWRRAVPLCETSAGRRVTQLRGDDLRRPATMKGKERSPVKAKRSRGGEDSTSRGERSKKLGGSGGSNGSSSGKTDSGGGSRRSLHLDKSSSRGGSREYDTGGGSSSSRLHSYSSPSTKNSSGGGESRSSSRGGGGESRSSGAASSAPGGGDGAEYKTLKISELGSQLSDEAVEDGLFHEFKRFGDVSVKISHLSGSGSGDERVAFVNFRRPEDARAAKHARGRLVLYDRPLKIEAVYVSRRRSRSPLDKDTYPPSASVVGASVGGHRHPPGGGGGQRSLSPGGAALGYRDYRLQQLALGRLPPPPPPPLPRDLERERDYPFYERVRPAYSLEPRVGAGAGAAPFREVDEISPEDDQRANRTLFLGNLDITVTESDLRRAFDRFGVITEVDIKRPSRGQTSTYGFLKFENLDMSHRAKLAMSGKIIIRNPIKIGYGKATPTTRLWVGGLGPWVPLAALAREFDRFGTIRTIDYRKGDSWAYIQYESLDAAHAAWTHMRGFPLGGPDRRLRVDFADTEHRYQQQYLQPLPLTHYELVTDAFGHRAPDPLRGARDRTPPLLYRDRDRDLYPDSDWVPPPPPVRERSTRTAATSVPAYEPLDSLDRRRDGWSLDRDRGDRDLPSSRDQPRKRRLPEESGGRHLDRSPESDRPRKRHCAPSPDRSPELSSSRDRYNSDNDRSSRLLLERPSPIRDRRGSLEKSQGDKRDRKNSASAERDRKHRTTAPTEGKSPLKKEDRSDGSAPSTSTASSKLKSPSQKQDGGTAPVASASPKLCLAWQGMLLLKNSNFPSNMHLLQGDLQVASSLLVEGSTGGKVAQLKITQRLRLDQPKLDEVTRRIKVAGPNGYAILLAVPGSSDSRSSSSSAASDTATSTQRPLRNLVSYLKQKQAAGVISLPVGGNKDKENTGVLHAFPPCEFSQQFLDSPAKALAKSEEDYLVMIIVRGAS

SEQ ID NO: 18070 - protein, 87 aa, Homo sapiens
TKAGLYWGYTVRLASCLSAVFAEAPFQDGYDLTIGTSERGSDVASAQLPNFRKPSSSPWPPCSLASSRRVPGTPESSKGPRTSVKQQ

SEQ ID NO: 18071 - protein, 390 aa, Homo sapiens
MSSSCSGLSRVLVAVATALVSASSPCPQAWGPPGVQYGQPGRSVKLCCPGVTAGDPVSWFRDGEPKLLQGPDSGLGHELVLAQADSTDEGTYICQTLDGALGGTVTLQLGYPPARPVVSCQAADYENFSCTWSPSQISGLPTRYLTSYRKKTVLGADSQRRSPSTGPWPCPQDPLGAARCVVHGAEFWSQYRINVTEVNPLGASTRLLDVSLQSILRPDPPQGLRVESVPGYPRRLRASWTYPASWPCQPHFLLKFRLQYRPAQHPAWSTVEPAGLEEVITDAVAGLPHAVRVSARDFLDAGTWSTWSPEAWGTPSTGTIPKEIPAWGQLHTQPEVEPQVDSPAPPRPSLQPHPRLLDHRDSVEQVAVLASLGILSFLGLVAGALALGLW

SEQ ID NO: 18072 - protein, 423 aa, Homo sapiens
MATVWDEAEQDGIGEEVLKMSTEEIIQRTRLLDSEIKIMKSEVLRVTHELQAMKDKIKENSEKIKVNKTLPYLVSNVIELLDVDPNDQEEDGANIDLDSQRKGKCAVIKTSTRQTYFLPVIGLVDAEKLKPGDLVGVNKDSYLILETLPTEYDSRVKAMEVDERPTEQYSDIGGLDKQIQELVEAIVLPMNHKEKFENLGIQPPKGVLMYGPPGTGKTLLARACAAQTKATFLKLAGPQLVQMFIGDGAKLVRDAFALAKEKAPSIIFIDELDAIGTKRFDSEKAGDREVQRTMLELLNQLDGFQPNTQVKVIAATNRVDILDPALLRSGRLDRKIEFPMPNEEARARIMQIHSRKMNVSPDVNYEELARCTDDFNGAQCKAVCVEAGMIALRRGATELTHEDYMEGILEVQAKKKANLQYYA

SEQ ID NO: 18073 - protein, 439 aa, Homo sapiens
MEPSTAARAWALFWLLLPLLGAVCASGPRTLVLLDNLNVRETHSLFFRSLKDRGFELTFKTADDPSLSLIKYGEFLYDNLIIFSPSVEDFGGNINVETISAFIDGGGSVLVAASSDIGDPLRELGSECGIEFDEEKTAVIDHHNYDISDLGQHTLIVADTENLLKAPTIVGKSSLNPILFRGVGMVADPDNPLVLDILTGSSTSYSFFPDKPITQYPHAVGKNTLLIAGLQARNNARVIFSGSLDFFSDSFFNSAVQKAAPGSQRYSQTGNYELAVALSRWVFKEEGVLRVGPVSHHRVGETAPPNAYTVTDLVEYSIVIQQLSNGKWVPFDGDDIQLEFVRIDPFVRTFLKKKGGKYSVQFKLPDVYGVFQFKVDYNRLGYTHLYSSTQVSVRPLQHTQYERFIPSAYPYYASAFSMMLGLFIFSIVFLHMKEKEKSD

SEQ ID NO: 18074 - protein, 256 aa, Homo sapiens
MLLWLLLLILTPGREQSGVAPKAVLLLNPPWSTAFKGEKVALICSSISHSLAQGDTYWYHDEKLLKIKHDKIQITEPGNYQCKTRGSSLSDAVHVEFSPDWLILQALHPVFEGDNVILRCQGKDNKNTHQKVYYKDGKQLPNSYNLEKITVNSVSRDNSKYHCTAYRKFYILDIEVTSKPLNIQVQELFLHPVLRASSSTPIEGSPMTLTCETQLSPQRPDVQLQFSLFRDSQTLGLGWSRSPRLQIPAMWTEDSG

SEQ ID NO: 18075 - protein, 88 aa, Homo sapiens
MRPRGLPPLLVVLLGCWASVSAQTDATPAVTTEGLNSTEAALATFGTFPSTRPPGTPRAPGPSSGPRPTPVTDGATASFVVKKQSSIH

SEQ ID NO: 18076 - protein, 245 aa, Homo sapiens
MRPRGLPPLLVVLLGCWASVSAQTDATPAVTTEGLNSTEAALATFGTFPSTRPPGTPRAPGPSSGPRPTPVTDVAVLCVCDLSPAQCDINCCCDPDCSSVDFSVFSACSVPVVTGDSQFCSQKAVIYSLNFTANPPQRVFELVDQINPSIFCIHITNYKPALSFINPEVPDENNFDTLMKTSDGFTLNAESYVSFTTKLDIPTAAKYEVSLNLIDSFHPITNIFPCKLIFKVTRKTGFLETELIL

SEQ ID NO: 18077 - protein, 239 aa, Homo sapiens
MDPKQTTLLCLVLCLGQRIQAQEGDFPMPFISAKSSPVIPLDGSVKIQCQAIREAYLTQLMIIKNSTYREIGRRLKFWNETDPEFVIDHMDANKAGRYQCQYRIGHYRFRYSDTLELVVTGLYGKPFLSADRGLVLMPGENISLTCSSAHIPFDRFSLAKEGELSLPQHQSGEHPANFSLGPVDLNVSGIYRCYGWYNRSPYLWSFPSNALELVVTGRYRPVQPCVWVGCPGPCHRAGI

SEQ ID NO: 18078 - protein, 520 aa, Homo sapiens
MVARVGLLLRALQLLLWGHLDAQPAERGGQELRKEAEAFLEKYGYLNEQVPKAPTSTRFSDAIRAFQWVSQLPVSGVLDRATLRQMTRPRCGVTDTNSYAAWAERISDLFARHRTKMRRKKRFAKQGNKWYKQHLSYRLVNWPEHLPEPAVRGAVRAAFQLWSNVSALEFWEAPATGPADIRLTFFQGDHNDGLGNAFDGPGGALAHAFLPRRGEAHFDQDERWSLSRRRGRNLFVVLAHEIGHTLGLTHSPAPRALMAPYYKRLGRDALLSWDDVLAVQSLYGKPLGGSVAVQLPGKLFTDFETWDSYSPQGRRPETQGPKYCHSSFDAITVDRQQQLYIFKGSHFWEVAADGNVSEPRPLQERWVGLPPNIEAAAVSLNDGDFYFFKGGRCWRFRGPKPVWGLPQLCRAGGLPRHPDAALFFPPLRRLILFKGARYYVLARGGLQVEPYYPRSLQDWGGIPEEVSGALPRPDGSIIFFRDDRYWRLDQAKLQATTSGRWATELPWMGCWHANSGSALF

SEQ ID NO: 18079 - protein, 72 aa, Homo sapiens
MTAQGGLVANRGRRFKWAIELSGPGGGSRGRSDRGSGQGDSLYPVGYLDKQVPDTSVQETDRILVEKVQRLQ

SEQ ID NO: 18080 - protein, 162 aa, Homo sapiens
MRPRGLPPLLVVLLGCWASVSAQTDATPAVTTEGLNSTEAALATFGTFPSTRPPGTPRAPGPSSGPRPTPVTDVAVLCVCDLSPAQCDINCCCDPDCSSVDFSVFSACSVPVVTGDSQFCSQKAVIYSLNFTANPPQRVFELVDQINPSIFCIHITNCRCSV

SEQ ID NO: 18081 - protein, 301 aa, Homo sapiens
MEKWYLMTVVVLIGLTVRWTVSLNSYSGAGKPPMFGDYEAQRHWQEITFNLPVKQWYFNSSDNNLQYWGLDYPPLTAYHSLLCAYVAKFINPDWIALHTSRGYESQAHKLFMRTTVLIADLLIYIPAVVLYCCCLKEISTKKKIANALCILLYPGLILIDYGHFQYNSVSLGFALWGVLGISCDCDLLGSLAFCLAINYKQMELYHALPFFCFLLGKCFKKGLKGKGFVLLVKLACIVVASFVLCWLPFFTEREQTLQVLRRLFPVDRGLFEDKVANIWCSFNVFLKIKDILPRHIQLIMS

SEQ ID NO: 18082 - protein, 137 aa, Homo sapiens
MALVPCQVLRMAILLSYCSILCNYKAIEMPSHQTYGGSWKFLTFIDLVIQAVFFGICVLTDLSSLLTRGSGNQEQERQLKKLISLRDWMLAVLAFPVGVFVVAVFWIIYAYDREMIYPKLLDNFIPGWLNHGMHFKA

SEQ ID NO: 18083 - protein, 789 aa, Homo sapiens
MTSPAKFKKDKEIIAEYDTQVKEIRAQLTEQMKCLDQQCELRVQLLQDLQDFFRKKAEIEMDYSRNLEKLAERFLAKTRSTKDQQFKKDQNVLSPVNCWNLLLNQVKRESRDHTTLSDIYLNNIIPRFVQVSEDSGRLFKKSKEVGQQLQDDLMKVLNELYSVMKTYHMYNADSISAQSKLKEAEKQEEKQIGKSVKQEDRQTPRSPDSTANVRIEEKHVRRSSVKKIEKMKEKRQAKYTENKLKAIKARNEYLLALEATNASVFKYYIHDLSDLIDCCDLGYHASLNRALRTFLSAELNLEQSKHEGLDAIENAVENLDATSDKQRLMEMYNNVFCPPMKFEFQPHMGDMASQLCAQQPVQSELVQRCQQLQSRLSTLKIENEEVKKTMEATLQTIQDIVTVEDFDVSDCFQYSNSMESVKSTVSETFMSKPSIAKRRANQQETEQFYFTKMKEYLEGRNLITKLQAKHDLLQKTLGESQRTDCSLARRSSTVRKQDSSQAIPLVVESCIRFISRHGLQHEGIFRVSGSQVEVNDIKNAFERGEDPLAGDQNDHDMDSIAGVLKLYFRGLEHPLFPKDIFHDLMACVTMDNLQERALHIRKVLLVLPKTTLIIMRYLFAFLNHLSQFSEENMMDPYNLAICFGPSLMSVPEGHDQVSCQAHVNELIKTIIIQHENIFPSPRELEGPVYSRGGSMEDYCDSPHGETTSVEDSTQDVTAEHHTSDDECEPIEAIAKFDYVGRTARELSFKKGASLLLYQRASDDWWEGRHNGIDGLIPHQYIVVQDTLIS

SEQ ID NO: 18084 - protein, 47 aa, Homo sapiens
ILTARSRWRLRNSISAFLFTVTFAWCPPGLSNLTILSCPEMRSCCVA

SEQ ID NO: 18085 - protein, 343 aa, Homo sapiens
MQPPPPGPLGDCLRDWEDLQQDFQNIQETHRLYRLKLEELTKLQNNCTSSITRQKKRLQELALALKKCKPSLPAEAEGAAQELENQMKERQGLFFDMEAYLPKKNGLYLSLVLGNVNVTLLSKQAKFAYKDEYEKFKLYLTIILILISFTCRFLLNSRVTDAAFNFLLVWYYCTLTIRESILINNGSRIKGWWVFHHYVSTFLSGVMLTWPDGLMYQKFRNQFLSFSMYQSFVQFLQYYYQSGCLYRLRALGERHTMDLTVEGFQSWMWRGLTFLLPFLFFGHFWQLFNALTLFNLAQDPQCKEWQVLMCGFPFLLLFLGNFFTTLRVVHHKFHSQRHGSKKD

SEQ ID NO: 18086 - protein, 117 aa, Homo sapiens
MKHLWFFLLLVAAPRWVLSQVQLQESGPGLVKPSETLSLTCVVSGGSISSSNWWSWVRQPPGKGLEWIGEIYHSGSPNYNPSLKSRVTISVDKSKNQFSLKLSSVTAADRAVYYCAR

SEQ ID NO: 18087 - protein, 468 aa, Homo sapiens
MDPLGDTLRRLREAFHAGRTRPAEFRAAQLQGLGRFLQENKQLLHDALAQDLHKSAFESEVSEVAISQGEVTLALRNLRAWMKDERVPKNLATQLDSAFIRKEPFGLVLIIAPWNYPLNLTLVPLVGALAAGNCVVLKPSEISKNVEKILAEVLPQYVDQSCFAVVLGGPQETGQLLEHRFDYIFFTGSPRVGKIVMTAAAKHLTPVTLELGGKNPCYVDDNCDPQTVANRVAWFRYFNAGQTCVAPDYVLCSPEMQERLLPALQSTITRFYGDDPQSSPNLGRIINQKQFQRLRALLGCGRVAIGGQSDESDRYIAPTVLVDVQEMEPVMQEEIFGPILPIVNVQSLDEAIEFINRREKPLALYAFSNSSQVVKRVLTQTSSGGFCGNDGFMHMTLASLPFGGVGASGMGRYHGKFSFDTFSHHRACLLRSPGMEKLNALRYPPQSPRRLRMLLVAMEAQGCSCTLL

SEQ ID NO: 18088 - protein, 70 aa, Homo sapiens
MDEQPRLMHSHAGVGMAGHPGLSQHLQDGAGGTEGEGGRKQDIGDILQQIMTITDQSLDEAQASNYMAEE

SEQ ID NO: 18089 - protein, 117 aa, Homo sapiens
MEFELSWVFLVAILQGVHCEVQLVESGRGLAQPGGYLKLSGAASGFTVGSWYMSWIHQAPGKGLEWVSYISSSGCSTNYADSVKGRFTISTDNSKNTLYLQMNSLRVEDTAVYYCAR

SEQ ID NO: 18090 - protein, 56 aa, Homo sapiens
MALPALFSLIIGFAFGALYWKKRQPSLTRAVENIQINEEDNEISMLQEKEREFQEV

SEQ ID NO: 18091 - protein, 77 aa, Homo sapiens
MSKGLLLLLLLSMGGTWASKEPLRPRCRPINATLAVEKEGCPVCITVNTTICAGYCPTMTRVLQGVLPALPQVVCNY

SEQ ID NO: 18092 - protein, 352 aa, Homo sapiens
MPSETLWEIAKAEVEKRGINGSEGDGAEIAEKFVFFIGSKNGGKTTIILRCLDRDEPPKPTLALEYTYGRRAKGHNTPKDIAHFWELGGGTSLLDLISIPITGDTLRTFSLVLVLDLSKPNDLWPTMENLLQATKSHVDKVIMKLGKTNAKAVSEMRQKIWNNMPKDHPQDHELIDPFPVPLVIIGSKYDVFQDFESEKRKVICKTLRFVAHYYGASLMFTSKSEALLLKIRGVINQLAFGIDKSKSICVDQNKPLFITAGLDSFGQIGSPPVPENDIGKLHAHSPMELWKKVYEKLFPPKSINTLKDIKDPARDPQYAENEVDEMRIQKDLELEQYKRSSSKSWKQIELDS

SEQ ID NO: 18093 - protein, 61 aa, Homo sapiens
MQKVTLGLLVFLAGFPVLDANDLEDKNSPFYYGESPCPLSPPHNPTYCLVPRVPIQGWGLT

SEQ ID NO: 18094 - protein, 62 aa, Homo sapiens
MSTSWSDRLQNAADMPANMDKHALKKYRREAYHRVFVNRSLAMEKIKCFGFDMDYTLAGEPV

SEQ ID NO: 18095 - protein, 592 aa, Homo sapiens
MSDSGSYGQSGGEQQSYSTYGNPGSQGYGQASQSYSGYGQTTDSSYGQNYSGYSSYGQSQSGYSQSYGGYENQKQSSYSQQPYNNQGQQQNMESSGSQGGRAPSYDQPDYGQQDSYDQQSGYDQHQGSYDEQSNYDQQHDSYSQNQQSYHSQRENYSHHTQDDRRDVSRYGEDNRGYGGSQGGGRGRGGYDKDGRGPMTGSSGGDRGGFKNFGGHRDYGPRTDADSESDNSDNNTIFVQGLGEGVSTDQVGEFFKQIGIIKTNKKTGKPMINLYTDKDTGKPKGEATVSFDDPPSAKAAIDWFDGKEFHGNIIKVSFATRRPEFMRGGGSGGGRRGRGGYRGRGGFQGRGGDPKSGDWVCPNPSCGNMNFARRNSCNQCNEPRPEDSRPSGGDFRGRGYGGERGYRGRGGRGGDRGGYGGDRSGGGYGGDRSSGGGYSGDRSGGGYGGDRSGGGYGGDRGGGYGGDRGGGYGGDRGGGYGGDRGGYGGDRGGGYGGDRGGYGGDRGGYGGDRGGYGGDRGGYGGDRSRGGYGGDRGGGSGYGGDRSGGYGGDRSGGGYGGDRGGGYGGDRGGYGGKMGGRNDYRNDQRNRPY

SEQ ID NO: 18096 - protein, 67 aa, Homo sapiens
LRNSISAFLFTVTFAWCPPGLSNLTILSCPGLGISKQEEGLGEESDEQGEGSQGWSEIQEMRSCCVA

SEQ ID NO: 18097 - protein, 251 aa, Homo sapiens
MVSWGRFICLVVVTMATLSLARPSFSLVEDTTLEPEGAPYWTNTEKMEKRLHAVPAANTVKFRCPAGGNPMPTMRWLKNGKEFKQEHRIGGYKVRNQHWSLIMESVVPSDKGNYTCVVENEYGSINHTYHLDVVERSPHRPILQAGLPANASTVVGGDVEFVCKVYSDAQPHIQWIKHVEKNGSKYGPDGLPYLKVLKHSGINSSNAEVLALFNVTEADAGEYICKVSNYIGQANQSAWLTVLPKQQGRRC

SEQ ID NO: 18098 - protein, 116 aa, Homo sapiens
MEFGLNWVFLVAIIKGAQCEVQLVESGGGLVQPGGSLRLSCPDSGFTFSNHYMSWVRQAPGKGLEWISYISGDSGYTNYADSVKGRFTISRDNANNSPYLQMNSLRAEDTAVYYCV

SEQ ID NO: 18099 - protein, 91 aa, Homo sapiens
MKVSAAALAVILIATALCAPASASPYSSDTTPCCFAYIARPLPRAHIKEYFYTSGKCSNPAVVFVTRKNRQVCANPEKKWVREYINSLEMS

SEQ ID NO: 18100 - protein, 212 aa, Homo sapiens
MVAFLGASAVTASTGLLWKRAHAESPPCVDNLKSDIGDKGKNKDEGDVCNHEKKTADLAPHPEEKKKKRSGFRDRKVMEYENRIRAYSTPDKIFRYFATLKVISEPGEAEVFMTPEDFVRSITPNEKQPEHLGLDQYIIKRFDGKKISQEREKFADEGSIFYTLGECGLISFSDYIFLTTVLSTPQRNFEIAFKMFDLNGDGEVDMEEFEQA

SEQ ID NO: 18101 - protein, 203 aa, Homo sapiens
MVSTYRVAVLGARGVGKSAIVRQFLYNEFSEVCVPTTARRLYLPAVVMNGHVHDLQILDFPPISAFPVNTLQEWADTCCRGLRSVHAYILVYDICCFDSFEYVKTIRQQILETRVIGTSETPIIIVGNKRDLQRGRVIPRWNVSHLVRKTWKCGYVECSAKYNWHILLLFSELLKSVGCARCKHVHAALRFQGALRRNRCAIM

SEQ ID NO: 18102 - protein, 233 aa, Homo sapiens
MGDLWLFLLLPLSAFHGVKGCLECDPKFIEDVGSLLGNLIPSEVPGRTQLLERQIKEMIHLSFKVSHSDKRLRVLAVQQVVKLRTWLKNEFYKLGNETWKGVFIYQGKLLDVCQNLESKLKELLKNFSEIVVVEGPILDCWTCLRMTNRCFKGEYCGDEDPRKAENREIALFLILLATAVILGSAVLLFHFCIFHRRKMKAIRRSLKEYVEKKLEELMGKIDEKEEKDFRLRK

SEQ ID NO: 18103 - protein, 84 aa, Homo sapiens
MLIKVKTLTGKEIEIDIEPTDKVERIKERVEEKEGIPPQQQRLIYSGKQMNDEKTAADYKILVMELYEIGGAKTSDCTQRCLRS

SEQ ID NO: 18104 - protein, 1966 aa, Homo sapiens
MENSHPPHHHHQQPPPQPGPSGERRNHHWRSYKLMIDPALKKGHHKLYRYDGQHFSLAMSSNRPVEIVEDPRVVGIWTKNKELELSVPKFKIDEFYVGPVPPKQVTFAKLNDNIRENFLRDMCKKYGEVEEVEILYNPKTKKHLGIAKVVFATVRGAKDAVQHLHSTSVMGNIIHVELDTKGETRMRFYELLVTGRYTPQTLPVGELDAVSPIVNETLQLSDALKRLKDGGLSAGCGSGSSSVTPNSGGTPFSQDTAYSSCRLDTPNSYGQGTPLTPRLGTPFSQDSSYSSRQPTPSYLFSQDPAVTFKARRHESKFTDAYNRRHEHHYVHNSPAVTAVAGATAAFRGSSDLPFGAVGGTGGSSGPPFKAQPQDSATFAHTPPPAQATPAPGFKSAFSPYQTPVAHFPPPPEEPTATAAFGARDSGEFRRAPAPPPLPPAEPLAKEKPGTPPGPPPPDTNSMELGGRPTFGWSPEPCDSPGTPTLESSPAGPEKPHDSLDSRIEMLLKEQRTKLLFLREPDSDTELQMEGSPISSSSSQLSPLAPFGTNSQPGFRGPTPPSSRPSSTGLEDISPTPLPDSDEDEELDLGLGPRPPPEPGPPDPAGLLSQTAEVALDLVGDRTPTSEKMDEGQQSSGEDMEISDDEMPSAPITSADCPKPMVVTPGAAAVAAPSVLAPTLPLPPPPGFPPLPPPPPPPPPQPGFPMPPPLPPPPPPPPPAHPAVTVPPPPLPAPPGVPPPPILPPLPPFPPGLFPVMQVDMSHVLGGQWGGMPMSFQMQTQVLSRLMTGQGACPYPPFMAAAAAAASAGLQFVNLPPYRGPFSLSNSGPGRGQHWPPLPKFDPSVPPPGYMPRQEDPHKATVDGVLLVVLKELKAIMKRDLNRKMVEVVAFRAFDEWWDKKERMAKASLTPVKSGEHKDEDRPKPKDRIASCLLESWGKGEGLGYEGLGLGIGLRGAIRLPSFKVKRKEPPDTTSSGDQKRLRPSTSVDEEDEESERERDRDMADTPCELAKRDPKGVGVRRRPARPLELDSGGEEDEKESLSASSSSSASSSSGSSTTSPSSSASDKEEEQESTEEEEEAEEEEEEEVPRSQLSSSSTSSTSDKDDDDDDSDDRDESENDDEDTALSEASEKDEGDSDEEETVSIVTSKAEATSSSESSESSEFESSSESSPSSSEDEEEVVAREEEEEEEEEEMVAEESMASAGPEDFEQDGEEAALAPGAPAVDSLGMEEEVDIETEAVAPEERPSMLDEPPLPVGVEEPADSREPPEEPGLSQEGAMLLSPEPPAKEVEARPPLSPERAPEHDLEVEPEPPMMLPLPLQPPLPPPRPPRPPSPPPEPETTDASHPSVPPEPLAEDHPPHTPGLCGSLAKSQSTETVPATPGGEPPLSGGSSGLSLSSPQVPGSPFSYPAPSPSLSSGGLPRTPGRDFSFTPTFSEPSGPLLLPVCPLPTGRRDERSGPLASPVLLETGLPLPLPLPLPLPLALPAVLRAQARAPTPLPPLLPAPLASCPPPMKRKPGRPRRSPPSMLSLDGPLVRPPAGAALGRELLLLPGQPQTPVFPSTHDPRTVTLDFRNAGIPAPPPPLPPQPPPPPPPPPVEPTKLPFKELDNQWPSEAIPPGPRGRDEVTEEYMELAKSRGPWRRPPKKRHEDLVPPAGSPELSPPQPLFRPRSEFEEMTILYDIWNGGIDEEDIRFLCVTYERLLQQDNGMDWLNDTLWVYHPSTSLSSAKKKKRDDGIREHVTGCARSEGFYTIDKKDKLRYLNSSRASTDEPPADTQGMSIPAQPHASTRAGSERRSEQRRLLSSFTGSCDSDLLKFNQLKFRKKKLKFCKSHIHDWGLFAMEPIAADEMVIEYVGQNIRQVIADMREKRYEDEGIGSSYMFRVDHDTIIDATKCGNFARFINHSCNPNCYAKVITVESQKKIVIYSKQHINVNEEITYDYKFPIEDVKIPCLCGSENCRGTLN

SEQ ID NO: 18105 - protein, 117 aa, Homo sapiens
MDWTWRILFLVAAATGAHSQVQLVQSGAEVKKPGASVKVSCKASGYIFTDYYMHWVRQAPGQELGWMGRINPNSGGTNYAQKFQGRVTMTRDTSISTAYTELSSLRSEDTATYYCAR

SEQ ID NO: 18106 - protein, 106 aa, Homo sapiens
MRPRGLPPLLVVLLGCWASVSAQTDATPAVTTEGLNSTEAALATFGTFPSTRPPGTPRAPGPSSGPRPTPVTDGHATCRYRSRRLTVSGELDGKLQVASGSVGGEE

SEQ ID NO: 18107 - protein, 116 aa, Homo sapiens
MEAPAQLLFLLLLWLPDTTGEIVMTQSPATLSLSPGERATLSCRASQSVSSSYLSWYQQKPGQAPRLLIYGASTRATGIPARFSGSGSGTDFTLTISSLQPEDFAVYYCQQDYNLP

SEQ ID NO: 18108 - protein, 106 aa, Homo sapiens
MRALLARLLLCVLVVSDSKGSNELHQVPSNCDCLNGGTCVSNKYFSNIHWCNCPKKFGGQHCEIDKSKTCYEGNGHFYRGKASTDTMGRPCLPWNSATVLQQTYHA

SEQ ID NO: 18109 - protein, 1283 aa, Homo sapiens
MAELEEVTLDGKPLQALRVTDLKAALEQRGLAKSGQKSALVKRLKGALMLENLQKHSTPHAAFQPNSQIGEEMSQNSFIKQYLEKQQELLRQRLEREAREAAELEEASAESEDEMIHPEGVASLLPPDFQSSLERPELELSRHSPRKSSSISEEKGDSDDEKPRKGERRSSRVRQARAAKLSEGSQPAEEEEDQETPSRNLRVRADRNLKTEEEEEEEEEEEEDDEEEEGDDEGQKSREAPILKEFKEEGEEIPRVKPEEMMDERPKTRSQEQEVLERGGRFTRSQEEARKSHLARQQQEKEMKTTSPLEEEEREIKSSQGLKEKSKSPSPPRLTEDRKKASLVALPEQTASEEETPPPLLTKEASSPPPHPQLHSEEEIEPMEGPAPAVLIQLSPPNTDADTRELLVSQHTVQLVGGLSPLSSPSDTKAESPAEKVPEESVLPLVQKSTLADYSAQKDLEPESDRSAQPLPLKIEELALAKGITEECLKQPSLEQKEGRRASHTLLPSHRLKQSADSSSSRSSSSSSSSSRSRSRSPDSSGSRSHSPLRSKQRDVAQARTHANPRGRPKMGSRSTSESRSRSRSRSRSASSNSRKSLSPGVSRDSSTSYTETKDPSSGQEVATPPVPQLQVCEPKERTSTSSSSVQARRLSQPESAEKHVTQRLQPERGSPKKCEAEEAEPPAATQPQTSETQTSHLPESERIHHTVEEKEEVTMDTSENRPENDVPEPPMPIADQVSNDDRPEGSVEDEEKKESSLPKSFKRKISVVSATKGVPAGNSDTEGGQPGRKRRWGASTATTQKKPSISITTESLKSLIPDIKPLAGQEAVVDLHADDSRISEDETERNGDDGTHDKGLKICRTVTQVVPAEGQENGQREEEEEEKEPEAEPPVPPQVSVEVALPPPAEHEVKKVTLGDTLTRRSISQQKSGVSITIDDPVRTAQVPSPPRGKISNIVHISNLVRPFTLGQLKELLGRTGTLVEEAFWIDKIKSHCFVTYSTVEEAVATRTALHGVKWPQSNPKFLCADYAEQDELDYHRGLLVDRPSETKTEEQGIPRPLHPPPPPPVQPPQHPRAEQREQERAVREQWAEREREMERRERTRSEREWDRDKVREGPRSRSRSRDRRRKERAKSKEKKSEKKEKAQEEPPAKLLDDLFRKTKAAPCIYWLPLTDSQIVQKEAERAERAKEREKRRKEQEEEEQKEREKEAERERNRQLEREKRREHSRERDRERERERERDRGDRDRDRERDRERGRERDRRDTKRHSRSRSRSTPVRDRGGRR

SEQ ID NO: 18110 - protein, 128 aa, Homo sapiens
MSNTTVVPSTAGPGPSGGPGGGGGGGGGGGGTEVIQVTNVSPSASSEQMRTLFGFLGKIDELRLFPPDDSPLPVSSRVCFVKFHDPDSAVVAQHLTNTVFVDRALIVVPYAEVKQPTRVVVHKTAFES

SEQ ID NO: 18111 - protein, 119 aa, Homo sapiens
MDTFCSTLLLLTTPSWVLSQVTLKESGPALVKPTETLTLTCTLSGFSLSTSGMGMSWIRQPPGKALEWLAHIFLNDKKSYSTSLKNRLIISKDTSKSQVVLTMTNMDPVDTATYYCAWR

SEQ ID NO: 18112 - protein, 117 aa, Homo sapiens
MEMRVPAQLLGLLLLWLRGARCDIQVTQSPSSLSASVGDRVTITCRASQGISNGLSWYQQKPGQAPTLLIYAASSLQSGVPSRFSGSGSGTDFTLTISSLQPEDVATYYCLQDYTTP

SEQ ID NO: 18113 - protein, 337 aa, Homo sapiens
METMRAQRLQPGVGTSGRGTLRALRPGVTGAAAATATPPAGPPPAPPPPAPPPPPLLLSGAPGLPLPPGAAGSPAVLREAVEAVVRSFAKHTQGYGRVNVVEALQEFWQMKQSRGADLKNGALVVYEMVPSNSPPYVCYVTLPGGSCFGSFQFCPTKAEARRSAAKIALMNSVFNEHPSRRITDEFIEKSVSEALASFNGNREEADNPNTGIGAFRFMLESNKGKSMLEFQELMTVFQLLHWNGSLKAMRERQCSRQEVLAHYSHRALDDDIRHQMALDWVSREQSVPGALSRELASTERELDEARLAGKELRFHKEKKDILVLAAGQLGNMHSSNC

SEQ ID NO: 18114 - protein, 119 aa, Homo sapiens
MEFGLSWVFLVAILKGVQCEVQLVESGGGLVQPGGSLRLSCAASGFTFSDHYMSWVRQAQGKGLELVGLIRNKANSYTTEYAASVKGRLTISREDSKNTLYLQMSNLKTEDLAVYYCAR

SEQ ID NO: 18115 - protein, 117 aa, Homo sapiens
MEFGLSWVFLVALLRGVQCQVQLVESGGGVVQPGRSLRLSCAASGFTFSSYGMHWVRQAPGKGLEWVAVISYDGSNKYYADSVKGRFTISRDNSKNTLYLQMNSLRAEDTAVYYCAK

SEQ ID NO: 18116 - protein, 75 aa, Homo sapiens
MRPRGLPPLLVVLLGCWASVSAQTDATPAVTTEGLNSTEAALATFGTFPSTRPPGTPRAPGPSSGPRPTPVTDGG

SEQ ID NO: 18117 - protein, 261 aa, Homo sapiens
MAGQAFRKFLPLFDRVLVERSAAETVTKGGIMLPEKSQGKVLQATVVAVGSGSKGKDFYNWPDESFDEMDSTLAVQQYIQQNIRADCSNIDKILEPPEGQDEGVWKYEHLRQFCLELNGLAVKLQSECHPDTCTQMTATEQWIFLCAAHKTPKECPAIDYTRHTLDGAACLLNSNKYFPSRVSIKESSVAKLGSVCRRIYRIFSHAYFHHRQIFDEYENETFLCHRFTKFVMKYNLMSKDNLIVPILEEEVQNSVSGESEA

SEQ ID NO: 18118 - protein, 331 aa, Homo sapiens
MAFVTRQFMRSVSSSSTASASAKKIIVKHVTVIGGGLMGAGIAQVAAATGHTVVLVDQTEDILAKSKKGIEESLRKVAKKKFAENLKAGDEFVEKTLSTIATSTDAASVVHSTDLVVEAIVENLKVKNELFKRLDKFAAEHTIFASNTSSLQITSIANATTRQDRFAGLHFFNPVPVMKLVEVIKTPMTSQKTFESLVDFSKALGKHPVSCKDTPGFIVNRLLVPYLMEAIRLYERDFQTCGDSNSGLGFSLKGDASKEDIDTAMKLGAGYPMGPFELLDYVGLDTTKFIVDGWHEMDAENPLHQPSPSLNKLVAENKFGKKTGEGFYKYK

SEQ ID NO: 18119 - protein, 589 aa, Homo sapiens
MSDSGSYGQSGGEQQSYSTYGNPGSQGYGQASQSYSGYGQTTDSSYGQNYSGYSSYGQSYSQSYGGYENQKQSSYSQQPYNNQGQQQNMESSGSQGGRAPSYDQPDYGQQDSYDQQSGYDQHQGSYDEQSNYDQQHDSYSQNQQSYHSQRENYSHHTQDDRRDVSRYGEDNRGYGGSQGGGRGRGGYDKDGRGPMTGSSGGDRGGFKNFGGHRDYGPRTDADSESDNSDNNTIFVQGLGEGVSTDQVGEFFKQIGIIKTNKKTGKPMINLYTDKDTGKPKGEATVSFDDPPSAKAAIDWFDGKEFHGNIIKVSFATRRPEFMRGGGSGGGRRGRGGYRGRGGFQGRGGDPKSGDWVCPNPSCGNMNFARRNSCNQCNEPRPEDSRPSGGDFRGRGYGGERGYRGRGGRGGDRGGYGGDRSGGGYGGDRSSGGGYSGDRSGGGYGGDRSGGGYGGDRGGGYGGDRGGGYGGDRGGGYGGDRGGYGGDRGGGYGGDRGGYGGDRGGYGGDRGGYGGDRGGYGGDRSRGGYGGDRGGGSGYGGDRSGGYGGDRSGGGYGGDRGGGYGGDRGGYGGKMGGRNDYRNDQRNRPY

SEQ ID NO: 18120 - protein, 117 aa, Homo sapiens
MGWTWRILFLVVIAAGAQSQVQLMQSGAEVKKPGASVRISCKASGYTFTSYCMHWVCQAHAQGLEWMGLVCPSDGSTSYAQKFQGRVTITRDTSMGTAYMELSSLRSEDTAMYYCVR

SEQ ID NO: 18121 - protein, 168 aa, Homo sapiens
MANGGGGGGGSSGGGGGGGGSSLRMSSNIHANHLSLDASSSSSSSSSSSSSSSSSSSSSSVHEPKMDALIIPVTMEVPCDSRGQRMWWAFLASSMVTFFGGLFIILLWRTLKYLWTVCCHCGGKTKATHFGSPEMPPAARSWSGSPPEAAVLRGASSLALEVARCRRL

SEQ ID NO: 18122 - protein, 699 aa, Homo sapiens
MADAGIRRVVPSDLYPLVLGFLRDNQLSEVANKFAKATGATQQDANASSLLDIYSFWLKSAKVPERKLQANGPVAKKAKKKASSSDSEDSSEEEEEVQGPPAKKAAVPAKRVGLPPGKAAAKASESSSSEESSDDDDEEDQKKQPVQKGVKPQAKAAKAPPKKAKSSDSDSDSSSEDEPPKNQKPKITPVTVKAQTKAPPKPARAAPKIANGKAASSSSSSSSSSSSDDSEEEKAAATPKKTVPKKQVVAKAPVKAATTPTRKSSSSEDSSSDEEEEQKKPMKNKPGPYSSVPPPSAPPPKKSLGTQPPKKAVEKQQPVESSEDSSDESDSSSEEEKKPPTKAVVSKATTKPPPAKKAAESSSDSSDSDSSEDDEAPSKPAGTTKNSSNKPAVTTKSPAVKPAAAPKQPVGGGQKLLTRKADSSSSEEESSSSEEEKTKKMVATTKPKATAKAALSLPAKQAPQGSRDSSSDSDSSSSEEEEEKTSKSAVKKKPQKVAGGAAPSKPASAKKGKAESSNSSSSDDSSEEEEEKLKGKGSPRPQAPKANGTSALTAQNGKAAKNSEEEEEEKKKAAVVVSKSGSLKKRKQNEAAKEAETPQAKKIKLQTPNTFPKRKKGEKRASSPFRRVREEEIEVDSRVADNSFDAKRGAAGDWGERANQVLKFTKGKSFRHEKTKKKRGSYRGGSISVQVNSIKFDSE

SEQ ID NO: 18123 - protein, 524 aa, Homo sapiens
ILTARSRWRLRNSISAFLFTVTFAWCPPGLSNLTILSCPDWESHINTKWSAPQQNFLQGKTSSVVEMERNHFGEELFDFNQCEKALSEHSCLKTHRRTYFRKKTCECNQCEKAFRKPSIFTLHKKTDIGEELPNCNQCETAFSQHLHLVCKKTSQNLHLVCKKTHTQEKPYKCSDCEKGLPSSSHLRECVRIYGGERPYTHKEYVETFSHSTALFVHMQTQDGEKFYECKACGKPFTESSYLTQHLRTHSRVLPIEHKKFGKAFAFSPDLAKHIRLRTRGKHYVCNECGKEFTCFSKLNIHIRVHTGEKPYECNKCGKAFTDSSGLIKHRRTHTGEKPYECKECGKAFANSSHLTVHMRTHTGEKPYQCKECGKAFINSSSFKSHMQTHPGVKPYDCQQCGKAFIRSSFLIRHLRSHSAERPFECEECGKAFRYSSHLSQHKRIHTGERPYKCQKCGQAFSISSGLTVHMRTHTGERPFECQECGKAFTRSTYLIRHLRSHSVEKPYKECGQTFSNSSCLTECV

SEQ ID NO: 18124 - protein, 117 aa, Homo sapiens
MEFGLSWVFLVAILKGVQCEVQLVESGGGLVQPGGSLRLSCAASGFTFSSYWMHWVRQAPGKGLVWVSRINSDGSSTSYADSMKGQFTISRDNAKNTLYLQMNSLRAEDMAVYYCTR

SEQ ID NO: 18125 - protein, 251 aa, Homo sapiens
MEGELYSALKEEEASESVSSTNFSGEMHFYELVEDTKDGIWLVQVNEWSLKIRKEMRVVDRQIRDIQREEEKVKRSVKDAAKKGQKDVCIVLAKEMIRSRKAVSKLYASKAHMNSVLMGMKNQLAVLRVAGSLQKSTEVMKAMQSLVKIPEIQATMRELSKEMMKAGIIEEMLEDTFESMDDQEEMEEEAEMEIDRILFEITAGALGKAPSKVTDALPEPEPPGAMAASEDEEEEEEALEAMQSRLATLRS

SEQ ID NO: 18126 - protein, 238 aa, Homo sapiens
MRSLGALLLLLSACLAVSAGPVPTPPDNIQVQENFNISRIYGKWYNLAIGSTCPWLKKIMDRMTVSTLVLGEGATEAEISMTSTRWRKGVCEETSGAYEKTDTDGKFLYHKSKWNITMESYVVHTNYDEYAIFLTKKFSRHHGPTITAKLYGRAPQLRETLLQDFRVVAQGVGIPEDSIFTMADRVNGLEQATQAGPFMKWTKARQVPSTMLTKDTNPGLGWPLGLVLLFTPLSCSVT

SEQ ID NO: 18127 - protein, 45 aa, Homo sapiens
TARSRWRLRNSISAFLFTVTFAWCPPGLSNLTILSCPEMRSCCVA

SEQ ID NO: 18128 - protein, 116 aa, Homo sapiens
MEFVLSWVFLVAILKGVQCEVQLVQSGGGLVHPGGSLRLSCAGSGFTFSSYAMHWVRQAPGKGLEWVSAIGTGGGTYYADSVKGRFTISRDNAKNSLYLQMNSLRAEDMAVYYCAR

SEQ ID NO: 18129 - protein, 116 aa, Homo sapiens
MEFGLNWVFLVAIIKGAQCEVQLVESGGGLVQPGGSLRLSCPASGFTFSNHYMSWVRQAPGKGLEWVSYISGDSGYTNYADSVKGRFTISRDNANNSPYLQMNSLRAEDTAVYYCV

SEQ ID NO: 18130 - protein, 382 aa, Homo sapiens
MAPRAGQPGLQGLLLVAAALSQPAAPCPFQCYCFGGPKLLLRCASGAELRQPPRDVPPDARNLTIVGANLTVLRAAAFAGGDGDGDQAAGVRLPLLSALRLTHNHIEVVEDGAFDGLPSLAALDLSHNPLRALGGGAFRGLPALRSLQLNHALVRGGPALLAALDAALAPLAELRLLGLAGNALSRLPPAALRLARLEQLDVRLNALAGLDPDELRALERDGGLPGPRLLLADNPLRCGCAARPLLAWLRNATERVPDSRRLRCAAPRALLDRPLLDLDGARLRCADSGADARGEEAEAAGPELEASYVFFGLVLALIGLIFLMVLYLNRRGIQRWMRNLREACRDQMEGYHYRYEQDADPRRAPAPAAPAGSRATSPGSGL

SEQ ID NO: 18131 - protein, 191 aa, Homo sapiens
SLTFPPGSSMRGLLVLSVLLGAVFGKEDFVGHQVLRISVADEAQVQKITQDYGQDAAFTAILDTLDIFLEIVTNPDGFAFTHSTNRMWRKTRSHTAGSLCIGVDPNRNWDAGFGLSGASSNPCSETYHGKFANSEVEVKSIVDFVKDHGNIKAFISIHSYSQLLMYPYGYKTEPVPDQDELDQLSKAAVTA

SEQ ID NO: 18132 - protein, 700 aa, Homo sapiens
MADAGIRRVVPSDLYPLVLGFLRDNQLSEVANKFAKATGATQQDANASSLLDIYSFWLNRSAKVPERKLQANGPVAKKAKKKASSSDSEDSSEEEEEVQGPPAKKAAVPAKRVGLPPGKAAAKASESSSSEESSDDDDEEDQKKQPVQKGVKPQAKAAKAPPKKAKSSDSDSDSSSEDEPPKNQKPKITPVTVKAQTKAPPKPARAAPKIANGKAASSSSSSSSSSSSDDSEEEKAAATPKKTVPKKQVVAKAPVKAATTPTRKSSSSEDSSSDEEEEQKKPMKNKPGPYSSVPPPSAPPPKKSLGTQPPKKAVEKQQPVESSEDSSDESDSSSEEEKKPPTKAVVSKATTKPPPAKKAAESSSDSSDSDSSEDDEAPSKPAGTTKNSSNKPAVTTKSPAVKPAAAPKQPVGGGQKLLTRKADSSSSEEESSSSEEEKTKKMVATTKPKATAKAALSLPAKQAPQGSRDSSSDSDSSSSEEEEEKTSKSAVKKKPQKVAGGAAPSKPASAKKGKAESSNSSSSDDSSEEEEEKLKGKGSPRPQAPKANGTSALTAQNGKAAKNSEEEEEEKKKAAVVVSKSGSLKKRKQNEAAKEAETPQAKKIKLQTPNTFPKRKKGEKRASSPFRRVREEEIEVDSRVADNSFDAKRGAAGDWGERANQVLKFTKGKSFRHEKTKKKRGSYRGGSISVQVNSIKFDSE

SEQ ID NO: 18133 - protein, 1548 aa, Homo sapiens
MLRARPEALMLLGALLTGSLGPSGNQDALSLPWEVQRYDGWFNNLRHHERGAVGCRLQRRVPANYADGVYQALEEPQLPNPRRLSNAATRGIAGLPSLHNRTVLGVFFGYHVLSDVVSVETPGCPAEFLNIRIPPGDPVFDPDQRGDVVLPFQRSRWDPETGRSPSNPRDLANQVTGWLDGSAIYGSSHSWSDALRSFSGGQLASGPDPAFPRDSQNPLLMWAAPDPATGQNGPRGLYAFGAERGNREPFLQALGLLWFRYHNLWAQRLARQHPDWEDEELFQHARKRVIATYQNIAVYEWLPSFLQKTLPEYTGYRPFLDPSISPEFVVASEQFFSTMVPPGVYMRNASCHFRKVLNKGFQSSQALRVCNNYWIRENPNLNSTQEVNELLLGMASQISELEDNIVVEDLRDYWPGPGKFSRTDYVASSIQRGRDMGLPSYSQALLAFGLDIPRNWSDLNPNVDPQVLEATAALYNQDLSQLELLLGGLLESHGDPGPLFSAIVLDQFVRLRDGDRYWFENTRNGLFSKKEIEDIRNTTLRDVLVAVINIDPSALQPNVFVWHKGAPCPQPKQLTTDGLPQCAPLTVLDFFEGSSPGFAITIIALCCLPLVSLLLSGVVAYFRGREHKKLQKKLKESVKKEAAKDGVPAMEWPGPKERSSPIIIQLLSDRCLQVLNRHLTVLRVVQLQPLQQVNLILSNNRGCRTLLLKIPKEYDLVLLFSSEEERGAFVQQLWDFCVRWALGLHVAEMSEKELFRKAVTKQQRERILEIFFRHLFAQVLDINQADAGTLPLDSSQKVREALTCELSRAEFAESLGLKPQDMFVESMFSLADKDGNGYLSFREFLDILVVFMKGSPEDKSRLMFTMYDLDENGFLSKDEFFTMMRSFIEISNNCLSKAQLAEVVESMFRESGFQDKEELTWEDFHFMLRDHDSELRFTQLCVKGGGGGGNGIRDIFKQNISCRVSFITRTPGERSHPQGLGPPAPEAPELGGPGLKKRFGKKAAVPTPRLYTEALQEKMQRGFLAQKLQQYKRFVENYRRHIVCVAIFSAICVGVFADRAYYYGFASPPSDIAQTTLVGIILSRGTAASVSFMFSYILLTMCRNLITFLRETFLNRYVPFDAAVDFHRWIAMAAVVLAILHSAGHAVNVYIFSVSPLSLLACIFPNVFVNDGSKLPQKFYWWFFQTVPGMTGVLLLLVLAIMYVFASHHFRRRSFRGFWLTHHLYILLYALLIIHGSYALIQLPTFHIYFLVPAIIYGGDKLVSLSRKKVEISVVKAELLPSGVTYLQFQRPQGFEYKSGQWVRIACLALGTTEYHPFTLTSAPHEDTLSLHIRAVGPWTTRLREIYSSPKGNGCAGYPKLYLDGPFGEGHQEWHKFEVSVLVGGGIGVTPFASILKDLVFKSSLGSQMLCKKIYFIWVTRTQRQFEWLADIIQEVEENDHQDLVSVHIYVTQLAEKFDLRTTMLYICERHFQKVLNRSLFTGLRSITHFGRPPFEPFFNSLQEVHPQVRKIGVFSCGPPGMTKNVEKACQLVNRQDRAHFMHHYENF

SEQ ID NO: 18134 - protein, 52 aa, Homo sapiens
LVGVLWFVSVTTGPWGAVATSAGGEESLKCEDLKVGQYPLWRTPPHGGEIQK

SEQ ID NO: 18135 - protein, 368 aa, Homo sapiens
MASSSGSKAEFIVGGKYKLVRKIGSGSFGDIYLAINITNGEEVAVKLESQKARHPQLLYESKLYKILQGGVGIPHIRWYGQEKDYNVLVMDLLGPSLEDLFNFCSRRFTMKTVLMLADQMISRIEYVHTKNFIHRDIKPDNFLMGIGRHCNKLFLIDFGLAKKYRDNRTRQHIPYREDKNLTGTARYASINAHLGIEQSRRDDMESLGYVLMYFNRTSLPWQGLKRQCLTVLPRLVSNSWAQVILLLQHPKELGLQAATKKQKYEKISEKKMSTPVEVLCKGFPAEFAMYLNYCRGLRFEEAPDYMYLRQLFRILFRTLNHQYDYTFDWTMLKQKAAQQAASSSGQGQQAQTPTGKQTDKTKSNMKGF

SEQ ID NO: 18136 - protein, 192 aa, Homo sapiens
MACAGLLTVCLLRPPAPQPQPQTPRHPQLAPDPGPAGHTLFQDVFRRADKNDDGKLSFEEFQNYFADGVLSLGELQELFSGIDGHLTDNLETEKLCDYFSEHLGVYRPVLAALESLNRAVLAAMDATKLEYERASKVDQFVTRFLLRETVSQLQALQSSLEGASDTLEAQAHGWRLIPSWGPSPRPCEPHFL

SEQ ID NO: 18137 - protein, 1027 aa, Homo sapiens
MLIEDVDALKSWLAKLLEPICDADPSALANYVVALVKKDKPEKELKAFCADQLDVFLQKETSGFVDKLFESLYTKNYLPLLEPVKPEPKPLVQEKEEIKEEVFQEPAEEERDGRKKKYPSPQKTRSESSERRTREKKREDGKWRDYDRYYERNELYREKYDWRRGRSKSRSKSRGLSRSRSRSRGRSKDRDPNRNVEHRERSKFKSERNDLESSYVPVSAPPPNSSEQYSSGAQSIPSTVTVIAPAHHSENTTESWSNYYNNHSSSNSFGRNLPPKRRCRDYDERGFCVLGDLCQFDHGNDPLVVDEVALPSMIPFPPPPPGLPPPPPPGMLMPPMPGPGPGPGPGPGPGPGPGPGPGHSMRLPVPQGHGQPPPSVVLPIPRPPITQSSLINSRDQPGTSAVPNLASVGTRLPPPLPQNLLYTVSEHTYEPDGYNPEAPSITSSGRSQYRQFFSRTQTQRPNLIGLTSGDMDVNPRAANIVIQTEPPVPVSINSNITRVVLEPDSRKRAMSGLEGPLTKKPWLGKQGNNNQNKPGFLRKNQYTNTKLEVKKIPQELNNITKLNEHFSKFGTIVNIQVAFKGDPEAALIQYLTNEEARKAISSTEAVLNNRFIRVLWHRENNEQPTLQSSAQLLLQQQQTLSHLSQQHHHLPQHLHQQQVLVAQSAPSTVHGGIQKMMSKPQTSGAYVLNKVPVKHRLGHAGGNQSDASHLLNQSGGAGEDCQIFSTPGHPKMIYSSSNLKTPSKLCSGSKSHDVQEVLKKKQEAMKLQQDMRKKRQEVLEKQIECQKMLISKLEKNKNMKPEERANIMKTLKELGEKISQLKDELKTSSAVSTPSKVKTKTEAQKELLDTELDLHKRLSSGEDTTELRKKLSQLQVEAARLGILPVGRGKTMSSQGRGRGRGRGGRGRGSLNHMVVDHRPKALTVGGFIEEEKEDLLQHFSMEFCSCCPGWSAMVRSRLTATSASLVQVILLPQPPKQLRLQEREDDGHELQAAFRHAPGAARTQILQSALWLRGHAPSLSPSPAGT

SEQ ID NO: 18138 - protein, 297 aa, Homo sapiens
MACAGLLTVCLLRPPAPQPQPQTPRHPQLAPDPGPAGHTLFQDVFRRADKNDDGKLSFEEFQNYFADGVLSLGELQELFSGIDGHLTDNLETEKLCDYFSEHLGVYRPVLAALESLNRAVLAAMDATKLEYERASKVDQFVTRFLLRETVSQLQALQSSLEGASDTLEAQAHGWRSDAESVEAQSRLCGSRRAGRRALRSVSRSSTWSPGSSDTGRSSEAEMQWRLQVNRLQELIDQLECKRQVQVAEEGLQDFHRALRCYVDFTGAQSHCLHVSAQKMLDGASFTLYEFWQDEASW

SEQ ID NO: 18139 - protein, 140 aa, Homo sapiens
MRQPYLSSREVSSSRKRWRTFPVDCVAMCGDCVEKEYPNRGNTCLENGSFLLNFTGCAVCSKRDFMLITNKSLKEEDGEEIVTYDPDLCKNCHHVIARHEYTFSIMDEFQEYTMLCLLCGKAEDTISILPDDPRQMTLLF

SEQ ID NO: 18140 - protein, 1183 aa, Homo sapiens
MEEFDLVKTLHKTSSSVGSDENSLHSLGLNLNTDRSSPHLSTNGVSSFSGKTRPSVIQGTVEVLTSLMQELQNSGKTDSELWKNCETRWLQLFNLVEKQCQEQIVAQQEQFHNQIQHIQEEIKNLVKLQTSSASLASCEGNSSNKQVSSESQMGFFSLSSERNESVIHYPESTEPEIQQEMSTSQPDCNVDSCSVSSGYGTFCISELNLYKSKDPKEFMEHIDVPKGQYVAPAVPAESLVDGVKNENFYIQTPEECHVSLKEDVSISPGEFEHNFLGENKVSEVYSGKTNSNAITSWAQKLKQNQPKRAHVEDGGSRSKQGNEQSKKTPIEKSDFAAATHPRAFYLSKPDETPNAWMSDSGTGLTYWKLEEKDMHHSLPETLEKTFISLSSTDVSPNQSNTSNEMKLPSLKDIYYKKQRENKQLPERNLTSASNPNHPPEVLTLDPTLHMKPKQQISGIQPHGLPNALDDRISFSPDSVLEPSMSSPSDIDSFSQASNVTSQLPGFPKYPSHTKASPVDSWKNQTFQNESRTSSTFPSVYTITSNDISVNTVDEENTVMVASASVSQSQLPGTANSVPECISLTSLEDPVILSKIRQNLKEKHARHIADLRAYYESEINSLKQKLEAKEISGVEDWKITNQILVDRCGQLDSALHEATSRVRTLENKNNLLEIEVNDLRERFSAASSASKILQERIEEMRTSSKEKDNTIIRLKSRLQDLEEAFENAYKLSDDKEAQLKQENKMFQDLLGEYESLGKEHRRVKDALNTTENKLLDAYTQISDLKRMISKLEAQVKQVEHENMLSLRHNSRIHVRPSRANTLATSDVSRRKWLIPGAEYSIFTGQPLDTQDSNVDNQLEETCSLGHRSPLEKDSSPGSSSTSLLIKKQRETSDTPIMRALKELDEGKIFKNWGTQTEKEDTSNINPRQTETSVNASRSPEKCAQQRQKRLNSASQRSSSLPPSNRKSSTPTKREIMLTPVTVAYSPKRSPKENLSPGFSHLLSKNESSPIRFDILLDDLDTVPVSTLQRTNPRKQLQFLPLDDSEEKTYSEKATDNHVNHSSCPEPVPNGVKKVSVRTAWEKNKSVSYEQCKPVSVTPQGNDFEYTAKIRTLAETERFFDELTKEKDQIEAALSRMPSPGGRITLQTRLNQEALEDRLERINRELGSVRMTLKKFHVLRTSANL

SEQ ID NO: 18141 - protein, 70 aa, Homo sapiens
MPARRLLLLLTLLLPGLGVSDRGAWGGGQLATAGSGPGQRRGAGAGVRAGSATAAARCPVSPAVGGSGRA

SEQ ID NO: 18142 - protein, 109 aa, Homo sapiens
MIRAAPPPLFLLLLLLLLLVSWASRGEAAPDQDEIQRLPGLAKQPSFRQYSGYLKGSGSKHLHYWFVESQKDPENSPVVLWLNGGPGCSSLDGLLTEHGPFLVQPDGVT

SEQ ID NO: 18143 - protein, 353 aa, Homo sapiens
MAASAAVFSRLRSGLRLGSRGLCTRLATPPRRAPDQAAEIGSRGSTKAQGPQQQPGSEGPSYAKKVALWLAGLLGAGGTVSVVYIFGNNPVDENGAKIPDEFDNDPILVQQLRRTYKYFKDYRQMIIEPTSPCLLPDPLQEPYYQPPYTLVLELTGVLLHPEWSLATGWRFKKRPGIETLFQQLAPLYEIVIFTSETGMTAFPLIDSVDPHGFISYRLFRDATRYMDGHHVKDISCLNRDPARVVVVDCKKEAFRLQPYNGVALRPWDGNSDDRVLLDLSAFLKTIALNGVEDVRTVLEHYALEDDPLAAFKQRQSRLEQEEQQRLAELSKSNKQNLFLGSLTSRLWPRSKQP

SEQ ID NO: 18144 - protein, 46 aa, Homo sapiens
MDPNCSCSPVGSCACAGSCKCKECKCTSCKKSECRAFPANLGDGPS

SEQ ID NO: 18145 - protein, 462 aa, Homo sapiens
MAPQVWRRRTLERCLTEVGKATGRPECFLTIQEGLASKFTSLTKVLYDFNKILENGRIHGSPLQKLVIENFDDEQIWQQLELQNEPILQYFQNAVSETINDEDISLLPESEEQEREEDGSEIEADDKEDLEDLEEEEVSDMGNDDPEMGERAENSSKSDLRKSPVFSDEDSDLDFDISKLEQQSKVQNKGQGKPREKSIVDDKFFKLSEMEAYLENIEKEEERKDDNDEEEEDIDFFEDIDSDEDEGGLFGSKKLKSGKSSRNLKYKDFFDPVESDEDITNVHDDELDSNKEDDEIAEEEAEELSISETDEDDDLQENEDNKQHKESLKRVTFALPDDAETEDTGVLNVKKNSDEVKSSFEKRQEKMNEKIASLEKELLEKKPWQLQGEVTAQKRPENSLLEETLHFDHAVRMGMVPSSVVFMSVLFPWFHFIQRFGVVFLFPQLFILKTCKHMAWHGSSHL

SEQ ID NO: 18146 - protein, 52 aa, Homo sapiens
FMLAGVILGGAYLYKYFALQSFSLVAQTGVQWRDLGSLHPLSPGQMTCTTVE

SEQ ID NO: 18147 - protein, 211 aa, Homo sapiens
MAEASSANLGSGCEEKRHEGSSSESVPPGTTISRVKLLDTMVDTFLQKLVAAGSYQRFTDCYKCFYQLQPAMTQQIYDKFIAQLQTSIREEISDIKEEGNLEAVLNALDKIVEEGKVRKEPAWRPSGIPEKDLHSVMAPYFLQQRDTLRRHVQKQEAENQQLADAVLAGRRQVEELQLQVQAQQQAWQVRSPAVQSPAKVQPLCPSRRAAR

SEQ ID NO: 18148 - protein, 54 aa, Homo sapiens
MALSRGLPRELAEAVAGGRVLVVGAGGIGCELLKNLVLTGFSHIDLPPGSHYFA

SEQ ID NO: 18149 - protein, 52 aa, Homo sapiens
MRRPRRPGGLGGSGGLRLLLCLLLLSSRPGGCSAVSAHGSGEGHGVHVGRGT

SEQ ID NO: 18150 - protein, 293 aa, Homo sapiens
MQSSLKLVDCIIEVHDARIPLSGRNPLFQETLGLKPHLLVLNKMDLADLTEQQKIMQHLEGEGLKNVIFTNCVKDENVKQIIPMVTELIGRSHRYHRKENLEYCIMVIGVPNVGKSSLINSLRRQHLRKGKATRVGGEPGITRAVMSKIQVSERPLMFLLDTPGVLAPRIESVETGLKLALCGTVLDHLVGEETMADYLLYTLNKHQRFGYVQHYGLGSACDNVERVLKSVAVKLGKTQKVKVLTGTGNVNIIQPNYPAAARDFLQTFRRGLLGSVMLDLDVLRGHPPAETLP

SEQ ID NO: 18151 - protein, 229 aa, Homo sapiens
MTTAARPTFEPARGGRGKGEGDLSQLSKQYSSRDLPSHTKIKYRQTTQDAPEEVRNRDFRRELEERERAAAREKNRDRPTREHTTSSSVSKKPRLDQIPAANLDADDPLTDEEDEDFEEESDDDDTAALLAELEKIKKERAEEQARKEQEQKAEEERIRMENILSGNPLLNLTGPSQPQANFKVKRRWDDDVVFKNCAKGVDDQKKDKRFVNDTLRSEFHKKFMEKYIK

SEQ ID NO: 18152 - protein, 80 aa, Homo sapiens
MGRAMVARLGLGLLLLALLLPTQIYSSETTTGTSSNSSQSTSNSGLAPNPTNATTKAAGGALQSTASLFVVSLSLLHLYS

SEQ ID NO: 18153 - protein, 154 aa, Homo sapiens
MEPSTAARAWALFWLLLPLLGAVCASGPRTLVLLDNLNVRETHSLFFRSLKDRGFELTFKTADDPSLSLIKYGEFLYDNLIIFSPSVEGDPLRELGSECGIEFDEEKTAVIDHHNYDISDLGQHTLIVADTENLLKAPTIVGKSSLNPILFRGV

SEQ ID NO: 18154 - protein, 207 aa, Homo sapiens
MAAAWPSGPSAPEAVTARLVGVLWFVSVTTGPWGAVATSAGGEESLKCEDLKVGQYICKDPKINDATQEPVNCTNYTAHVSCFPAPNITCKDSSGNETHFTGNEVGFFKPISCRNVNGYSYKVAVALSLFLGWLGADRFYLGYPALGLLKFCTVGFCGIGSLIDFILISMQIVGPSDGSSYIIDYYGTRLTRLSITNETFRKTQLYP

SEQ ID NO: 18155 - protein, 63 aa, Homo sapiens
MGTSSIFLCVLFLCGALGLTMSPARGRLRCYICGFTKPCHPVPTECRDDEACGISIGTSDAHC

SEQ ID NO: 18156 - protein, 1117 aa, Homo sapiens
MYRSSARSSVSSHRPKDDGGGGPRSGRSSGSSSGPARRSSPPPPPSGSSSRTPARRPRSPSGHRGRRASPSPPRGRRVSPSPPRARRGSPSPPRGRRLFPPGPAGFRGSSRGESRADYARDGRGDHPGDSGSRRRSPGLCSDSLEKSLRITVGNDHFCVSTPERRRLSDRLGSPVDNLEDMDRDDLTDDSVFTRSSQCSRGLERYISQEEGPLSPFLGQLDEDYRTKETFLHRSDYSPHISCHDELLRGTERNREKLKGYSIRSEERSREAKRPRYDDTVKINSMGGDHPSFTSGTRNYRQRRRSPSPRFLDPEFRELDLARRKREEEEERSRSLSQELVGVDGGGTGCSIPGLSGVLTASEPGYSLHRPEEVSVMPKKSILKKRIEVDIMEPSMQLESFSSSTSSSQDHPLYSGHPSLPLSGAIAAFASEIENKGTMVETALKEPQGNLYQWGPLPGIPKDNSPLREKFGSFLCHKDNLDLKAEGPERHTDFLLPHERASQDGSGFSRILSMLADSTSTQEKRRRSFPDIEDEEKFLYGDEEEDLKAESVPKPLGSSESEVMRQKASSLPSSAPAVKLESLEETNPEYAKIHDLLKTIGLDIGVAEISQLAARTQERLHGKKPSLRSSADRRSSVDRYFSADHCSSVDHRFSADRCSSVDHCFSADRRSSDPHRLESREAHHSNTHSPEVSHPHPPSPVDPYLLTKNSPPFLKSDHPVGHISGPEVVGSGFQSSVAVRCMLPSAPSAPIRLPHTAALSQFHMPRASQFAAARIPPNYQGPAIPPASFDAYRHYMAYAASRWPMYPTSQPSNHPVPEPHRIMPITKQATRSRPNLRVIPTVTPDKPKQKESLRGSIPAAQVPVQVSIPSLIRYNPEKISDEKNRASQKQKVIEEREKLKNDREARQKKMYYLRTELERLHKQQGEMLRKKRREKDGHKDPLLVEVSRLQDNIMKDIAELRQEAEEAEKKQSELDKVAQILGINIFDKSQKSLSDSREPTEKPGKAEKSKSPEKVSSFSNSSSNKESKVNNEKFRTKSPKPAESPQSATKQLDQPTAAYEYYDAGNHWCKDCNTICGTMFDFFTHMHNKKHTQGQFQKSSDFQKEGLQQTFLPPERQG

SEQ ID NO: 18157 - protein, 205 aa, Homo sapiens
MAEPLQPDPGAAEDAAAQAVETPGWKAPEDAGPQPGSYEIRHYGPAKWVSTSVESMDWDSAIQTGFTKLNSYIQGKNEKEMKIKMTAPVTSYVEPGSGPFSESTITISLYIPSEQQFDPPRPLESDVFIEDRAEMTVFVRSFDGFSSAQKNQEQLLTLASILREDGKVFDEKVYYTAGYNSPVKLLNRNNEVWLIQKNEPTKENE

SEQ ID NO: 18158 - protein, 71 aa, Homo sapiens
MACAGLLTVCLLRPPAPQPQPQTPRHPQLAPDPGPAGHTLFQDVFRRADKNELLCRWGSQPGGAAGTVQRH

SEQ ID NO: 18159 - protein, 494 aa, Homo sapiens
MKTYRQREKQGSKVQESTKGPDEAKIKVFVGKIPRDLYEDELVPLFEKAGPIWDLRLMMDPLSGQNRGYAFITFCGKEAAQEAVKLCDSYEIRPGKHLGVCISVANNRLFVGSIPKNKTKENILEEFSKVTEGLVDVILYHQPDDKKKNRGFCFLEYEDHKSAAQARRRLMSGKVKVWGNVVTVEWADPVEEPDPEVMAKVKVLFVRNLATTVTEEILEKSFSEFGKLERVKKLKDYAFVHFEDRGAAVKAMDEMNGKEIEGEEIEIVLAKPPDKKRKERQAARQASRSTAYEDYYYHPPPRMPPPIRGRGRGGGRGGYGYPPDYYGYEDYYDDYYGYDYHDYRGGYEDPYYGYDDGYAVRGRGGGRGGRGAPPPPRGRGAPPPRGRAGYSQRGAPLGPPRGSRGGRGGPAQQQRGRGSRGSRGNRGGNVGGKRKADGYNQPDSKRRQTNNQQNWGSQPIAQQPLQQGGDYSGNYGYNNDNQEFYQDTYGQQWK

SEQ ID NO: 18160 - protein, 151 aa, Homo sapiens
MVKLFIGNLPREATEQEIRSLFEQYGKVLECDIIKNYGFVHIEDKTAAEDAIRNLHHYKLHGVNINVEASKNKSKASTKLHVGNISPTCTNQELRAKFEEYGPVIECDIVKDYAFVHMERAEDAVEAIRGLDNTEFQGELLWAWVVAPSGV

SEQ ID NO: 18161 - protein, 130 aa, Homo sapiens; identical to SEQ ID NO: 8583

SEQ ID NO: 18162 - protein, 82 aa, Homo sapiens
MTSSPRAPPGEQGRGGAEMIRAAPPPLFLLLLLLLLLVSWASRGEAAPDQDEIQRLPGLAKQPSFRQYSGYLKGSGSKHLHY

SEQ ID NO: 18163 - protein, 35 aa, Homo sapiens
MAEFRFLKSGALPILSLLCLQALKFSLGCSRGSSE

SEQ ID NO: 18164 - protein, 42 aa, Homo sapiens
MLFSALLLEVIWILAADGGQHWTYEAPPFWISSCLEFHIYGS

SEQ ID NO: 18165 - protein, 232 aa, Homo sapiens
MIITKAGRRMFPAMRVKISGLDPHQQYYIAMDIVPVDNKRYRYVYHSSKWMVAGNADSPVPPRVYIHPDSPASGETWMRQVISFDKLKLTNNELDDQGHIILHSMHKYQPRVHVIRKDCGDDLSPIKPVPSGEGVKAFSFPETVFTTVTAYQNQQITRLKIDRNPFAKGFRDSGRNRMGLEALVESYAFWRPSLRTLTFEDIPGIPKQEYRDLKTDYIFPERDNLVSRETKL

SEQ ID NO: 18166 - protein, 23 aa, Homo sapiens
MTLCLGGTVYSLYSLGWASFPRN

SEQ ID NO: 18167 - protein, 167 aa, Homo sapiens
MKEVGRPREVRGRPGKSRIQKELADITLDPPPNCSAGPKGDNIYEWRSTILGPPGSVYEGGVFFLDITFTPEYPFKPPKVTFRTRIYHCNINSQGVICLDILKDNWSPALTISKVLLSICSLLTDCNPGKVHNSLPCFILPYLKNTCFQKLSKDKTNFSAQVCEYKN

SEQ ID NO: 18168 - protein, 555 aa, Homo sapiens
MEPVTKWSPKQVVDWTRGLDDCLQQYVHKFEREKINGEQLLQISHQDLEELGVTRIGHQELVLEAVDLLCALNYGLETDNMKNLVLKLRASSHNLQNYISSRRKSPAYDGNTSRKAPNEFLTSVVELIGAAKALLAWLDRAPFTGITDFSVTKNKIIQLCLDLTTTVQKDCFVAEMEDKVLTVVKVLNGICDKTIRSTTDPVMSQCACLEEVHLPNIKPGEGLGMYIKSTYDGLHVITGTTENSPADRSQKIHAGDEVIQVNQQTVVGWQLKNLVKKLRENPTGVVLLLKKRPTGSFNFTPAPLKNLRWKPPLVQTSPPPATTQSPESTMDTSLKKEKSAILDLYIPPPPAVPYSPRDENGSFVYGGSSKCKQPLPGPKGSESPNSFLDQESRRRRFTIADSDQLPGYSVETNILPTKMREKTPSYGKPRPLSMPADGNWMGIVDPFARPRGHGRKGEDALCRYFSNERIPPIIEESSSPPYRFSRPTTERHLVRGADYIRGSRCYINSDLHSSATIPFQEEGTKKKSGSSATKSSSTEPSLLVSWFTRLKLLTH

SEQ ID NO: 18169 - protein, 368 aa, Homo sapiens
MAACTARRALAVGSRWWSRSLTGARWPRPLCAAAGAGAFSPASTTTTRRHLSSRNRPEGKVLETVGVFEVPKQNGKYETGQLFLHSIFGYRGVVLFPWQARLYDRDVASAAPEKAENPAGHGSKEVKGKTHTYYQVLIDARDCPHISQRSQTEAVTFLANHDDSRALYAIPGLDYVSHEDILPYTSTDQVPIQHELFERFLLYDQTKAPPFVARETLRAWQEKNHPWLELSDVHRETTENIRVTVIPFYMGMREAQNSHVYWWRYCIRLENLDSDVVQLRERHWRIFSLSGTLETVRGRGVVGREPVLSKEQPAFQYSSHVSLQASSGHMWGTFRFERPDGSHFDVRIPPFSLESNKDEKTPPSGLHW

SEQ ID NO: 18170 - protein, 153 aa, Homo sapiens
MAVESRVTQEEIKKEPEKPIDREKTCPLLLRVFTTNNGRHHRMDEFSRGNVPSSELQIYTWMDATLKELTSLVKEVYPEARKKGTHFNFAIVFTDVKRPGYRVKEIGSTMSGRKGTDDSMTLQSQKFQIGDYLDIAITPPNRAPPPSGRMRPY

SEQ ID NO: 18171 - protein, 54 aa, Homo sapiens
MACAGLLTVCLLRPPAPQPQPQTPRHPQLAPDPGPAGHTLFQDVFRRADKNALI

SEQ ID NO: 18172 - protein, 164 aa, Homo sapiens
MSVLTPLLLRGLTGSARRLPVPRAKIHSLPPEGKLGIMGKENGIGSRRICNHHRELWEAGKMEPNQCVGWRCGSGAAGLSYRSQVRRPGVPAPATGLEAHSLTTPKGIPLLGLLPRRGNEEGLASGRTAIGNPEAVGSAALFKDGGGGTSAAEAGAAGQRLRRC

SEQ ID NO: 18173 - protein, 57 aa, Homo sapiens
MKPAVDEMFPEGAGPYVDLDEAGGSTGLLMDLAANEKAVHADFFNDFEDLFDDDDIQ

SEQ ID NO: 18174 - protein, 633 aa, Homo sapiens
MRLALLWALGLLGAGSPLPSWPLPNIVSACNVEAPQVALRSSRQSQRRPRGSPWSPRSFRTISQLASKRCFRELVPGRPTLVWYQPDGTRVVSEGHTLENCCYQGRVRGYAGSWVSICTCSGLRGLVVLTPERSYTLEQGPGDLQGPPIISRIQDLHLPGHTCALSWRESVHTQKPPEHPLGQRHIRRRRDVVTETKTVELVIVADHSEAQKYRDFQHLLNRTLEVALLLDTFFRPLNVRVALVGLEAWTQRDLVEISPNPAVTLENFLHWRRAHLLPRLPHDSAQLVTGTSFSGPTVGMAIQNSICSPDFSGGVNMDHSTSILGVASSIAHELGHSLGLDHDLPGNSCPCPGPAPAKTCIMEASTDFLPGLNFSNCSRRALEKALLDGMGSCLFERLPSLPPMAAFCGNMFVEPGEQCDCGFLDDCVDPCCDSLTCQLRPGAQCASDGPCCQNCQLRPSGWQCRPTRGDCDLPEFCPGDSSQCPPDVSLGDGEPCAGGQAVCMHGRCASYAQQCQSLWGPGAQPAAPLCLQTANTRGNAFGSCGRNPSGSYVSCTPRDAICGQLQCQTGRTQPLLGSIRDLLWETIDVNGTELNCSWVHLDLGSDVAQPLLTLPGTACGPGLVSSLGGQDQV

SEQ ID NO: 18175 - protein, 91 aa, Homo sapiens
MQSLLKTAGPYGIFAGRDASRGLATFCLDKDALRDEYDDLSDLNAVQMESVREWEMQFKEKYDYVGRLLKPGEEPSEYTDEEDTKDHNKQD

SEQ ID NO: 18176 - protein, 488 aa, Homo sapiens
MTKGLVLGIYSKEKEDDVPQFTSAGENFDKLLAGKLRETLNISGPPLKAGKTRTFYGLHQDFPSVVLVGLGKKAAGIDEQENWHEGKENIRAAVAAGCRQIQDLELSSVEVDPCGDAQAAAEGAVLGLYEYDDLKQKKKMAVSAKLYGSGDQEAWQKGVLFASGQNLARQLMETPANEMTPTRFAEIIEKNLKSASSKTEVHIRPKSWIEEQAMGSFLSVAKGSDEPPVFLEIHYKGSPNANEPPLVFVGKGITFDSGGISIKASANMDLMRADMGGAATICSAIVSAAKLNLPINIIGLAPLCENMPSGKANKPGDVVRAKNGKTIQVDNTDAEGRLILADALCYAHTFNPKVILNAATLTGAMDVALGSGATGVFTNSSWLWNKLFEASIETGDRVWRMPLFEHYTRQVVDCQLADVNNIGKYRSAGACTAAAFLKEFVTHPKWAHLDIAGVMTNKDEVPYLRKGMTGRPTRTLIEFLLRFSQDNA

SEQ ID NO: 18177 - protein, 210 aa, Homo sapiens
MACAGLLTVCLLRPPAPQPQPQTPRHPQLAPDPGPAGHTLFQDVFRRADKNDDGKLSFEEFQNYFADGVLSLGELQELFSGIDGHLTDNLETEKLCDYFSEHLGVYRPVLAALESLNRAVLAAMDATKLEYERASKVDQFVTRFLLRETVSQLQALQSSLEGASDTLEAQAHGWRCRERGGAEQALRQPAGRTPSPEECQPVIHLVPRLF

SEQ ID NO: 18178 - protein, 180 aa, Homo sapiens
MRPSVWAAVAAGLWVLCTVIAEGPPALPALALPLAGAPDAGGCQGAEGPLRGRGAELGAAQLLLPPQEGSSAAIVLRSAPPRGPGHRGRPGSAQRPAPLGAAPRRRPDPGAAGGRGEGCGGLPUAGTARLLQEGPRGPEEASQTPESGLASVPQSQRGLQPPAPAHVGAPAGCTLWALPL

SEQ ID NO: 18179 - protein, 71 aa, Homo sapiens
MVNVLKGVLIECDPAMKQFLLYLDESNALGKKFIIQDIDDTHVFVIAELVNVLQERVGELMDQNAFSLTQK

SEQ ID NO: 18180 - protein, 62 aa, Homo sapiens
MPFSHLSTYSLVWVMAAVVLCTAQVQVVTQDEREQLYTPASLKCSLQNAQEALIVTWQKKKA

SEQ ID NO: 18181 - protein, 126 aa, Homo sapiens
MAASRYRRFLKLCEEWPVDETKRGRDLGAYLRQRVAQAFREGENTQVAEPEACDQMYESLARLHSNYYKHKYPRPRDTSFSGLSLEEYKLILSTDTLEELKEIDKGMWKKLQEKFAPKGPEEDHKA

SEQ ID NO: 18182 - protein, 103 aa, Homo sapiens
AWPSGPSAPEAVTARLVGVLWFVSVTTGPWGAVATSAGGEESLKCEDLKVGQYPLWRTPPHGGEVELGSQGLTLSPWLEYSGTISAHCSLRLPGSVNSPASAS

SEQ ID NO: 18183 - protein, 325 aa, Homo sapiens
MAVLGVQLVVTLLTATLMHRLAPHCSFARWLLCNGSLFRYKHPSEEELRALAGKPRPRGRKERWANGLSEEKPLSVPRDAPFQLETCPLTTVDALVLRFFLEYQWFVDFAVYSGGVYLFTEAYYYMLGPAKETNIAVFWCLLTVTFSIKMFLTVTRLYFSAEEGGERSVCLTFAFLFLLLAMLVQVVREETLELGLEPGLASMTQNLEPLLKKQGWDWALPVAKLAIRVGLAVVGSVLGAFLTFPGLRLAQTHRDALTMSEDRPMLQFLLHTSFLSPLFILWLWTKPIARDFLHQPPFGETRCPILPSTLGASGCWWCCACCGWR

SEQ ID NO: 18184 - protein, 310 aa, Homo sapiens
MRPLQIVPSRLISQLYCGLKPPASTRNQICLKMARPSSSMADFRKFFAKAKHIVIISGAGVSAESGVPTFRGAGGYWRKWQAQDLATPLAFAHNPSRVWEFYHYRREVMGSKEPNAGHRAIAECETRLGKQGRRVVVITQNIDELHRKAGTKNLLEIHGSLFKTRCTSCGVVAENYKSPICPALSGKGAPEPGTQDASIPVEKLPRCEEAGCGGLLRPHVVWFGENLDPAILEEVDRELAHCDLCLVVGTSSVVYPAAMFAPQVAARGVPVAEFNTETTPATNRFRFHFQGPCGTTLPEALACHENETVS

SEQ ID NO: 18185 - protein, 238 aa, Homo sapiens
MTSVVKTVYSLQPPSALSGGQPADTQTRATSKSLLPVRSKEVDVSKQLHSGGPENDVTKITKLRRENGQMKATDTATRRNVRKGYKPLSKQKSEEELKDKNQLLEAVNKQLHQKLTETQGELKDLTQKVELLEKFRDNCLAILESKGLDPALGSETLASRQESTTDHMDSMLLLETLQEELKLFNETAKKQMEELQALKVKLEMKEERVRFLEQQTLCNNQVNDLTTALKEMEQLLEM

SEQ ID NO: 18186 - protein, 118 aa, Homo sapiens
MGRHCGYLALVSALACGADWVFLPESPPEEGWEEQMCVKLSENRARKKRLNIIIVAEGAIDTQNKPITSEKIKELVVTQLGYDTRVTILGHVQRGGTPSAFDRILASRMGVEAVIALL

SEQ ID NO: 18187 - protein, 96 aa, Homo sapiens
MATLLRPVLRRLCGLPGLQRPAAEMPLRARSDGAGPLYSHHLPTSPLQKGLLAAGSAAMALYNPYRHDSWIPPKRTESESESAVEGEMGVKPKVCL

SEQ ID NO: 18188 - protein, 273 aa, Homo sapiens
MSSKGSSTDGRTDLANGSLSSSPEEMSGAEEGRETSSGIEVEASDLSLSLTGDDGGPNRTSTESRGTDTESSGEDKDSDSMEDTGHYSINDENRVHDRSEEEEEEEEEEEEEQPRRRVQRKRANRDQDSSDDERALEDWVSSETSALPRPRWQALPALRERELGSSARFVYEACGARVFVQRFRLQHGLEGHTGCVNTLHFNQRGTWLASGSDDLKVVVWDWVRRQPVLDFESGHKSNVFQVRQGSIIATERIRHELEKSELQHGLGADSELL

SEQ ID NO: 18189 - protein, 109 aa, Homo sapiens
MILSLLFSLGGPLGWGLLGAWAQASSTSLSDLQSSRTPGVWKAEAEDTGKDPVGRIMDSRIPALLRQEARTGGSALAPPVDLGVAQQPSPLACFPVTGAPTQCPSWSPY

SEQ ID NO: 18190 - protein, 582 aa, Homo sapiens
MEALSRAGQEMSLAALKQHDPYITSIADLTGQVALYTFCPKANQWEKTDIEGTLFVYRRSASPYHGFTIVNRLNMHNLVEPVNKDLEFQLHEPFLLYRNASLSIYSIWFYDKNDCHRIAKLMADVVEEETRRSQQAARDKQSPSQANGCSDHRPIDILEMLSRAKDEYERNQMGDSNISSPGLQPSTQLSNLGSTETLEEMPSGSQDKSAPSGHKHLTVEELFGTSLPKEQPAVVGLDSEEMERLPGDASQKEPNSFLPFPFEQLGGAPQSETLGVPSAAHHSVQPEITTPVLITPASITQSNEKHAPTYTIPLSPVLSPTLPAEAPTAQVPPSLPRNSTMMQAVKTTPRQRSPLLNQPVPELSHASLIANQSPFRAPLNVTNTAGTSLPSVDLLQKLRLTPQHDQIQTQPLGKGAMVASFSPAAGQLATPESFIEPPSKTAAARVAASASLSNMVLAPLQSMQQNQDPEVFVQPKVLSSAIPVAGAPLVTATTTAVSSVLLAPSVFQQTVTRSSDLERKASSPSPLTIGTPESQRKPSIILSKSQLQDTLIHLIKNDSSFLSTLHEVYLQVLTKNKDNHNL

SEQ ID NO: 18191 - protein, 55 aa, Homo sapiens
METRPRLGATCLLGFSFLLLVISSDGHNGLGKGFGDHIHWRTLEDGKKEAAARPY

SEQ ID NO: 18192 - protein, 42 aa, Homo sapiens
MCWGSSIFMLFSPLVLYDCYLYEALVITKHFFCPFLPELCKL

SEQ ID NO: 18193 - protein, 374 aa, Homo sapiens
MAASAAAAELQASGGPRHPVCLLVLGMAGSGKTTFVQRLTGHLHAQGTPPYVINLDPAVHEVPFPANIDIRDTVKYKEVMKQYGLGPNGGIVTSLNLFATRFDQVMKFIEKAQNMSKYVLIDTPGQIEVFTWSASGTIITEALASSFPTVVIYVMDTSRSTNPVTFMSNMLYACSILYKTKLPFIVVMNKTDIIDHSFAVEWMQDFEAFQDALNQETTYVSNLTRSMSLVLDEFYSSLRVVGVSAVLGTGLDELFVQVTSAAEEYEREYRPEYERLKKSLANAESQQQREQLERLRKDMGSVALDAGTAKDSLSPVLHPSDLILTRGTLDEEDEEADSDTDDIDHRVTEESHEEPAFQNFMQESMAQYWKRNNK

SEQ ID NO: 18194 - protein, 520 aa, Homo sapiens
MFCTRGLLFFAFLAGLDIEFTGLRSNLSGPQQISLFDLPSEWYLKTRQSVQQFTVCQIGLSVFSAIEGEANKYIAHSCNFYLFPTTFGILDSEFSFQASSVQFLNQYGFNYNKFLKNGIPYMNEEQEKKIRHDILTGNWRVRSSPDKDQIKVVIDEVTRWLELAKEGDWMTLPGITGFQAFEVQLVLRQALPNIWTVLKDEGVVVKKVSKQHRWYLQNTSCDRESCWKENILLSARGFSVFFQMLVKAQKPLVGHNMMMDLLHLHEKFFRPLPESYDQFKQNIHSLFPVLIDTKSVTKDIWKEMNFPRVSNLSEVYEVLNSDLNPTKNSGPEIVHASRCEKYVETKCPHEAAYDAFLCGSVLLKVAHLLLQKIYHIDPVPESSFPQYLDVLAPYVNQVNLIRAGVPKINFSGPDYPSIRPPILILSVKRWPGVSEQQVYHKFQNLCKFDVRRLTRSQFLLLTNKFKDARNILKEYRDHPTLCISLYRYWRHSPNVNCLLQVCGIVTAWALLAFILGRSGT

SEQ ID NO: 18195 - protein, 153 aa, Homo sapiens
MKLTIDHTPERKDEKERIKKCGGFVAWNSLGQPHVNGRLAMTRSIGDLDLKTSGVIAEPETKRIKLHHADDSFLVLTTDGINFMVNSQEICDFVNQCHDPNEAAHAVTEQAIQYGTEDNSTAVVVPFGAWGKYKNSEINFSFSRSFASSGRWA

SEQ ID NO: 18196 - protein, 172 aa, Homo sapiens
MFFGGGFPSSNVHVYSNGRMRYTYQQRQDRRDNQGDGGLGVFVQLMPILILILVSALSQLMVSSPPYSLSPRPSVGHIHRRVTDHLGVVYYVGDTFSEEYTGSSLKTVERNVEDDYIANLRNNCWKEKQQKEGLLYRARYFGDTDMYHRAQKMGTPSCSRLSETMKSLENFW

SEQ ID NO: 18197 - protein, 1153 aa, Homo sapiens
MSLKPQQQQQQQQQQQQQQQQQQQQQQQPPPAAANVRKPGGSGLLASPAAAPSPSSSSVSSSSATAPSSVVAATSGGGRPGLGRGRNSNKGLPQSTISFDGIYANMRMVHILTSVVGSKCEVQVKNGGIYEGVFKTYSPKCDLVLDAAHEKSTESSSGPKREEIMESILFKCSDFVVVQFKDMDSSYAKRDAFTDSAISAKVNGEHKEKDLEPWDAGELTANEELEALENDVSNGWDPNDMFRYNEENYGVVSTYDSSLSSYTVPLERDNSEEFLKREARANQLAEEIESSAQYKARVALENDDRSEEEKYTAVQRNSSEREGHSINTRENKYIPPGQRNREVISWGSGRQNSPRMGQPGSGSMPSRSTSHTSDFNPNSGSDQRVVNGGVPWPSPCPSPSSRPPSRYQSGPNSLPPRAATPTRPPSRPPSRPSRPPSHPSAHGSPAPVSTMPKRMSSEGPPRMSPKAQRHPRNHRVSAGRGSISSGLEFVSHNPPSEAATPPVARTSPSGGTWSSVVSGVPRLSPKTHRPRSPRQNSIGNTPSGPVLASPQAGIIPTEAVAMPIPAASPTPASPASNRAVTPSSEAKDSRLQDQRQNSPAGNKENIKPNETSPSFSKAENKGISPVVSEHRKQIDDLKKFKNDFRLQPSSTSESMDQLLNKNREGEKSRDLIKDKIEPSAKDSFIENSSSNCTSGSSKPNSPSISPSILSNTEHKRGPEVTSQGVQTSSPACKQEKDDKEEKKDAAEQVRKSTLNPNAKEFNPRSFSQPKPSTTPTSPRPQAQPSPSMVGHQQPTPVYTQPVCFAPNMMYPVPVSPGVQPLYPIPMTPMPVNQAKTYRAVPNMPQQRQDQHHQSAMMHPASAAGPPIAATPPAYSTQYVAYSPQQFPNQPLVQHVPHYQSQHPHVYSPVIQGNARMMAPPTHAQPGLVSSSATQYGAHEQTHAMYACPKLPYNKETSPSFYFAISTGSLAQQYAHPNATLHPHTPHPQPSATPTGQQQSQHGGSHPAPSPVQHHQHQAAQALHLASPQQQSAIYHAGLAPTPPSMTPASNTQSPQNSFPAAQQTVFTIHPSHVQPAYTNPPHMAHVPQAHVQSGMVPSHPTAHAPMMLMTTQPPGGPQAALAQSALQPIPVSTTAHFPYMTHPSVQAHHQQQL

SEQ ID NO: 18198 - protein, 196 aa, Homo sapiens
MAQLFLPLLAALVLAQAPAALADVLEGDSSEDRAFRVRIAGDAPLQGVLGGALTIPCHVHYLRPPPSRRAVLGSPRVKWTFLSRGREAEVLVARGVRVKVNEAYRFRVALPAYPASLTDVSLALSELRPNDSGIYRCEVQHGIDDSSDAVEVKVKGIPSRPHERPVTETWMASPGSGTMVWWTRMTSMMCTVMLKT

SEQ ID NO: 18199 - protein, 246 aa, Homo sapiens
MGPQHLRLVQLFCLLGAISTLPRAGALLCYEATASRFRAVAFHNWKWLLMRNMVCKLQEGCEETLVFIETGTARGVVGFKGCSSSSSYPAQISYLVSPPGVSIASYSRVCRSYLCNNLTNLEPFVKLKASTPKSITSASCSCPTCVGEHMKDCLPNFVTTNSCPLAASTCYSSTLKFQAGFLNTTFLLMGCAREHNQLLADFHHIGSIKVTEVLNILEKSQIVGAASSRQDPAWGVVLGLLFAFRD

SEQ ID NO: 18200 - protein, 66 aa, Homo sapiens
MKLLAATVLLLTICSLEGALVRRQAKEPCVESLVSQYFQTVTDYGKDLMEKVKSPELQAEAKSYFE

SEQ ID NO: 18201 - protein, 138 aa, Homo sapiens
MGRPLLLPLLLLLQPPAFLQPGGSTGSGPSYLYGVTQPKHLSASMGGSVEIPFSFYYPWELAIVPNVRISWRRGHFHGQSFYSTRPPSIHKDYVNRLFLNWTEGQESGFLRISNLRKEDQSVYFCRVELDTRRSGRQQ

SEQ ID NO: 18202 - protein, 338 aa, Homo sapiens
MSGPDVETPSAIQICRIMRPDDANVAGNVHGGTILKMIEEAGAIISTRHCNSQNGERCVAALARVERTDFLSPMCIGEVAHVSAEITYTSKHSVEVQVNVMSENILTGAKKLTNKATLWYVPLSLKNVDKVLEVPPVVYSRQEQEEEGRKRYEAQKLERMETKWRNGDIVQPVLNPEPNTVSYSQSSLIHLVGPSDCTLHGFVHGGVTMKLMDEVAGIVAARHCKTNIVTASVDAINFHDKIRKGCVITISGRMTFTSNKSMEIEVLVDADPVVDSSQKRYRAASAFFTYVSLSQEGRSLPVPQLVPETEDEKKRFEEGKGRYLQMKAKRQGHAEPQP

SEQ ID NO: 18203 - protein, 113 aa, Homo sapiens
MGLLTILKKMKQKERELRLLMLGLDNAGKTTILKKFNGEDIDTISPTLGFNIKTLEHRGFKLNIWDVGGQKSLRSYWRNYFESTDGLIWVVDSADRQRMQDCQRELQSLLVEE

SEQ ID NO: 18204 - protein, 317 aa, Homo sapiens
MAAPMELFCWSGGWGLPSVDLDSLAVLTYARFTGAPLKVHKISNPWQSPSGTLPALRTSHGEVISVPHKIITHLRKEKYNADYDLSARQGADTLAFMSLLEEKLLPVLVHTFWIDTKNYVEVTRKWYAEAMPFPLNFFLPGRMQRQYMERLQLLTGEHRPEDEEELEKELYREARECLTLLSQRLGSQKFFFGDAPASLDAFVFSYLALLLQAKLPSGKLQVHLRGLHNLCAYCTHILSLYFPWDGAEVPPQRQTPAGPETEEEPYRRRNQILSVLAGLAAMVGYALLSGIVSIQRATPARAPGTRTLGMAEEDEEE

SEQ ID NO: 18205 - protein, 45 aa, Homo sapiens
MISTAPLYSGVHNWTSSDRIRMCGINEESHFQQWSPPTSASPTAF

SEQ ID NO: 18206 - protein, 254 aa, Homo sapiens
MWLLVSVILISRISSVGGEAMFCDFPKINHGILYDEEKYKPFSQVPTGEVFYYSCEYNFVSPSKSFWTRITCAEEGWSPTPKCLRQTHLEGDTVQIICNTGYRLQNNENNISCVERGWSTPPKCRSTISAEKCGPPPPIDNGDITSFLLSVYAPGSSVEYQCQNLYQLEGNNQITCRNGQWSEPPKCLDPCVISQEIMEKYNIKLKWTNQQKLYSRTGDIVEFVCKSGYHPTKSHSFRAMCQNGKLVYPSCEEK

SEQ ID NO: 18207 - protein, 90 aa, Homo sapiens
MLLLVTSLLLCELPHPAFLLIPEKSDLRTVAPASSLNVRFDSRTMNLSWDCQENTTFSKCFLTDKKNRVVEPRMEFPSCCPDRTIAHQPA

SEQ ID NO: 18208 - protein, 883 aa, Homo sapiens
MKKHRRALALVSCLFLCSLVWLPSWRVCCKESSSASASSYYSQDDNCALENEDVQFQKKNTESKKLSPPVVETLPTVDLHEESSNAVVDSETVENISSSSTSEITPISKLDEIEKSGTIPIAKPSETEQSETDCDVGEALDASAPIEQPSFVSPPDSLVGQHIENVSSSHGKGKITKSEFESKVSASEQGGGDPKSALNASDNLKNESSDYTKPGDIDPTSVASPKDPEDIPTFDEWKKKVMEVEKEKSQSMHASSNGGSHATKKVQKNRNNYASVECGAKILAANPEAKSTSAILIENMDLYMLNPCSTKIWFVIELCEPIQVKQLDIANYELFSSTPKDFLVSISDRYPTNKWIKLGTFHGRDERNVQSFPLDEQMYAKYVKMFIKYIKVELLSHFGSEHFCPLSLIRVFGTSMVEEYEEIADSQYHSERQELFDEDYDYPLDYNTGEDKSSKNLLGSATNAILNMVNIAANILGAKTEDLTEGNKSISENATATAAPKMPESTPVSTPVPSPEYVTTEVHTHDMEPSTPDTPKESPIVQLVQEEEEEASPSTVTLLGSGEQEDESSPWYRKQMEEMQKAFNKTIVKLQNTSRIAEEQDQRQTEAIQLLQAQLTNMTQLVSNLSATVAELKREVSDRQSYLVISLVLCVVLGLMLCMQRCRNTSQFDGDYISKLPKSNQYPSPKRCFSSYDDMNLKRRTSFPLMRSKSLQLTGKEVDPNDLYIVEPLKFSPEKKKKRCKYKIEKIETIKPEEPLHPIANGDIKGRKPFTNQRDFSNMGEVYHSSYKGPPSEGSSETSSQSEESYFCGISACTSLCNGQSQKTKTEKRALKRRRSKVQDQGKLIKTLIQTKSGSLPSLHDIIKGNKEITVGTFGVTAVSGHI

SEQ ID NO: 18209 - protein, 95 aa, Homo sapiens
MKLLAATVLLLTICSLEGALVRRQAKEPCVESLVSQYFQTVTDYGKDLMEKVKSPELQAEAKSYFEKSKEQLTPLIKKAGTELVNFLSYFVELGT

SEQ ID NO: 18210 - protein, 772 aa, Homo sapiens
MAAESALQVVEKLQARLAANPDPKKLLKYLKKLSTLPITVDILAETGVGKTVNSLRKHEHVGSFARDLVAQWKKLVPVERNAEPDEQDFEKSNSRKRPRDALQKEEEMEGDYQETWKATGSRSYSPDHRQKKHRKLSELERPHKVSHGHERRDERKRCHRMSPTYSSDPESSDYGHVQSPPSCTSPHQMYVDHYRSLEEDQEPIVSHQKPGKGHSNAFQDRLGASQERHLGEPHGKGVVSQNKEHKSSHKDKRPVDAKSDEKASVVSREKSHKALSKEENRRPPSGDNAREKPPSSGVKKEKDREGSSLKKKCLPPSEAASDNHLKKPKHRDPEKAKLDKSKQGLDSFDTGKGAGDLLPKVKEKGSNNLKTPEGKVKTNLDRKSLGSLPKVEETDMEDEFEQPTMSFESYLSYDQPRKKKKKIVKTSATALGDKGLKKNDSKSTGKNLDSVQKLPKVNKTKSEKPAGADLAKLRKVPDVLPVLPDLPLPAIQANYRPLPSLELISSFQPKRKAFSSPQEEEEAGFTGRRMNSKMQVYSGSKCAYLPKMMTLHQQCIRVLKNNIDSIFEVGGVPYSVLEPVLERCTPDQLYRIEEYNHVLIEETDQLWKVHCHRDFKEERPEEYESWREMYLRLQDAREQRLRVLTKNIQFAHANKPKGRQAKMAFVNSVAKPPRDVRRRQEKFGTGGAAVPEKIKIKPAPYPMGSSHASASSISFNPSPEEPAYDGPSTSSAHLAPVVSSTVSYDPRKPTVKKIAPMMAKTIKAFKNRFSRR

SEQ ID NO: 18211 - protein, 12 aa, Homo sapiens
MIASQFLSALTL

SEQ ID NO: 18212 - protein, 332 aa, Homo sapiens
MAAATAAAALAAADPPPAMPQAAGAGGPTTRRDFYWLRSFLAGGIAGCCAKTTVAPLDRVKVLLQAHNHHYKHLGVFSALRAVPQKEGFLGLYKGNGAMMIRIFPYGAIQFMAFEHYKTLITTKLGISGHVHRLMAGSMAGMTAVICTYPLDMVRVRLAFQVKGEHSYTGIIHAFKTIYAKEGGFFGFYRGLMPTILGMAPYAGVSFFTFGTLKSVGLSHAPTLLGRPSSDNPNVLVLKTHVNLLCGGVAGAIAQTISYPFDVTRRRMQLGTVLPEFEKCLTMRDTMKYVYGHHGIRKGLYRGLSLNYIRCIPSQAVAFTTYELMKQFFHLN

SEQ ID NO: 18213 - protein, 517 aa, Homo sapiens
MHAALAGPLLAALLATARARPQPPDGGQCRPPGSQRDLNSFLWTIRRDPPAYLFGTIHVPYTRVWDFIPDNSKAAFQASTRVYFELDLTDPYTISALASCQLLPHGENLQDVLPHELYWRLKRHLDYVKLMMPSWMTPAQRGKGLYADYLFNAIAGNWERKRPVWVMLMVNSLTERDVRFRGVPVLDLYLAQQAEKMKKTTGAVEQVEEQCHPLNNGLNFSQVLFALNQTLLQQESVRAGSLQASYTTEDLIKHYNCGDLSAVIFNHDTSQLPNFINTTLPPHEQVTAQEIDSYFRQELIYKRNERMGKRVMALLRENEDKICFFAFGAGHFLGNNTVIDILRQAGLEVDHTPAGQAIHSPAPQSPAPSPEGTSTSPAPVTPAAAVPEAPSVTPTAPPEDEDPALSPHLLLPDSLSQLEEFGRQRKWHKRQSTHQRPRQFNDLWVRIEDSTTASPPPLPLQPTHSSGTAKPPFQLSDQLQQQDPPGPASSSAPTLGLLPAIATTIAVCFLLHSLGPS

SEQ ID NO: 18214 - protein, 87 aa, Homo sapiens
MGTRLLPALFLVLLVLGFEVQGTQQPQQDEMPSPTFLTQVKESLSSYWESAKTAAQNLDLYSKSTAAMSTYTGIFTDQVLSVLKGEE

SEQ ID NO: 18215 - protein, 222 aa, Homo sapiens
MQLRNPELHLGCALALRFLALVSWDIPGARALDNGLARTPTMGWLHWERFMCNLDCQEEPDSCISEKLFMEMAELMVSEGWKDAGYEYLCIDDCWMAPQRDSEGRLQADPQRFPHGIRQLANYVHSKGLKLGIYADVGNKTCAGFPGSFGYYDIDAQTFADWGVDLLKFDGCYCDSLENLADGYKHMSLALNRTGRSIVYSCEWPLYMWPFQKSSTLFGSIC

SEQ ID NO: 18216 - protein, 612 aa, Homo sapiens
MADFAGPSSAGRKAGAPRCSRKAAGTKQTSTLKQEDASKRKAELEAAVRKKIEFERKALHIVEQLLEENITEEFLMECGRFITPAHYSDVVDERSIVKLCGYPLCQKKLGIVPKQKYKISTKTNKVYDITERKSFCSNFCYQASKFFEAQIPKTPVWVREEERHPDFQLLKEEQSGHSGEEVQLCSKAIKTSDIDNPSHFEKQYESSSSSTHSDSSSDNEQDFVSSILPGNRPNSTNIRPQLHQKSIMKKKAGHKANSKHKDKEQTVVDVTEQLGDCKLDSQEKDATCELPLQKVNTQSSSNSTLPERLKASENSESEYSRSEITLVGISKKSAEHFKRKFAKSNQVSRSVSSSVQVCPEVGKRNLLKVLKETLIEWKTEETLRFLYGQNYASVCLKPEASLVKEELDEDDIISDPDSHFPAWRESQNSLDESLPFRGSGTAIKPLPSYENLKKETEKLNLRIREFYRGRYVLGEETTKSQDSEEHDSTFPLIDSSSQNQIRKRIVLEKLSKVLPGLLVPLQITLGDIYTQLKNLVRTFRLTNRNIIHKPAEWTLIAMVLLSLLTPILGIQKHSQEGMVFTRFLDTLLEELHLKNEDLESLTIIFRTSCLPE

SEQ ID NO: 18217 - protein, 136 aa, Homo sapiens
MARTKQTARKSTGGKAPRKQLATKAARKSAPATGGVKKPHRYRPGTVALREIRRYQKSTELLIRKLPFQRLVREIAQEFKTDLRFQSSAVMALQEAREAYLVGLFEDTNLCAIHAKRVTIMPKDIQLVSRIRGERA

SEQ ID NO: 18218 - protein, 148 aa, Homo sapiens
MKVRKCSTPEEIKKRKKAVIFCLSADKKCIIVEEGKEILVGDVGVTITDPFKHFVGMLPEKDCRYALYDASFETKESRKEELMFFLWAPELAPLKSKMIYASSKDAIKKKFQGIKHECQANGPEDLNRACIAEKLGGSLIVAFEGCPV

SEQ ID NO: 18219 - protein, 109 aa, Homo sapiens
MSHAAEPARDGVEASAEGPRAVFVLLEERRPADSAQLLSLNSLLPESGIVADIELENVLDPDSFYELKSQPLPLRSRGLQDPCHVVIFFIEGLAAAAANAGPGAGAGEA

SEQ ID NO: 18220 - protein, 488 aa, Homo sapiens
MNGALDHSDQPDPDAIKMFVGQIPRSWSEKELKELFEPYGAVYQINVLRDRSQNPPQSKGCCFVTFYTRKAALEAQNALHNIKTLPGMHHPIQMKPADSEKSNAVEDRKLFIGMVSKKCNENDIRVMFSPFGQIEECRILRGPDGLSRGCAFVTFSTRAMAQNAIKAMHQSQTMEGCSSPIVVKFADTQKDKEQRRLQQQLAQQMQQLNTATWGNLTGLGGLTPQYLALLQQATSSSNLGAFSGIQQMAGMNALQLQNLATLAAAAAAAQTSATSTNANPLSTTSSALGALTSPVAASTPNSTAGAAMNSLTSLGTLQGLAGATVGLNNINALAGTINSMAALNGGLGATGLTNGTAGTMDALTQAYSGIQQYAAAALPTLYSQSLLQQQSAAGSQKEGPEGANLFIYHLPQEFGDQDILQMFMPFGNVISAKVFIDKQTNLSKCFGFVSYDNPVSAQAAIQAMNGFQIGMKRLKVQLKRSKNDSKPY

SEQ ID NO: 18221 - protein, 96 aa, Homo sapiens
MIIMVIIFLVLLFWENEVNDEAVMSTLEHLHVDYPQNDVPVPARRDYTTSEMETFPLLLLSLGLVLAEASESTMKIIKEEFTDEEMQYDMAKSGQE

SEQ ID NO: 18222 - protein, 181 aa, Homo sapiens
MPGKRGLGWWWARLPLCLLLSLYGPWMPSSLGKPKGHPHMNSIRIDGDITLGGLFPVHGRGSEGKPCGELKKEKGIHRLEAMLFALDRINNDPDLLPNITLGARILDTCSRDTHALEQSLTFVQALIEKDGTEVRCGSGGPPIITKPERVVGVIGASGSSVSIMVANILRLFKGACASPSR

SEQ ID NO: 18223 - protein, 532 aa, Homo sapiens
MDGIVTEVAVGVKRGSDELLSGSVLSSPNSNMSSMVVTANGNDSKKFKGEDKMDGAPSRVLHIRKLPGEVTETEVIALGLPFGKVTNILMLKGKNQAFLELATEEAAITMVNYYSAVTPHLRNQPIYIQYSNHKELKTDNTLNQRAQAVLQAVTAVQTANTPLSGTTVSESAVTPAQSPVLRIIIDNMYYPVTLDVLHQIFSKFGAVLKIITFTKNNQFQALLQYGDPVNAQQAKLALDGQNIYNACCTLRIDFSKLVNLNVKYNNDKSRDYTRPDLPSGDGQPALDPAIAAAFAKETSLLAVPGALSPLAIPNAAAAAAAAAAGRVGMPGVSAGGNTVLLVSNLNEEMVTPQSLFTLFGVYGDVQRVKILYNKKDSALIQMADGNQSQLAMNHLNGQKMYGKIIRVTLSKHQTVQLPREGLDDQGLTKDFGNSPLHRFKKPGSKNFQNIFPPSATLHLSNIPPSVAEEDLRTLFANTGGTVKAFKFFQRDHKMALLQMATVEEAIQALIDLHNYNLGENHHLRVSFSKSTI

SEQ ID NO: 18224 - protein, 82 aa, Homo sapiens
MKLLAATVLLLTICSLEGALVRRQAKEPCVESLVSQYFQTVTDYGKDLMEKVKSPELQAEAKSYFENFLSYFVELGTQPATQ

SEQ ID NO: 18225 - protein, 31 aa, Homo sapiens
MVMGLGVLLLVFVLGLGLTPPTLAQDNSRHL

SEQ ID NO: 18226 - protein, 72 aa, Homo sapiens
MKLLAATVLLLTICSLEGLATKGLKRKIIPSLKPRKPIQRSGWIPFWGGGRELGWVLAEVWQEARIHCCGPS

SEQ ID NO: 18227 - protein, 56 aa, Homo sapiens
METRPRLGATCLLGFSFLLLVISSDGHNGLGKGFGDHIHWRTLEDGKKEAAARIHV

SEQ ID NO: 18228 - protein, 365 aa, Homo sapiens
MWLLLTMASLISVLGTTHGLFGKLHPGSPEVTMNISQMITYWGYPNEEYEVVTEDGYILEVNRIPYGKKNSGNTDAGYDVWLGNSRGNTWARRNLYYSPDSVEFWAFSFDEMAKYDLPATIDFIVKKTGQKQLHYVGHSQGTTIGFIAFSTNPSLAKRIKTFYALAPVATVKYTKSLINKLRFVPQSLFKFIFGDKIFYPHNFFDQFLATEVCSREMLNLLCSNALFIICGFDSKNFNTSRLDVYLSHNPAGTSVQNMFHWTQAVKSGKFQAYDWGSPVQNRMHYDQSQPPYYNVTAMNVPIAVWNGGKDLLADPQDVGLLLPKLPNLIYHKEIPFYNHLDFIWAMDAPQEVYNDIVSMISEDKK

SEQ ID NO: 18229 - protein, 86 aa, Homo sapiens
MCSTMSAPTCLAHLPPCFLLLALVLVPSDASGQSSRNDWQVLQPEGPMLVAEGETLLLRCMVVGSCTDGMIKWVKGAHWNLPLCEV

SEQ ID NO: 18230 - protein, 578 aa, Homo sapiens
MLLLINVILTLWVSCANGQEVKPCDFPEIQHGGLYYKSLRRLYFPAAAGQSYSYYCDQNFVTPSGSYWDYIHCTQDGWSPTVPCLRTCSKSDVEIENGFISESSSIYILNEETQYNCKPGYATAEGNSSGSITCLQNGWSTQPICIKFCDMPVFENSRAKSNGMWFKLHDTLDYECYDGYESSYGNTTDSIVCGEDGWSHLPTCYNSSENCGPPPPISNGDTTSFPQKVYLPWSRVEYQCQSYYELQGSKYVTCSNGDWSEPPRCISMKPCEFPEIQHGHLYYENTRRPYFPVATGQSYSYYCDQNFVTPSGSYWDYIHCTQDGWLPTVPCLRTCSKSDIEIENGFISESSSIYILNKEIQYKCKPGYATADGNSSGSITCLQNGWSAQPICIKFCDMPVFENSRAKSNGMRFKLHDTLDYECYDGYEISYGNTTGSIVCGEDGWSHFPTCYNSSEKCGPPPPISNGDTTSFLLKVYVPQSRVEYQCQSYYELQGSNYVTCSNGEWSEPPRCIHPCIITEENMNKNNIQLKGKSDIKYYAKTGDTIEFMCKLGYNANTSVLSFQAVCREGIVEYPRCE

SEQ ID NO: 18231 - protein, 47 aa, Homo sapiens
MGTRLLPALFLVLLVLGFGEGISLQLLGVSKDSRPEPVREDIPARCR

SEQ ID NO: 18232 - protein, 50 aa, Homo sapiens
MKNTSWIRKNWLLVAGISFIGVHLGTYFLQRSAKQSVKFQSQSKQKSIEE

SEQ ID NO: 18233 - protein, 89 aa, Homo sapiens
MSDRKAVIKNADMSEDMQQDAVDCATQAMEKYNIEKDIAAYIKKEFDKKYNPTWHCIVGRNFGSYVTHETKHFIYFYLGQVAILLFKSG

SEQ ID NO: 18234 - protein, 776 aa, Homo sapiens
MEIGWMHNRRQRQVLVFFVLLSLSGAGAELGSYSVVEETERGSFVANLGKDLGLGLTEMSTRKARIISQGNKQHLQLKAQTGDLLINEKLDREELCGPTEPCILHFQVLMENPLEIFQAELRVIDINDHSPMFTEKEMILKIPENSPLGTEFPLNHALDLDVGSNNVQNYKISPSSHFRVLIHEFRDGRKYPELVLDKELDREEEPQLRLTLTALDGGSPPRSGTAQVRIEVVDINDNAPEFEQPIYKVQIPENSPLGSLVATVSARDLDGGANGKISYTLFQPSEDISKTLEVNPMTGEVRLRKQVDFEMVTSYEVRIKATDGGGLSGKCTLLLQVVDVNDNPPQVTMSALTSPIPENSPEIVVAVFSVSDPDSGNNGKTISSIQEDLPFLLKPSVKNFYTLVTERALDREARAEYNITLTVTDMGTPRLKTEHNITVQISDVNDNAPTFTQTSYTLFVRENNSPALHIGSVSATDRDSGTNAQVTYSLLPPQDPHLPLASLVSINADNGHLFALRSLDYEALQAFEFRVGATDRGSPALSREALVRVLVLDANDNSPFVLYPLQNGSAPCTELVPRAAEPGYLVTKVVAVDGDSGQNAWLSYQLLKATEPGLFGVWAHNGEVRTARLLSERDAAKQRLVVLVKDNGEPPRSATATLHVLLVDGFSQPFLPLPEAAPGQTQANSLTVYLVVALASVSSLFLFSVLLFVAVRLCRRSRAASVGRCSMPEGPFPGRLVDVSGTGTLSQSYQYEVCLTGGSETSEFKFLKPIIPNFSP

SEQ ID NO: 18235 - protein, 27 aa, Homo sapiens
MKLLAATVLLLTICSLEGLTLKSQRSS

SEQ ID NO: 18236 - protein, 1121 aa, Homo sapiens
MDALEDYVWPRATSELILLPVTGLECVGDRLLAGEGPDVLVYSLDFGGHLRMIKRVQNLLGHYLIHGFRVRPEPNGDLDLEAMVAVFGSKGLRVVKISWGQGHFWELWRSGLWNMSDWIWDARWLEGNIALALGHNSVVLYDPVVGCILQEVPCTDRCTLSSACLIGDAWKELTIVAGAVSNQLLVWYPATALADNKPVAPDRRISGHVGIIFSMSYLESKGLLATASEDRSVRIWKVGDLRVPGGRVQNIGHCFGHSARVWQVKLLENYLISAGEDCVCLVWSHEGEILQAFRGHQGRGIRAIAAHERQAWVITGGDDSGIRLWHLVGRGYRGLGVSALCFKSRSRPGTLKAVTLAGSWRLLAVTDTGALYLYDVEVKCWEQLLEDKHFQSYCLLEAAPGPEGFGLCAMANGEGRVKVVPINTPTAAVDQTLFPGKVHSLSWALRGYEELLLLASGPGGVVACLEISAAPSGKAIFVKERCRYLLPPSKQRWHTCSAFLPPGDFLVCGDRRGSVLLFPSRPGLLKDPGVGGKARAGAGAPVVGSGSSGGGNAFTGLGPVSTLPSLHGKQGVTSVTCHGGYVYTTGRDGAYYQLFVRDGQLQPVLRQKSCRGMNWLAGLRIVPDGSMVILGFHANEFVVWNPRSHEKLHIVNCGGGHRSWAFSDTEAAMAFAYLKDGDVMLYRALGGCTRPHVILREGLHGREITCVKRVGTITLGPEYGVPSFMQPDDLEPGSEGPDLTDIVITCSEDTTVCVLALPTTTGSAHALTAVCNHISSVRAVAVWGIGTPGGPQDPQPGLTAHVVSAGGRAEMHCFSIMVTPDPSTPSRLACHVMHLSSHRLDEYWDRQRNRHRMVKVDPETRYMSLAVCELDQPGLGPLVAAACSDGAVRLFLLQDSGRILQLLAETFHHKRCVLKVHSFTHEAPNQRRRLLLCSAATDGSLAFWDLTTMLDHDSTVLEPPVDPGLPYRLGTPSLTLQAHSCGINSLHTLPTREGHHLVASGSEDGSLHVFVLAVEMLQLEEAVGEAGLVPQLRVLEEYSVPCAHAAHVTGLKILSPSIMVSASIDQRLTFWRLGHGEPTFMNSTVFHVPDVADMDCWPVSPEFGHRCALGGQGLEVYNWYD

SEQ ID NO: 18237 - protein, 44 aa, Homo sapiens
NKKLSEQLQQKIETILSKSLLLCYLTTLLIHEDSYHGPPESCFL

SEQ ID NO: 18238 - protein, 462 aa, Homo sapiens
AVILWFQLALCFGPAQLTGGFDDLQVCADPGIPENGFRTPSGGVFFEGSVARFHCQDGFKLKGATKRLCLKHFNGTLGWIPSDNSICVQEDCRIPQIEDAEIHNKTYRHGEKLIITCHEGFKIRYPDLHNMVSLCRDDGTWNNLPICQGCLRPLASSNGYVNISELQTSFPVGTVISYRCFPGFKLDGSAYLECLQNLIWSSSPPRCLALEAQVCPLPPMVSHGDFVCHPRPCERYNHGTVVEFYCDPGYSLTSDYKYITCQYGEWFPSYQVYCIKSEQTWPSTHETLLTTWKIVAFTATSVLLVLLLVILARMFQTKFKAHFPPRGPPRSSSSDPDFVVVDGVPVMLPSYDEAVSGGLSALGPGYMASVGQGCPLPVDDQSPPAYPGSGDTDTGPGESETCDSVSGSSELLQSLYSPPRCQESTHPASDNPDIIASTAEEVASTSPGIDIADEIPLMEEDP

SEQ ID NO: 18239 - protein, 431 aa, Homo sapiens
MSYTGFVQGSETTLQSTYSDTSAQPTCDYGYGTWNSGTNRGYEGYGYGYGYGQDNTTNYGINQRLDMVPHLETDMMQGGVYGSGGERYDSYESCDSRAVLSERDLYRSGYDYSELDPEMEMAYEGQYDAYRDQFRMRGNDTFGPRAQGWARDARSGRPMASGYGRMWEDPMGARGQCMSGASRLPSLFSQNIIPEYGMFQGMRGGGAFPGGSRFGFGFGNGMKQMRRTWKTWTTADFRTKKKKRKQGGSPDEPDSKATRTDCSDNSDSDNDEGTEGEATEGLEGTEAVEKGSRVDGEDEEGKEDGREEGKEDPEKGALTTQDENGQTKRKLQAGKKSQDKQKKRQRDRMVERAPALALASSASDSCSCWTFLSLAGARPLGSPDKADPVAQIRTSGRGSSLCVLCANTGPSMRTRWPAILTASSTRNTLST

SEQ ID NO: 18240 - protein, 14 aa, Homo sapiens
MCWGSSIFMLFSPL

SEQ ID NO: 18241 - protein, 139 aa, Homo sapiens
MAIDSGFRNSGITVGKRGKTMLAVRSTHGLEVPLSHKGKLMVTEEYIDFLLNVANQKMEENKKRIERFYNCLQHALERETMTNLHPKIKEKNNSSYIHKKKRNPEKTRAQCITKESDEELENDDDDDLGINVTIFPEDY

SEQ ID NO: 18242 - protein, 264 aa, Homo sapiens
MAPASRLLALWALAAVALPGSGAEGDGGWRPGGPGAVAEEERCTVERRADLTYAEFVQQYAFVRPVILQGLTDNSRFRALCSRDRLLASFGDRVVRLSTANTYSYHKVDLPFQEYVEQLLHPQDPTSLGNDTLYFFGDNNFTEWASLFRHYSPPPFGLLGTAPAYSFGIAGAGSGVPFHWHGPGYSEVIYGRKRWFLYPPEKTPEFHPNKTTLAWLRDTYPALPPSARPLECTIRAGEVLYFPDRWWHATLNLDTSVFISTFLG

SEQ ID NO: 18243 - protein, 1405 aa, Homo sapiens
MRGFLARPFLSTNQHLAQWGSPLPQGKGLVQLPSQHTRHSRPFHELCSKEENSATVPKLISLVVSSETIDFSNKTMDSRRDWEREKRILEGKLQLPKALARTQRARDEGRAWTSRWLQRRRSPESCEAPLSAPLWGPQRGLPGREPLRSRSASAIALRTIGHILALLLRLLHLGLGSGGCREDVPPSGRGKKEEKMKKHRRALALVSCLFLCSLVWLPSWRVCCKESSSASASSYYSQDDNCALENEDVQFQKKNTESKKLSPPVVETLPTVDLHEESSNAVVDSETVENISSSSTSEITPISKLDEIEKSGTIPIAKPSETEQSETDCDVGEALDASAPIEQPSFVSPPDSLVGQHIENVSSSHGKGKITKSEFESKVSASEQGGGDPKSALNASDNLKNESSDYTKPGDIDPTSVASPKDPEDIPTFDEWKKKVMEVEKEKSQSMHASSNGGSHATKKVQKNRNNYASVECGAKILAANPEAKSTSAILIENMDLYMLNPCSTKIWFVIELCEPIQVKQLDIANYELFSSTPKDFLVSISDRYPTNKWIKLGTFHGRDERNVQSFPLDEQMYAKYVKVELLSHFGSEHFCPLSLIRVFGTSMVEEYEEIADSQYHSERQELFDEDYDYPLDYNTGEDKSSKNLLGSATNAILNMVNIAANILGAKTEDLTEGNKSISENATATAAPKMPESTPVSTPVPSPEYVTTEVHTHDMEPSTPDTPKESPIVQLVQEEEEEASPSTVTLLGSGEQEDESSPWFESETQIFCSELTTICCISSFSEYIYKWCSVRVALYRQRSRTALSKGKDYLVLAQPPLLLPAESVDVSVLQPLSGELENTNIEREAETVVLGDLSSSMHQDDLVNHTVDAVELEPSHSQTLSQSLLLDITPEINPLPKIEVSESVEYEAGHIPSPVIPQESSVEIDNETEQKSESFSSIEKPSITYETNKVNELMDNIIKEDVNSMQIFTKLSETIVPPINTATVPDNEDGEAKMNIADTAKQTLISVVDSSSLPEVKEEEQSPEDALLRGLQRTATDFYAELQNSTDLGYANGNLVHGSNQKESVFMRLNNRIKALEVNMSLSGRYLEELSQRYRKQMEEMQKAFNKTIVKLQNTSRIAEEQDQRQTEAIQLLQAQLTNMTQLVSNLSATVAELKREVSDRQSYLVISLVLCVVLGLMLCMQRCRNTSQFDGDYISKLPKSNQYPSPKRCFSSYDDMNLKRRTSFPLMRSKSLQLTGKEVDPNDLYIVEPLKFSPEKKKKRCKYKIEKIETIKPEEPLHPIANGDIKGRKPFTNQRDFSNMGEVYHSSYKGPPSEGSSETSSQSEESYFCGISACTSLCNGQSQKTKTEKRALKRRRSKVQDQGKLIKTLIQTKSGSLPSLHDIIKGNKEITVGTFGVTAVSGHI

SEQ ID NO: 18244 - protein, 1267 aa, Homo sapiens; identical to SEQ ID NO: 10463

SEQ ID NO: 18245 - protein, 253 aa, Homo sapiens
MWSHLNRLLFWSIFSSVTCRKAVLDCEAMKTNDPVTSPVLNIMVIQTETDRHITLHCLSVNGSLPINYTFFENHVAISPAISKYDREPAEFNLTKKNPGEEEEYRCEAKNRLPNYATYSHPVTMPSTGGDSCPFCLKLLLPGLLLLLVVIILILAFWVLPKYKTRKAMRNNVPRDRGDTAMEVGIYANILEKQAKEESVPEVGSRPCVSTAQDEAKHSQELQYATPVFQEVAPREQEACDSYKSGYVYSELNF

SEQ ID NO: 18246 - protein, 641 aa, Homo sapiens
MDGLQASAGPLRRGRPKRRRKPQPHSGSVLALPLRSRKIRKQLRSVVSRMAALRTQTLPSENSEESRVESTADDLGDALPGGAAVAAVPDAARREPYGHLGPAELLEASPAARSLQTPSARLVPASAPPARLVEVPAAPVRVVETSALLCTAQHLAAVQSSGAPATASGPQVDNTGGEPAWDSPLRRVLAELNRIPSSRRRAARLFEWLIAPMPPDHFYRRLWEREAVLVRRQDHTYYQGLFSTADLDSMLRNEEVQFGQHLDAARYINGRRETLNPPGRALPAAAWSLYQAGCSLRLLCPQAFSTTVWQFLAVLQEQFGSMAGSNVYLTPPNSQGFAPHYDDIEAFVLQLEGRKLWRVYRPRVPTEELALTSSPNFSQDDLGEPVLQTVLEPGDLLYFPRGFIHQAECQDGVHSLHLTLSTYQRNTWGDFLEAILPLAVQAAMEENVEFRRGLPRDFMDYMGAQHSDSKDPRRTAFMEKVRVLVARLGHFAPVDAVADQRAKDFIHDSLPPVLTDRERALSVYGLPIRWEAGEPVNVGAQLTTETEVHMLQDGIARLVGEGGHLFLYYTVENSRVYHLEEPKCLEIYPQQADAMELLLGSYPEFVRVGDLPCDSVEDQLSLATTLYDKGLLLTKMPLALN

SEQ ID NO: 18247 - protein, 126 aa, Homo sapiens
MPDPAKSAPAPKKGSKKAVTKAQKKDGKKRKRSRKESYSIYVYKVLKQVHPDTGISSKAMGIMNSFVNDIFERIAGEASRLAHYNKRSTITSREIQTAVRLLLPGELAKHAVSEGTKAVTKYTSSK

SEQ ID NO: 18248 - protein, 146 aa, Homo sapiens
MDSEGGSLLLDEDSEVFKMLQENREGRAAPRQSSSFRLLQEALEAEERGGTPAFLPSSLSPQSSLPASRALATPPKLHTCEKCSTSIANQAVRIQEGRYRHPGCYTCADCGLNLKMRGHFWVGDELYCEKHARQRYSAPATLSSRA

SEQ ID NO: 18249 - protein, 486 aa, Homo sapiens
MLFPTSAQESSRGLPDANDLCLGLQSLSLTGWDRPWSTQDSDSSAQSSTHSVLSMLHNPLGNVLGKPPLSFLPLDPLGSDLVDKFPAPSVRGSRLDTRPILDSRSSSPSDSDTSGFSSGSDHLSDLISSLRISPPLPFLSLSGGGPRDPLKMGVGSRMDQEQAALAAVTPSPTSASKRWPGASVWPSWDLLEAPKDPFSIEREARLHRQAAAVNEATCTWSGQLPPRNYKNPIYSCKVFLGGVPWDITEAGLVNTFRVFGSLSVEWPGKDGKHPRCPPKGYVYLVFELEKSVRSLLQACSHDPLSPDGLSEYYFKMSSRRMRCKEVQVIPWVLADSNFVRSPSQRLDPSRTVFVGALHGMLNAEALAAILNDLFGGVVYAGIDTDKHKYPIGSGRVTFNNQRSYLKAVSAAFVEIKTTKFTKKVQIDPYLEDSLCHICSSQPGPFFCRDQVCFKYFCRSCWHWRHSMEGLRHHSPLMRNQKNRDSS

SEQ ID NO: 18250 - protein, 866 aa, Homo sapiens
MEGAGPRGAGPARRRGAGGPPSPLLPSLLLLLLLWMLPDTVAPQELNPRGRNVCRAPGSQVPTCCAGWRQQGDECGIAVCEGNSTCSENEVCVRPGECRCRHGYFGANCDTKCPRQFWGPDCKELCSCHPHGQCEDVTGQCTCHARRWGARCEHACQCQHGTCHPRSGACRCEPGWWGAQCASACYCSATSRCDPQTGACLCHAGWWGRSCNNQCACNSSPCEQQSGRCQCRERTFGARCDRYCQCFRGRCHPVDGTCACEPGYRGKYCREPCPAGFYGLGCRRRCGQCKGQQPCTVAEGRCLTCEPGWNGTKCDQPCATGFYGEGCSHRCPPCRDGHACNHVTGKCTRCNAGWIGDRCETKCSNGTYGEDCAFVCADCGSGHCDFQSGRCLCSPGVHGPHCNVTCPPGLHGADCAQACSCHEDTCDPVTGACHLETNQRKGVMGAGALLVLLVCLLLSLLGCCCACRGKDPTRRELSLGRKKAPHRLCGRFSRISMKLPRIPLRRQKLPKVVVAHHDLDNTLNCSFLEPPSGLEQPSPSWSSRASFSSFDTTDEGPVYCVPHEEAPAESRDPEVPTVPAEAPAPSPVPLTTPASAEEAIPLPASSDSERSASSVEGPGGALYARVARREARPARARGEIGGLSLSPSPERRKPPPPDPATKPKVSWIHGKHSAAAAGRAPSPPPPGSEAAPSPSKRKRTPSDKSAHTVEHGSPRTRDPTPRPPGLPEEATALAAPSPPRARARGRGPGLLEPTDAGGPPRSAPEAASMLAAELRGKTRSLGRAEVALGAQGPREKPAPPQKAKRSVPPASPARAPPATETPGPEKAATDLPAPETPRKKTPIQKPPRKKSREAAGELGRAGAPTL

SEQ ID NO: 18251 - protein, 303 aa, Homo sapiens [sequence omitted]

SEQ ID NO: 18252 - protein, 124 aa, Homo sapiens
MLSPDLPDSAWNTRLLCRVMLCLLGAGSVAAGVIQSPRHLIKEKRETATLKCYPIPRHDTVYWYQQGPGQDPQFLISFYEKMQSDKGSIPDRFSAQQFSDYHSELNMSSLELGDSALYFCASSL

SEQ ID NO: 18253 - protein, 537 aa, Homo sapiens
MAAQCVTKVALNVSCANLLDKDIGSKSDPLCVLFLNTSGQQWYEVERTERIKNCLNPQFSKTFIIDYYFEVVQKLKFGVYDIDNKTIELSDDDFLGECECTLGQIVSSKKLTRPLVMKTGRPAGKGSITISAEEIKDNRVVLFEMEARKLDNKDLFGKSDPYLEFHKQTSDGNWLMVHRTEVVKNNLNPVWRPFKISLNSLCYGDMDKTIKVECYDYDNDGSHDLIGTFQTTMTKLKEASRSSPVEFECINEKKRQKKKSYKNSGVISVKQCEITVECTFLDYIMGGCQLNFTVGVDFTGSNGDPRSPDSLHYISPNGVNEYLTALWSVGLVIQDYDADKMFPAFGFGAQIPPQWQVSHEFPMNFNPSNPYCNGIQGIVEAYRSCLPQIKLYGPTNFSPIINHVARFAAAATQQQTASQYFVLLIITDGVITDLDETRQAIVNASRLPMSIIIVGVGGADFSAMEFLDGDGGSLRSPLGEVAIRDIVQFVPFRQFQNAPKEALAQCVLAEIPQQVVGYFNTYKLLPPKNPATKQQKQ

SEQ ID NO: 18254 - protein, 185 aa, Homo sapiens
MASHRLLLLCLAGLVFVSEAGPTGTGESKCPLMVKVLDAVRGSPAINVAVHVFRKAADDTWEPFASGKTSESGELHGLTTEEEFVEGIYKVEIDTKSYWKALGISPFHEHAEVSIQTFESFETDGCHGNRIQTCSSWSELQTSGFHQNVDVVFTANDSGPRRYTIAALLSPYSYSTTAVVTNPKE

SEQ ID NO: 18255 - protein, 194 aa, Homo sapiens
MAEKFDCHYCRDPLQGKKYVQKDGHHCCLKCFDKFCANTCVECRKPIGADSKEVHYKNRFWHDTCFRCAKCLHPLANETFVAKDNKILCNKCTTREDSPKCKGCFKAIVAGDQNVEYKGTVWHKDCFTCSNCKQVIGTGSFFPKGEDFYCVTCHETKFAKHCVKCNKGLVKAPVWWPMKDNPGTTTASTAKNAP

SEQ ID NO: 18256 - protein, 216 aa, Homo sapiens
MVQKTSMSRGPYPPSQEIPMEVFDPSPQGKYSKRKGRFKRSDGSTSSDTTSNSFVRQGSAESYTSRPSDSDVSLEEDREALRKEAERQALAQLEKAKTKPVAFAVRTNVGYNPSPGDEVPVQGVAITFEPKDFLHIKEKYNNDWWIGRLVKEGCEVGFIPSPVKLDSLRLLQEQKLRQNRLGSSKSGDNSSSSLGDVVTGTRRPTPPASDRACAPL

SEQ ID NO: 18257 - protein, 46 aa, Homo sapiens
MAGPGWTLLLLLLLLLLLGSMAGYGPQKKLNLSHKKLLRKPKFEGW

SEQ ID NO: 18258 - protein, 1568 aa, Homo sapiens
MAGVGAAALSLLLHLGALALAAGAEGGAVPREPPGQQTTAHSSVLAGNSQEQWHPLREWLGRLEAAVMELREQNKDLQTRVRQLESCECHPASPQCWGLGRAWPEGARWEPDACTACVCQDGAAHCGPQAHLPHCRGCSQNGQTYGNGETFSPDACTTCRCLTGAVQCQGPSCSELNCLESCTPPGECCPICRPGCDYEGQLYEEGVTFLSSSNPCLQCTCLRSRVRCMALKCPPSPCPEPVLRPGHCCPTCQGCTEGGSHWEHGQEWTTPGDPCRICRCLEGHIQCRQRECASLCPYPARPLPGTCCPVCDGCFLNGREHRSGEPVGSGDPCSHCRCANGSVQCEPLPCPPVPCRHPGKIPGQCCPVCDGCEYQGHQYQSQETFRLQERGLCVRCSCQAGEVSCEEQECPVTPCALPASGRQLCPACELDGEEFAEGVQWEPDGRPCTACVCQDGVPKCGAVLCPPAPCQHPTQPPGACCPSCDSCTYHSQVYANGQNFTDADSPCHACHCQDGTVTCSLVDCPPTTCARPQSGPGQCCPRCPDCILEEEVFVDGESFSHPRDPCQECRCQEGHAHCQPRPCPRAPCAHPLPGTCCPNDCSGCAFGGKEYPSGADFPHPSDPCRLCRCLSGNVQCLARRCVPLPCPEPVLLPGECCPQCPAAPAPAGCPRPGAAHARHQEYFSPPGDPCRRCLCLDGSVSCQRLPCPPAPCAHPRQGPCCPSCDGCLYQGKEFASGERFPSPTAACHLCLCWEGSVSCEPKACAPALCPFPARGDCCPDCDGCEYLGESYLSNQEFPDPREPCNLCTCLGGFVTCGRRPCEPPGCSHPLIPSGHCCPTCQGCRYHGVTTASGETLPDPLDPTCSLCTCQEGSMRCQKKPCPPALCPHPSPGPCFCPVCHSCLSQGREHQDGEEFEGPAGSCEWCRCQAGQVSCVRLQCPPLPCKLQVTERGSCCPRCRGCLAHGEEHPEGSRWVPPDSACSSCVCHEGVVTCARIQCISSCAQPRQGPHDCCPQCSDCEHEGRKYEPGESFQPGADPCEVCICEPQPEGPPSLRCHRRQCPSLVGCPPSQLLPPGPQHCCPTCAEALSNCSEGLLGSELAPPDPCYTCQCQDLTWLCIHQACPELSCPLSERHTPPGSCCPVCRAPTQSCVHQGREVASGERWTVDTCTSCSCMAGTVRCQSQRCSPLSCGPDKAPALSPGSCCPRCLPRPASCMAFGDPHYRTFDGRLLHFQGSCSYVLAKDCHSGDFSVHVTNDDRGRSGVAWTQEVAVLLGDMAVRLLQDGAVTVDGHPVALPFLQEPLLYVELRGHTVILHAQPGLQVLWDGQSQVEVSVPGSYQGRTCGLCGNFNGFAQDDLQGPEGLLLPSEAAFGNSWQVSEGLWPGRPCSAGREVDPCRAAGYRARREANARCGVLKSSPFSRCHAVVPPEPFFAACVYDLCACGPGSSADACLCDALEAYASHCRQAGVTPTWRGPTLCVVGCPLERGFVFDECGPPCPRTCFNQHIPLGELAAHCVRPCVPGCQCPAGLVEHEAHCIPPEACPQVLLTGDQPLGARPSPSREPQETP

SEQ ID NO: 18259 - protein, 116 aa, Homo sapiens
MTPLLTLILVVLMGLPLAQALDCHVCAYNGDNCFNPMRCPAMVAYCMTTRTYYTPTRMKVSKSCVPRCFETVYDGYSKHASTTSCCQYDLCNGTGLATPATLALAPILLATLWGLL

SEQ ID NO: 18260 - protein, 198 aa, Homo sapiens
MSSRGHSTLPRTLMAPRMISEGDIGGIAQITSSLFLGRGSVASNRHLLQARGITCIVNATIEIPNFNWPQFEYVKVPLADMPHAPIGLYFDTVADKIHSVSRKHGATLVHCAAGVSRSATLCIAYLMKFHNVCLLEAYNWVKARRPVIRPNVGFWRQLIDYERQLFGKSTVKMVQTPYGIVPDVYEKESRHLMPYWGI

SEQ ID NO: 18261 - protein, 315 aa, Homo sapiens [sequence omitted]

SEQ ID NO: 18262 - protein, 417 aa, Homo sapiens
MDRETRALADSHFRGLGVDVPGVGQAPGRVAFVSEPGAFSYADFVRGFLLPNLPCVFSSAFTQGWGSRRRWVTPAGRPDFDHLLRTYGDVVVPVANCGVQEYNSNPKEHMTLRDYITYWKEYIQAGYSSPRGCLYLKDWHLCRDFPVEDVFTLPVYFSSDWLNEFWDALDVDDYRFVYAGPAGSWSPFHADIFRSFSWSVNVCGRKKWLLFPPGQEEALRDRHGNLPYDVTSPALCDTHLHPRNQLAGPPLEITQEAGEMVFVPSGWHHQVHNLDDTISINHNWVNGFNLANMWRFLQQELCAVQEEVSEWRDSMPDWHHHCQVIMRSCSGINFEEFYHFLKVIAEKRLLVLREAAAEDGAGLGFEQAAFDVGRITEVLASLVAHPDFQRVDTSAFSPQPKELLQQLREAVDAAAAP

SEQ ID NO: 18263 - protein, 115 aa, Homo sapiens
MVSRLLSLVSLCLLGAKHIEAGVTQFPSHSVIEKGQTVTLRCDPISGHDNLYWYRRVMGKEIKFLLHFVKESKQDESGMPNNRFLAERTGGTYSTLKVQPAELEDSGVYFCASSQ

SEQ ID NO: 18264 - protein, 169 aa, Homo sapiens
MAAPVRRTLLGVAGGWRRFERLWAGSLSSRSLALAAAPSSNGSPWRLLGALCLQRPPVVSKPLTPLQEEMASLLQQIEIERSLYSDHELRALDENQRLAKKKADLHDEEDEQDILLAQDLEDMWEQKFLQFKLGARITGCDPFRPARRKGKGVFGFPNKRQLLGPCFVF

SEQ ID NO: 18265 - protein, 256 aa, Homo sapiens
MACAEFSFHVPSLEELAGVMQKGLKDNFADVQVSVVDCPDLTKEPFTFPVKGICGKTRIAEVGGVPYLLPLVNQKKVYDLNKIAKEIKLPGAFILGAGAGPFQTLGFNSEVIEVKAKRRTGPLNFVTCMRETLEKHYGNKPIGMGGTFIIQKGKVKSHIMPAEFSSCPLNSDEEVNKWLHFYEMKAPLVCLPVFVSRDPGFDLRLEHTHFFSRHGEGGHYHYDTTPDIVEYLGYFLPAEFLYRIDQPKETHSIGRD

SEQ ID NO: 18266 - protein, 1260 aa, Homo sapiens
MGSVTGAVLKTLLLLSTQNWNRVEAGNSYDCDDPLVSALPQASFSSSSELSSSHGPGFARLNRRDGAGGWSPLVSNKYQWLQIDLGERMEVTAVATQGGYGSSNWVTSYLLMFSDSGWNWKQYRQEDSIWGFSGNANADSVVYYRLQPSIKARFLRFIPLEWNPKGRIGMRIEVFGCAYRSEVVDLDGKSSLLYRFDQKSLSPIKDIISLKFKTMQSDGILLHREGPNGDHITLQLRRARLFLLINSGEAKLPSTSTLVNLTLGSLLDDQHWHSVLIQRLGKQVNFTVDEHRHHFHARGEFNLMNLDYEGNVSFSCSQPQSMPVTFLSSRSYLALPDFSGEEEVSATFQFRTWNKAGLLLFSELQLISGGILLFLSDGKLKSNLYQPGKLPSDITAGVELNDGQWHSVSLSAKKNHLSVAVDGQMASAAPLLGPEQIYSGGTYYFGGCPDKSFGSKCKSPLGGFQGCMRLISISGKVVDLISVQQGSLGNFSDLQIDSCGISDRCLPNYCEHGGECSQSWSTFHCNCTNTGYRGATCHNSIYEQSCEAYKHRGNTSGFYYIDSDGSGPLEPFLLYCNMTETAWTIIQHNGSDLTRVRNTNPENPYAGFFEYVASMEQLQATINRAEHCEQEFTYYCKKSRLVNKQDGTPLSWWVGRTNETQTYWGGSSPDLQKCTCGLEGNCIDSQYYCNCDADRNEWTNDTGLLAYKEHLPVTKIVITDTGRLHSEAAYKLGPLLCQGDRSFWNSASFDTEASYLHFPTFHGELSADVSFFFKTTASSGVFLENLGIADFIRIELRSPTVVTFSFDVGNGPFEISVQSPTHFNDNQWHHVRVERNMKEASLQVDQLTPKTQPAPADGHVLLQLNSQLFVGGTATRQRGFLGCIRSLQLNGMTLDLEERAQVTPEVQPGCRGHCSSYGKLCRNGGKCRERPIGFFCDCTFSAYTGPFCSNEISAYFGSGSSVIYNFQENYLLSKNSSSHAASFHGDMKLSREMIKFSFRTTRTPSLLLFVSSFYKEYLSVIIAKNGSLQIRYKLNKYQEPDVVNFDFKNMADGQLHHIMINREEGVVFIEIDDNRRRQVHLSSGTEFSAVKSLVLGRILEHSDVDQDTALAGAQGFTGCLSAVQLSHVAPLKAALHPSHPDPVTVTGHVTESSCMAQPGTDATSRERTHSFADHSGTIDDREPLANAIKSDSAVIGGLIAVVIFILLCITAIAVRIYQQKRLYKRSEAKRSENVDSAEAVLKSELNIQNAVNENQKEYFF

SEQ ID NO: 18267 - protein, 443 aa, Homo sapiens
MDRLGSFSNDPSDKPPCRGCSSYLMEPYIKCAECGPPPFFLCLQCFTRGFEYKKHQSDHTYEIMTSDFPVLDPSWTAQEEMALLEAVMDCGFGNWQDVANQMCTKTKEECEKHYMKHFINNPLFASTLLNLKQAEEAKTADTAIPFHSTDDPPRPTFDSLLSRDMAGYMPARADFIEEFDNYAEWDLRDIDFVEDDSDILHALKMAVVDIYHSRLKERQRRKKIIRDHGLINLRKFQLMERRYPKEVQDLYETMRRFARIVGPVEHDKFIESHALEFELRREIKRLQEYRTAGITNFCSARTYDHLKKTREEERLKRTMLSEVLQYIQDSSACQQWLRRQADIDSGLSPSIPMASNSGRRSAPPLNLTGLPGTEKLNEKEKELCQMVRLVPGAYLEYKSALLNECNKQGGLRLAQARALIKIDVNKTRKIYDFLIREGYITKG

SEQ ID NO: 18268 - protein, 575 aa, Homo sapiens
MDPEDEGVAGVMSVGPPAARLQEPVTFRDVAVDFTQEEWGQLDPTQRILYRDVMLETFGHLLSIGPELPKPEVISQLEQGTELWVAERGTTQGCHPAWEPRSESQASRKEEGLPEEEPSHVTGREGFPTDAPYPTTLGKDRECQSQSLALKEQNNLKQLEFGLKEAPVQDQGYKTLRLRENCVLSSSPNPFPEISRGEYLYTYDSQITDSEHNSSLVSQQTGSPGKQPGENSDCHRDSSQAIPITELTKSQVQDKPYKCTDCGKSFNHNAHLTVHKRIHTGERPYMCKECGKAFSQNSSLVQHERIHTGDKPYKCAECGKSFCHSTHLTVHRRIHTGEKPYECQDCGRAFNQNSSLGRHKRTHTGEKPYTCSVCGKSFSRTTCLFLHLRTHTEERPYECNHCGKGFRHSSSLAQHQRKHAGEKPFECRQRLIFEQTPALTKHEWTEALGCDPPLSQDERTHRSDRPFKCNQCGKCFIQSSHLIRHQITHTREEQPHGRSRRREQSSSRNSHLVQHQHPNSRKSSAGGAKAGQPESRALALFDIQKIMQEKNPVHVIGVEEPSVGASMLFDIREST

SEQ ID NO: 18269 - protein, 1364 aa, Homo sapiens
MLSFVDTRTLLLLAVTLCLATCQFFETVRKGPAGDRGPRGERGPPGPPGRDGEDGPTGPPGPPGPPGPPGLGGNFAAQYDGKGVGLGPGPMGLMGPRGPPGAAGAPGPQGFQGPAGEPGEPGQTGPAGARGPAGPPGKAGEDGHPGKPGRPGERGVVGPQGARGFPGTPGLPGFKGIRGHNGLDGLKGQPGAPGVKGEPGAPGENGTPGQTGARGLPGERGRVGAPGPAGARGSDGSVGPVGPAGPIGSAGPPGFPGAPGPKGEIGAVGNAGPAGPAGPRGEVGLPGLSGPVGPPGNPGANGLTGAKGAAGLPGVAGAPGLPGPRGIPGPVGAAGATGARGLVGEPGPAGSKGESGNKGEPGSAGPQGPPGPSGEEGKRGPNGEAGSAGPPGPPGLRGSPGSRGLPGADGRAGVMGPPGSRGASGPAGVRGPNGDAGRPGEPGLMGPRGLPGSPGNIGPAGKEGPVGLPGIDGRPGPIGPAGARGEPGNIGFPGPKGPTGDPGKNGDKGHAGLAGARGAPGPDGNNGAQGPPGPQGVQGGKGEQGPPGPPGFQGLPGPSGPAGEVGKPGERGLHGEFGLPGPAGPRGERGPPGESGAAGPTGPIGSRGPSGPPGPDGNKGEPGVVGAVGTAGPSGPSGLPGERGAAGIPGGKGEKGEPGLRGEIGNPGRDGARGAPGAVGAPGPAGATGDRGEAGAAGPAGPAGPRGSPGERGEVGPAGPNGFAGPAGAAGQPGAKGERGAKGPKGENGVVGPTGPVGAAGPAGPNGPPGPAGSRGDGGPPGMTGFPGAAGRTGPPGPSGISGPPGPPGPAGKEGLRGPRGDQGPVGRTGEVGAVGPPGFAGEKGPSGEAGTAGPPGTPGPQGLLGAPGILGLPGSRGERGLPGVAGAVGEPGPLGIAGPPGARGPPGAVGSPGVNGAPGEAGRDGNPGNDGPPGRDGQPGHKGERGYPGNIGPVGAAGAPGPHGPVGPAGKHGNRGETGPSGPVGPAGAVGPRGPSGPQGIRGDKGEPGEKGPRGLPGLKGHNGLQGLPGIAGHHGDQGAPGSVGPAGPRGPAGPSGPAGKDGRTGHPGTVGPAGIRGPQGHQGPAGPPGPPGPPGPPGVSGGGYDFGYDGDFYRADQPRSAPSLRPKDYEVDATLKSLNNQIETLLTPEGSRKNPARTCRDLRLSHPEWSSGYYWIDPNQGCTMDAIKVYCDFSTGETCIRAQPENIPAKNWYRSSKDKKHVWLGETINAGSQFEYNVEGVTSKEMATQLAFMRLLANYASQNITYHCKNSIAYMDEETGNLKKAVILQGSNDVELVAEGNSRFTYTVLVDGCSKKTNEWGKTIIEYKTNKPSRLPFLDIAPLDIGGADQEFFVDIGPVCFK

SEQ ID NO: 18270 - protein, 134 aa, Homo sapiens
MALSVLRLALLLLAVTFAGSARSGPGERGPPEKSGFGSQTGGGPCPAPGGLGDGTRAPVTGGSPEDLPGKVVIILKSFEMDPADGAVYRKEDGETTFTGRLDKLHFPFFSFPVFLYMRFVNTHFLRAGMEDSHV

SEQ ID NO: 18271 - protein, 285 aa, Homo sapiens
MSSRRDTDSDTQDANDSSCKSSERSLPDCTPHPNSISIDAGPRQAPKIAQIKRNLSYGDNSDPALEASSLPPPDPWLETSSSSPAEPAQPGACRRDGYWFLKLLQAETERLEGWCCQMDKETKENNLSEEVLGKVLSAVGSAQLLMSQKFQQFRGLCEQNLNPDANPRPTAQDLAGFWDLLQLSIEDISMKFDELYHLKANSWQLVETPEKRKEEKKPPPPVPKKPAKSKPAVSRDKASDASDKQRQEARKRLLAAKRAASVRQNSATESADSIEIYVPEAQTRL

SEQ ID NO: 18272 - protein, 352 aa, Homo sapiens
MLAVGCALLAALLAAPGAALAPRRCPAQEVARGVLTSLPGDSVTLTCPGVEPEDNATVHWVLRKPAAGSHPSRWAGMGRRLLLRSVQLHDSGNYSCYRAGRPAGTVHLLVDVPPEEPQLSCFRKSPLSNVVCEWGPRSTPSLTTKAVLLVRKFQNSPAEDFQEPCQYSQESQKFSCQLAVPEGDSSFYIVSMCVASSVGSKFSKTQTFQGCGILQPDPPANITVTAVARNPRWLSVTWQDPHSWNSSFYRLRFELRYRAERSKTFTTWMVKDLQHHCVIHDAWSGLRHVVQLRAQEEFGQGEWSEWSPEAMGTPWTDRLSPRCPGWSTAVQSQLTATSASWVQAILPPQPPK

SEQ ID NO: 18273 - protein, 194 aa, Homo sapiens
MDPELLSMVPRPVCAVLLLFPITEKYEVFRTEEEEKIKSQGQDVTSSVYFMKQTISNACGTIGLIHAIANNKDKMHFESGSTLKKFLEESVSMSPEERARYLENYDAIRVTHETSAHEGQTEAPSIDEKVDLHFIALVHVDGHLYELDGRKPFPINHGETSDETLLEDAIEVCKKFMERDPDELRFNAIALSAA

SEQ ID NO: 18274 - protein, 122 aa, Homo sapiens
MEASALTSSAVTSVAKVVRVASGSAVVLPLARIATVVIGGVVAMAAVPMVLSAMGFTAAGIASSSIAAKMMSAAAIANGGGVASGSLVATLQSLGATGLSGLTKFILGSIGSAIAAVIARFY

SEQ ID NO: 18275 - protein, 270 aa, Homo sapiens
MQRARPTLWAAALTLLVRCEPCDARALAQCAPPPAVCAELVREPGCGCCLTCALSEGQPCGIYTERCGSGLRCQPSPDEARPLQALLDGRGLCVNASAVSRLRAYLLPAPPAPGNASESEEDRSAGSVESPSVSSTHRVSDPKFHPLHSKIIIIKKGHAKDSQRYKVDYESQSTDTQNFSSESKRETEYGPCRREMEDTLNHLKFLNVLSPRGVHIPNCDKKGFYKKKQCRPSKGRKRGFCWCVDKYGQPLPGYTTKGKEDVHCYSMQSK

SEQ ID NO: 18276 - protein, 197 aa, Homo sapiens
MIIYRDLISHDEMFSDIYKIREIADGLCLEVEGKMVSRTEGNIDDSLIGGNASAEGPEGEGTESTVITGVDIVMNHHLQETSFTKEAYKKYIKDYMKSIKGKLEEQRPERVKPFMTGAAEQIKHILANFKNYQFFIGENMNPDGMVALLDYREDGVTPYMIFFKDGLEMEKCDAKERNPCAFCLSLWRPRLNWGIHL

SEQ ID NO: 18277 - protein, 761 aa, Homo sapiens [sequence omitted]

SEQ ID NO: 18278 - protein, 296 aa, Homo sapiens
MAGTWLLLLLALGCPALPTGVGGTPFPSLAPPIMLLVDGKQQMVVVCLVLDVAPPGLDSPIWFSAGNGSALDAFTYGPSPATDGTWTNLAHLSLPSEELASWEPLVCHTGPGAEGHSRSTQPMHLSGEASTARTCPQEPLRGGCGLLRAPERFLLAGTPGGALWLGVLRLLLFKLLLFDLLLTCSCLCDPAGPLPSPATTTRLRALGSHRLHPATETGGREATSSPRPQPRDRRWGDTPPGRKPGSPVWGEGSYLSSYPTCPAQAWCSRSALRAPSSSLGAFFAGDLPPPLQAGAA

SEQ ID NO: 18279 - protein, 292 aa, Homo sapiens
MRIAVICFCLLGITCAIPVKQADSGSSEEKQLYNKYPDAVATWLNPDPSQKQNLLAPQNAVSSEETNDFKQETLPSKSNESHDHMDDMDDEDDDSHQSDESHHSDESDELVTDFPTDLPATEVFTPVVPTVDTYDGRGDSVVYGLRSKSKKFRRPDIQYPDATDEDITSHMESEELNGAYKAIPVAQDLNAPSDWDSRGKDSYETSQLDDQSAETHSHKQSRLYKRKANDESNEHSDVIDSQELSKVSREFHSHEFHSHEDMLVVDPKSKEEDKHLKFRISHELDSASSEVN

SEQ ID NO: 18280 - protein, 848 aa, Homo sapiens [sequence omitted]

SEQ ID NO: 18281 - protein, 957 aa, Homo sapiens
MAQVAMSTLPVEDEESSESRMVVTFLMSALESMCKELAKSKAEVACIAVYETDVFVVGTERGRAFVNTRKDFQKDFVKYCVEEEEKAAEMHKMKSTTQANRMSVDAVEIETLRKTVEDYFCFCYGKALGKSTVVPVPYEKMLRDQSAVVVQGLPEGVAFKHPENYDLATLKWILENKAGISFIIKRPFLEPKKHVGGRVMVTDADRSILSPGGSCGPIKVKTEPTEDSGISLEMAAVTVKEESEDPDYYQYNIQGSHHSSEGNEGTEMEVPAEDDDYSPPSKRPKANELPQPPVPEPANAGKRKVREFNFEKWNARITDLRKQVEELFERKYAQAIKAKGPVTIPYPLFQSHVEDLYVEGLPEGIPFRRPSTYGIPRLERILLAKERIRFVIKKHELLNSTREDLQLDKPASGVKEEWYARITKLRKMVDQLFCKKFAEALGSTEAKAVPYQKFEAHPNDLYVEGLPENIPFRSPSWYGIPRLEKIIQVGNRIKFVIKRPELLTHSTTEVTQPRTNTPVKEDWNVRITKLRKQVEEIFNLKFAQALGLTEAVKVPYPVFESNPEFLYVEGLPEGIPFRSPTWFGIPRLERIVRGSNKIKFVVKKPELVISYLPPGMASKINTKALQSPKRPRSPGSNSKVPEIEVTVEGPNNNNPQTSAVRTPTQTNGSNVPFKPRGREFSFEAWNAKITDLKQKVENLFNEKCGEALGLKQAVKVPFALFESFPEDFYVEGLPEGVPFRRPSTFGIPRLEKILRNKAKIKFIIKKPEMFETAIKESTSSKSPPRKINSSPNVNTTASGVEDLNIIQVTIPDDDNERLSKVEKARQLREQVNDLFSRKFGEAIGMGFPVKVPYRKITINPGCVVVDGMPPGVSFKAPSYLEISSMRRILDSAEFIKFTVIRPFPGLVINNQLVDQSESEGPVIQESAEPSQLEVPATEEIKETDGSSQIKQEPDPTW

SEQ ID NO: 18282 - protein, 671 aa, Homo sapiens
MQFVSTRPQPQQLGIQGLGLDSGSWSWAQALPPEEVCHQEPALRGEMAEGMPPMQAQEWDMDARRPMPFQFPPFPDRAPVFPDRMMREPQLPTAEISLWTVVAAIQAVERKVDAQASQLLNLEGRTGTAEKKLADCEKTAVEFGNHMESKWAVLGTLLQEYGLLQRRLENLENLLRNRNFWVLRLPPGSKGEAPKVPVTFVDIAVYFSEDEWKNLDEWQKELYNNLVKENYKTLMSLDAEGSVPKPDAPVQAEPREEPCVWEQRHPEEREIPMDPEAGAEPLVPAQDASSQVKREDTLCVRGQRGLEERAIPTESITDSPISAQDLLSRIKQEEHQCVWDQQDLADRDIPTDPNSESLISAHDILSWIKQEEQPYPWGPRDSMDGELGLDSGPSDSLLMVKNPPPAPPQPQPQPQPPQPQLQSQPQPQSLPPIAVAENPGGPPSRGLLDDGFQVLPGERGSGEAPPGGDRSTGGGGGDGGGGGGGAEAGTGAGGGCGSCCPGGLRRSLLLHGARSKPYSCPECGKSFGVRKSLIIHHRSHTKERPYECAECEKSFNCHSGLIRHQMTHRGERPYKCSECEKTYSRKEHLQNHQRLHTGERPFQCALCGKSFIRKQNLLKHQRIHTGERPYTCGECGKSFRYKESLKDHLRVHSGGPGPGAPRQLPPPPERD

SEQ ID NO: 18283 - protein, 560 aa, Homo sapiens
MAGPQPLALQLEQLLNPRPSEADPEADPEEATAARVIDRFDEGEDGEGDFLVVGSIRKLASASLLDTDKRYCGKTTSRKAWNEDHWEQTLPGSSDEEISDEEGSGDEDSEGLGLEEYDEDDLGAAEEQECGDHRESKKSRSHSAKTPGFSVQSISDFEKFTKGMDDLGSSEEEEDEESGMEEGDDAEDSQGESEEDRAGDRNSEDDGVVMTFSSVKVSEEVEKGRAVKNQIALWDQLLEGRIKLQKALLTTNQLPQPDVFPLFKDKGGPEFSSALKNSHKALKALLRSLVGLQEELLFQYPDTRYLVDGTKPNAGSEEISSEDDELVEEKKQQRRRVPAKRKLEMEDYPSFMAKRFADFTVYRNRTLQKWHDKTKLASGKLGKGFGAFERSILTQIDHILMDKERLLRRTQTKRSVYRVLGKPEPAAQPVPESLPGEPEILPQAPANAHLKDLDEEIFDDDDFYHQLLRELIERKTSSLDPNDQVAMGRQWLAIQKLRSKIHKKVDRKASKGRKLRFHVLSKLLSFMAPIDHTTMNDDARTELYRSLFGQLHPPDEGHGD

SEQ ID NO: 18284 - protein, 167 aa, Homo sapiens
MLFNLLLQALFLIQGMFVSLFPIHLVGQLVSLLHMSLLYSLYCFEYRWFNKGIEMHQRLSNIERNWPYYFGFGLPLAFLTAMQSSYIISGCLFSILFPLFIISANEAKTPGKAYLFQLRLFSLVVFLSNRLFHKTVYLQSALSSSTSAEKFPSPHPSPAKLKATAGH

SEQ ID NO: 18285 - protein, 214 aa, Homo sapiens
MAVLSAPGLRGFRILGLRSSVGPAVQARGVHQSVATDGPSSTQPALPKARAVAPKPSSRGEYVVAKLDDLVNWARRSSLWPMTFGLACCAVEMMHMAAPRYDMDRFGVVFRASPRQSDVMIVAGTLTNKMAPALRKPPSRPQNAGAALRGLHGELRQRRRLLPLFLLGGEGLRPHRARGHLHPRLPTAEALLYGILQLQRKIKRERRLQIWYRR

SEQ ID NO: 18286 - protein, 126 aa, Homo sapiens
MPEPVKSAPVPKKGSKKAINKAQKKDGKKRKRSRKESYSVYVYKVLKQVHPDTGISSKAMGIMNSFVNDIFERIAGEASRLAHYNKRSTITSREIQTAVRLLLPGELAKHAVSEGTKAVTKYTSSK

SEQ ID NO: 18287 - protein, 92 aa, Homo sapiens
MQVSTAALAVLLCTMALCNQFSASLAADTPTACCFSYTSRQIPQNFIADYFETSSQCSKPGVIFLTKRSRQVCADPSEEWVQKYVSDLELSA

SEQ ID NO: 18288 - protein, 37 aa, Homo sapiens
MPGRTWELCLLLLLGLGLGSQEALPPPCERTSPADLH

SEQ ID NO: 18289 - protein, 1338 aa, Homo sapiens [sequence omitted]

SEQ ID NO: 18290 - protein, 1606 aa, Homo sapiens [sequence omitted]

SEQ ID NO: 18291 - protein, 244 aa, Homo sapiens
MLGIWTLLPLVLTSVARLSSKSVNAQVTDINSKGLELRKTVTTVETQNLEGLHHDGQFCHKPCPPGERKARDCTVNGDEPDCVPCQEGKEYTDKAHFSSKCRRCRLCDEGHGLEVEINCTRTQNTKCRCKPNFFCNSTVCEHCDPCTKCEHGIIKECTLTSNTKCKEEGSRSNLGWLCLLLLPIPLIVWVKRKEVQKTCRKHRKENQGSHESPTLNPMESCSIAQAGVQGCNHGSLQPQSPGLK

SEQ ID NO: 18292 - protein, 814 aa, Homo sapiens
MLERKYGGRLVTRHAARTIQTAFRQYQMNKNFERLRSSMSENRMSRRIVLSNMRMQFSFEGPEKVHSSYFEGKQVSVTNDGSQLGALVSPECGDLSEPTTLKSPAPSSDFADAITELEDAFSRQVKSLAESIDDALNCRSLHTEEAPALDAARARDTEPQTALHGMDHRKLDEMTASYSDVTLYIDEEELSPPLPLSQAGDRPSSTESDLRLRAGGAAPDYWALAHKEDKADTDTSCRSTPSLERQEQRLRVEHLPLLTIEPPSDSSVDLSDRSERGSLKRQSAYERSLGGQQGSPKHGPHSGAPKSLPREEPELRPRPPRPLDSHLAINGSANRQSKSESDYSDGDNDSINSTSNSNDTINCSSESSSRDSLREQTLSKQTYHKEARNSWDSPAFSNDVIRKRHYRIGLNLFNKKPEKGVQYLIERGFVPDTPVGVAHFLLQRKGLSRQMIGEFLGNRQKQFNRDVLDCVVDEMDFSTMELDEALRKFQAHIRVQGEAQKVERLIEAFSQRYCICNPGVVRQFRNPDTIFILAFAIILLNTDMYSPNVKPERKMKLEDFIKNLRGVDDGEDIPREMLMGIYERIRKRELKTNEDHVSQVQKVEKLIVGKKPIGSLHPGLGCVLSLPHRRLVCYCRLFEVPDPNKPQKLGLHQREIFLFNDLLVVTKIFQKKKNSVTYSFRQSFSLYGMQVLLFENQYYPNGIRLTSSVPGADIKVLINFNAPNPQDRKKFTDDLRESIAEVQEMEKHRIESELEKQKGVVRPSMSQCSSLKKESGNGTLSRACLDDSYASGEGLKRSALSSSLRDLSEAGVHH

SEQ ID NO: 18293 - protein, 351 aa, Homo sapiens
MTRLLDAEWWRRSEAGHLRRQVAAVLFFPEGTCSNKKALLKFKPGAFIAGVPVQPVLIRYPNSLDTTSWAWRGPGVLKVLWLTASQPCSIVDVEFLPVYHPSPEESRDPTLYANNVQRVMAQALGIPATECEFVGSLPVIVVGRLKVALEPQLWELGKVLRKAGLSAGYVDAGAEPGRSRMISQEEFARQLQLSDPQTVAGAFGYFQQDTKGLVDFRDVALALAALDGGRSLEELTRLAFELFAEEQAEGPNRLLYKDGFSTILHLLLGSPHPAATALHAELCQAGSSQGLSLCQFQNFSLHDPLYGKLFSTYLRPPHTSRGTSQTPNASSPGNPTALANGTVQAPKQKGD

SEQ ID NO: 18294 - protein, 570 aa, Homo sapiens
MQLEYETQIKKMLCSKDSLGLKEELTDEDREKVAVHEGINSGTAMSRGLYQPATIFMGRQMSAILSMRDFSTEHKSPQPTKNFSIPDPHSHRQTAQSSNVTDSCVVQTSNDTQCLNKSDNIDGKASLQIGEKMPVTASVLSEEEQTHCLEIGSNTRHGKSNLSEGKKSAELNSPLRERLSPENRTTDLKCDSSSGSEGEILTREHIEVEEKRASPPVSPIPVSEYCESENKWSQEKHSPWEGVSDHLAHREPKSQKPFRKMQEEEEESWSTSSDLTISISEDDLILESPEPQPNPGGKMEGEDGIEALKLIHAEQERVALSTEKNCILQTLSSPDSEKESSTNAPTREPGQTPDSDVPRAQVGQHVATLKEHDNSVKEEATALLRKALTEECGRRSAIHSSESSCSLPSILNDNSGIKEAKPAVWLNSVPTREQEVSSGCGDKSKKENVAADIPITETEAYQLLKKATLQDNTNQTENRFQKTDASVSHLSGLNIGSGAFETKTANKIASEASFSSSEGSPLSRHENKKKPVINLKSNALWDESDDSNSEIEAALRPRNHNTDDSDDFYD

SEQ ID NO: 18295 - protein, 120 aa, Homo sapiens
MKVSEAALSLLVLILIITSASRSQPKVPEWVNTPSTCCLKYYEKVLPRRLVVGYRKALNCHLPAIIFVTKRNREVCTNPNDDWVQEYIKDPNLPLLPTRNLSTVKIITAKNGQPQLLNSQ

SEQ ID NO: 18296 - protein, 791 aa, Homo sapiens
MDVCVRLALWLLWGLLLHQGQSLSHSHSEKATGTSSGANSEESTAAEFCRIDKPLCHSEDEKLSFEAVRNIHKLMDDDANGDVDVEESDEFLREDLNYHDPTVKHSTFHGEDKLISVEDLWKAWKSSEVYNWTVDEVVQWLITYVELPQYEETFRKLQLSGHAMPRLAVTNTTMTGTVLKMTDRSHRQKLQLKALDTVLFGPPLLTRHNHLKDFMLVVSIVIGVGGCWFAYIQNRYSKEHMKKMMKDLEGLHRAEQSLHDLQERLHKAQEEHRTVEVEKVHLEKKLRDEINLAKQEAQRLKELREGTENERSRQKYAEEELEQVREALRKAEKELESHSSWYAPEALQKWLQLTHEVEVQYYNIKKQNAEKQLLVAKEGAEKIKKKRNTLFGTFHVAHSSSLDDVDHKILTAKQALSEVTAALRERLHRWQQIEILCGFQIVNNPGIHSLVAALNIDPSWMGSTRPNPAHFIMTDDVDDMDEEIVSPLSMQSPSLQSSVRQRLTEPQHGLGSQRLVEGEAGHFLTSRVSLRRMRSLSSGQSFSSEGYGTSSPSASAAASCSSSITTITTTTTTTTTFTTVHVHPVYYHHSTSYFLQMEPYPDTPPSDSTAVMPGHSESLGDLTHSDSESSLHMSDRQRVAPKPPQMSRAADEALNAMTSNGSHRLIEGVHPGSLVEKLPDSPALAKKALLALNHGLDKAHSLMELSPSAPPGGSPHLDSSRSHSPSSPDPDTPSPVGDSRALQASRNTRIPHLAGKKAVAEEDNGSIGEETDSSPGRKKFPLKIFKKPLKK

SEQ ID NO: 18297 - protein, 332 aa, Homo sapiens
MGAQFSKTAAKGEAAAERPGEAAVASSPSKANGQENGHVKVNGDASPAAAESGAKEELQANGSAPAADKEEPAAAGSGAASPSAAEKGEPAAAAAPEAGASPVEKEAPAEGEAAEPGSPTAAEGEAASAASSTSSPKAEDGATPSPSNETPKKKKKRFSFKKSFKLSGFSFKKNKKEAGEGGEAEAPAAEGGKDEAAGGAAAAAAEAGAASGEQAAAPGEEAAAGEEGAAGGDPQEAKPQEAAVAPEKPPASDETKAAEEPSKVEEKKAEEAGASAAACEAPSAAGPGAPPEQEAAPAEEPAAAAASSACAAPSQEAQPECSPEAPPAEAAE

SEQ ID NO: 18298 - protein, 425 aa, Homo sapiens
MGGGDLNLKKSWHPQTLRNVEKVWKAEQKHEAERKKIEELQRELREERAREEMQRYAEDVGAVKKKEEKLDWMYQGPGGMVNRDEYLLGRPIDKYVFEKMEEKEAGCSSETGLLPGSIFAPSGANSLLDMASKIREDPLFIIRKKEEEKKREVLNNPVKMKKIKELLQMSLEKKEKKKKKEKKKKHKKHKHRSSSSDRSSSEDEHSAGRSQKKMANSSPVLSKVPGYGLQVRNSDRNQGLQGPLTAEQKRGHGMKNHSRSRSSSHSPPRHASKKSTREAGSRDRRSRSLGRRSRSPRPSKLHNSKVNRRETGQTRSPSPKKEVYQRRHAPGYTRKLSAEELERKRQEMMENAKWREEERLNILKRHAKDEEREQRLEKLDSRDGKFIHRMKLESASTSSLEDRVKRNIYSLQRTSVALEKNFMKR

SEQ ID NO: 18299 - protein, 1539 aa, Homo sapiens
MFRQFYLWTCLASGIILGSLFEICLGQYDDDCKLARGGPPATIVAIDEESRNGTILVDNMLIKGTAGGPDPTIELSLKDNVDYWVLMDPVKQMLFLNSTGRVLDRDPPMNIHSIVVQVQCINKKVGTIIYHEVRIVVRDRNDNSPTFKHESYYATVNELTPVGTTIFTGFSGDNGATDIDDGPNGQIEYVIQYNPDDPTSNDTFEIPLMLTGNIVLRKRLNYEDKTRYFVIIQANDRAQNLNERRTTTTTLTVDVLDGDDLGPMFLPCVLVPNTRDCRPLTYQAAIPELRTPEELNPIIVTPPIQAIDQDRNIQPPSDRPGILYSILVGTPEDYPRFFHMHPRTAELSLLEPVNRDFHQKFDLVIKAEQDNGHPLPAFAGLHIEILDENNQSPYFTMPSYQGYILESAPVGATISDSLNLTSPLRIVALDKDIEDTKDPELHLFLNDYTSVFTVTQTGITRYLTLLQPVDREEQQTYTFSITAFDGVQESEPVIVNIQVMDANDNTPTFPEISYDVYVYTDMRPGDSVIQLTAVDADEGSNGEITYEILVGAQGDFIINKTTGLITIAPGVEMIVGRTYALTVQAADNAPPAERRNSICTVYIEVLPPNNQSPPRFPQLMYSLEISEAMRVGAVLLNLQATDREGDSITYAIENGDPQRVFNLSETTGILTLGKALDRESTDRYILIITASDGRPDGTSTATVNIVVTDVNDNAPVFDPYLPRNLSVVEEEANAFVGQVKATDPDAGINGQVHYSLGNFNNLFRITSNGSIYTAVKLNREVRDYYELVVVATDGAVHPRHSTLTLAIKVLDIDDNSPVFTNSTYTVLVEENLPAGTTILQIEAKDVDLGANVSYRIRSPEVKHFFALHPFTGELSLLRSLDYEAFPDQEASITFLVEAFDIYGTMPPGIATVTVIVKDMNDYPPVFSKRIYKGMVAPDAVKGTPITTVYAEDADPPGLPASRVRYRVDDVQFPYPASIFEVEEDSGRVITRVNLNEEPTTIFKLVVVAFDDGEPVMSSSATVKILVLHPGEIPRFTQEEYRPPPVSELATKGTMVGVISAAAINQSIVYSIVSGNEEDTFGINNITGVIYVNGPLDYETRTSYVLRVQADSLEVVLANLRVPSKSNTAKVYIEIQDENNHPPVFQKKFYIGGVSEDARMFTSVLRVKATDKDTGNYSVMAYRLIIPPIKEGKEGFVVETYTGLIKTAMLFHNMRRSYFKFQVIATDDYGKGLSGKADVLVSVVNQLDMQVIVSNVPPTLVEKKIEDLTEILDRYVQEQIPGAKVVVESIGARRHGDAFSLEDYTKCDLTVYAIDPQTNRAIDRNELFKFLDGKLLDINKDFQPYYGEGGRILEIRTPEAVTSIKKRGESLGYTEGALLALAFIIILCCIPAILVVLVSYRQFKVRQAECTKTARIQAALPAAKPAVPAPAPVAAPPPPPPPPPGAHLYEELGDSSMHKNYPWSLELILARNMDKIITVMSMGMKCLNMGVAVDCYHQLDRRNMVRWLVKLRKNMRRKRKSQRKLKNQRLKLESLVRRKK

SEQ ID NO: 18300 - protein, 314 aa, Homo sapiens
MWGLVRLLLAWLGGWGCMGRLAAPARAWAGSREHPGPALLRTRRSWVWNQFFVIEEYAGPEPVLIGKLHSDVDRGEGRTKYLLTGEGAGTVFVIDEATGNIHVTKSLDREEKAQYVLLAQAVDRASNRPLEPPSEFIIKIITCVGALLALVVLFVALRRQKQEALMVLEEEDVRENIITYDDEGGGEEDTEAFDITALQNPDGAAPPAPGPPARRDVLPRARVSRQPRPPGPADVAQLLALRLREADEDPGVPPYDSVQVYGYEGRGSSCGSLSSLGSGSEAGGAPGPAEPLDDWGPLFRTLAELYGAKEPPAP

SEQ ID NO: 18301 - protein, 458 aa, Homo sapiens
MAGSGRLVLRPWIRELILGSETPSSPRAGQLLEVLQDAEAAVAGPSHAPDTSDVGATLLVSDGTHSVRCLVTREALDTSDWEEKEFGFRGTEGRLLLLQDCGVHVQVAEGGAPAEFYLQVDRFSLLPTEQPRLRVPGCNQDLDVQKKLYDCLEEHLSESTSSNAGLSLSQLLDEMREDQEHQGALVCLAESCLTLEGPCTAPPVTHWAASRCKATGEAVYTVPSSMLCISENDQLILSSLGPCQRTQGPELPPPDPALQDLSLTLIASPPSSPSSSGTPALPGHMSSEESGTSISLLPALSLAAPDPGQRSSSQPSPAICSAPATLTPRSPHASRTPSSPLQSCTPSLSPRSHVPSPHQALVTRPQKPSLEFKEFVGLPCKNRPPFPRTGATRGAQEPCSVWEPPKRHRDGSAFQYEYEPPCTSLCARVQAVRLPPQLMAWALHFLMDAQPGSEPTPM

SEQ ID NO: 18302 - protein, 162 aa, Homo sapiens
MWKVSALLFVLGSASLWVLAEGASTGQPEDDTETTGLEGGVAMPGAEDDVVTPGTSEDRYKSGLTTLVATSVNSVTGIRIEDLPTSESTVHAQEQSPSATASNVATSHSTEKVDGDTQTTVEKDGLSTVTLVGIIVGVLLAIGFIGAIIVVVMRKMSGRYSP

SEQ ID NO: 18303 - protein, 1443 aa, Homo sapiens
MYAVYKQAHPPTGLEFSMYCNFFNNSERNLVVAGTSQLYVYRLNRDAEALTKNDRSTEGKAHREKLELAASFSFFGNVMSMASVQLAGAKRDALLLSFKDAKLSVVEYDPGTHDLKTLSLHYFEEPELRDGFVQNVHTPRVRVDPDGRCAAMLVYGTRLVVLPFRRESLAEEHEGLVGEGQRSSFLPSYIIDVRALDEKLLNIIDLQFLHGYYEPTLLILFEPNQTWPGRVAVRQDTCSIVAISLNITQKVHPVIWSLTSLPFDCTQALAVPKPIGGVVVFAVNSLLYLNQSVPPYGVALNSLTTGTTAFPLRTQEGVRITLDCAQATFISYDKMVISLKGGEIYVLTLITDGMRSVRAFHFDKAAASVLTTSMVTMEPGYLFLGSRLGNSLLLKYTEKLQEPPASAVREAADKEEPPSKKKRVDATAGWSAAGKSVPQDEVDEIEVYGSEAQSGTQLATYSFEVCDSILNIGPCANAAVGEPAFLSEEFQNSPEPDLEIVVCSGHGKNGALSVLQKSIRPQVVTTFELPGCYDMWTVIAPVRKEEEDNPKGEGTEQEPSTTPEADDDGRRHGFLILSREDSTMILQTGQEIMELDTSGFATQGPTVFAGNIGDNRYIVQVSPLGIRLLEGVNQLHFIPVDLGAPIVQCAVADPYVVIMSAEGHVTMFLLKSDSYGGRHHRLALHKPPLHHQSKVITLCLYRDLSGMFTTESRLGGARDELGGRSGPEAEGLGSETSPTVDDEEEMLYGDSGSLFSPSKEEARRSSQPPADRDPAPFRAEPTHWCLLVRENGTMEIYQLPDWRLVFLVKNFPVGQRVLVDSSFGQPTTQGEARREEATRQGELPLVKEVLLVALGSRQSRPYLLVHVDQELLIYEAFPHDSQLGQGNLKVRFKKVPHNINFREKKPKPSKKKAEGGGAEEGAGARGRVARFRYFEDIYGYSGVFICGPSPHWLLVTGRGALRLHPMAIDGPVDSFAPFHNVNCPRGFLYFNRQGELRISVLPAYLSYDAPWPVRKIPLRCTAHYVAYHVESKVYAVATSTNTPCARIPRMTGEEKEFETIERDERYIHPQQEAFSIQLISPVSWEAIPNARIELQEWEHVTCMKTVSLRSEETVSGLKGYVAAGTCLMQGEEVTCRGRILIMDVIEVVPEPGQPLTKNKFKVLYEKEQKGPVTALCHCNGHLVSAIGQKIFLWSLRASELTGMAFIDTQLYIHQMISVKNFILAADVMKSISLLRYQEESKTLSLVSRDAKPLEVYSVDFMVDNAQLGFLVSDRDRNLMVYMYLPEAKESFGGMRLLRRADFHVGAHVNTFWRTPCRGATEGLSKKSVVWENKHITWFATLDGGIGLLLPMQEKTYRRLLMLQNALTTMLPHHAGLNPRAFRMLHVDRRTLQNAVRNVLDGELLNRYLYLSTMERSELAKKIGTTPDIILDDLLETDRVTAHF

SEQ ID NO: 18304 - protein, 170 aa, Homo sapiens
MASLLKVDQEVKLKVDSFRERITSEAEDLVANFFPKKLLELDSFLKEPILNIHDLTQLLIPRIEDGNNFGVSIQEETVAELRTVESEAASYLDQISRYYITRAKLVSKIAKYPHVEDYRRTVTEIDEKEYISLRLIISELRNQYVTLHDMILKNIEKIKRPRSSNAETLY

SEQ ID NO: 18305 - protein, 212 aa, Homo sapiens
MATLSFVFLLLGAVSWPPASASGQEFWPGQSAADILSGAASRRRYLLYDVNPPEGFNLRRDVYIRIASLLKTLLKTEEWVLVLPPWGRLYHWQSPDIHQVRIPWSEFFDLPSLNKNIPVIEYEQFIAGRRTACGVCFVVSQCSARDKESGGPFIDQVYVLQSYAEGWKEGTWEEKVDERPCIDQLLYSQDKHEYYRCLLRLLPLPQRMVLGL

SEQ ID NO: 18306 - protein, 96 aa, Homo sapiens
MPKVSGSRDTVSQLLSMLHQGQYQPRPSFRGNKYSRSYRYALQDMDKFSLKDSGRGDSEAGDSDYDLGRDSPIDRLLGEGFSDLFLTDGRIPAVQL

SEQ ID NO: 18307 - protein, 91 aa, Homo sapiens
MRGPGHPLLLGLLLVLGPSPEQRVEIVPRDLRMKDKFLKHLTGPLYFSPKCSKHFHRLYHNTRDCTIPAYYKRCARLLTRLAVSPVCMEDK

SEQ ID NO: 18308 - protein, 94 aa, Homo sapiens
MGPMGWMKCPLASTNKRFLINTIKNTLPSHKEQDHEQKEGDKEPAKSQAQKEENPKKHRSHPYKHSFRARGSASYSPPRKRSSQDKYEKRSNRR

SEQ ID NO: 18309 - protein, 119 aa, Homo sapiens
MTSSRLWFSLLLAAAFAGRATALWPWPQNFQTSDQRYVLYPNNFQFQYDVSSAAQPGCSVLDEAFQRYRDLLFGSGSWPRPYLTGLSLSFRLECSGVITAYSNLELQDSSSLPASLMSS

SEQ ID NO: 18310 - protein, 354 aa, Homo sapiens
MDDLMLSPDDIEQWFTEDPGPDEAPRMPEAAPPVAPAPAAPTPAAPAPAPSWPLSSSVPSQKTYQGSYGFRLGFLHSGTAKSVTCTYSPALNKMFCQLAKTCPVQLWVDSTPPPGTRVRAMAIYKQSQHMTEVVRRCPHHERCSDSDGLAPPQHLIRVEGNLRVEYLDDRNTFRHSVVVPYEPPEVGSDCTTIHYNYMCNSSCMGGMNRRPILTIITLEDSSGNLLGRNSFEVRVCACPGRDRRTEEENLRKKGEPHHELPPGSTKRALPNNTSSSPQPKKKPLDGEYFTLQIRGRERFEMFRELNEALELKDAQAGKEPGGSRAHSSHLKSKKGQSTSRHKKLMFKTEGPDSD

SEQ ID NO: 18311 - protein, 697 aa, Homo sapiens
MARLVAVCRDGEEEFPFERRQIPLYIDDTLTMVMEFPDNVLNLDGHQNNGAQLKQFIQRHGMLKQQDLSIAMVVTSREVLSALSQLVPCVGCRRSVERLFSQLVESGNPALEPLTVGPKGVLSVTRSCMTDAKKLYTLFYVHGSKLNDMIDAIPKSKKNKRCQLHSLDTHKPKPLGGCWMDVWELMSQECRDEVVLIDSSCLLETLETYLRKHRFCTDCKNKVLRAYNILIGELDCSKEKGYCAALYEGLRCCPHERHIHVCCETDFIAHLLGRAEPEFAGGRRERHAKTIDIAQEEVLTCLGIHLYERLHRIWQKLRAEEQTWQMLFYLGVDALRKSFEMTVEKVQGISRLEQLCEEFSEEERVRELKQEKKRQKRKNRRKNKCVCDIPTPLQTADEKEVSQEKETDFIENSSCKACGSTEDGNTCVEVIVTNENTSCTCPSSGNLLGSPKIKKGLSPHCNGSDCGYSSSMEGSETGSREGSDVACTEGICNHDEHGDDSCVHHCEDKEDDGDSCVECWANSEENDTKGKNKKKKKKSKILKCDEHIQKLGSCITDPGNRETSGNTMHTVFHRDKTKDTHPESCCSSEKGGQPLPWFEHRKNVPQFAEPTETLFGPDSGKGAKSLVELLDESECTSDEEIFISQDEIQSFMANNQSFYSNREQYRQHLKEKFNKYCRLNDHKRPICSGWLTTAGAN

SEQ ID NO: 18312 - protein, 468 aa, Homo sapiens
MAFPAGFGWAAATAAYQVEGGWDADGKGPCVWDTFTHQGGERVFKNQTGDVACGSYTLWEEDLKCIKQLGLTHYRFSLSWSRLLPDGTTGFINQKGIDYYNKIIDDLLKNGVTPIVTLYHFDLPQTLEDQGGWLSEAIIESFDKYAQFCFSTFGDRVKQWITINEANVLSVMSYDLGMFPPGIPHFGTGGYQAAHNLIKAHARSWHSYDSLFRKKQKGMVSLSLFAVWLEPADPNSVSDQEAAKRAITFHLDLFAKPIFIDGDYPEVVKSQIASMSQKQGYPSSRLPEFTEEEKKMIKGTADFFAVQYYTTRLIKYQENKKGELGILQDAEIEFFPDPSWKNVDWIYVVPWGVCKLLKYIKDTYNNPVIYITENGFPQSDPAPLDDTQRWEYFRQTFQELFKAIQLDKVNLQVYCAWSLLDNFEWNQGYSSRFGLFHVDFEDPARPRVPYTSAKEAKIIRNNGLEAHL

SEQ ID NO: 18313 - protein, 979 aa, Homo sapiens
MGTRLPLVLRQLRRPPQPPGPPRRLRVPCRASSGGGGGGGGGREGLLGQRRPQDGQARSSCSPGGRTPAARDSIVREVIQNSKEVLSLLQEKNPAFKPVLAIIQAGDDNLMQEINQNLAEEAGLNITHICLPPDSSEAEIIDEILKINEDTRVHGLALQISENLFSNKVLNALKPEKDVDGVTDINLGKLVRGDAHECFVSPVAKAVIELLEKSVGVNLDGKKILVVGAHGSLEAALQCLFQRKGSMTMSIQWKTRQLQSKLHEADIVVLGSPKPEEIPLTWIQPGTTVLNCSHDFLSGKVGCGSPRIHFGGLIEEDDVILLAAALRIQNMVSSGRRWLREQQHRRWRLHCLKLQPLSPVPSDIEISRGQTPKAVDVLAKEIGLLADEIEIYGKSKAKVRLSVLERLKDQADGKYVLVAGITPTPLGEGKSTVTIGLVQALTAHLNVNSFACLRQPSQGPTFGVKGGAAGGGYAQVIPMEEFNLHLTGDIHAITAANNLLAAAIDTRILHENTQTDKALYNRLVPLVNGVREFSEIQLARLKKLGINKTDPSTLTEEEVSKFARLDIDPSTITWQRVLDTNDRFLRKITIGQGNTEKGHYRQAQFDIAVASEIMAVLALTDSLADMKARLGRMVVASDKSGQPVTADDLGVTGALTVLMKDAIKPNLMQTLEGTPVFVHAGPFANIAHGNSSVLADKIALKLVGEEGFVVTEAGFGADIGMEKFFNIKCRASGLVPNVVVLVATVRALKMHGGGPSVTAGVPLKKEYTEENIQLVADGCCNLQKQIQITQLFGVPVVVALNVFKTDTRAEIDLVCELAKRAGAFDAVPCYHWSVGGKGSVDLARAVREAASKRSRFQFLYDVQVPIVDKIRTIAQAVYGAKDIELSPEAQAKIDRYTQQGFGNLPICMAKTHLSLSHQPDKKGVPRDFILPISDVRASIGAGFIYPLVGTMSTMPGLPTRPCFYDIDLDTETEQVKGLF

SEQ ID NO: 18314 - protein, 157 aa, Homo sapiens
MPGRSSSNSGSTGFISFSGVESALSSLKNFQACINSGMDTASSVALDLVESQTEVSSEYSMDKAMVEFATLDRQLNHYVKAVQSTINHVKEERPEKIPDLKLLVEKKFLALQSKNSDADFQNNEKFVQFKQQLKELKKQCKSTCFALVRLFEIRELT

SEQ ID NO: 18315 - protein, 923 aa, Homo sapiens
MGSGAGELGRAERLPVLFLFLLSLFCPALCEQIRYRIPEEMPKGSVVGNLATDLGFSVQELPTRKLRVSSEKPYFTVSAESGELLVSSRLDREEICGKKPACALEFEAVAENPLNFYHVNVEIEDINDHTPKFTQNSFELQISESAQPGTRFILEVAEDADIGLNSLQKYKLSLNPSFSLIIKEKQDGSKYPELALEKTLDREQQSYHRLVLTALDGGHPPLSGTTELRIQVTDANDNPPVFNRDVYRVSLRENVPPGTTVLQVSATDQDEGINSEITYSFYRTGQIFSLNSKSGEITTQKKLDFEETKEYSMVVEGRDGGGLVAQCTVEINIQDENDNSPEVTFHSLLEMILENAVPGTLIALIKIHDQDSGENGEVNCQLQGEVPFKIISSSKNSYKLVTDGTLDREQTPEYNVTITATDRGKPPLSSSISVILHIRDVNDNAPVFHQASYLVSVPENNPPGASIAQVCASDLDLGLNGQVSYSIMASDLEPLALASYVSMSAQSGVVFAQRAFDYEQLRTFELTLQARDQGSPALSANVSLRVLVGDRNDNAPRVLYPALGPDGSALFDMVPRAAEPGYLVTKVVAVDADSGHNAWLSYHVLQASEPGLFSLGLRTGEVRTARALGDRDAARQRLLVAVRDGGQPPLSATATLHLVFADSLQEVLPDITDRPVPSDPQAELQFYLVVALALISVLFLLAVILAVALRLRRSSSPAAWSCFQPGLCVKSGPVVPPNYSQGTLPYSYNLCVAHTGKTEFNFLKCSEQLSSGQDILCGDSSGALFPLCNSSESTSHPELQAPPNTDWRFSQAQRPGTSGSQNGDDTGTWPNNQFDTEMLQAMILASASEAADGSSTLGGGAGTMGLSARYGPQFTLQHVPDYRQNVYIPGSNATLTNAAGKRDGKAPAGGNGNKKKSGKKEKK

SEQ ID NO: 18316 - protein, 88 aa, Homo sapiens [sequence omitted]

SEQ ID NO: 18317 - protein, 592 aa, Homo sapiens
MAAAVAAALARLLAAFLLLAAQVACEYGMVHVVSQAGGPEGKDYCILYNPQWAHLPHDLSKASFLQLRNWTASLLCSAADLPARGFSNQIPLVARGNCTFYEKVRLAQGSGARGLLIVSRERLVPPGGNKTQYDEIGIPVALLSYKDMLDIFTRFGRTVRAALYAPKEPVLDYNMVIIFIMAVGTVAIGGYWAGSRDVKKRYMKHKRDDGPEKQEDEAVDVTPVMTCVFVVMCCSMLVLLYYFYDLLVYVVIGIFCLASATGLYSCLAPCVRRLPFGKCRIPNNSLPYFHKRPQARMLLLALFCVAVSVVWGVFRNEDQWAWVLQDALGIAFCLYMLKTIRLPTFKACTLLLLVLFLYDIFFVFITPFLTKSGSSIMVEVATGPSDSATREKLPMVLKVPRLNSSPLALCDRPFSLLGFGDILVPGLLVAYCHRFDIQVQSSRVYFVACTIAYGVGLLVTFVALALMQRGQPALLYLVPCTLVTSCAVALWRRELGVFWTGSGFAKVLPPSPWAPAPADGPQPPKDSATPLSPQPPSEEPATSPWPAEQSPKSRTSEEMGAGAPMREPGSPAESEGRDQAQPSPVTQPGASA

SEQ ID NO: 18318 - protein, 115 aa, Homo sapiens
MGTSLLCWMALCLLGADHADTGVSQNPRHKITKRGQNVTFRCDPISEHNRLYWYRQTLGQGPEFLTYFQNEAQLEKSRLLSDRFSAERPKGSFSTLEIQRTEQGDSAMYLCASSL

SEQ ID NO: 18319 - protein, 37 aa, Homo sapiens
MGRAMVARLGLGLLLLALLLPTQKMLRIPNLIDLKNM

SEQ ID NO: 18320 - protein, 102 aa, Homo sapiens
MLEHLSSLPTQMDYKGQKLAEQMFQGIILFSAIVGFIYGYVAEQFGWTVYIVMAGFAFSCLLTLPPWPIYRRHPLKWLPVQESSTDDKKPGERKIKRHAKNN

SEQ ID NO: 18321 - protein, 791 aa, Homo sapiens
MDASSDPYLPYDGGGDSIPLRELHKRGTHYTMTNGGSINSSTHLLDLLDEPIPGVGTYDDFHTIDWVREKCKDRERHRRINSKKKESAWEMTKSLYDAWSGWLVVTLTGLASGALAGLIDIAADWMTDLKEGICLSALWYNHEQCCWGSNETTFEERDKCPQWKTWAELIIGQAEGPGSYIMNYIMYIFWALSFAFLAVSLVKVFAPYACGSGIPEIKTILSGFIIRGYLGKWTLMIKTITLVLAVASGLSLGKEGPLVHVACCCGNIFSYLFPKYSTNEAKKREVLSAASAAGVSVAFGAPIGGVLFSLEEVSYYFPLKTLWRSFFAALVAAFVLRSINPFGNSRLVLFYVEYHTPWYLFELFPFILLGVFGGLWGAFFIRANIAWCRRRKSTKFGKYPVLEVIIVAAITAVIAFPNPYTRLNTSELIKELFTDCGPLESSSLCDYRNDMNASKIVDDIPDRPAGIGVYSAIWQLCLALIFKIIMTVFTFGIKVPSGLFIPSMAIGAIAGRIVGIAVEQLAYYHHDWFIFKEWCEVGADCITPGLYAMVGAAACLGGVTRMTVSLVVIVFELTGGLEYIVPLMAAVMTSKWVGDAFGREGIYEAHIRLNGYPFLDAKEEFTHTTLAADVMRPRRNDPPLAVLTQDNMTVDDIENMINETSYNGFPVIMSKESQRLVGFALRRDLTIAIESARKKQEGIVGSSRVCFAQHTPSLPAESPRPLKLRSILDMSPFTVTDHTPMEIVVDIFRKLGLRQCLVTHNGRLLGIITKKDILRHMAQTANQDPASIMFN

SEQ ID NO: 18322 - protein, 793 aa, Homo sapiens
MWIQVRTMDGRQTHTVDSLSRLTKVEELRRKIQELFHVEPGLQRLFYRGKQMEDGHTLFDYEVRLNDTIQLLVRQSLVLPHSTKERDSELSDTDSGCCLGQSESDKSSTHGEAAAETDSRPADEDMWDETELGLYKVNEYVDARDTNMGAWFEAQVVRVTRKAPSRDEPCSSTSRPALEEDVIYHVKYDDYPENGVVQMNSRDVRARARTIIKWQDLEVGQVVMLNYNPDNPKERGFWYDAEISRKRETRTARELYANVVLGDDSLNDCRIIFVDEVFKIERPGEGSPMVDNPMRRKSGPSCKHCKDDVNRLCRVCACHLCGGRQDPDKQLMCDECDMAFHIYCLDPPLSSVPSEDEWYCPECRNDASEVVLAGERLRESKKKAKMASATSSSQRDWGKGMACVGRTKECTIVPSNHYGPIPGIPVGTMWRFRVQVSESGVHRPHVAGIHGRSNDGAYSLVLAGGYEDDVDHGNFFTYTGSGGRDLSGNKRTAEQSCDQKLTNTNRALALNCFAPINDQEGAEAKDWRSGKPVRVVRNVKGGKNSKYAPAEGNRYDGIYKVVKYWPEKGKSGFLVWRYLLRRDDDEPGPWTKEGKDRIKKLGLTMQYPEGYLEALANREREKENSKREEEEQQEGGFASPRTGKGKWKRKSAGGGPSRAGSPRRTSKKTKVEPYSLTAQQSSLIREDKSNAKLWNEVLASLKDRPASGSPFQLFLSKVEETFQCICCQELVFRPITTVCQHNVCKDCLDRSFRAQVFSCPACRYDLGRSYAMQVNQPLQTVLNQLFPGYGNGR

SEQ ID NO: 18323 - protein, 647 aa, Homo sapiens [sequence omitted]

SEQ ID NO: 18324 - protein, 2812 aa, Homo sapiens
MVPPVWTLLLLVGAALFRKEKPPDQKLVVRSSRDNYVLTQCDFEDDAKPLCDWSQVSADDEDWVRASGPSPTGSTGAPGGYPNGEGSYLHMESNSFHRGGVARLLSPDLWEQGPLCVHFAHHMFGLSWGAQLRLLLLSGEEGRRPDVLWKHWNTQRPSWMLTTVTVPAGFTLPTRLMFEGTRGSTAYLDIALDALSIRRGSCNRVCMMQTCSFDIPNDLCDWTWIPTASGAKWTQKKGSSGKPGVGPDGDFSSPGSGCYMLLDPKNARPGQKAVLLSPVSLSSGCLSFSFHYILRGQSPGAALHIYASVLGSIRKHTLFSGQPGPNWQAVSVNYTAVGRIQFAVVGVFGKTPEPAVAVDATSIAPCGEGFPQCDFEDNAHPFCDWVQTSGDGGHWALGHKNGPVHGMGPAGGFPNAGGHYIYLEADEFSQAGQSVRLVSRPFCAPGDICVEFAYHMYGLGEGTMLELLLGSPAGSPPIPLWKRVGSQRPYWQNTSVTVPSGHQQPMQLIFKGIQGSNTASVVAMGFILINPGTCPVKVLPELPPVSPVSSTGPSETTGLTENPTISTKKPTVSIEKPSVTTEKPTVPKEKPTIPTEKPTISTEKPTIPSEKPNMPSEKPTIPSEKPTILTEKPTIPSEKPTIPSEKPTISTEKPTVPTEEPTTPTEETTTSMEEPVIPTEKPSIPTEKPSIPTEKPTISMEETIISTEKPTISPEKPTIPTEKPTIPTEKSTISPEKPTTPTEKPTIPTEKPTISPEKPTTPTEKPTISPEKLTIPTEKPTIPTEKPTIPTEKPTISTEEPTTPTEETTISTEKPSIPMEKPTLPTEETTTSVEETTISTEKLTIPMEKPTISTEKPTIPTEKPTISPEKLTIPTEKLTIPTEKPTIPIEETTISTEKLTIPTEKPTISPEKPTISTEKPTIPTEKPTIPTEETTISTEKLTIPTEKPTISPEKLTIPTEKPTISTEKPTIPTEKLTIPTEKPTIPTEKPTIPTEKLTALRPPHPSPTATGLAALVMSPHAPSTPMTSVILGTTTTSRSSTERCPPNARYESCACPASCKSPRPSCGPLCREGCVCNPGFLFSDNHCIQASSCNCFYNNDYYEPGAEWFSPNCTEHCRCWPGSRVECQISQCGTHTVCQLKNGQYGCHPYAGTATCLVYGDPHYVTFDGRHFGFMGKCTYILAQPCGNSTDPFFRVTAKNEEQGQEGVSCLSKVYVTLPESTVTLLKGRRTLVGGQQVTLPAIPSKGVFLGASGRFVELQTEFGLRVRWDGDQQLYVTVSSTYSGKLCGLCGNYDGNSDNDHLKLDGSPAGDKEELGNSWQTDQDEDQECQKYQVVNSPSCDSSLQSSMSGPGFCGRLVDTHGPFETCLLHVKAASFFDSCMLDMCGFQGLQHLLCTHMSTMTTTCQDAGHAVKPWREPHFCPMACPPNSKYSLCAKPCPDTCHSGFSGMFCSDRCVEACECNPGFVLSGLECIPRSQCGCLHPAGSYFKVGERWYKPGCKELCVCESNNRIRCQPWRCRAQEFCGQQDGIYGCHAQGAATCTASGDPHYLTFDGALHHFMGTCTYVLTRPCWSRSQDSYFVVSATNENRGGILEVSYIKAVHVTVFDLSISLLRGCKVMLNGHRVALPVWLAQGRVTIRLSSNLVLLYTNFGLQVRYDGSHLVEVTVPSSYGGQLCGLCGNYNNNSLDDNLRPDRKLAGDSMQLGAAWKLPESSEPGCFLVGGKPSSCQENSMADAWNKNCAILINPQGPFSQCHQVVPPQSSFASCVHGQCGTKGDTTALCRSLQAYASLCAQAGQAPAWRNRTFCPMRCPPGSSYSPCSSPCPDTCSSINNPRDCPKALPCAESCECQKGHILSGTSCVPLGQCGCTDPAGSYHPVGERWYTENTCTRLCTCSVHNNITCFQSTCKPNQICWALDGLLHCRASGVGVCQLPGESHYVSFDGSNHSIPDACTLVLVKVCHPAMALPFFKISAKHEKEEGGTEAFRLHEVYIDIYDAQVTLQKGHRVLINSKQVTLPAISQIPGVSVKSSSIYSIVNIKIGVQVKFDGNHLLEIEIPTTYYGKVCGMCGNFNDEEEDELMMPSDEVANSDSEFVNSWKDKDIDPSCQSLLVDEQQIPAEQQENPSGNCRAADLRRAREKCEAALRAPVWAQCASRIDLTPFLVDCANTLCEFGGLYQALCQALQAFGATCQSQGLKPPLWRNSSFCPLECPAYSSYTNCLPSCSPSCWDLDGRCEGAKVPSACAEGCICQPGYVLSEDKCVPRSQCGCKDAHGGSIPLGKSWVSSGCTEKCVCTGGAIQCGDFRCPSGSHCQLTSDNSNSNCVSDKSEQCSVYGDPRYLTFDGFSYRLQGRMTYVLIKTVDVLPEGVEPLLVEGRNKMDPPRSSIFLQEVITTVYGYKVQLQAGLELVVNNQKMAVPYRPNEHLRVTLWGQRLYLVTDFELVVSFGGRKNAVISLPSMYEGLVSGLCGNYDKNRKNDMMLPSGALTQNLNTFGNSWEVKTEDALLRFPRAIPAEEEGQGAELGLRTGLQVSECSPEQLASNSTQACRVLADPQGPFAACHQTVAPEPFQEHCVLDLCSAQDPREQEELRCQVLSGHGVSSRYHISELYDTLPSILCQPGRPRGLRGPLRGRLRQHPRLCLQWHPEPPLADCGCTSNGIYYQLGSSFLTEDCSQRCTCASSRILLCEPFSCRAGEVCTLGNHTQGCFPESPCLQNPCQNDGQCREQGATFTCECEVGYGGGLCMEPRDAPPPRKPASNLVGVLLGLLVPVVVVLLAVTRECIYRTRRKREKTQEGDRLARLVDTDTVLDCAC

SEQ ID NO: 18325 - protein, 113 aa, Homo sapiens
MAHSAAAVPLGALEQGCPIRVEHDRRRRQFTVRLNGCHDRAVLLYEYVGKRIVDLQHTEVPDAYRGRGIAKHLAKAALDFVVEEDLKAHLTCWYIQKYVKENPLPQYLERLQP

SEQ ID NO: 18326 - protein, 256 aa, Homo sapiens
MAAPIPQGFSCLSRFLGWWSRQPVLVTQSAAIVPVRTKKRFTPPIYQPKFKTEKEFMQHARKAGLVIPPEKSDRSIHLACTAGIFDAYVPPEGDARISSLSKEGLIERTERMKKTMASQVSIRRIKDYDANFKIKDFPEKAKDIFIEAHLCLNNSDHDRLHTLVTEHCFPTLAIYDRFGRLMYGQEDVPKDVLEYVVFEKQLTNPYGSWRMHTKIVPPWAPPKQPILKTVMIPGPQLKPEEEYEEAQGEAQKPQLA

SEQ ID NO: 18327 - protein, 1461 aa, Homo sapiens [sequence omitted]

SEQ ID NO: 18328 - protein, 156 aa, Homo sapiens
MAPKKRPETQKTSEIVLRPRNKRSRSPLELEPEAKKLCAKGSGPSRRCDSDCLWVGLAGPQILPPCRSIVRTLHQHKLGRASWPSVQQGLQQSFLHTLDSYRILQKAAPFDRRATSLAWHPTHPSTVAVGSKGGDIMLWNFGIKDKPTFIKGHLVL

SEQ ID NO: 18329 - protein, 225 aa, Homo sapiens [sequence omitted]

SEQ ID NO: 18330 - protein, 959 aa, Homo sapiens
MFWKFDLNTTSHVDKLLDKEHVTLQELMDEDDILQECKAQNQKLLDFLCRQQCMEELVSLITQDPPLDMEEKVRFKYPNTACELLTCDVPQISDRLGGDESLLSLLYDFLDHEPPLNPLLASFFSKTIGNLIARKTEQVITFLKKKDKFISLVLKHIGTSALMDLLLRLVSCVEPAGLRQDVLHWLNEEKVIQRLVELIHPSQDEDRQSNASQTLCDIVRLGRDQGSQLQEALEPDPLLTALESQDCVEQLLKNMFDGDRTESCLVSGTQVLLTLLETRRVGTEGLVDSFSQGLERSYAVSSSVLHGIEPRLKDFHQLLLNPPKKKAILTTIGVLEEPLGNARLHGARLMAALLHTNTPSINQELCRLNTMDLLLDLFFKYTWNNFLHFQVELCIAAILSHAAREERTEASGSESRVEPPHENGNRSLETPQPAASLPDNTMVTHLFQKCCLVQRILEAWEANDHTQAAGGMRRGNMGHLTRIANAVVQNLERGPVQTHISEVIRGLPADCRGRWESFVEETLTETNRRNTVDLVSTHHLHSSSEDEDIEGAFPNELSLQQAFSDYQIQQMTANFVDQFGFNDEEFADQDDNINAPFDRIAEINFNIDADEDSPSAALFEACCSDRIQPFDDDEDEDIWEDSDTRCAARVMARPRFGAPHASESCSKNGPERGGQDGKASLEAHRDAPGAGAPPAPGKKEAPPVEGDSEGAMWTAVFDEPANSTPTAPGVVRDVGSSVWAAGTSAPEEKGWAKFTDFQPFCCSESGPRCSSPVDTECSHAEGSRSQGPEKAFSPASPCAWNVCVTRKAPLLASDSSSSGGSHSEDGDQKAASAMDAVSRGPGREAPPLPTVARTEEAVGRVGCADSRLLSPACPAPKEVTAAPAVAVPPEATVAITTALSKAGPAIPTPAVSSALAVAVPLGPIMAVTAAPAMVATLGTVTKDGKTDAPPEGAALNGPV

SEQ ID NO: 18331 - protein, 662 aa, Homo sapiens
MSHVAVENALGLDQQFAGLDLNSSDNQSGGSTASKGRYIPPHLRNREATKGFYDKDSSGWSSSKDKDAYSSFGSRSDSRGKSSFFSDRGSGSRGRFDDRGRSDYDGIGSRGDRSGFGKFERGGNSRWCDKSDEDDWSKPLPPSERLEQELFSGGNTGINFEKYDDIPVEATGNNCPPHIESFSDVEMGEIIMGNIELTRYTRPTPVQKHAIPIIKEKRDLMACAQTGSGKTAAFLLPILSQIYSDGPGEALRAMKENGRYGRRKQYPISLVLAPTRELAVQIYEEARKFSYRSRVRPCVVYGGADIGQQIRDLERGCHLLVATPGRLVDMMERGKIGLDFCKYLVLDEADRMLDMGFEPQIRRIVEQDTMPPKGVRHTMMFSATFPKEIQMLARDFLDEYIFLAVGRVGSTSENITQKVVWVEESDKRSFLLDLLNATGKDSLTLVFVETKKGADSLEDFLYHEGYACTSIHGDRSQRDREEALHQFRSGKSPILVATAVAARGLDISNVKHVINFDLPSDIEEYVHRIGRTGRVGNLGLATSFFNERNINITKDLLDLLVEAKQEVPSWLENMAYEHHYKGSSRGRSKSSRFSGGFGARDYRQSSGASSSSFSSSRASSSRSGGGGHGSSRGFGGGGYGGFYNSDGYGGNYNSQGVDWWGN

SEQ ID NO: 18332 - protein, 103 aa, Homo sapiens
MQAWGSLLSGLRREEWRSPSSHCSVPSLAAGLLFGSLAGLGAYQLYQDPRNVWGFLAATSVTFVGVMGMRSYYYGKFMPVGLIAGASLLMAAKVGVRMLMTSD

SEQ ID NO: 18333 - protein, 1127 aa, Homo sapiens
MAECGRGGAAGGALPTSPGPALGAKGALKAGVGEGGGGGGRLGHGRARYDSGGVSNGDCSLGVSGDEARASPTRGPRGVALAPTPSAVVCTLPRESKPGGLPRRSSIIKDGTKQKRERKKTVSFSSMPTEKKISSASDCINSMVEGSELKKVRSNSRIYHRYFLLDADMQSLRWEPSKKDSEKAKIDIKSIKEVRTGKNTDIFRSNGISDQISEDCAFSVIYGENYESLDLVANSADVANIWVTGLRYLISYGKHTLDMLESSQDNMRTSWVSQMFSEIDVDNLGHITLCNAVQCIRNLNPGLKTSKIELKFKELHKSKDKAGTEVTKEEFIEVFHELCTRPEIYFLLVQFSSNKEFLDTKDLMMFLEAEQGVAHINEEISLEIIHKYEPSKEGQEKGWLSIDGFTNYLMSPDCYIFDPEHKKVCQDMKQPLSHYFINSSHNTYLIEDQFRGPSDITGYIRALKMGCRSVELDVWDGPDNEPVIYTGHTMTSQIVFRSVIDIINKYAFFASEYPLILCLENHCSIKQQKVMVQHMKKLLGDKLYTTSPNVEESYLPSPDVLKGKILIKAKKLSSNCSGVEGDVTDEDEGAEMSQRMGKENMEQPNNVPVKRFQLCKELSELVSICKSVQFKEFQVSFQVQKYWEVCSFNEVLASKYANENPGDFVNYNKRFLARVFPSPMRIDSSNMNPQDFWKCGCQIVAMNFQTPGLMMDLNIGWFRQNGNCGYVLRPAIMREEVSFFSANTKDSVPGVSPQLLHIKIISGQNFPKPKGSGAKGDVVDPYVYVEIHGIPADCAEQRTKTVHQNGDAPIFDESFEFQINLPELAMVRFVVLDDDYIGDEFIGQYTIPFECLQTGYRHVPLQSLTGEVLAHASLFVHVAITNRRGGGKPHKRGLSVRKGKKSREYASLRTLWIKTVDEVFKNAQPPIRDATDLRENMQNAVVSFKELCGLSSVANLMQCMLAVSPRFLGPDNTPLVVLNLSEQYPTMELQGIVPEVLKKIVTTYDMMIQSLKALIENADAVYEKIVHCQKAAMEFHEHLHSIGTKEGLKERKLQKAVESFTWNITILKGQADLLKYAKNETLENLKQIHFAAVSCGLNKPGTENADVQKPRRSLEVIPEKANDETGE

SEQ ID NO: 18334 - protein, 289 aa, Homo sapiens [sequence omitted]

SEQ ID NO: 18335 - protein, 894 aa, Homo sapiens
MARQKKMGQSVLRAVFFLVLGLLGHSHGGFPNTISIGGLFMRNTVQEHSAFRFAVQLYNTNQNTTEKPFHLNYHVDHLDSSNSFSVTNAFCSQFSRGVYAIFGFYDQMSMNTLTSFCGALHTSFVTPSFPTDADVQFVIQMRPALKGAILSLLGHYKWEKFVYLYDTERGFSILQAIMEAAVQNNWQVTARSVGNIKDVQEFRRIIEEMDRRQEKRYLIDCEVERINTILEQVVILGKHSRGYHYMLANLGFTDILLERVMHGGANITGFQIVNNENPMVQQFIQRWVRLDEREFPEAKNAPLKYTSALTHDAILVIAEAFRYLRRQRVDVSRRGSAGDCLANPAVPWSQGIDIERALKMVQVQGMTGNIQFDTYGRRTNYTIDVYEMKVSGSRKAGYWNEYERFVPFSDQQISNDSASSENRTIVVTTILESPYVMYKKNHEQLEGNERYEGYCVDLAYEIAKHVRIKYKLSIVGDGKYGARDPETKIWNGMVGELVYGRADIAVAPLTITLVREEVIDFSKPFMSLGISIMIKKPQKSKPGVFSFLDPLAYEIWMCIVFAYIGVSVVLFLVSRFSPYEWHLEDNNEEPRDPQSPPDPPNEFGIFNSLWFSLGAFMQQGCDISPRSLSGRIVGGVWWFFTLIIISSYTANLAAFLTVERMVSPIESAEDLAKQTEIAYGTLDSGSTKEFFRRSKIAVYEKMWSYMKSAEPSVFTKTTADGVARVRKSKGKFAFLLESTMNEYIEQRKPCDTMKVGGNLDSKGYGVATPKGSALRTPVNLAVLKLSEQGILDKLKNKWWYDKGECGAKDSGSKDKTSALSLSNVAGVFYILVGGLGLAMMVALIEFCYKSRAESKRMKLTKNTQNFKPAPATNTQNYATYREGYNVYGTESVKI

SEQ ID NO: 18336 - protein, 1809 aa, Homo sapiens
MSGASVKVAVRVRPFNSRETSKESKCIIQMQGNSTSIINPKNPKEAPKSFSFDYSYWSHTSPEDPCFASQNRVYNDIGKEMLLHAFEGYNVCIFAYGQTGAGKSYTMMGKQEESQAGIIPQLCEELFEKINDNCNEEMSYSVEVSYMEIYCERVRDLLNPKNKGNLRVREHPLLGPYVEDLSKLAVTSYTDIADLMDAGNKARTVAATNMNETSSRSHAVFTIVFTQKKHDNETNLSTEKVSKISLVDLAGSERADSTGAKGTRLKEGANINKSLTTLGKVISALAEVDNCTSKSKKKKKTDFIPYRDSVLTWLLRENLGGNSRTAMVAALSPADINYDETLSTLRYADRAKQIKCNAVINEDPNAKLVRELKEEVTRLKDLLRAQGLGDIIDNLKDFQNNKHRYLLASENQRPGHFSTASMGSLTSSPSSCSLSSQVGLTSVTSIQERIMSTPGGEEAIERLKESEKIIAELNETWEEKLRKTEAIRMEREALLAEMGVAIREDGGTLGVFSPKKTPHLVNLNEDPLMSECLLYYIKDGITRVGQADAERRQDIVLSGAHIKEEHCIFRSERSNSGEVIVTLEPCERSETYVNGKRVSQPVQLRSGNRIIMGKNHVFRFNHPEQARAEREKTPSAETPSEPVDWTFAQRELLEKQGIDMKQEMEKRLQEMEILYKKEKEEADLLLEQQRLDYESKLQALQKQVETRSLAAETTEEEEEEEEVPWTQHEFELAQWAFRKWKSHQFTSLRDLLWGNAVYLKEANAISVELKKKVQFQFVLLTDTLYSPLPPELLPTEMEKTHEDRPFPRTVVAVEVQDLKNGATHYWSLEKLKQRLDLMREMYDRAGEMASSAQDESETTVTGSDPFYDRFHWFKLVGSSPIFHGCVNERLADRTPSPTFSTADSDITELADEQQDEMEDFDDEAFVDDAGSDAGTEEGSDLFSDGHDPFYDRSPWFILVGRAFVYLSNLLYPVPLIHRVAIVSEKGEVRGFLRVAVQAIAADEEAPDYGSGIRQSGTAKISFDNEYFNQSDFSSVAMTRSGLSLEELRIVEGQGQSSEVITPPEEISRINDLDLKSSTLLDGKMVMEGFSEEIGNHLKLGSAFTFRVTVLQASGILPEYADIFCQFNFLHRHDEAFSTEPLKNNGRGSPLAFYHVQNIAVEITESFVDYIKTKPIVFEVFGHYQQHPLHLQGQELNSPPQPCRRFFPPPMPLSKPVPATKLNTMSKTSLGQSMSKYDLLVWFEISELEPTGEYIPAVVDHTAGLPCQGTFLLHQGIQRRITVTIIHEKGSELHWKDVRELVVGRIRNKPEVDEAAVDAILSLNIISAKYLKSSHNSSRTFYRFEAVWDSSLHNSLLLNRVTPYGEKIYMTLSAYLELDHCIQPAVITKDVCMVFYSRDAKISPPRSLRSLFGSGYSKSPDSNRVTGIYELSLCKMSDTGSPGMQRRRRKILDTSVAYVRGEENLAGWRPRGDSLILEHQWELEKLELLHEVEKTRHFLLLRERLGDSIPKSLSDSLSPSLSSGTLSTSTSISSQISTTTFESAITPSESSGYDSGDIESLVDREKELATKCLQLLTHTFNREFSQVHGSVSDCKLSDISPIGRDPSESSFSSATLTPSSTCPSLVDSRSNSLDQKTPEANSRASSPCPEFEQFQIVPAVETPYLARAGKNEFLNLVPDIEEIRPSSVVSKKGYLHFKEPLYSNWAKHFVVVRRPYVFIYNSDKDPVERGIINLSTAQVEYSEDQQAMVKTPNTFAVCTKHRGVLLQALNDKDMNDWLYAFNPLLAGTIRPGHLASEIIREDKSVSFSCQ

SEQ ID NO: 18337 - protein, 511 aa, Homo sapiens
MAAAVAAALARLLAAFLLLAAQVACEYGMVHVVSQAGGPEGKDYCILYNPQWAHLPHDLSKASFLQLRNWTASLLCSAADLPARGFSNQIPLVARGNCTFYEKVRLAQGSGARGLLIVSRERLVPPGGNKTQYDEIGIPVALLSYKDMLDIFTRFGRTVRAALYAPKEPVLDYNMVIIFIMAVGTVAIGGYWAGSRDVKKRYMKHKRDDGPEKQEDEAVDVTPVMTCVFVVMCCSMLVLLYYFYDLLVYVVIGIFCLASATGLYSCLAPCVRRLPFGKCRIPNNSLPYFHKRPQARMLLLALFCVAVSVVWGVFRNEDQWAWVLQDALGIAFCLYMLKTIRLPTFKACTLLLLVLFLYDIFFVFITPFLTKSGSSIMVEVATGPSDSATREKLPMVLKVPRLNSSPLALCDRPFSLLGFGDILVPGLLVAYCHRFDIQVQSSRVYFVACTIAYGVGLLVTFVALALMQRGQPALLYLVPCTLVTSCAVALWRRELGVFWTGSGFAVNTSLL

SEQ ID NO: 18338 - protein, 1681 aa, Homo sapiens
MFRQFYLWTCLASGIILGSLFEICLGQYDDDWQYEDCKLARGGPPATIVAIDEESRNGTILVDNMLIKGTAGGPDPTIELSLKDNVDYWVLMDPVKQMLFLNSTGRVLDRDPPMNIHSIVVQVQCINKKVGTIIYHEVRIVVRDRNDNSPTFKHESYYATVNELTPVGTTIFTGFSGDNGATDIDDGPNGQIEYVIQYNPDDPTSNDTFEIPLMLTGNIVLRKRLNYEDKTRYFVIIQANDRAQNLNERRTTTTTLTVDVLDGDDLGPMFLPCVLVPNTRDCRPLTYQAAIPELRTPEELNPIIVTPPIQAIDQDRNIQPPSDRPGILYSILVGTPEDYPRFFHMHPRTAELSLLEPVNRDFHQKFDLVIKAEQDNGHPLPAFAGLHIEILDENNQSPYFTMPSYQGYILESAPVGATISDSLNLTSPLRIVALDKDIEDTKDPELHLFLNDYTSVFTVTQTGITRYLTLLQPVDREEQQTYTFSITAFDGVQESEPVIVNIQVMDANDNTPTFPEISYDVYVYTDMRPGDSVIQLTAVDADEGSNGEITYEILVGAQGDFIINKTTGLITIAPGVEMIVGRTYALTVQAADNAPPAERRNSICTVYIEVLPPNNQSPPRFPQLMYSLEISEAMRVGAVLLNLQATDREGDSITYAIENGDPQRVFNLSETTGILTLGKALDRESTDRYILIITASDGRPDGTSTATVNIVVTDVNDNAPVFDPYLPRNLSVVEEEANAFVGQVKATDPDAGINGQVHYSLGNFNNLFRITSNGSIYTAVKLNREVRDYYELVVVATDGAVHPRHSTLTLAIKVLDIDDNSPVFTNSTYTVLVEENLPAGTTILQIEAKDVDLGANVSYRIRSPEVKHFFALHPFTGELSLLRSLDYEAFPDQEASITFLVEAFDIYGTMPPGIATVTVIVKDMNDYPPVFSKRIYKGMVAPDAVKGTPITTVYAEDADPPGLPASRVRYRVDDVQFPYPASIFEVEEDSGRVITRVNLNEEPTTIFKLVVVAFDDGEPVMSSSATVKILVLHPGEIPRFTQEEYRPPPVSELATKGTMVGVISAAAINQSIVYSIVSGNEEDTFGINNITGVIYVNGPLDYETRTSYVLRVQADSLEVVLANLRVPSKSNTAKVYIEIQDENNHPPVFQKKFYIGGVSEDARMFTSVLRVKATDKDTGNYSVMAYRLIIPPIKEGKEGFVVETYTGLIKTAMLFHNMRRSYFKFQVIATDDYGKGLSGKADVLVSVVNQLDMQVIVSNVPPTLVEKKIEDLTEILDRYVQEQIPGAKVVVESIGARRHGDAFSLEDYTKCDLTVYAIDPQTNRAIDRNELFKFLDGKLLDINKDFQPYYGEGGRILEIRTPEAVTSIKKRGESLGYTEGALLALAFIIILCCIPAILVVLVSYRQVFKGRQAECTKTARIQAALPAAKPAVPAPAPVAAPPPPPPPPPGAHLYEELGDSSMYEMPQYGSRRRLLPPAGQEEYGEVVGEAEEEYEEEEWARKRMIKLVVDREYETSSTGEDSAPECQRNRLHHPSIHSNINGNIYIAQNGSVVRTRRACLTDNLKVASPVRLGGPFKKLDKLAVTHEENVPLNTLSKGPFSTEKMNARPTLVTFAPCPVGTDNTAVKPLRNRLKSTVEQESMIDSKNIKEALEFHSDHTQSDDEELWMGPWNNLHIPMTKL

SEQ ID NO: 18339 - protein, 86 aa, Homo sapiens
MSSGKSARYNRFSGGPSNLPTPDVTTGTRMETTFGPAFSAVTTITKADGTSTYKQHCRTPSSSSTLAYSPRDEEDSMVGPYPQEPV

SEQ ID NO: 18340 - protein, 305 aa, Homo sapiens
MAPRRARGCRTLGLPALLLLLLLRPPATRDARDRLAVLAGRSRISESFNHEVQTHEACVRLRTMENCPQCHHHRTSRQQAGITCPPPMSVEHADIWVKSYSLYSRERYICNSGFKRKAGTSSLTECVLNKATNVAHWTTPSLKCIRDPALVHQRPAPPSTVTTAGVTPQPESLSPSGKEPAASSPSSNNTAATTAAIVPGSQLMPSKSPSTGTTEISSHESSHGTPSQTTAKNWELTASASHQPPGVYPQGHSDTTGRKQHLLPDFQASFQRDCINKHIEDKECWTVASFLLFCTMFVSTCWYTL

SEQ ID NO: 18341 - protein, 1016 aa, Homo sapiens
MRGSGPRGAGRRRPPSGGGDTPITPASLAGCYSAPRRAPLWTCLLLCAALRTLLASPSNEVNLLDSRTVMGDLGWIAFPKNGWEEIGEVDENYAPIHTYQVCKVMEQNQNNWLLTSWISNEGASRIFIELKFTLRDCNSLPGGLGTCKETFNMYYFESDDQNGRNIKENQYIKIDTIAADESFTELDLGDRVMKLNTEVRDVGPLSKKGFYLAFQDVGACIALVSVRVYYKKCPSVVRHLAVFPDTITGADSSQLLEVSGSCVNHSVTDEPPKMHCSAEGEWLVPIGKCMCKAGYEEKNGTCQVCRPGFFKASPHIQSCGKCPPHSYTHEEASTSCVCEKDYFRRESDPPTMACTRPPSAPRNAISNVNETSVFLEWIPPADTGGRKDVSYYIACKKCNSHAGVCEECGGHVRYLPRQSGLKNTSVMMVDLLAHTNYTFEIEAVNGVSDLSPGARQYVSVNVTTNQAAPSPVTNVKKGKIAKNSISLSWQEPDRPNGIILEYEIKYFEKDQETSYTIIKSKETTITAEGLKPASVYVFQIRARTAAGYGVFSRRFEFETTPVSVAASSDQSQIPVIAVSVTVGVILLAVVIGVLLSGRRCGYSKAKQDPEEEKMHFHNGHIKLPGVRTYIDPHTYEDPNQAVHEFAKEIEASCITIERVIGAGEFGEVCSGRLKLPGKRELPVAIKTLKVGYTEKQRRDFLGEASIMGQFDHPNIIHLEGVVTKSKPVMIVTEYMENGSLDTFLKKNDGQFTVIQLVGMLRGISAGMKYLSDMGYVHRDLAARNILINSNLVCKVSDFGLSRVLEDDPEAAYTTRGGKIPIRWTAPEAIAFRKFTSASDVWSYGIVMWEVVSYGERPYWEMTNQDVIKAVEEGYRLPSPMDCPAALYQLMLDCWQKERNSRPKFDEIVNMLDKLIRNPSSLKTLVNASCRVSNLLAEHSPLGSGAYRSVGEWLEAIKMGRYTEIFMENGYSSMDAVAQVTLEDLRRLGVTLVGHQKKIMNSLQEMKVQLVNGMVPL

SEQ ID NO: 18342 - protein, 2346 aa, Homo sapiens
MDEPSPLAQPLELNQHSRFIIGSVSEDNSEDEISNLVKLDLLEEKEGSLSPASVGSDTLSDLGISSLQDGLALHIRSSMSGLHLVKQGRDRKKIDSQRDFTVASPAEFVTRFGGNKVIEKVLIANNGIAAVKCMRSIRRWSYEMFRNERAIRFVVMVTPEDLKANAEYIKMADHYVPVPGGPNNNNYANVELILDIAKRIPVQAVWAGWGHASENPKLPELLLKNGIAFMGPPSQAMWALGDKIASSIVAQTAGIPTLPWSGSGLRVDWQENDFSKRILNVPQELYEKGYVKDVDDGLQAAEEVGYPVMIKASEGGGGKGIRKVNNADDFPNLFRQVQAEVPGSPIFVMRLAKQSRHLEVQILADQYGNAISLFGRDCSVQRRHQKIIEEAPATIATPAVFEHMEQCAVKLAKMVGYVSAGTVEYLYSQDGSFYFLELNPRLQVEHPCTEMVADVNLPAAQLQIAMGIPLYRIKDIRMMYGVSPWGDSPIDFEDSAHVPCPRGHVIAARITSENPDEGFKPSSGTVQELNFRSNKNVWGYFSVAAAGGLHEFADSQFGHCFSWGENREEAISNMVVALKELSIRGDFRTTVEYLIKLLETESFQMNRIDTGWLDRLIAEKVQAERPDTMLGVVCGALHVADVSLRNSVSNFLHSLERGQVLPAHTLLNTVDVELIYEGVKYVLKVTRQSPNSYVVIMNGSCVEVDVHRLSDGGLLLSYDGSSYTTYMKEEVDRYRITIGNKTCVFEKENDPSVMRSPSAGKLIQYIVEDGGHVFAGQCYAEIEVMKMVMTLTAVESGCIHYVKRPGAALDPGCVLAKMQLDNPSKVQQAELHTGSLPRIQSTALRGEKLHRVFHYVLDNLVNVMNGYCLPDPFFSSKVKDWVERLMKTLRDPSLPLLELQDIMTSVSGRIPPNVEKSIKKEMAQYASNITSVLCQFPSQQIANILDSHAATLNRKSEREVFFMNTQSIVQLVQRYRSGIRGHMKAVVMDLLRQYLRVETQFQNGHYDKCVFALREENKSDMNTVLNYIFSHAQVTKKNLLVTMLIDQLCGRDPTLTDELLNILTELTQLSKTTNAKVALRARQVLIASHLPSYELRHNQVESIFLSAIDMYGHQFCIENLQKLILSETSIFDVLPNFFYHSNQVVRMAALEVYVRRAYIAYELNSVQHRQLKDNTCVVEFQFMLPTSHPNRGNIPTLNRMSFSSNLNHYGMTHVASVSDVLLDNSFTPPCQRMGGMVSFRTFEDFVRIFDEVMGCFSDSPPQSPTFPEAGHTSLYDEDKVPRDEPIHILNVAIKTDCDIEDDRLAAMFREFTQQNKATLVDHGIRRLTFLVAQKDFRKQVNYEVDRRFHREFPKFFTFRARDKFEEDRIYRHLEPALAFQLELNRMRNFDLTAIPCANHKMHLYLGAAKVEVGTEVTDYRFFVRAIIRHSDLVTKEASFEYLQNEGERLLLEAMDELEVAFNNTNVRTDCNHIFLNFVPTVIMDPSKIEESVRSMVMRYGSRLWKLRVLQAELKINIRLTPTGKAIPIRLFLTNESGYYLDISLYKEVTDSRTAQIMFQAYGDKQGPLHGMLINTPYVTKDLLQSKRFQAQSLGTTYIYDIPEMFRQSLIKLWESMSTQAFLPSPPLPSDMLTYTELVLDDQGQLVHMNRLPGGNEIGMVAWKMTFKSPEYPEGRDIIVIGNDITYRIGSFGPQEDLLFLRASELARAEGIPRIYVSANSGARIGLAEEIRHMFHVAWVDPEDPYKGYRYLYLTPQDYKRVSALNSVHCEHVEDEGESRYKITDIIGKEEGIGPENLRGSGMIAGESSLAYNEIITISLVTCRAIGIGAYLVRLGQRTIQVENSHLILTGAGALNKVLGREVYTSNNQLGGIQIMHNNGVTHCTVCDDFEGVFTVLHWLSYMPKSVHSSVPLLNSKDPIDRIIEFVPTKTPYDPRWMLAGRPHPTQKGQWLSGFFDYGSFSEIMQPWAQTVVVGRARLGGIPVGVVAVETRTVELSIPADPANLDSEAKIIQQAGQVWFPDSAFKTYQAIKDFNREGLPLMVFANWRGFSGGMKDMYDQVLKFGAYIVDGLRECCQPVLVYIPPQAELRGGSWVVIDSSINPRHMEMYADRESRGSVLEPEGTVEIKFRRKDLVKTMRRVDPVYIHLAERLGTPELSTAERKELENKLKEREEFLIPIYHQVAVQFADLHDTPGRMQEKGVISDILDWKTSRTFFYWRLRRLLLEDLVKKKIHNANPELTDGQIQAMLRRWFVEVEGTVKAYVWDNNKDLAEWLEKQLTEEDGVHSVIEENIKCISRDYVLKQIRSLVQANPEVAMDSIIHMTQHISPTQRAEVIRILSTMDSPST

SEQ ID NO: 18343 - protein, 947 aa, Homo sapiens
MAVMEMACPGAPGSAVGQQKELPKAKEKTPPLGKKQSSVYKLEAVEKSPVFCGKWEILNDVITKGTAKEGSEAGPAAISIIAQAECENSQEFSPTFSERIFIAGSKQYSQSESLDQIPNNVAHATEGKMARVCWKGKRRSKARKKRKKKSSKSLAHAGVALAKPLPRTPEQESCTIPVQEDESPLGAPYVRNTPQFTKPLKEPGLGQLCFKQLGEGLRPALPRSELHKLISPLQCLNHVWKLHHPQDGGPLPLPTHPFPYSRLPHPFPFHPLQPWKPHPLESFLGKLACVDSQKPLPDPHLSKLACVDSPKPLPGPHLEPSCLSRGAHEKFSVEEYLVHALQGSVSSGQAHSLTSLAKTWAARGSRSREPSPKTEDNEGVLLTEKLKPVDYEYREEVHWATHQLRLGRGSFGEVHRMEDKQTGFQCAVKKVRLEVFRAEELMACAGLTSPRIVPLYGAVREGPWVNIFMELLEGGSLGQLVKEQGCLPEDRALYYLGQALEGLEYLHSRRILHGDVKADNVLLSSDGSHAALCDFGHAVCLQPDGLGKSLLTGDYIPGTETHMAPEVVLGRSCDAKVDVWSSCCMMLHMLNGCHPWTQFFRGPLCLKIASEPPPVREIPPSCAPLTAQAIQEGLRKEPIHRVSAAELGGKVNRALQQVGGLKSPWRGEYKEPRHPPPNQANYHQTLHAQPRELSPRAPGPRPAEETTGRAPKLQPPLPPEPPEPNKSPPLTLSKEESGMWEPLPLSSLEPAPARNPSSPERKATVPEQELQQLEIELFLNSLSQPFSLEEQEQILSCLSIDSLSLSDDSEKNPSKASQSSRDTLSSGVHSWSSQAEARSSSWNMVLARGRPTDTPSYFNGVKVQIQSLNGEHLHIREFHRVKVGDIATGISSQIPAAAFSLVTKDGQPVRYDMEVPDSGIDLQCTLAPDGSFAWSWRVKHGQLENRP

SEQ ID NO: 18344 - protein, 232 aa, Homo sapiens
MEEEASSPGLGCSKPHLEKLTLGITRILESSPGVTEVTIIEKPPAERHMISSWEQKNNCVMPEDVKNFYLMTNGFHMTWSVKLDEHIIPLGSMAINSISKLTQLTQSSMYSLPNAPTLADLEDDTHEASDDQPEKPHFDSRSVIFELDSCNGSGKVCLVYKSGKPALAEDTEIWFLDRALYWHFLTDTFTAYYRLLITHLGLPQWQYAFTSYGISPQAKPKGSEGRSKRGCF

SEQ ID NO: 18345 - protein, 543 aa, Homo sapiens
MGTSLSPNDPWPLNPLSIQQTTLLLLLSVLATVHVGQRLLRQRRRQLRSAPPGPFAWPLIGNAAAVGQAAHLSFARLARRYGDVFQIRLGSCPIVVLNGERAIHQALVQQGSAFADRPAFASFRVVSGGRSMAFGHYSEHWKVQRRAAHSMMRNFFTRQPRSRQVLEGHVLSEARELVALLVRGSADGAFLDPRPLTVVAVANVMSAVCFGCRYSHDDPEFRELLSHNEEFGRTVGAGSLVDVMPWLQYFPNPVRTVFREFEQLNRNFSNFILDKFLRHCESLRPGAAPRDMMDAFILSAEKKAAGDSHGGGARLDLENVPATITDIFGASQDTLSTALQWLLLLFTRYPDVQTRVQAELDQVVGRDRLPCMGDQPNLPYVLAFLYEAMRFSSFVPVTIPHATTANTSVLGYHIPKDTVVFVNQWSVNHDPLKWPNPENFDPARFLDKDGLINKDLTSRVMIFSVGKRRCIGEELSKMQLFLFISILAHQCDFRANPNEPAKMNFSYGLTIKPKSFKVNVTLRESMELLDSAVQNLQAKETCQ

SEQ ID NO: 18346 - protein, 83 aa, Homo sapiens
METLYRVPFLVLECPNLKLKKPPWLHMPSAMTVYALVVVSYFLITGGIIYDVIVEPPSVGSMTDEHGHQRPVAFLAYRGYLMG

SEQ ID NO: 18347 - protein, 196 aa, Homo sapiens
MNIKGSPWKGSLLLLLVSNLLLSHYIHNLSSEMFSEFDKRYTHGRGFITKAINSCHTSSLATPEDKEQAQQMNQKDFLSLIVSILRSWNEPLYHLVTEVRGMQEAPEAILSKAVEIEEQTKRLLEGMELIVSQVHPETKENEIYPVWSGLPSLQMADEESRLSAYYNLLHCLRRDSHKIDNYLKLLKCRIIHNNNC

SEQ ID NO: 18348 - protein, 133 aa, Homo sapiens [sequence omitted]

SEQ ID NO: 18349 - protein, 874 aa, Homo sapiens
MAANVGDQRSTDWSSQYSMVAGAGRENGMETPMHENPEWEKARQALASISKSGAAGGSAKSSSNGPVASAQYVSQAEASALQQQQYYQWYQQYNYAYPYSYYYPMSMYQSYGSPSQYGMAGSYGSATPQQPSAPQHQGTLNQPPVPGMDESMSYQAPPQQLPSAQPPQPSNPPHGAHTLNSGPQPGTAPATQHSQAGPATGQAYGPHTYTEPAKPKKGQQLWNRMKPAPGTGGLKFNIQKRPFAVTTQSFGSNAEGQHSGFGPQPNPEKVQNHSGSSARGNLSGKPDDWPQDMKEYVERCFTACESEEDKDRTEKLLKEVLQARLQDGSAYTIDWSREPLPGLTREPVAESPKKKRWEAASSLHPPRGAGSATRGGGAPSQRGTPGAGGAGRARGNSFTKFGNRNVFMKDNSSSSSTDSRSRSSSRSPTRHFRRSDSHSDSDSSYSGNECHPVGRRNPPPKGRGGRGAHMDRGRGRAQRGKRHDLAPTKRSRKKMAALECEDPERELKKQKRAARFQHGHSRRLRLEPLVLQMSSLESSGADPDWQELQIVGTCPDITKHYLRLTCAPDPSTVRPVAVLKKSLCMVKCHWKEKQDYAFACEQMKSIRQDLTVQGIRTEFTVEVYETHARIALEKGDHEEFNQCQTQLKSLYAENLPGNVGEFTAYRILYYIFTKNSGDITTELAYLTRELKADPCVAHALALRTAWALGNYHRFFRLYCHAPCMSGYLVDKFADRERKVALKAMIKTYVVPSSLLPLLFPSFRLAPPLRPAPGRRPPPAPNPCPGPCFPIIFLHSALPSPVPLALLVGHLCVPGHSSPSPHCSQLTASGASSPPHLCVSSSCSLLPGPPSSLLALGFLRTLRSLLSQLVAVLPP

SEQ ID NO: 18350 - protein, 736 aa, Homo sapiens
MLRLLRPLLLLLLLPPPGSPEPPGLTQLSPGAPPQAPDLLYADGLRAYAAGAWAPAVALLREALRSQAALGRVRLDCGASCAADPGAALPAVLLGAPEPDSGPGPTQGSWERQLLRAALRRADCLTQCAARRLGPGGAARLRVGSALRDAFRRREPYNYLQRAYYQLKKLDLAAAAAHTFFVANPMHLQMREDMAKYRRMSGVRPQSFRDLETPPHWAAYDTGLELLGRQEAGLALPRLEEALQGSLAQMESCRADCEGPEEQQGAEEEEDGAASQGGLYEAIAGHWIQVLQCRQRCVGETATRPGRSFPVPDFLPNQLRRLHEAHAQVGNLSQAIENVLSVLLFYPEDEAAKRALNQYQAQLGEPRPGLGPREDIQRFILRSLGEKRQLYYAMEHLGTSFKDPDPWTPAALIPEALREKLREDQEKRPWDHEPVKPKPLTYWKDVLLLEGVTLTQDSRQLNGSERAVLDGLLTPAECGVLLQLAKDAAGAGARSGYRGRRSPHTPHERFEGLTVLKAAQLARAGTVGSQGAKLLLEVSERVRTLTQAYFSPERPLHLSFTHLVCRSAIEGEQEQRMDLSHPVHADNCVLDPDTGECWREPPAYTYRDYSGLLYLNDDFQGGDLFFTEPNALTVTARVRPRCGRLVAFSSGVENPHGVWAVTRGRRCALALWHTWAPEHREQEWIEAKELLQESQEEEEEEEEEMPSKDPSPEPPSRRHQRVQDKTGRAPRVREEL

SEQ ID NO: 18351 - protein, 797 aa, Homo sapiens
MKTRGFSFPRQRQVLFLFLFWGVSLAGSGFGRYSVTEETEKGSFVVNLAKDLGLAEGELAARGTRVVSDDNKQYLLLDSHTGNLLTNEKLDREKLCGPKEPCMLYFQILMDDPFQIYRAELRVRDINDHSPVFRHKEMVLKISENTAEGTAFRLERAQDPDEGHNSIQNYTISSNSFFHIKISGSDEGMIYPELVLDKALDREEQEELSLTLTALDGGSPSRSGTSTIRIVVLDVNDNVPQFAQALYETQAPENSPVGSLIVKVSAGDADSGVNAEVSYSFFDASEDILTTFQINPFSGEIFLRELLDYELVNSYKINIQAMDGGGLSARCTVLIKVLDSNDNPPELIISSLSNSVAENSPGIVLAVFKIKDRDSGENGKTICYVQDNLPFFLKPSVDNFYILMTEGALDRESKAEYNITITVTDLGTPRLKTEHSITLQVSDVNDNAPAFTQTSYTLFVRENNSPALHIGSVSATDRDSGTNAQVTYSLLPPQDPHLPLASLVSINADNGHLFALRSLDYEALQAFDFRVGASDRGSPALSSEALVRVLVLDANDNSPFVLYPLQNGSAPCTELVPRAAEPGYLVTKVVAVDGDSGQNAWLSYQLLKATEPGLFGVWAHNGEVRTARLLSERDAAKHRLVVLVKDNGEPPRSATATLHVLLVDGFSQPYLPLPEAAPAQAQADLLTVYLVVALASVSSLFLLSVLLFVAVRLCRRSRAASVGRCSVPEGPFPGHLVDVSGTGTLFQSYQYEVCLTGGSETGEFKFLKPITPHLPPHRGGKEIEENSTLPNSFGFNY

SEQ ID NO: 18352 - protein, 1222 aa, Homo sapiens; identical to SEQ ID NO: 5933

SEQ ID NO: 18353 - protein, 225 aa, Homo sapiens
MWFLTTLLLWVPVDGQVVDTTKAVITLQPPWVSVFQEETITLHCEVLHLPGSSSTQWFLNGTATQTSTPSYRITSASVNDSGEYRCQRGLSGRSDPIQLEIHRGWLLLQVSSRVFMEGEPLALRCHAWKDKLVYNVLYYRNGKAFKFFHWNSNLTILKTNISHNGTYHCSGMGKHRYTSAGISQYTVKELFPAPVLNASVTSPLLEGNLVTLSCETKLLLQRPGL

SEQ ID NO: 18354 - protein, 652 aa, Homo sapiens
MASVAWAVLKVLLLLPTQTWSPVGAGNPPDCDSPLASALPRSSFSSSSELSSSHGPGFSRLNRRDGAGGWTPLVSNKYQWLQIDLGERMEVTAVATQGGYGSSDWVTSYLLMFSDGGRNWKQYRREESIWGFPGNTNADSVVHYRLQPPFEARFLRFLPLAWNPRGRIGMRIEVYGCAYKSEVVYFDGQSALLYTLDKKPLKPIRDVISLKFKAMQSNGILLHREGQHGNHITLELIKGKLVFFLNSGNAKLPSTIAPVTLTLGSLLDDQHWHSVLIELLDTQVNFTVDKHTHHFQAKGDSSNLDLNFEISFGGILSPGRSRAFTRKSFHGCLENLYYNGVDVTELAKKHKPQILMMGNVSFSCPQPQTVPVTFLSSRSYLALPGNSGEDKVSVTFQFRTWNRAGHLLFGELQRGSGSFVLFLKDGKLKLSLFQAGQSPRNVTAGAGLNDGQWHSVSFSAKWSHMNVVVDDDTAVQPLVAVLIDSGDTYYFGALYEQSCEAHKHRGNPSGLYYIDADGSGPLGPFLVYCNMTDSAWTVVRHGGPDAVTLRGAPSGHPLSAVSFAYAAGAGQLRAAVNLAERCEQRLALRCGTARRPDSRDGTPLSWWVGRTNETHTSWGGSLPDAQKCTCGLEGNCIDSQYYCNCDAGQNEW

SEQ ID NO: 18355 - protein, 1288 aa, Homo sapiens
MASVAWAVLKVLLLLPTQTWSPVGAGNPPDCDSPLASALPRSSFSSSSELSSSHGPGFSRLNRRDGAGGWTPLVSNKYQWLQIDLGERMEVTAVATQGGYGSSDWVTSYLLMFSDGGRNWKQYRREESIWGFPGNTNADSVVHYRLQPPFEARFLRFLPLAWNPRGRIGMRIEVYGCAYKSEVVYFDGQSALLYTLDKKPLKPIRDVISLKFKAMQSNGILLHREGQHGNHITLELIKGKLVFFLNSGNAKLPSTIAPVTLTLGSLLDDQHWHSVLIELLDTQVNFTVDKHTHHFQAKGDSSNLDLNFEISFGGILSPGRSRAFTRKSFHGCLENLYYNGVDVTELAKKHKPQILMMGNVSFSCPQPQTVPVTFLSSRSYLALPGNSGEDKVSVTFQFRTWNRAGHLLFGELQRGSGSFVLFLKDGKLKLSLFQAGQSPRNVTAGAGLNDGQWHSVSFSAKWSHMNVVVDDDTAVQPLVAVLIDSGDTYYFGGCLGNSSGSGCKSPLGGFQGCLRLITIGDKAVDPILVQQGALGSFRDLQIDSCGITDRCLPSYCEHGGECSQSWDTFSCDCLGTGYTGETCHSSLYEQSCEAHKHRGNPSGLYYIDADGSGPLGPFLVYCNMTADSAWTVVRHGGPDAVTLRGAPSGHPLSAVSFAYAAGAGQLRAAVNLAERCEQRLALRCGTARRPDSRDGTPLSWWVGRTNETHTSWGGSLPDAQKCTCGLEGNCIDSQYYCNCDAGQNEWTSDTIVLSQKEHLPVTQIVMTDTGQPHSEADYTLGPLLCRGDKSFWNSASFNTETSYLHFPAFHGELTADVCFFFKTTVSSGVFMENLGITDFIRIELRAPTEVTFSFDVGNGPCEVTVQSPTPFNDNQWHHVRAERNVKGASLQVDQLPQKMQPAPADGHVRLQLNSQLFIGGTATRQRGFLGCIRSLQLNGVALDLEERATVTPGVEPGCAGHCSTYGHLCRNGGRCREKRRGVTCDCAFSAYDGPFCSNEISAYFATGSSMTYHFQEHYTLSENSSSLVSSLHRDVTLTREMITLSFRTTRTPSLLLYVSSFYEEYLSVILANNGSLQIRYKLDRHQNPDAFTFDFKNMADGQLHQVKINREEAVVMVEVNQSAKKQVILSSGTEFNAVKSLILGKVLEAAGADPDTRRAATSGFTGCLSAVRFGCAAPLKAALRPSGPSRVTVRGHVAPMARCAAGAASGSPARELAPRLAGGAGRSGPVDEGEPLVNADRRDSAVIGGVIAVEIFILLCITAIAIRIYQQRKLRKENESKVSKKEEC

SEQ ID NO: 18356 - protein, 764 aa, Homo sapiens
MSDTRRRVKVYTLNEDRQWDDRGTGHVSSTYVEELKGMSLLVRAESDGSLLLESKINPNTAYQKQQDTLIVWSEAENYDLALSFQEKAGCDEIWEKICQVQGKDPSVEVTQDLIDESEEERFEEMPETSHLIDLPTCELNKLEEIADLVTSVLSSPIRREKLALALENEGYIKKLLQLFQACENLENTEGLHHLYEIIRGILFLNKATLFEVMFSDECIMDVVGCLEYDPALAQPKRHREFLTKTAKFKEVIPITDSELRQKIHQTYRVQYIQDIILPTPSVFEENFLSTLTSFIFFNKVEIVSMLQEDEKFLSEVFAQLTDEATDDDKRRELVNFFKEFCAFSQTLQPQNRDAFFKTLAKLGILPALEIVMGMDDLQVRSAATDIFSYLVEFSPSMVREFVMQEAQQSDDDILLINVVIEQMICDTDPELGGAVQLMGLLRTLIDPENMLATTNKTEKSEFLNFFYNHCMHVLTAPLLTNTSEDKCEKDNIVGSNKNNTICPGALRFMRRIIGLKDEFYNRYITKGNLFEPVINALLDNGTRYNLLNSAVIELFEFIRVEDIKSLTAHIVENFYKALESIEYVQTFKGLKTKYEQEKDRQNQKLNSVPSILRSNRFRRDAKALEEDEEMWFNEDEEEEGKAVVAPVEKPKPEDDFPDNYEKFMETKKAKESEDKENLPKRTSPGGFKFTFSHSASAANGTNSKSVVAQIPPATSNGSSSKTTNLPTSVTATKGSLVGLVDYPDDEEEDEEEESSPRKRPRLGS

SEQ ID NO: 18357 - protein, 259 aa, Homo sapiens
MYSNVIGTVTSGKRKVYLLSLLLIGFWDCVTCHGSPVDICTAKPRDIPMNPMCIYRSPEKKATEDEGSEQKIPEATNRRVWELSKANSRFATTFYQHLADSKNDNDNIFLSPLSISTAFAMTKLGACNDTLQQLMEVFKFDTISEKTSDQIHFFFAKLNCRLYRKANKSSKLVSANRLFGDKSLTFNDLYVSDAFHKAFLEVNEEGSEAAASTAVVIAGRSLNPNRVTFKANRPFLVFIREVPLNTIIFMGRVANPCVK

SEQ ID NO: 18358 - protein, 282 aa, Homo sapiens
MLLLAPQMLNLLLLALPVLASRAYAAPAPGQALQRVGIVGGQEAPRSKWPWQVSLRVRDRYWMHFCGGSLIHPQWVLTAAHCVGPDVKDLAALRVQLREQHLYYQDQLLPVSRIIVHPQFYTAQIGADIALLELEEPVNVSSHVHTVTLPPASETFPPGMPCWVTGWGDVDNDERLPPPFPLKQVKVPIMENHICDAKYHLGAYTGDDVRIVRDDMLCAGNTRRDSCQGDSGGPLVCKVNGTWLQAGVVSWGEGCAQPNRPGIYTRVTYYLDWIHHYVPKKP

SEQ ID NO: 18359 - protein, 227 aa, Homo sapiens
MTSSRLWFSLLLAAAFAGRATALWPWPQNFQTSDQRYVLYPNNFQFQYDVSSAAQPGCSVLDEAFQRYRDLLFGSGSWPRPYLTGKRHTLEKNVLVVSVVTPGCNQLPTLESVENYTLTINDDQCLLLSETVWGALRGTPEQKALVIGGEACMWGEYVDNTNLVPRLWPRAGAVAERLWSNKLTSDLTFAYERLSHFRCELLRLQGRRMCLRLRGKKVVKDTEDRDV

SEQ ID NO: 18360 - protein, 610 aa, Homo sapiens
MRGAARLGRPGRSCLPGARGLRAPPPPPLLLLLALLPLLPAPGAAAAPAPRPPELQSASAGPSVSLYLSEDEVRRLIGLDAELYYVRNDLISHYALSFSLLVPSETNFLHFTWHAKSKVEYKLGFQVDNVLAMDMPQVNISVQGEVPRTLSVFRVELSCTGKVDSEVMILMQLNLTVNSSKNFTVLNFKRRKMCYKKLEEVKTSALDKNTSRTIYDPVHAAPTTSTRVFYISVGVCCAVIFLVAIILAVLHLHSMKRIELDDSISASSSSQGLSQPSTQTTQYLRADTPNNATPITSSLGYPTLRIEKNDLRSVTLLEAKGKVKDIAISRERITLKDVLQEGTFGRIFHGILIDEKDPNKEKQAFVKTVKDQASEIQVTMMLTESCKLRGLHHRNLLPITHVCIEEGEKPMVILPYMNWGNLKLFLRQCKLVEANNPQAISQQDLVHMAIQIACGMSYLARREVIHKDLAARNCVIDDTLQVKITDNALSRDLFPMDYHCLGDNENRPVRWMALESLVNNEFSSASDVWAFGVTLWELMTLGQTPYVDIDPFEMAAYLKDGYRIAQPINCPDELFAVMACCWALDPEERPKFQQLVQCLTEFHAALGAYV

SEQ ID NO: 18361 - protein, 844 aa, Homo sapiens
MVSRCSCLGVQCLLLSLLLLAAWEVGSGQLHYSVYEEARHGTFVGRIAQDLGLELAELVQRLFRVASKRHGDLLEVNLQNGILFVNSRIDREELCGRSVECSIHLEVIVDRPLQVFHVDVEVKDINDNPPRFSVTEQKLSIPESRLLDSRFPLEGASDADVGENALLTYKLSPNEYFVLDIINKKDKDKFPVLVLRKLLDREENPQLKLLLTATDGGKPEFTGSVSLLILVLDANDNAPIFDRPVYEVKMYENQVNQTLVIRLNASDSDEGINKEMMYSFSSLVPPTIRRKFWINERTGEIKVNDAIDFEDSNTYEIHVDVTDKGNPPMVGHCTVLVELLDENDNSPEVIVTSLSLPVKEDAQVGTVIALISVSDHDSGANGQVTCSLTPHVPFKLVSTYKNYYSLVLDSALDRERVSAYELVVTARDGGSPPLWATASVSVEVADVNDNAPAFAQSEYTVFVKENNPPGCHIFTVSAWDADAQENALVSYSLVERRLGERSLSSYVSVHAESGKVYALQPLDHEELELLQFQVSARDGGVPPLGSNLTLQVFVLDENDNAPALLASPAGSAGGAVSELVLRSVVAGHVVAKVRAVDADSGYNAWLSYELQSAAVGARIPFRVGLYTGEISTTRALDETDSPRQRLLVLVKDHGEPSLTATATVLVSLVEGSQAPKASSRASVGVAPEVALVDVNVYLIIAICAVSSLLVLTLLLYTALRCSAAPTEGACGPVKPTLVCSSAVGSWSYSQQRRQRVCSGEGLPKADLMAFSPSLPPCPMVDVDGEDQSIGGDHSRKVGYYVFIFLLCFMNNIFSYRIFSNMYQNISFLSTFHLCLNISSDTFVI

SEQ ID NO: 18362 - protein, 403 aa, Homo sapiens
MSGRVGDLSPRQKEALAKFRENVQDVLPALPNPDDYFLLRWLRARSFDLQKSEAMLRKHVEFRKQKDIDNIISWQPPEVIQQYLSGGMCGYDLDGCPVWYDIIGPLDAKGLLFSASKQDLLRTKMRECELLLQECAHQTTKLGRKVETITIIYDCEGLGLKHLWKPAVEAYGEFLCMFEENYPETLKRLFVVKAPKLFPVAYNLIKPFLSEDTRKKIMVLGANWKEVLLKHISPDQVPVEYGGTMTDPDGNPKCKSKINYGGDIPRKYYVRDQVKQQYEHSVQISRGSSHQVEYEILFPGCVLRWQFMSDGADVGFGIFLKTKMGERQRAGEMTEVLPNQRYNSHLVPEDGTLTCSDPGIYVLRFDNTYSFIHAKKVNFTVEVLLPDKASEEKMKQLGAGTPK

SEQ ID NO: 18363 - protein, 144 aa, Homo sapiens
MARQKKMGQSVLRAVFFLVLGLLGHSHGGFPNTISIGGLFMRNTVQEHSAFRFAVQLYNTNQNTTEKPFHLNYHVDHLDSSNSFSVTNACPAERDYLPWPGSIRENNWTALPCCKDHGLLHLKCSPGGARQNWAYCIWGVTGEL

SEQ ID NO: 18364 - protein, 508 aa, Homo sapiens
MEPAGPAPGRLGPLLCLLLAASCAWSGVAGEEELQVIQPDKSVLVAAGETATLRCTATSLIPVGPIQWFRGAGPGRELIYNQKEGHFPRVTTVSDLTKRNNMDFSIRIGNITPADAGTYYCVKFRKGSPDDVEFKSGAGTELSVRAKPSAPVVSGPAARATPQHTVSFTCESHGFSPRDITLKWFKNGNELSDFQTNVDPVGESVSYSIHSTAKVVLTREDVHSQVICEVAHVTLQGDPLRGTANLSETIRVPPTLEVTQQPVRAENQVNVTCQVRKFYPQRLQLTWLENGNVSRTETASTVTENKDGTYNWMSWLLVNVSAHRDDVKLTCQVEHDGQPAVSKSHDLKVSAHPKEQGSNTAAENTGSNERNIYIVVGVVCTLLVALLMAALYLVRIRQKKAQGSTSSTRLHEPEKNAREITQVQSLDTNDITYADLNLPKGKKPAPQAAEPNNHTEYASIQTSPQPASEDTLTYADLDMVHLNRTPKQPAPKPEPSFSEYASVQVPRK

SEQ ID NO: 18365 - protein, 140 aa, Homo sapiens
MAQQRALPQSKETLLQSYNKRLKDDIKSIMDNFTEIIKTAKIEDETQVSRATQGEQDNYEMHVRAANIVRAGESLMKLVSDLKQFLILNDFPSVNEAIDQRNQQLRTLQEECDRKLITLRDEISIDLYELEEEYYSSRYK

SEQ ID NO: 18366 - protein, 422 aa, Homo sapiens
MPSPLGPPCLPVMDPETTLEEPETARLRFRGFCYQEVAGPREALARLRELCCQWLQPEAHSKEQMLEMLVLEQFLGTLPPEIQAWVRGQRPGSPEEAAALVEGLQHDPGQLLGWITAHVLKQEVLPAAQKTEEPLGSPHPSGTVESPGEGPQDTRIEGSVQLSCSVKEEPNVDGQEVAPSSPPLAAQSPEGNHGHQEPASTSFHPPRIQEEWGLLDRSQKELYWDAMLEKYGTVVSLGLPPHQPEAQAQSELGMLLTGTGVCRSLRSGNESEGPPGCPEAQPPQGPGPAAWEGLSGAATPAPTVRPGTPPVPTQPTPAETRLEPAATPRKPYTCEQCGRGFDWKSVFVIHHRTHTSGPGVQSPGLATGESTEKPPQGEVAFPHHPRRSLTGPRSYPCEECGCSFSWKSQLVIHRKSHRPEVP

SEQ ID NO: 18367 - protein, 1253 aa, Homo sapiens
MAAQVTLEDALSNVDLLEELPLPDQQPCIEPPPSSLLYQPNFNTNFEDRNAFVTGIARYIEQATVHSSMNEMLEEGQEYAVMLYTWRSCSRAIPQVKCNEQPNRVEIYEKTVEVLEPEVTKLMNFMYFQRNAIERFCGEVRRLCHAERRKDFVSEAYLITLGKFINMFAVLDELKNMKCSVKNDHSAYKRAAQFLRKMADPQSIQESQNLSMFLANHNKITQSLQQQLEVISGYEELLADIVNLCVDYYENRMYLTPSEKHMLLKVMGFGLYLMDGSVSNIYKLDAKKRINLSKIDKYFKQLQVVPLFGDMQIELARYIKTSAHYEENKSRWTCTSSGSSPQYNICEQMIQIREDHMRFISELARYSNSEVVTGSGRQEAQKTDAEYRKLFDLALQGLQLLSQWSAHVMEVYSWKLVHPTDKYSNKDCPDSAEEYERATRYNYTSEEKFALVEVIAMIKGLQVLMGRMESVFNHAIRHTVYAALQDFSQVTLREPLRQAIKKKKNVIQSVLQAIRKTVCDWETGHEPFNDPALRGEKDPKSGFDIKVPRRAVGPSSTQLYMVRTMLESLIADKSGSKKTLRSSLEGPTILDIEKFHRESFFYTHLINFSETLQQCCDLSQLWFREFFLELTMGRRIQFPIEMSMPWILTDHILETKEASMMEYVLYSLDLYNDSAHYALTRFNKQFLYDEIEAEVNLCFDQFVYKLADQIFAYYKVMAGSLLLDKRLRSECKNQGATIHLPPSNRYETLLKQRHVQLLGRSIDLNRLITQRVSAAMYKSLELAIGRFESEDLTSIVELDGLLEINRMTHKLLSRYLTLDGFDAMFREANHNVSAPYGRITLHVFWELNYDFLPNYCYNGSTNRFVRTVLPFSQEFQRDKQPNAQPQYLHGSKALNLAYSSIYGSYRNFVGPPHFQVICRLLGYQGIAVVMEELLKVVKSLLQGTILQYVKTLMEVMPKICRLPRHEYGSPGILEFFHHQLKDIVEYAELKTVCFQNLREVGNAILFCLLIEQSLSLEEVCDLLHAAPFQNILPRVHVKEGERLDAKMKRLESKYAPLHLVPLIERLGTPQQIAIAREGDLLTKERLCCGLSMFEVILTRIRSFLDDPIWRGPLPSNGVMHVDECVEFHRLWSAMQFVYCIPVGTHEFTVEQCFGDGLHWAGCMIIVLLGQQRRFAVLDFCYHLLKVQKHDGKDEIIKNVPLKKMVERIRKFQILNDEIITILDKYLKSGDGEGTPVEHVRCFQPPIHQSLASS

SEQ ID NO: 18368 - protein, 1002 aa, Homo sapiens
MWPQPRLPPRPAMSEETRQSKLAAAKKKLREYQQRNSPGVPTGAKKKKKIKNGSNPETTTSGGCHSPEDTPKDNAATLQPSDDTVLPGGVPSPGASLTSMAASQNHDADNVPNLMDETKTFSSTESLRQLSQQLNGLVCESATCVNGEGPASSANLKDLESRYQQLAVALDSSYVTNKQLNITIEKLKQQNQEITDQLEEEKKECHQKQGALREQLQVHIQTIGILVSEKAELQTALAHTQHAARQKEGESEDLASRLQYSRRRVGELERALSAVSTQQKKADRYNKELTKERDALRLELYKNTQSNEDLKQEKSELEEKLRVLVTEKAGMQLNLEELQKKLEMTELLLQQFSSRCEAPDANQQLQQAMEERAQLEAHLGQVMESVRQLQMERDKYAENLKGESAMWRQRMQQMSEQVHTLREEKECSMSRVQELETSLAELRNQMAEPPPPEPPAGPSEVEQQLQAEAEHLRKELEGLAGQLQAQVQDNEGLSRLNREQEERLLELERAAELWGEQAEARRQILETMQNDRTTISRALSQNRELKEQLAELQSGFVKLTNENMEITSALQSEQHVKRELGKKLGELQEKLSELKETVELKSQEAQSLQQQRDQYLGHLQQYVAAYQQLTSEKEVLHNQLLLQTQLVDQLQQQEAQGKAVAEMARQELQETQERLEAATQQNQQLRAQLSLMAHPGEGDGLDREEEEDEEEEEEEAVAVPQPMPSIPEDLESREAMVAFFNSAVASAEEEQARLRGQLKEQRVRCRRLAHLLASAQKEPEAAAPAPGTGGDSVCGETHRALQGAMEKLQSRFMELMQEKADLKERVEELEHRCIQLSGETDTIGEYIALYQSQRAVLKERHREKEEYISRLAQDKEEMKVKLLELQELVLRLVGDRNEWHGRFLAAAQNPADEPTSGAPAPQELGAANQQGDLCEVSLAGSVEPAQGEAREGSPRDNPTAQQIMQLLREMQNPRERPGLGSNPCIPFFYRADENDEVKITVI

SEQ ID NO: 18369 - protein, 534 aa, Homo sapiens
MSDPYMPSYYAPSIGFPYSLGEAAWSTAGDQPMPYLTTYGQMSNGEHHYIPDGVFSQPGALGNTPPFLGQHGFNFFPGNADFSTWGTSGSQGQSTQSSAYSSSYGYPPSSLGRAITDGQAGFGNDTLSKVPGISSIEQGMTGLKIGGDLTAAVTKTVGTALSSSGMTSIATNSVPPVSSAAPKPTSWAAIARKPAKPQPKLKPKGNVGIGGSAVPPPPIKHNMNIGTWDEKGSVVKAPPTQPVLPPQTIIQQPQPLIQPPPLVQSQLPQQQPQPPQPQQQQGPQPQAQPHQVQPQQQQLQNRWVAPRNRGAGFNQNNGAGSENFGLGVVPVSASPSSVEVHPVLEKLKAINNYNPKDFDWNLKNGRVFIIKSYSEDDIHRSIKYSIWCSTEHGNKRLDAAYRSLNGKGPLYLLFSVNGSGHFCGVAEMKSVVDYNAYAGVWSQDKWKGKFEVKWIFVKDVPNNQLRHIRLENNDNKPVTNSRDTQEVPLEKAKQVLKIIATFKHTTSIFDDFAHYEKRQEEEEAMRRERNRNKQ

SEQ ID NO: 18370 - protein, 202 aa, Homo sapiens
MCAARLAAAAAAAQSVYAFSARPLAGGEPVSLGSLRGKVLLIENVASLGTTVRDYTQMNELQRRLGPRGLVVLGFPCNQFGHQENAKNEEILNSLKYVRPGGGFEPNFMLFEKCEVNGAGAHPLFAFLREALPAPSDDATALMTDPKLITWSPVCRNDVAWNFEKFLVGPDGVPLRRYSRRFQTIDIEPDIEALLSQGPSCA

SEQ ID NO: 18371 - protein, 416 aa, Homo sapiens
MLKLAPWCLSFVTTPMFLVAMRKELASRMEWSGKQPICIKACREPKISDLVRRRVLPMQVQSRETPLHQLYSAAFSKQKLQSAPTKKPALPFGDLPMGYQHLHTQLQYECISPFYRRLGSSRRTCLRTGKWSGRAPSCIPICGKIENITAPKTQGLRWPWQAAIYRRTSGVHDGSLHKGAWFLVCSGALVNERTVVVAAHCVTDLGKVTMIKTADLKVVLGKFYRDDDRDEKTIQSLQISAIILHPNYDPILLDADIAILKLLDKARISTRVQPICLAASRDLSTSFQESHITVAGWNVLADVRSPGFKNDTLRSGVVSVVDSLLCEEQHEDHGIPVSVTDNMFCASWEPTAPSDICTAETGGIAAVSFPGRASPEPRWHLMGLVSWSYDKTCSHRLSTAFTKVLPFKDWIERNMK

SEQ ID NO: 18372 - protein, 133 aa, Homo sapiens [sequence omitted]

SEQ ID NO: 18373 - protein, 385 aa, Homo sapiens
MARENGESSSSWKKQAEDIKKIFEFKETLGTGAFSEVVLAEEKATGKLFAVKCIPKKALKGKESSIENEIAVLRKIKHENIVALEDIYESPNHLYLVMQLVSGGELFDRIVEKGFYTEKDASTLIRQVLDAVYYLHRMGIVHRDLKPENLLYYSQDEESKIMISDFGLSKMEGKGDVMSTACGTPGYVAPEVLAQKPYSKAVDCWSIGVIAYILLCGYPPFYDENDSKLFEQILKAEYEFDSPYWDDISDSAKDFIRNLMEKDPNKRYTCEQAARHPWIAGDTALNKNIHESVSAQIRKNFAKSKWRQAFNATAVVRHMRKLHLGSSLDSSNASVSSSLSLASQKDCLAPSTLCSFISSSSGVSGVGAERRPRPTTVTAVHSGSK

SEQ ID NO: 18374 - protein, 454 aa, Homo sapiens
LDFFRVVENQQPPATMPLNVSFTNRNYDLDYDSVQPYFYCDEEENFYQQQQQSELQPPAPSEDIWKKFELLPTPPLSPSRRSGLCSPSYVAVTPFSLRGDNDGGGGSFSTADQLEMVTELLGGDMVNQSFICDPDDETFIKNIIIQDCMWSGFSAAAKLVSEKLASYQAARKDSGSPNPARGHSVCSTSSLYLQDLSAAASECIDPSVVFPYPLNDSSSPKSCASQDSSAFSPSSDSLLSSTESSPQGSPEPLVLHEETPPTTSSDSEEEQEDEEEIDVVSVEKRQAPGKRSESGSPSAGGHSKPPHSPLVLKRCHVSTHQHNYAAPPSTRKDYPAAKRVKLDSVRVLRQISNNRKCTSPRSSDTEENVKRRTHNVLERQRRNELKRSFFALRDQIPELENNEKAPKVVILKKATAYILSVQAEEQKLISEEDLLRKRREQLKHKLEQLRNSCA

SEQ ID NO: 18375 - protein, 810 aa, Homo sapiens
MQRAREAEMMKSQVLFPFLLSLFCGAISQQIRYTIPEELANGSRVGKLAKDLGLSVRELPTRKLRVSAEDYFNVSLESGDLLVNGRIDREKICGRKLECALEFETVAENPMNVFHVVVVIQDINDNAPRFVAKGIDLEICESALPGVKFSLDSAQDADVEGNSLKLYTINPNQYFSLSTKESPDGSKYPVLLLEKPLDREHQSSHRLILTAMDGGDPPLSGTTHIWIRVTDANDNAPVFSQEVYRVSLQENVPWGTSVLRVMATDQDEGINAEITYAFLNSPISTSLFNLNPNTGDITTNGTLDFEETSRYVLSVEAKDGGVHTAHCNVQIEIVDENDNAPEVTFMSFSNQIPEDSDLGTVIALIKVRDKDSGQNGMVTCYTQEEVPFKLESTSKNYYKLVIAGALNREQTADYNVTIIATDKGKPALSSRTSITLHISDINDNAPVFHQASYVVHVSENNPPGASIAQVSASDPDLGPNGRVSYSILASDLEPRELLSYVSVSPQSGVVFAQRAFDHEQLRAFELTLQARDQGSPALSANVSLRVLVGDLNDNAPRVLYPALGPDGSALFDMVPRAAEPGYLVTKVVAVDADSGHNAWLSYHVLQASEPGLFSLGLRTGEVRTARALGDRDAARQRLLVAVRDGGQPPLSATATLHLIFADSLQEVLPDLSDRPEPSDPQTELQFYLVVALALISVLFLLAVILAIALRLRRSSSLDTEGCFQTGLCSKSGPGVPPNHSEGTLPYSYNLCIASHSAKTEFNSLNLTPEMAPPQDLLCDDPSMVVCASNEDHKIAYDPSLSSHVSFCKSS

SEQ ID NO: 18376 - protein, 612 aa, Homo sapiens
MSHPSWLPPKSTGEPLGHVPARMETTHSFGNPSISVSTQQPPKKFAPVVAPKPKYNPYKQPGGEGDFLPPPPPPLDDSSALPSISGNFPPPPPLDEEAFKVQGNPGGKTLEERRSSLDAEIDSLTSILADLECSSPYKPRPPQSSTGSTASPPVSTPVTGHKRMVIPNQPPLTATKKSTLKPQPAPQAGPIPVAPIGTLKPQPQPVPASYTTASTSSRPTFNVQVKSAQPSPHYMAAPSSGQIYGSGPQGYNTQPVPVSGQCPPPSTRGGMDYAYIPPPGLQPEPGYGYAPNQGRYYEGYYAAGPGYGGRNDSDPTYGQQGHPNTWKREPGYTPPGAGNQNPPGMYPVTGPKKTYITDPVSAPCAPPLQPKGGHSGQLGPSSVAPSFRPEDELEHLTKKMLYDMENPPADEYFGRCARCGENVVGEGTGCTAMDQVFHVDCFTCIICNNKLRGQPFYAVEKKAYCEPCYINTLEQCNVCSKPIMERILRATGKAYHPHCFTCVMCHRSLDGIPFTVDAGGLIHCIEDFHKKFAPRCSVCKEPIMPAPGQEETVRIVALDRDFHVHCYRCEDCGGLLSEGDNQGCYPLDGHILCKTCNSARIRVLTAKASTDL

SEQ ID NO: 18377 - protein, 477 aa, Homo sapiens
MGRAGGGGPGRGPPPLLLFLGAALVLASGAVPAREAGSAVEAEELVKGSPAWEPPANDTREEAGPPAAGEDEASWTAPGGELAGPEEVLQESAAVTGTAWLEADSPGLGGVTAEAGSGDAQALPATLQAPHEVLGQSIMPPAIPEATEASGPPSPTPGDKLSPASELPKESPLEVWLNLGGSTPDPQGPELTYPFQGTLEPQPASDIIDIDYFEGLDGEGRGADLGSFPGSPGTSENHPDTEGETPSWSLLDLYDDFTPFDESDFYPTTSFYDDLDEEEEEEEDDKDAVGGGDLEDENELLVPTGKPGLGPGTGQPTSRWHAVPPQHTLGSVPGSSIALRPRPGEPGRDLASSENGTECRSGFVRHNGSCRSVCDLFPSYCHNGGQCYLVENIGAFCRCNTQDYIWHKGMRCESIITDFQVMCVAVGSAALVLLLLFMMTVFFAKKLYLLKTENTKLRRTKMILVLPTKSRRFSSPA

SEQ ID NO: 18378 - protein, 53 aa, Homo sapiens
MKVSEAALSLLVLILIITSASRSQPSWSAVSRSRLTTTSASRVQVILLPQPPE

SEQ ID NO: 18379 - protein, 189 aa, Homo sapiens
MAAALFVLLGFALLGTHGASGAGPPRVKAVKSSEHINEGETAMLVCKSESVPPVTDWAWYKITDSEDKALMNGSESRFFVSSSQGRSELHIENLNMEADPGQYRCNGTSSKGSDQAIITLRVRSHLAALWPFLGIVAEVLVLVTIIFIYEKRRKPEDVLDDDDAGSAPLKSSGQHQNDKGKNVRQRNSS

SEQ ID NO: 18380 - protein, 344 aa, Homo sapiens
MHRTTRIKITELNPHLMCALCGGYFIDATTIVECLHSFCKTCIVRYLETNKYCPMCDVQVHKTRPLLSIRSDKTLQDIVYKLVPGLFKDEMKRRRDFYAAYPLTEVPNGSNEDRGEVLEQEKGALSDDEIVSLSIEFYEGARDRDEKKGPLENGDGDKEKTGVRFLRCPAAMTVMHLAKFLRNKMDVPSKYKVEVLYEDEPLKEYYTLMDIAYIYPWRRNGPLPLKYRVQPACKRLTLATVPTPSEGTNTSGASECESVSDKAPSPATLPATSSSLPSPATPSHGSPSSHGPPATHPTSPTPPSTASGATTAANGGSLNCLQTPSSTSRGRKMTVNGAPVPPLT

SEQ ID NO: 18381 - protein, 130 aa, Homo sapiens
MKLAFLFLGPMALLLLAGYGCVLGASSGNLRTFVGCAVREFTFLAKKPGCRGLRITTDACWGRCETWEKPILEPPYIEAHHRVCTYNETKQVTVKLPNCAPGVDPFYTYPVAIRCDCGACSTATTECETI

SEQ ID NO: 18382 - protein, 192 aa, Homo sapiens
MLRGMYLTRNGNLQRRHTMKEAKDMKNKLGIFRRRNESPGAPPAGKADKMMKSFKPTSEEALKWGESLEKLLVHKYGLAVFQAFLRTEFSEENLEFWLACEDFKKVKSQSKMASKAKKIFAEYIAIQACKEVNLDSYTREHTKDNLQSVTRGCFDLAQKRIFGLMEKDSYPRFLRSDLYLDLINQKKMSPPL

SEQ ID NO: 18383 - protein, 446 aa, Homo sapiens [sequence omitted]

SEQ ID NO: 18384 - protein, 109 aa, Homo sapiens
MKISVAAIPFFLLITIALGTKTESSSQTGGKPKVVKIQLKLVGGPYHPSECCFTYTTYKIPRQRIMDYYETNSQCSKPGIVFITKRGHSVCTNPSDKWVQDYIKDMKEN

SEQ ID NO: 18385 - protein, 103 aa, Homo sapiens [sequence omitted]

SEQ ID NO: 18386 - protein, 467 aa, Homo sapiens
MAPKLLLLLCLFSGLHARSRKVEEDEYEDSSSNQKWVLAPKSQDTDVTLILNKLLREYDKKLRPDIGIKPTVIDVDIYVNSIGPVSSINMEYQIDIFFAQTWTDSRLRFNSTMKILTLNSNMVGLIWIPDTIFRNSKTAEAHWITTPNQLLRIWNDGKILYTLRLTINAECQLQLHNFPMDEHSCPLIFSSYGYPKEEMIYRWRKNSVEAADQKSWRLYQFDFMGLRNTTEIVTTSAGDYVVMTIYFELSRRMGYFTIQTYIPCILTVVLSWVSFWIKKDATPARTALGITTVLTMTTLSTIARKSLPRVSYVTAMDLFVTVCFLFVFAALMEYATLNYYSSCRKPTTTKKTTSLLHPDSSRWIPERISLQAPSNYSLLDMRPPPTAMITLNNSVYWQEFEDTCVYECLDGKDCQSFFCCYEECKSGSWRKGRIHIDILELDSYSRVFFPTSFLLFNLVYWVGYLYL

SEQ ID NO: 18387 - protein, 351 aa, Homo sapiens
MAATAAAVVAEEDTELRDLLVQTLENSGVLNRIKAELRAAVFLALEEQEKVENKTPLVNESLKKFLNTKDGRLVASLVAEFLQFFNLDFTLAVFQPETSTLQGLEGRENLARDLGIIEAEGTVGGPLLLEVIRRCQQKEKGPTTGEKANDEANQSDTSVSLSEPKSKSSLHLLSHETKIGSFLSNRTLDGKDKAGLCPDEDDMEGDSFFDDPIPKPEKTYGLRKEPRKQAGSLASLSDAPPLKSGLSSLAGAPSLKDSESKRGNTVLKDLKLISDKIGSLGLGTGEDDDYVDDFNSTSHRSEKSEISIGEEIEEDLSVEIDDINTSDKTITQLECLLSIGALHFKNTADIF

SEQ ID NO: 18388 - protein, 81 aa, Homo sapiens
MTQQGAALQNYNNELVKCIEELCQKREELCRQIQEEEDEKQRLQNEILESSQTLLSVLKREAGNLTKATAPDQKSSGGRDS

SEQ ID NO: 18389 - protein, 254 aa, Homo sapiens [sequence omitted]

SEQ ID NO: 18390 - protein, 85 aa, Homo sapiens
MARRHCFSYWLLVCWLVVTVAEGQEEVFTPPGDSQNNADATDCQIFTLTPPPAPRSPVTRAQPITKTPRYFPRRRLQRGSSSEES

SEQ ID NO: 18391 - protein, 807 aa, Homo sapiens
MLSSWQGGPRPRQLLLWLLILAAWETGSGQLHYSVPEEAKHGTFVGRIAQDLGLELAELVPRLFRVASKRHGDLLEVNLQNGILFVNSRIDREELCGRSAECSIHLEVIVDRPLQVFHVEVKVRDINDNPPIFPESKKRIIIAESRPPETRFPLDGASDADIGVNSALTYRLDPNDYFTLDAQNSLEQMSSLSLVLRKTLDREEIQEHSLLLTASDGGKPELTGTVQLLITILDVNDNAPEFYQSVYKVTVLENAFNGTLVIKLNATDPDDGTNGDIVYSFRRPVWPAVVYAFTINPNNGEIRTKGKLDFEEKKLYEISVEAVDKGNIPMAGHCTLLVEVLDVNDNAPEVTITSLSLPIREDTQPSAIIALISVSDRDSGSNGQVTCTLTPHVPFKLVSTYKNYYSLVLDSALDRESVSAYELVVTARDGGSPSLWATASVSVGVADVNDNAPAFAQPEYTVFVKENNPPGCHIFTVSAQDADAQENALVSYSLVERRVGERALSSYVSVHAESGKVYALQPLDHEELELLQFQVSARDSGVPPLGSNVTLQVFVLDENDNAPALLTPGAGSAGGTVSELMPRSVGAGHVVAKVRAVDADSGYNAWLSYELQLAAVGARIPFRVGLYTGEISTTRPLDEVDAPHHRLLVLVKDHGEPALTATATVLLSLVESGQAPQASSRASAGAVGPEAALVDVNVYLIIAICAVSSLLVLTLLLYTALRCSAPPTEGACAPGKPTLVCSSAAGSWSYSQQRRPRVCSGEGPHKTDLMAFSPSLPPCLGSAEGTGQREEDSECLKEVSLYFKKLS

SEQ ID NO: 18392 - protein, 187 aa, Homo sapiens
MLLILLSVALLAFSSAQDLNEDVSQEDVPLVISDGGDSEQFLDEERQGPPLGGQQSQPSAGDGNQDDGPQQGPPQQGGQQQQGPPPPQGKPQGPPQQGGQQQQGPPPPQGKPQGPPQQGGHPPPPQGRPQGPPQQGGHPRPPRGRPQGPPQQGGHQQGPPPPPPGKPQGPPPQGGRPQGPPQGQSPQ

SEQ ID NO: 18393 - protein, 126 aa, Homo sapiens
MPDPAKSAPAPKKGSKKAVTKAQKKDGKKRKRSRKESYSVYVYKVLKQVHPDTGISSKAMGIMNSFVNDIFERIAGEASRLAHYNKRSTITSREIQTAVRLLLPGELAKHAVSEGTKAVTKYTSSK

SEQ ID NO: 18394 - protein, 139 aa, Homo sapiens
MASHRLLLLCLAGLVFVSEAGPTGTGESKCPLMVKVLDAVRGSPAINVAVHVFRKAADDTWEPFASGKTSESGELHGLTTEEEFVEGIYKVEIDTKSYWKALGISPFHEHAEVVFTANDSGPRRYYSYSTTAVVTNPKE

SEQ ID NO: 18395 - protein, 256 aa, Homo sapiens [sequence omitted]

SEQ ID NO: 18396 - protein, 115 aa, Homo sapiens
MSPIFTCITILCLLAAGSPGEEVAQTPKHLVRGEGQKAKLYCAPIKGHSYVFWYQQVLKNEFKFLISFQNENVFDETGMPKERFSAKCLPNSPCSLEIQATKLEDSAVYFCASSQ

SEQ ID NO: 18397 - protein, 270 aa, Homo sapiens
MASRGVVGIFFLSAVPLVCLELRRGIPDIGIKDFLLLCGRILLLLALLTLTISVTTSWLNSFKSPQVYLKEEEEKNEKRQKLVRKKQQEAQGEKASRYIENVLKPHQEMKLRKLEERFYQMTGEAWKLSSGHKLGGDEGTSQTSFETSNREAAKSQNLPKPLTEFPSPAEQPTCKEIPDLPEEPSQTAEEVVTVALRCPSGNVLRRRFLKSYSSQVLFDWMTRIGYHISLYSLSTSFPRRPLAVEGGQSLEDIGITVDTVLILEEKEQTN

SEQ ID NO: 18398 - protein, 884 aa, Homo sapiens [sequence omitted]

SEQ ID NO: 18399 - protein, 811 aa, Homo sapiens
MEAARALRLLLVVCGCLALPPLAEPVCPERCDCQHPQHLLCTNRGLRVVPKTSSLPSPHDVLTYSLGGNFITNITAFDFHRLGQLRRLDLQYNQIRSLHPKTFEKLSRLEELYLGNNLLQALAPGTLAPLRKLRILYANGNEISRLSRGSFEGLESLVKLRLDGNALGALPDAVFAPLGNLLYLHLESNRIRFLGKNAFAQLGKLRFLNLSANELQPSLRHAATFAPLRSLSSLILSANNLQHLGPRIFQHLPRLGLLSLRGNQLTHLAPEAFWGLEALRELRLEGNRLSQLPTALLEPLHSLEALDLSGNELSALHPATFGHLGRLRELSLRNNALSALSGDIFAASPALYRLDLDGNGWTCDCRLRGLKRWMGDWHSQGRLLTVFVQCRHPPALRGKYLDYLDDQQLQNGSCADPSPSASLTADRRRQPLPTAAGEEMTPPAGLAEELPPQPQLQQQGRFLAGVAWDGAARELVGNRSALRLSRRGPGLQQPSPSVAAAAGPAPQSLDLHKKPQRGRPTRADPALAEPTPTASPGSAPSPAGDPWQRATKHRLGTEHQERAAQSDGGAGLPPLVSDPCDFNKFILCNLTVEAVGADSASVRWAVREHRSPRPLGGARFRLLFDRFGQQPKFHRFVYLPESSDSATLRELRGDTPYLVCVEGVLGGRVCPVAPRDHCAGLVTLPEAGSRGGVDYQLLTLALLTVNALLVLLALAAWASRWLRRKLRARRKGGAPVHVRHMYSTRRPLRSMGTGVSADFSGFQSHRPRTTVCALSEADLIEFPCDRFMDSAGGGAGGSLRREDRLLQRFAD

SEQ ID NO: 18400 - protein, 609 aa, Homo sapiens
MELGCWTQLGLTFLQLLLISSLPREYTVINEACPGAEWNIMCRECCEYDQIECVCPGKREVVGYTIPCCRNEENECDSCLIHPGCTIFENCKSCRNGSWGGTLDDFYVKGFYCAECRAGWYGGDCMPCSSSPCFHDGTCVLDKAGSYKCACLAGYTGQRCENLLEERNCSDPGGPVNGYQKITGGPGLINGRHAKIGTVVSFFCNNSYVLSGNEKRTCQQNGEWSGKQPICIKACREPKISDLVRRRVLPMQVQSRETPLHQLYSAAFSKQKLQSAPTKKPALPFGDLPMGYQHLHTQLQYECISPFYRRLGSSRRTCLRTGKWSGRAPSCIPICGKIENITAPKTQGLRWPWQAAIYRRTSGVHDGSLHKGAWFLVCSGALVNERTVVVAAHCVTDLGKVTMIKTADLKVVLGKFYRDDDRDEKTIQSLQISAIILHPNYDPILLDADIAILKLLDKARISTRVQPICLAASRDLSTSFQESHITVAGWNVLADVRSPGFKNDTLRSGVVSVVDSLLCEEQHEDHGIPVSVTDNMFCASWEPTAPSDICTAETGGIAAVSFPGRASPEPRWHLMGLVSWSYDKTCSHRLSTAFTKVLPFKDWIERNMK

SEQ ID NO: 18401 - protein, 1610 aa, Homo sapiens
MSLLCVRVKRAKFQGSPDKFNTYVTLKVQNVKSTTVAVRGDQPSWEQDFMFEISRLDLGLSVEVWNKGLIWDTMVGTVWIALKTIRQSDEEGPGEWSTLEAETLMKDDEICGTRNPTPHKILLDTRFELPFDIPEEEARYWTYKWEQINALGADNEYSSQEESQRKPLPTAAAQCSFEDPDSAVDDRDSDYRSETSNSFPPPYHTASQPNASVHQFPVPVRSPQQLLLQGSSRDSCNDSMQSYDLDYPERRAISPTSSSRYGSSCNVSQGSSQLSELDQYHEQDDDHRETDSIHSCHSSHSLSRDGQAGFGEQEKPLEVTGQAEKEAACEPKEMKEDATTHPPPDLVLQKDHFLGPQESFPEENASSPFTQARAHWIRAVTKVRLQLQEIPDDGDPSLPQWLPEGPAGGLYGIDSMPDLRRKKPLPLVSDLSLVQSRKAGITSAMATRTSLKDEELKSHVYKKTLQALIYPISCTTPHNFEVWTATTPTYCYECEGLLWGIARQGMRCSECGVKCHEKCQDLLNADCLQRAAEKSCKHGAEDRTQNIIMAMKDRMKIRERNKPEIFEVIRDVFTVNKAAHVQQMKTVKQSVLDGTSKWSAKITITVVCAQGLQAKDKTGSSDPYVTVQVSKTKKRTKTIFGNLNPVWEEKFHFECHNSSDRIKVRVWDEDDDIKSRVKQRLKRESDDFLGQTIIEVRTLSGEMDVWYNLEKRTDKSAVSGAIRLQISVEIKGEEKVAPYHVQYTCLHENLFHYLTDIQGSGGVRIPEARGDDAWKVYFDETAQEIVDEFAMRYGIESIYQAMTHFACLSSKYMCPGVPAVMSTLLANINAYYAHTTASTNVSASDRFAASNFGKERFVKLLDQLHNSLRIDLSTYRNNFPAGSPERLQDLKSTVDLLTSITFFRMKVQELQSPPRASQVVKDCVKACLNSTYEYIFNNCHDLYSRQYQLKQELPPEEQGPSIRNLDFWPKLITLIVSIIEEDKNSYTPVLNQFPQELNVGKVSAEVMWHLFAQDMKYALEEHEKDHLCKSADYMNLHFKVKWLHNEYVRDLPVLQGQVPEYPAWFEQFVLQWLDENEDVSLEFLRGALERDKKDGFQQTSEHALFSCSVVDVFTQLNQSFEIIRKLECPDPSILAHYMRRFAKTIGKVLMQYADILSKDFPAYCTKEKLPCILMNNVQQLRVQLEKMFEAMGGKELDLEAADSLKELQVKLNTVLDELSMVFGNSFQVRIDECVRQMADILGQVRGTGNASPDARASAAQDADSVLRPLMDFLDGNLTLFATVCEKTVLKRVLKELWRVVMNTMERMIVLPPLTDQTGTQLIFTAAKELSHLSKLKDHMVREETRNLTPKQCAVLDLALDTIKQYFHAGGNGLKKTFLEKSPDLQSLRYALSLYTQTTDTLIKTFVRSQTTQVHDGKGIRFTANEDIRPEKGSGVDDPVGEVSIQVDLFTHPGTGEHKVTVKVVAANDLKWQTAGMFRPFVEVTMVGPHQSDKKRKFTTKSKSNNWAPKYNETFHFLLGNEEGPESYELQICVKDYCFAREDRVLGLAVMPLRDVTAKGSCACWCPLGRKIHMDETGLTILRILSQRSNDEVAREFVKLKSESRSTEEGS

SEQ ID NO: 18402 - protein, 829 aa, Homo sapiens
MTNCLSFRNGRGLALLCALLGTLCETGSGQIRYSVSEELDKGSFVGNIANDLGLEPRELAERGVRIVSRGRTQLFSLNPQSGSLVTAERIDREELCAQIPLCLVKINILVEDKLKIFEVEIEIKDINDNAPNFPTEELEIKIGELTVPGTRFPIKTAFDPDVGINSLQNYKLSPNDYFSLAVNSVSEGAKYPELVLERALDREKKEIHQLVLVASDGGDPVHSGNLHIQVIVLDANDNPPMFTQPEYRVSVWENVPVGTRLLTVNATDPDEGFNAQVSYILDKMPGKIAEIFHLNSVSGEVSILKSLDYEDAMFYEIKIEAQDGPGLLSRAKILVTVLDVNDNAPEITITSLTSSVPEEGTVGREIALIDVHDRDSGQNGQVEVFVLGNLPFKLEKSIDQYYRLVTATSLDREQISEYNISLRASDGGSPPLSTETHITLHVIDINDNPPTFPHLSYSAYIPENNPRGASIFSVTAQDPDSNNNARITYALTEDTLQGAPLSSFVSINSNTGVLYALRSFDYEQFRDLKLLVTASDSGNPPLSSNVSLNLFVLDQNDNAPEILYPALPTDGSTGVELAPRSAEPGYLVTKVVAVDRDSGQNAWLSYRLLKASEPGLFSVGLHTGEVRTARALLDRDALKQSLVVAVQDHGQPPLSATVTLTVAVADRIPDILADLGSLEPSAKPNDSDLTLYLVVAVAAVSCVFLAFVIVLLALRLRRWHKSRLLQASGGGLASTPGSHFVGADGVRAFLQTYSHEVSLTADSRKSHLIFPQPNYADTLISQESCEKSEPLLITQDLLEMKGDSNLLQVSLFISLIIKNKYENVVIIKL

SEQ ID NO: 18403 - protein, 114 aa, Homo sapiens
MGTRLFFYVALCLLWTGHMDAGITQSPRHKVTETGTPVTLRCHQTENHRYMYWYRQDPGHGLRLIHYSYGVKDTDKGEVSDGYSVSRSKTEDFLLTLESATSSQTSVYFCAISE

SEQ ID NO: 18404 - protein, 195 aa, Homo sapiens [sequence omitted]

SEQ ID NO: 18405 - protein, 168 aa, Homo sapiens
MDNVQPKIKHRPFCFSVKGHVKMLRLALTVTSMTFFIIAQAPEPYIVITGFEVTVILFFILLYVLRLDRLMKWLFWPLLDLTNSIITAVFLSVVAILAMQEKKRRHLLYVGGSLCLTAVIVCCIDAFVVTTKMRTNLKRFLGVEVERKLSPAKDAYPETGPDAPQRPA

SEQ ID NO: 18406 - protein, 1342 aa, Homo sapiens
MKPAAREARLPPRSPGLRWALPLLLLLLRLGQILCAGGTPSPIPDPSVATVATGENGITQISSTAESFHKQNGTGTPQVETNTSEDGESSGANDSLRTPEQGSNGTDGASQKTPSSTGPSPVFDIKAVSISPTNVILTWKSNDTAASEYKYVVKHKMENEKTITVVHQPWCNITGLRPATSYVFSITPGIGNETWGDPRVIKVITEPIPVSDLRVALTGVRKAALSWSNGNGTASCRVLLESIGSHEELTQDSRLQVNISGLKPGVQYNINPYLLQSNKTKGDPLGTEGGLDASNTERSRAGSPTAPVHDESLVGPVDPSSGQQSRDTEVLLVGLEPGTRYNATVYSQAANGTEGQPQAIEFRTNAIQVFDVTAVNISATSLTLIWKVSDNESSSNYTYKIHVAGETDSSNLNVSEPRAVIPGLRSSTFYNITVCPVLGDIEGTPGFLQVHTPPVPVSDFRVTVVSTTEIGLAWSSHDAESFQMHITQEGAGNSRVEITTNQSIIIGGLFPGTKYCFEIVPKGPNGTEGASRTVCNRTVPSAVFDIHVVYVTTTEMWLDWKSPDGASEYVYHLVIESKHGSNHTSTYDKAITLQGLIPGTLYNITISPEVDHVWGDPNSTAQYTRPSNVSNIDVSTNTTAATLSWQNFDDASPTYSYCLLIEKAGNSSNATQVVTDIGITDATVTELIPGSSYTVEIFAQVGDGIKSLEPGRKSFCTDPASMASFDCEVVPKEPALVLKWTCPPGANAGFELEVSSGAWNNATHLESCSSENGTEYRTEVTYLNFSTSYNISITTVSCGKMAAPTRNTCTTGITDPPPPDGSPNITSVSHNSVKVKFSGFEASHGPIKAYAVILTTGEAGHPSADVLKYTYEDFKKGASDTYVTYLIRTEEKGRSQSLSEVLKYEIDVGNESTTLGYYNGKLEPLGSYRCLLRACVAGFTNITFHPQNKGLIDGAESYVSFSRYSDAVSLPQDPGVICGAVFGCIFGALVIVTVGGFIFWRKKRKDAKNNEVSFSQIKSLKRSKLIRVENFEAYFKKQQADSNCGFAEEYEDLKLVGISQPKYAAELAENRGKNRYNNVLPYDISRVKLSVQTHSTDDYINANYMPGYHSKKDFIATQGPLPNTLKDFWRMVWEKNVYAIIMLTKCVEQGRTKCEEYWPSKQAQDYGDITVAMTSEIVLPEWTIRDFTVKNIQTSESHPLRQFHFTSWPDHGVPDTTDLLINFRYLVRDYMKQSPPESPILVHCSAGVGRTGTFIAIDRLIYQIENENTVDVYGIVYDLRMHRPLMVQTEDQYVFLNQCVLDIVRSQKDSKVDLIYQNTTAMTIYENLAPVTTFGKTNGYIA

SEQ ID NO: 18407 - protein, 87 aa, Homo sapiens
MKLCVTVLSLLVLVAAFCSLALSAPMGSDPPTACCFSYTARKLPRNFVVDYYETSSLCSQPAVVGKQVCADPSESWVQEYVYDLELN

SEQ ID NO: 18408 - protein, 360 aa, Homo sapiens
MELSGATMARGLAVLLVLFLHIKNLPAQAADTCPEVKVVGLEGSDKLTILRGCPGLPGAPGPKGEAGVIGERGERGLPGAPGKAGPVGPKGDRGEKGMRGEKGDAGQSQSCATGPRNCKDLLDRGYFLSGWHTIYLPDCRPLTVLCDMDTDGGGWTVFQRRMDGSVDFYRDWAAYKQGFGSQTHSHDAHSCPFAPSSVKPPHAHNLTRGRIMFLNMFTLGQKSFTSFNVCFLNTSGFDHFPVSVARQVFPWNLVSREESGPLFSRWHYRCSGRLSDFCEDFPPPVIDTGRSSPPPPSLPHPPMPHSQHFTLLEKGHFGVQKTLTKKGESLVGTFLLPTTAEFMLWAGWLLGRDKHLALTK

SEQ ID NO: 18409 - protein, 669 aa, Homo sapiens
MQRLMMLLATSGACLGLLAVAAVAAAGANPAQRDTHSLLPTHRRQKRDWIWNQMHIDEEKNTSLPHHVGKIKSSVSRKNAKYLLKGEYVGKVFRVDAETGDVFAIERLDRENISEYHLTAVIVDKDTGENLETPSSFTIKVHDVNDNWPVFTHRLFNASVPESSAVGTSVISVTAVDADDPTVGDHASVMYQILKGKEYFAIDNSGRIITITKSLDREKQARYEIVVEARDAQGLRGDSGTATVLVTLQDINDNFPFFTQTKYTFVVPEDTRVGTSVGSLFVEDPDEPQNRMTKYSILRGDYQDAFTIETNPAHNEGIIKPMKPLDYEYIQQYSFIVEATDPTIDLRYMSPPAGNRAQVIINITDVDEPPIFQQPFYHFQLVLQISAIDKDITPRNVKFKFILNTENNFTLTDNHDNTANITVKYGQFDREHTKVHFLPVVISDNGMPSRTGTSTLTVAVCKCNEQGEFTFCEDMAAQVGVSIQAVVAILLCILTITVITLLIFLRRRLRKQARAHGKSVPEIHEQLVTYDEEGGGEMDTTSYDVSVLNSVRRGGAKPPRPALDARPSLYAQVQKPPRHAPGAHGGPGEMAAMIEVKKDEADHDGDGPPYDTLHIYGYEGSESIAESLSSLGTDSSDSDVDYDFLNDWGPRFKMLAELYGSDPREELLY

SEQ ID NO: 18410 - protein, 713 aa, Homo sapiens
MQPRTPLVLCVLLSQVLLLTSAEDLDCTPGFQQKVFHINQPAEFIEDQSILNLTFSDCKGNDKLRYEVSSPYFKVNSDGGLVALRNITAVGKTLFVHARTPHAEDMAELVIVGGKDIQGSLQDIFKFARTSPVPRQKRSIVVSPILIPENQRQPFPRDVGKVVDSDRPERSKFRLTGKGVDQEPKGIFRINENTGSVSVTRTLDREVIAVYQLFVETTDVNGKTLEGPVPLEVIVIDQNDNRPIFREGPYIGHVMEGSPTGTTVMRMTAFDADDPATDNALLRYNIRQQTPDKPSPNMFYIDPEKGDIVTVVSPALLDRETLENPKYELIIEAQDMAGLDVGLTGTATATIMIDDKNDHSPKFTKKEFQATVEEGAVGVIVNLTVEDKDDPTTGAWRAAYTIINGNPGQSFEIHTNPQTNEGMLSVVKPLDYEISAFHTLLIKVENEDPLVPDVSYGPSSTATVHITVLDVNEGPVFYPDPMMVTRQEDLSVGSVLLTVNATDPDSLQHQTIRYSVYKDPAGWLNINPINGTVDTTAVLDRESPFVDNSVYTALFLAIDSGNPPATGTGTLLITLEDVNDNAPFIYPTVAEVCDDAKNLSVVILGASDKDLHPNTDPFKFEIHKQAVPDKVWKISKINNTHALVSLLQNLNKANYNLPIMVTDSGKPPMTNITDLRVQVCSCRNSKVDCNAAGALRFSLPSVLLLSLFSLACL

SEQ ID NO: 18411 - protein, 2240 aa, Homo sapiens
MEQTWTRDYFAEDDGEMVPRTSHTAAFLSDTKDRGPPVQSQIWRSGEKVPFVQTYSLRAFEKPPQVQTQALRDFEKHLNDLKKENFSLKLRIYFLEERMQQKYEASREDIYKRNIELKVEVESLKRELQDKKQHLDKTWADVENLNSQNEAELRRQFEERQQETEHVYELLENKIQLLQEESRLAKNEAARMAALVEAEKECNLELSEKLKGVTKNWEDVPGDQVKPDQYTEALAQRDKRIEELNQSLAAQERLVEQLSREKQQLLHLLEEPTSMEVQPMTEELLKQQKLNSHETTITQQSVSDSHLAELQEKIQQTEATNKILQEKLNEMSYELKCAQESSQKQDGTIQNLKETLKSRERETEELYQVIEGQNDTMAKLREMLHQSQLGQLHSSEGTSPAQQQVALLDLQSALFCSQLEIQKLQRVVRQKERQLADAKQCVQFVEAAAHESEQQKEASWKHNQELRKALQQLQEELQNKSQQLRAWEAEKYNEIRTQEQNIQHLNHSLSHKEQLLQEFRELLQYRDNSDKTLEANEMLLEKLRQRIHDKAVALERAIDEKFSALEEKEKELRQLRLAVRERDHDLERLRDVLSSNEATMQSMESLLRAKGLEVEQLSTTCQNLQWLKEEMETKFSRWQKEQESIIQQLQTSLHDRNKEVEDLSATLLCKLGPGQSEIAEELCQRLQRKERMLQDLLSDRNKQVLEHEMEIQGLLQSVSTREQESQAAAEKLVQALMERNSELQALRQYLGGRDSLMSQAPISNQQAEVTPTGRLGKQTDQGSMQIPSRDDSTSLTAKEDVSIPRSTLGDLDTVAGLEKELSNAKEELELMAKKERESQMELSALQSMMAVQEEELQVQAADMESLTRNIQIKEDLIKDLQMQLVDPEDIPAMERLTQEVLLLREKVASVESQGQEISGNRRQQLLLMLEGLVDERSRLNEALQAERQLYSSLVKFHAHPESSERDRTLQVELEGAQVLRSRLEEVLGRSLERLNRLETLAAIGGAAAGDDTEDTSTEFTDSIEEEAAHHSHQQLVKVALEKSLATVETQNPSFSPPSPMGGDSNRCLQEEMLHLRAEFHQHLEEKRKAEEELKELKAQIEEAGFSSVSHIRNTMLSLCLENAELKEQMGEAMSDGWEIEEDKEKGELDNQSQPRDPGPQSAFSLPGSTQHLRSQLSQCKQRYQDLQEKLLLSEATVFAQANELEKYRVMLTGESLVKQDSKQIQVDLQDLGYETCGRSENEAEREETTSPECEEHNSLKEMVLMEGLCSEQGRRGSTLASSSERKPLENQLGKQEEFRVYGKSENILVLRKDIKDLKAQLQNANKVIQNLKSRVRSLSVTSDYSSSLERPRKLRAVGTLEGSSPHSVPDEDEGWLSDGTGAFYSPGLQAKKDLESLIQRVSQLEAQLPKNGLEEKLAEELRSASWPGKYDSLIQDQARELSYLRQKIREGRGICYLITRHAKDTVKSFEDLLRSNDIDYYLGQSFREQLAQGSQLTERLTSKLSTKDHKSEKDQAGLEPLALRLSRELQEKEKVIEVLQAKLDARSLTPSSSHALSDSHRSPSSTSFLSDELEACSDMDIVSEYTHYEEKKASPSHSDSIHHSSHSAVLSSKPSSTSASQGAKAESNSNPISLPTPQNTPKEANQAHSGASTVPPASTATLLSNDLEADSSYYLNSAQPHSPPRGTIELGRILEPGYLGSSGKWDVMRPQKGSVSGDLSSGSSVYQLNSKPTGADLLEEHLGEIRNLRQRLEESICINDRLREQLEHRLTSTARGRGSTSNFYSQGLESIPQLCNENRVLREDNRRLQAQLSHVSREHSQETESLREALLSSRSHLQELEKELEHQKVERQQLLEDLREKQQEVLHFREERLSLQENDSRLQHKLVLLQQQCEEKQQLFESLQSELQIYEALYGNSKKGLKAYSLDACHQIPLSSDLSHLVAEVRALRGQLEQSIQGNNCLRLQLQQQLESGAGKASLSPSSINQNFPASTDPGNKQLLLQDSAVSPPVRDVGMNSPALVFPSSASSTPGSETPIINRANGLGLDTSPVMKTPPKLEGDATDGSFANKHGRHVIGHIDDYSALRQQIAEGKLLVKKIVSLVRSACSFPGLEAQGTEVLGSKGIHELRSSTSALHHALEESASLLTMFWRAALPSTHIPVLPGKVGESTERELLELRTKVSKQERLLQSTTEHLKNANQQKESMEQFIVSQLTRTHDVLKKARTNLEVKSLRALPCTPAL

SEQ ID NO: 18412 - protein, 324 aa, Homo sapiens
MMWTWALWMLPSLCKFSLAALPAKPENISCVYYYRKNLTCTWSPGKETSYTQYTVKRTYAFGEKHDNCTTNSSTSENRASCSFFLPRITIPDNYTIEVEAENGDGVIKSHMTYWRLENIAKTEPPKIFRVKPVLGIKRMIQIEWIKPELAPVSSDLKYTLRFRTVNSTSWMEVNFAKNRKDKNQTYNLTGLQPFTEYVIALRCAVKESKFWSDWSQEKMGMTEEEAPCGLELWRVLKPAEADGRRPVRLLWKKARGAPVLEKTLGYNIWYYPESNTNLTETMNTTNQQLELHLGGESFWVSMISYNSLGKSPVATLRIPAIQEK

SEQ ID NO: 18413 - protein, 231 aa, Homo sapiens
MPKAKGKTRRQKFGYSVNRKRLNRNARRKAAPRIECSHIRHAWDHAKSVRQNLAEMGLAVDPNRAVPLRKRKVKAMEVDIEERPKELVRKPYVLNDLEAEASLPEKKGNTLSRDLIDYVRYMVENHGEDYKSGKTSSILCRRGRWRWSDWFTSQLPQAEASPGPVKLEPGCKARRCCVAPEELARSHGIRRLHTHVHTPRSGEGTVLRGSNLYSSGGSRKSQNLLFSGWVM

SEQ ID NO: 18414 - protein, 103 aa, Homo sapiens [sequence omitted]

SEQ ID NO: 18415 - protein, 818 aa, Homo sapiens
MAPPQRHPQRSEQVLLLTLLGTLWGAAAAQIRYSIPEELEKGSFVGNIVKDLGLEPQELAEHGVRIVSRGRMQLFSLNPRNGSLVTAGRIDREELCAQSPRCLVSFNILVEDKLNLYPVEVEIVDINDNTPRFLKEELEVKILENAAPSSRFPLMEVYDPDVGMNSLQGFKLSGNSHFSVDVQSEAHGPKYPELVLEGTLDREGEAVYRLVLTAMDGGDPVRSSVAQILVTVLDVNDNTPMFTQPVYRVSVPENLPVGTPVLAVTATDQDEGVHGEVTYSFVKITEKISQIFCLNVLTGEISTSANLDYEDSSFYELGVEARDGPGLRDRAKVLITILDVNDNVPEVVVTSGSRTIAESAPPGTVIALFQVFDRDSGLNGLVTCSIPRSLPFELEKSVGNYYRLVTNAALDREEVFLYNITVTATDKGTPPLSTETIISLNVADTNDNPPTFPHSSYSVYVLENNPRGASIFSVNALDPDVDQNAQVSYSLAEDTLQGAPLSSYVSINSDTGILYALRSFDYEQLRDLQLWVTASDSGDPPLSSNVSLSLFVLDQNDNAPEILYPALPTDGSTGVELAPRSAEPGYLVTKVVAVDRDSGQNAWLSYRLLKASEPGLFSVGLHTGEVRTARALLDRDALKQSLVVAVQDHGQPPLSATVTLTVAVADRIPDILADLGSLEPSAKPNDSDLTLYLVVAVAAVSCVFLAFVIVLLALRLQRWHKSRLLQASGGGLASMPGSHFVGVEGVRAFLQTYSHEVSLTADSRKSHLIFPQPNYADTLINQESYEKSEPLLITQDLLETKGEPRQLQVSFFPPKREE

SEQ ID NO: 18416 - protein, 60 aa, Homo sapiens
MRLTGPWKLWLWMSIFLLPASTSVTVRDKTGIQANSLPNHQMLFIAFKSLKQILLRLKRP

SEQ ID NO: 18417 - protein, 956 aa, Homo sapiens
MPPRAPPAPGPRPPPRAAAATDTAAGAGGAGGAGGAGGPGFRPLAPRPWRWLLLLALPAACSAPPPRPVYTNHWAVQVLGGPAEADRVAAAHGYLNLGQIGNLEDYYHFYHSKTFKRSTLSSRGPHTFLRMDPQVKWLQQQEVKRRVKRQVRSDPQALYFNDPIWSNMWYLHCGDKNSRCRSEMNVQAAWKRGYTGKNVVVTILDDGIERNHPDLAPNYDSYASYDVNGNDYDPSPRYDASNENKHGTRCAGEVAASANNSYCIVGIAYNAKIGGIRMLDGDVTDVVEAKSLGIRPNYIDIYSASWGPDDDGKTVDGPGRLAKQAFEYGIKKGRQGLGSIFVWASGNGGREGDYCSCDGYTNSIYTISVSSATENGYKPWYLEECASTLATTYSSGAFYERKIVTTDLRQRCTDGHTGTSVSAPMVAGIIALALEANSQLTWRDVQHLLVKTSRPAHLKASDWKVNGAGHKVSHFYGFGLVDAEALVVEAKKWTAVPSQHMCVAASDKRPRSIPLVQVLRTTALTSACAEHSDQRVVYLEHVVVRTSISHPRRGDLQIYLVSPSGTKSQLLAKRLLDLSNEGFTNWEFMTVHCWGEKAEGQWTLEIQDLPSQVRNPEKQGKLKEWSLILYGTAEHPYHTFSAHQSRSRMLELSAPELEPPKAALSPSQVEVPEDEEDYTGVCHPECGDKGCDGPNADQCLNCVHFSLGSVKTSRKCVSVCPLGYFGDTAARRCRRCHKGCETCSSRAATQCLSCRRGFYHHQEMNTCVTLCPAGFYADESQKNCLKCHPSCKKCVDEPEKCTVCKEGFSLARGSCIPDCEPGTYFDSELIRCGECHHTCGTCVGPGREECIHCAKNFHFHDWKCVPACGEGFYPEEMPGLPHKVCRRCDENCLSCAGSSRNCSRCKTGFTQLGTSCITNHTCSNADETFCEMVKSNRLCERKLFIQFCCRTCLLAG

SEQ ID NO: 18418 - protein, 599 aa, Homo sapiens
MDVHDLFRRLGAGAKFDTRRFSADAARFQIGKRKYDFDSSEVLQGLDFFGNKKSVPGVCGASQTHQKPQNGEKKEESLTERKREQSKKKRKTMTSEIASQEEGATIQWMSSVEAKIEDKKVQRESKLTSGKLENLRKEKINFLRNKHKIHVQGTDLPDPIATFQQLDQEYKINSRLLQNILDAGFQMPTPIQMQAIPVMLHGRELLASAPTGSGKTLAFSIPILMQLKQPANKGFRALIISPTRELASQIHRELIKISEGTGFRIHMIHKAAVAAKKFGPKSSKKFDILVTTPNRLIYLLKQDPPGIDLASVEWLVVDESDKLFEDGKTGFRDQLASIFLACTSHKVRRAMFSATFAYDVEQWCKLNLDNVISVSIGARNSAVETVEQELLFVGSETGKLLAVRELVKKGFNPPVLVFVQSIERAKELFHELIYEGINVDVIHAERTQQQRDNTVHSFRAGKIWVLICTALLARGIDFKGVNLVINYDFPTSSVEYIHRIGRTGRAGNKGKAITFFTEDDKPLLRSVANVIQQAGCPVPEYIKGFQKLLSKQKKKMIKKPLERESISTTPKCFLEKAKDKQKKVTGQNSKKKVALEDKS

SEQ ID NO: 18419 - protein, 115 aa, Homo sapiens
MATRLLCCVVLCLLGEELIDARVTQTPRHKVTEMGQEVTMRCQPILGHNTVFWYRQTMMQGLELLAYFRNRAPLDDSGMPKDRFSAEMPDATLATLKIQPSEPRDSAVYFCASGL

SEQ ID NO: 18420 - protein, 377 aa, Homo sapiens
MAAAAGPGAALSPRPCDSDPATPGAQSPKDDNEDNSNDGTQPSKRRRMGSGDSSRSCETSSQDLGFSYYPAENLIEYKWPPDETGEYYMLQEQVSEYLGVTSFKRKYPDLERRDLSHKEKLYLRELNVITETQCTLGLTALRSDEVIDLMIKEYPAKHAEYSVILQEKERQRITDHYKEYSQMQQQNTQKVEASKVPEYIKKAAKKAAEFNSNLNRERMEERRAYFDLQTHVIQVPQGKYKVLPTERTKVSSYPVALIPGQFQEYYKRYSPDELRYLPLNTALYEPPLDPELPALDSDGDSDDGEDGRGDEKRKNKGTSDSSSGNVSEGESPPDSQEDSFQGRQKSKDKAATPRKDGPKRSVLSKSVPGYKVEEKSP

SEQ ID NO: 18421 - protein, 186 aa, Homo sapiens
MWSHLNRLLFWSIFSSVTCRKAVLDCEAMKTNEFPSPCLDSKTKVVMKGQNVSMFCSHKNKSLQITYSLFRRKTHLGTQDGKGEPAIFNLSITEAHESGPYKCKAQVTSCSKYSRDFSFTIVDPVTSPVLNIMVIQTETDRHITLHCLSVNGSLPINYTFFENHVAISPAISKYDREPAEFNLTKK

SEQ ID NO: 18422 - protein, 970 aa, Homo sapiens
MLQQVNGHNPGSDGQAREYLREDLQEFLGGEVLLYKLDDLTRVNPVTLETVLRCLQARYMADTFYTNAGCTLVALNPFKPVPQLYSPELMREYHAAPQPQKLKPHVFTVGEQTYRNVKSLIEPVNQSIVVSGESGAGKTWTSRCLMKFYAVVATSPASWESHKIAERIEQRILNSNPVMEAFGNACTLRNNNSSRFGKFIQLQLNRAQQMTGAAVQTYLLEKTRVACQASSERNFHIFYQICKGASEDERLQWHLPEGAAFSWLPNPERSLEEDCFEVTREAMLHLGIDTPTQNNIFKVLAGLLHLGNIQFAASEDEAQPCQPMDDAKYSVRTAASLLGLPEDVLLEMVQIRTIRAGRQQQVFRKPCARAECDTRRDCLAKLIYARLFDWLVSVINSSICADTDSWTTFIGLLDVYGFESFPDNSLEQLCINYANEKLQQHFVAHYLRAQQEEYAVEGLEWSFINYQDNQPCLDLIEGSPISICSLINEECRLNRPSSAAQLQTRIETALAGSPCLGHNKLSREPSFIVVHYAGPVRYHTAGLVEKNKDPIPPELTRLLQQSQDPLLMGLFPTNPKEKTQEEPPGQSRAPVLTVVSKFKASLEQLLQVLHSTTPHYIRCIKPNSQGQAQTFLQEEVLSQLEACGLVETIHISAAGFPIRVSHRNFVERYKLLRRLHPCTSSGPDSPYPAKGLPEWCPHSEEATLEPLIQDILHTLPVLTQAAAITGDSAEAMPAPMHCGRTKVFMTDSMLELLECGRARVLEQCARCIQGGWRRHRHREQERQWRAVMLIQAAIRSWLTRKHIQRLHAAATVIKRAWQKWRIRMACLAAKELDGVEEKHFSQAPCSLSTSPLQTRLLEAIIRLWPLGLVLANTAMGVGSFQRKLVVWACLQLPRGSPSSYTVQTAQDQAGVTSIRALPQGSIKFHCRKSPLRYADICPEPSPYSITGFNQILLERHRLIHVTSSAFTGLG

SEQ ID NO: 18423 - protein, 437 aa, Homo sapiens
MSAVLLLALLGFILPLPGVQALLCQFGTVQHVWKVSDLPRQWTPKNTSCDSGLGCQDTLMLIESGPQVSLVLSKGCTEAKDQEPRVTEHRMGPGLSLISYTFVCRQEDFCNNLVNSLPLWAPQPPADPGSLRCPVCLSMEGCLEGTTEEICPKGTTHCYDGLLRLRGGGIFSNLRVQGCMPQPVCNLLNGTQEIGPVGMTENCDMKDFLTCHRGTTIMTHGNLAQEPTDWTTSNTEMCEVGQVCQETLLLLDVGLTSTLVGTKGCSTVGAQNSQKTTIHSAPPGVLVASYTHFCSSDLCNSASSSSVLLNSLPPQAAPVPGDRQCPTCVQPLGTCSSGSPRMTCPRGATHCYDGYIHLSGGGLSTKMSIQGCVAQPSSFLLNHTRQIGIFSAREKRDVQPPASQHEGGGAEGLESLTWGVGLALAPALWWGVVCPSC

SEQ ID NO: 18424 - protein, 913 aa, Homo sapiens
MQSRRARPRREVIQNSKEVLSLLQEKNPAFKPVLAIIQAGDDNLMQEINQNLAEEAGLNITHICLPPDSSEAEIIDEILKINEDTRVHGLALQISENLFSNKVLNALKPEKDVDGVTDINLGKLVRGDAHECFVSPVAKAVIELLEKSVGVNLDGKKILVVGAHGSLEAALQCLFQRKGSMTMSIQWKTRQLQSKLHEADIVVLGSPKPEEIPLTWIQPGTTVLNCSHDFLSGKVGCGSPRIHFGGLIEEDDVILLAAALRIQNMVSSGRRWLREQQHRRWRLHCLKLQPLSPVPSDIEISRGQTPKAVDVLAKEIGLLADEIEIYGKSKAKVRLSVLERLKDQADGKYVLVAGITPTPLGEGKSTVTIGLVQALTAHLNVNSFACLRQPSQGPTFGVKGGAAGGGYAQVIPMEEFNLHLTGDIHAITAANNLLAAAIDTRILHENTQTDKALYNRLVPLVNGVREFSEIQLARLKKLGINKTDPSTLTEEEVSKFARLDIDPSTITWQRVLDTNDRFLRKITIGQGNTEKGHYRQAQFDIAVASEIMAVLALTDSLADMKARLGRMVVASDKSGQPVTADDLGVTGALTVLMKDAIKPNLMQTLEGTPVFVHAGPFANIAHGNSSVLADKIALKLVGEEGFVVTEAGFGADIGMEKFFNIKCRASGLVPNVVVLVATVRALKMHGGGPSVTAGVPLKKEYTEENIQLVADGCCNLQKQIQITQLFGVPVVVALNVFKTDTRAEIDLVCELAKRAGAFDAVPCYHWSVGGKGSVDLARAVREAASKRSRFQFLYDVQVPIVDKIRTIAQAVYGAKDIELSPEAQAKIDRYTQQGFGNLPICMAKTHLSLSHQPDKKGVPRDFILPISDVRASIGAGFIYPLVGTMSTMPGLPTRPCFYDIDLDTETEQVKGLF

SEQ ID NO: 18425 - protein, 673 aa, Homo sapiens
MSRTLASAVPLSSPDYYERLGQLQHGLRDSEKKRLDLEKKLYEYNQSDTCRVKLKYVKLKNYLKEICESEKKAHTRNQEYLKRFERVQAHVVHFTTNTEKLQKLKLEYETQIKKMLCSKDSLGLKEELTDEDREKVAVHEGINSGTAMSRGLYQPATIFMGRQMSAILSMRDFSTEHKSPQPTKNFSIPDPHSHRQTAQSSNVTDSCVVQTSNDTQCLNKSDNIDGKASLQIGEKMPVTASVLSEEEQTHCLEIGSNTRHGKSNLSEGKKSAELNSPLRERLSPENRTTDLKCDSSSGSEGEILTREHIEVEEKRASPPVSPIPVSEYCESENKWSQEKHSPWEGVSDHLAHREPKSQKPFRKMQEEEEESWSTSSDLTISISEDDLILESPEPQPNPGGKMEGEDGIEALKLIHAEQERVALSTEKNCILQTLSSPDSEKESSTNAPTREPGQTPDSDVPRAQVGQHVATLKEHDNSVKEEATALLRKALTEECGRRSAIHSSESSCSLPSILNDNSGIKEAKPAVWLNSVPTREQEVSSGCGDKSKKENVAADIPITETEAYQLLKKATLQDNTNQTENRFQKTDASVSHLSGLNIGSGAFETKTANKIASEASFSSSEGSPLSRHENKKKPVINLKSNALWDESDDSNSEIEAALRPRNHNTDDSDDFYD

SEQ ID NO: 18426 - protein, 263 aa, Homo sapiens
MAPRARRRRPLFALLLLCALLARLQVALQIAPPCTSEKHYEHLGRCCNKCEPGKYMSSKCTTTSDSVCLPCGPDEYLDSWNEEDKCLLHKVCDTGKALVAVVAGNSTTPRRCACTAGYHWSQDCECCRRNTECAPGLGAQHPLQLNKDTVCKPCLAGYFSDAFSSTDKCRPWTNCTFLGKRVEHHGTEKSDAVCSSSLPARKPPNEPHVYLPGLIILLLFASVALVAAIIFGVCYRKKGKALTANLWHWINEACGRLSGDKEM

SEQ ID NO: 18427 - protein, 4590 aa, Homo sapiens
MGRHLALLLLLLLLFQHFGDSDGSQRLEQTPLQFTHLEYNVTVQENSAAKTYVGHPVKMGVYITHPAWEVRYKIVSGDSENLFKAEEYILGDFCFLRIRTKGGNTAILNREVKDHYTLIVKALEKNTNVEARTKVRVQVLDTNDLRPLFSPTSYSVSLPENTAIRTSIARVSATDADIGTNGEFYYSFKDRTDMFAIHPTSGVIVLTGRLDYLETKLYEMEILAADRGMKLYGSSGISSMAKLTVHIEQANECAPVITAVTLSPSELDRDPAYAIVTVDDCDQGANGDIASLSIVAGDLLQQFRTVRSFPGSKEYKVKAIGGIDWDSHPFGYNLTLQAKDKGTPPQFSSVKVIHVTSPQFKAGPVKFEKDVYRAEISEFAPPNTPVVMVKAIPAYSHLRYVFKSTPGKAKFSLNYNTGLISILEPVKRQQAAHFELEVTTSDRKASTKVLVKVLGANSNPPEFTQTAYKAAFDENVPIGTTVMSLSAVDPDEGENGYVTYSIANLNHVPFAIDHFTGAVSTSENLDYELMPRVYTLRIRASDWGLPYRREVEVLATITLNNLNDNTPLFEKINCEGTIPRDLGVGEQITTVSAIDADELQLVQYQIEAGNELDFFSLNPNSGVLSLKRSLMDGLGAKVSFHSLRITATDGENFATPLYINITVAASHKLVNLQCEETGVAKMLAEKLLQANKLHNQGEVEDIFFDSHSVNAHIPQFRSTLPTGIQVKENQPVGSSVIFMNSTDLDTGFNGKLVYAVSGGNEDSCFMIDMETGMLKILSPLDRETTDKYTLNITVYDLGIPQKAAWRLLHVVVVDANDNPPEFLQESYFVEVSEDKEVHSEIIQVEATDKDLGPNGHVTYSIVTDTDTFSIDSVTGVVNIARPLDRELQHEHSLKIEARDQAREEPQLFSTVVVKVSLEDVNDNPPTFIPPNYRVKVREDLPEGTVIMWLEAHDPDLGQSGQVRYSLLDHGEGNFDVDKLSGAVRIVQQLDFEKKQVYNLTVRAKDKGKPVSLSSTCYVEVEVVDVNENLHPPVFSSFVEKGTVKEDAPVGSLVMTVSAHDEDARRDGEIRYSIRDGSGVGVFKIGEETGVIETSDRLDRESTSHYWLTVFATDQGVVPLSSFIEIYIEVEDVNDNAPQTSEPVYYPEIMENSPKDVSVVQIEAFDPDSSSNDKLMYKITSGNPQGFFSIHPKTGLITTTSRKLDREQQDEHILEVTVTDNGSPPKSTIARVIVKILDENDNKPQFLQKFYKIRLPEREKPDRERNARREPLYHVIATDKDEGPNAEISYSIEDGNEHGKFFIEPKTGVVSSKRFSAAGEYDILSIKAVDNGRPQKSSTTRLHIEWISKPKPSLEPISFEESFFTFTVMESDPVAHMIGVISVEPPGIPLWFDITGGNYDSHFDVDKGTGTIIVAKPLDAEQKSNYNLTVEATDGTTTILTQVFIKVIDTNDHRPQFSTSKYEVVIPEDTAPETEILQISAVDQDEKNKLIYTLQSSRDPLSLKKFRLDPATGSLYTSEKLDHEAVPAHLTVMVRDQDVPVKRNFARIVVNVSDTNDHAPWFTASSYKGRVYESAAVGSVVLQVTALDKDKGKNAEVLYSIESGTFGNIGNSFMIDPVLGSIKTAKELDRSNQAEYDLMVKATDKGSPPMSEITSVRIFVTIADNASPKFTSKEYSVELSETVSIGSFVGMVTAHSQSSVVYEIKDGNTGDAFDINPHSGTIITQKALDFETLPIYTLIIQGTNMAGLSTNTTVLVHLQDENDNAPVFMQAEYTGLISESASINSVVLTDRNVPLVIRAADADKDSNALLVYHIVEPSVHTYFAIDSSTGAIHTVLSLDYEETSIFHFTVQVHDMGTPRLFAEYAANVTVHVIDINDCPPVFAKPLYEASLLLPTYKGVKVITVNATDADSSAFSQLIYSITEGNIGEKFSMDYKTGALTVQNTTQLRSRYELTVRASDGRFAGLTSVKINVKESKESHLKFTQDVYSAVVKENSTEAETLAVITAIGNPINEPLFYHILNPDRRFKISRTSGVLSTTGTPFDREQQEAFDVVVEVTEEHKPSAVAHVVVKVIVEDQNDNAPVFVNLPYYAVVKVDTEVGHVIRYVTAVDRDSGRNGEVHYYLKEHHEHFQIGPLGEISLKKQFELDTLNKEYLVTVVAKDGGNPAFSAEVIVPITVMNKAMPVFEKPFYSAEIAESIQVHSPVVHVQANSPEGLKVFYSITDGDPFSQFTINFNTGVINVIAPLDFEAHPAYKLSIRATDSLTGAHAEVFVDIIVDDINDNPPVFAQQSYAVTLSEASVIGTSVVQVRATDSDSEPNRGISYQMFGNHSKSHDHFHVDSSTGLISLLRTLDYEQSRQHTIFVRAVDGGMPTLSSDVIVTVDVTDLNDNPPLFEQQIYEARISEHAPHGHFVTCVKAYDADSSDIDKLQYSILSGNDHKHFVIDSATGIITLSNLHRHALKPFYSLNLSVSDGVFRSSTQVHVTVIGGNLHSPAFLQNEYEVELAENAPLHTLVMEVKTTDGDSGIYGHVTYHIVNDFAKDRFYINERGQIFTLEKLDRETPAEKVISVRLMAKDAGGKVAFCTVNVILTDDNDNAPQFRATKYEVNIGSSAAKGTSVVKVLASDADEGSNADITYAIEADSESVKENLEINKLSGVITTKESLIGLENEFFTFFVRAVDNGSPSKESVVLVYVKILPPEMQLPKFSEPFYTFTVSEDVPIGTEIDLIRAEHSGTVLYSLVKGNTPESNRDESFVIDRQSGRLKLEKSLDHETTKWYQFSILARCTQDDHEMVASVDVSIQVKDANDNSPVFESSPYEAFIVENLPGGSRVIQIRASDADSGTNGQVMYSLDQSQSVEVIESFAINMETGWITTLKELDHEKRDNYQIKVVASDHGEKIQLSSTAIVDVTVTDVNDSPPRFTAEIYKGTVSEDDPQGGVIAILSTTDADSEEINRQVTYFITGGDPLGQFAVETIQNEWKVYVKKPLDREKRDNYLLTITATDGTFSSKAIVEVKVLDANDNSPVCEKTLYSDTIPEDVLPGKLIMQISATDADIRSNAEITYTLLGSGAEKFKLNPDTGELKTSTPLDREEQAVYHLLVRATDGGGRFCQASIVLTLEDVNDNAPEFSADPYAITVFENTEPGTLLTRVQATDADAGLNRKILYSLIDSADGQFSINELSGIIQLEKPLDRELQAVYTLSLKAVDQGLPRRLTATGTVIVSVLDINDNPPVFEYREYGATVSEDILVGTEVLQVYAASRDIEANAEITYSIISGNEHGKFSIDSKTGAVFIIENLDYESSHEYYLTVEATDGGTPSLSDVATVNVNVTDINDNTPVFSQDTYTTVISEDAVLEQSVITVMADDADGPSNSHIHYSIIDGNQGSSFTIDPVRGEVKVTKLLDRETISGYTLTVQASDNGSPPRVNTTTVNIDVSDVNDNAPVFSRGNYSVIIQENKPVGFSVLQLVVTDEDSSHNGPPFFFTIVTGNDEKAFEVNPQGVLLTSSAIKRKEKDHYLLQVKVADNGKPQLSSLTYIDIRVIEESIYPPAILPLEIFITSSGEEYSGGVIGKIHATDQDVYDTLTYSLDPQMDNLFSVSSTGGKLIAHKKLDIGQYLLNVSVTDGKFTTVADITVHIRQVTQEMLNHTIAIRFANLTPEEFVGDYWRNFQRALRNILGVRRNDIQIVSLQSSEPHPHLDVLLFVEKPGSAQISTKQLLHKINSSVTDIEEIIGVRILNVFQKLCAGLDCPWKFCDEKVSVDESVMSTHSTARLSFVTPRHHRAAVCLCKEGRCPPVHHGCEDDPCPEGSECVSDPWEEKHTCVCPSGRFGQCPGSSSMTLTGNSYVKYRLTENENKLEMKLTMRLRTYSTHAVVMYARGTDYSILEIHHGRLQYKFDCGSGPGIVSVQSIQVNDGQWHAVALEVNGNYARLVLDQVHTASGTAPGTLKTLNLDNYVFFGGHIRQQGTRHGRSPQVGNGFRGCMDSIYLNGQELPLNSKPRSYAHIEESVDVSPGCFLTATEDCASNPCQNGGVCNPSPAGGYYCKCSALYIGTHCEISVNPCSSKPCLYGGTCVVDNGGFVCQCRGLYTGQRCQLSPYCKDEPCKNGGTCFDSLDGAVCQCDSGFRGERCQSDIDECSGNPCLHGALCENTHGSYHCNCSHEYRGRHCEDAAPNQYVSTPWNIGLAEGIGIVVFVAGIFLLVVVFVLCRKMISRKKKHQAEPKDKHLGPATAFLQRPYFDSKLNKNIYSDIPPQVPVRPISYTPSIPSDSRNNLDRNSFEGSAIPEHPEFSTFNPESVHGHRKAVAVCSVAPNLPPPPPSNSPSDSDSIQKPSWDFDYDTKVVDLDPCLSKKPLEEKPSQPYSARESLSEVQSLSSFQSESCDDNGYHWDTSDWMPSVPLPDIQEFPNYEVIDEQTPLYSADPNAIDTDYYPGGYDIESDFPPPPEDFPAADELPPLPPEFSNQFESIHPPRDMPAAGSLGSSSRNRQRFNLNQYLPNFYPLDMSEPQTKGTGENSTCREPHAPYPPGYQRHFEAPAVESMPMSVYASTASCSDVSACCEVESEVMMSDYESGDDGHFEEVTIPPLDSQQHTEV

SEQ ID NO: 18428 - protein, 131 aa, Homo sapiens
MTPLLTLILVVLMGLPLAQALDCHVCAYNGDNCFNPMRCPAMVAYCMTTRTSAAEAIWCHQCTGFGGCSHGSRCLRDSTHCVTTATRVLSNTEDLPLVTKMCHIGCPDIPSLGLGPYVSIACCQTSLCNHD

SEQ ID NO: 18429 - protein, 1679 aa, Homo sapiens
MAQILPIRFQEHLQLQNLGINPANIGFSTLTMESDKFICIREKVGEQAQVVIIDMNDPSNPIRRPISADSAIMNPASKVIALKGIKESGKTLQIFNIEMKSKMKAHTMTDDVTFWKWISLNTVALVTDNAVYHWSMEGESQPVKMFDRHSSLAGCQIINYRTDAKQKWLLLTGISAQQNRVVGAMQLYSVDRKVSQPIEGHAASFAQFKMEGNAEESTLFCFAVRGQAGGKLHIIEVGTPPTGNQPFPKKAVDVFFPPEAQNDFPVAMQISEKHDVVFLITKYGYIHLYDLETGTCIYMNRISGETIFVTAPHEATAGIIGVNRKGQVLSVCVEEENIIPYITNVLQNPDLALRMAVRNNLAGAEELFARKFNALFAQGNYSEAAKVAANAPKGILRTPDTIRRFQSVPAQPGQTSPLLQYFGILLDQGQLNKYESLELCRPVLQQGRKQLLEKWLKEDKLECSEELGDLVKSVDPTLALSVYLRANVPNKVIQCFAETGQVQKIVLYAKKVGYTPDWIFLLRNVMRISPDQGQQFAQMLVQDEEPLADITQIVDVFMEYNLIQQCTAFLLDALKNNRPSEGPLQTRLLEMNLMHAPQVADAILGNQMFTHYDRAHIAQLCEKAGLLQRALEHFTDLYDIKRAVVHTHLLNPEWLVNYFGSLSVEDSLECLRAMLSANIRQNLQICVQVASKYHEQLSTQSLIELFESFKSFEGLFYFLGSIVNFSQDPDVHFKYIQAACKTGQIKEVERICRESNCYDPERVKNFLKEAKLTDQLPLIIVCDRFDFVHDLVLYLYRNNLQKYIEIYVQKVNPSRLPVVIGGLLDVDCSEDVIKNLILVVRGQFSTDELVAEVEKRNRLKLLLPWLEARIHEGCEEPATHNALAKIYIDSNNNPERFLRENPYYDSRVVGKYCEKRDPHLACVAYERGQCDLELINVCNENSLFKSLSRYLVRRKDPELWGSVLLESNPYRRPLIDQVVQTALSETQDPEEVSVTVKAFMTADLPNELIELLEKIVLDNSVFSEHRNLQNLLILTAIKADRTRVMEYINRLDNYDAPDIANIAISNELFEEAFAIFRKFDVNTSAVQVLIEHIGNLDRAYEFAERCNEPAVWSQLAKAQLQKGMVKEAIDSYIKADDPSSYMEVVQAANTSGNWEELVKYLQMARKKARESYVETELIFALAKTNRLAELEEFINGPNNAHIQQVGDRCYDEKMYDAAKLLYNNVSNFGRLASTLVHLGEYQAAVDGARKANSTRTWKEVCFACVDGKEFRLAQMCGLHIVVHADELEELINYYQDRGYFEELITMLEAALGLERAHMGMFTELAILYSKFKPQKMREHLELFWSRVNIPKVLRAAEQAHLWAELVFLYDKYEEYDNAIITMMNHPTDAWKEGQFKDIITKVANVELYYRAIQFYLEFKPLLLNDLLMVLSPRLDHTRAVNYFSKVKQLPLVKPYLRSVQNHNNKSVNESLNNLFITEEDYQALRTSIDAYDNFDNISLAQRLEKHELIEFRRIAAYLFKGNNRWKQSVELCKKDSLYKDAMQYASESKDTELAEELLQWFLQEEKRECFGACLFTCYDLLRPDVVLETAWRHNIMDFAMPYFIQVMKEYLTKVDKLDASESLRKEEEQATETQPIVYGQPQLMLTAGPSVAVPPQAPFGYGYTAPPYGQPQPGFGYSM

SEQ ID NO: 18430 - protein, 201 aa, Homo sapiens
MYTLLSGLYKYMFQKDEYCILILGLDNAGKTTFLEQSKTRFNKNYKGMSLSKITTTVGLNIGTVDVGKARLMFWDLGGQEELQSLWDKYYAECHGVIYVIDSTDEERLAESKQAFEKVVTSEALCGVPVLVLANKQDVETCLSIPDIKTAFSDCTSKIGRRDCLTQACSALTGKGVREGIEWMVKCVVRNVHRPPRQRDIT

SEQ ID NO: 18431 - protein, 789 aa, Homo sapiens
MLCGRWRRCRRPPEEPPVAAQVAAQVAAPVALPSPPTPSDGGTKRPGLRALKKMGLTEDEDVRAMLRGSRLRKIRSRTWHKERLYRLQEDGLSVWFQRRIPRAPSQHIFFVQHIEAVREGHQSEGLRRFGGAFAPARCLTIAFKGRRKNLDLAAPTAEEAQRWVRGLTKLRARLDAMSQRERLDHWIHSYLHRADSNQDSKMSFKEIKSLLRMVNVDMNDMYAYLLFKECDHSNNDRLEGAEIEEFLRRLLKRPELEEIFHQYSGEDRVLSAPELLEFLEDQGEEGATLARAQQLIQTYELNETAKQHELMTLDGFMMYLLSPEGAALDNTHTCVFQDMNQPLAHYFISSSHNTYLTDSQIGGPSSTEAYVRAFAQGCRCVELDCWEGPGGEPVIYHGHTLTSKILFRDVVQAVRDHAFTLSPYPVILSLENHCGLEQQAAMARHLCTILGDMLVTQALDSPNPEELPSPEQLKGRVLVKGKKLPAARSEDGRALSDREEEEEDDEEEEEEVEAAAQRRLAKQISPELSALAVYCHATRLRTLHPAPNAPQPCQVSSLSERKAKKLIREAGNSFVRHNARQLTRVYPLGLRMNSANYSPQEMWNSGCQLVALNFQTPGYEMDLNAGRFLVNGQCGYVLKPACLRQPDSTFDPEYPGPPRTTLSIQVLTAQQLPKLNAEKPHSIVDPLVRIEIHGVPADCARQETDYVLNNGFNPRWGQTLQFQLRAPELALVRFVVEDYDATSPNDFVGQFTLPLSSLKQGYRHIHLLSKDGASLSPATLFIQIRIQRS

SEQ ID NO: 18432 - protein, 224 aa, Homo sapiens
MWFLTTLLLWVPVDGQVDTTKAVITLQPPWVSVFQEETITLHCEVLHLPGSSSTQWFLNGTATQTSTPSYRITSASVNDSGEYRCQRGLSGRSDPIQLEIHRGWLLLQVSSRVFMEGEPLALRCHAWKDKLVYNVLYYRNGKAFKFFHWNSNLTILKTNISHNGTYHCSGMGKHRYTSAGISQYTVKELFPAPVLNASVTSPLLEGNLVTLSCETKLLLQRPGL

SEQ ID NO: 18433 - protein, 152 aa, Homo sapiens
MQPILLLLAFLLLPRADQLERKAKRTRAVQPLRLPSNKAQVKPGQTCSVAGWGQTAPLGKHSHTLQEVKMTVQEDRKCESDLRHYYDSTIELCVGDPEIKKTSFKGDSGGPLVCNKVAQGIVSYGRNNGMPPRACTKVSSFVHWIKKTMKRY

SEQ ID NO: 18434 - protein, 565 aa, Homo sapiens [sequence omitted]

SEQ ID NO: 18435 - protein, 495 aa, Homo sapiens
MSDLVKHQRTHTGEKPYKCGVCGKGFGDSSARIKHQRTHSGEKPYRARPPAQGPPKIPRSRIPAGERPTICGECGKSFRQSSDLVKHQRTHTGEKPYKCGICGKGFGDSSARIKHQRTHRGEQPPRPVVPRRQPSRAATAATQGPKAQDKPYICTDCGKRFVLSCSLLSHQRSHLGPKPFGCDVCGKEFARGSDLVKHLRVHTGEKPYLCPECGKGFADSSARVKHLRTHSGERPHACPECDRTFSLSSTLLRHRLTHMEPQDFSFPGYPLPALIPSPPPPPLGTSPPLTPRSPSHSGEPFGLPGLEPEPGGPQAGEPPPPLAGDKPHKCPECGKGFRRSSDLVKHHRVHTGEKPYLCPECGKGFADSSARVKHLRTHRGERARPPPPSTLLRPHNPPGPVPMAPRPRVRAQPSGPSQPHVCGFCGKEFPRSSDLVKHRRTHTGEKPYKCAECGKGFGDSSARIKHQRGHLVLTPFGIGDGRARPLKQEAATGLE

SEQ ID NO: 18436 - protein, 688 aa, Homo sapiens
MQSPWKILTVAPLFLLLSLQSSASPANDDQSRPSLSNGHTCVGCVLVVSVIEQLAQVHNSTVQASMERLCSYLPEKLFLKTTCYLVIDKFGSDIIKLLSADMNADVVCHTLEFCKQNTGQPLCHLYPLPKETWKFTLQKARQIVKKSPILKYSRSGSDICSLPVLAKICQKIKLAMEQSVPFKDVDSDKYSVFPTLRGYHWRGRDCNDSDESVYPGRRPNNWDVHQDSNCNGIWGVDPKDGVPYEKKFCEGSQPRGIILLGDSAGAHFHISPEWITASQMSLNSFINLPTALTNELDWPQLSGATGFLDSTVGIKEKSIYLRLWKRNHCNHRDYQNISRNGASSRNLKKFIESLSRNKVLDYPAIVIYAMIGNDVCSGKSDPVPAMTTPEKLYSNVMQTLKHLNSHLPNGSHVILYGLPDGTFLWDNLHNRYHPLGQLNKDMTYAQLYSFLNCLQVSPCHGWMSSNKTLRTLTSERAEQLSNTLKKIAASEKFTNFNLFYMDFAFHEIIQEWQKRGGQPWQLIEPVDGFHPNERKSILLKGILMTSQTLDNQEWTQLTSWIKGNLTCDSRTREWLCCCWRIISGKRCSSSGPKSWERRIRSTPRLNRCLETKAGTEPLRSMHPWGAQGGRGLGKLIPQTLWGLPRHRPKGLFFSSIFAKCLSLNEEHIWTTVQCCVLPGSVTLPLFLK

SEQ ID NO: 18437 - protein, 1628 aa, Homo sapiens
MAGVGAAALSLLLHLGALALAAGAEGGAVPREPPGQQTTAHSSVLAGNSQEQWHPLREWLGRLEAAVMELREQNKDLQTRVRQLESCECHPASPQCWGLGRAWPEGARWEPDACTACVCQDGAAHCGPQAHLPHCRGCSQNGQTYGNGETFSPDACTTCRCLEGTITCNQKPCPRGPCPEPGACCPHCKPGCDYEGQLYEEGVTFLSSSNPCLQCTCLRSRVRCMALKCPPSPCPEPVLRPGHCCPTCQGCTEGGSHWEHGQEWTTPGDPCRICRCLEGHIQCRQRECASLCPYPARPLPGTCCPVCDGCFLNGREHRSGEPVGSGDPCSHCRCANGSVQCEPLPCPPVPCRHPGKIPGQCCPVCDGCEYQGHQYQSQETFRLQERGLCVRCSCQAGEVSCEEQECPVTPCALPASGRQLCPACELDGEEFAEGVQWEPDGRPCTACVCQDGVPKCGAVLCPPAPCQHPTQPPGACCPSCDSCTYHSQVYANGQNFTDADSPCHACHCQDGTVTCSLVDCPPTTCARPQSGPGQCCPRCPDCILEEEVFVDGESFSHPRDPCQECRCQEGHAHCQPRPCPRAPCAHPLPGTCCPNDCSGCAFGGKEYPSGADFPHPSDPCRLCRCLSGNVQCLARRCVPLPCPEPVLLPGECCPQCPAAPAPAGCPRPGAAHARHQEYFSPPGDPCRRCLCLDGSVSCQRLPCPPAPCAHPRQGPCCPSCDGCLYQGKEFASGERFPSPTAACHLCLCWEGSVSCEPKACAPALCPFPARGDCCPDCDGCEYLGESYLSNQEFPDPREPCNLCTCLGGFVTCGRRPCEPPGCSHPLIPSGHCCPTCQGCRYHGVTTASGETLPDPLDPTCSLCTCQEGSMRCQKKPCPPALCPHPSPGPCFCPVCHSCLSQGREHQDGEEFEGPAGSCEWCRCQAGQVSCVRLQCPPLPCKLQVTERGSCCPRCRGCLAHGEEHPEGSRWVPPDSACSSCVCHEGVVTCARIQCISSCAQPRQGPHDCCPQCSDCEHEGRKYEPGESFQPGADPCEVCICEPQPEGPPSLRCHRRQCPSLVGCPPSQLLPPGPQHCCPTCAEALSNCSEGLLGSELAPPDPCYTCQCQDLTWLCIHQACPELSCPLSERHTPPGSCCPVCRECVVEAEGRRVADGESWRDPSNACIACTCHRGHVECHLEECQALSCPHGWAKVPQADSCCERCQAPTQSCVHQGREVASGERWTVDTCTSCSCMAGTVRCQSQRCSPLSCGPDKAPALSPGSCCPRCLPRPASCMAFGDPHYRTFDGRLLHFQGSCSYVLAKDCHSGDFSVHVTNDDRGRSGVAWTQEVAVLLGDMAVRLLQDGAVTVDGHPVALPFLQEPLLYVELRGHTVILHAQPGLQVLWDGQSQVEVSVPGSYQGRTCGLCGNFNGFAQDDLQGPEGLLLPSEAAFGNSWQVSEGLWPGRPCSAGREVDPCRAAGYRARREANARCGVLKSSPFSRCHAVVPPEPFFAACVYDLCACGPGSSADACLCDALEAYASHCRQAGVTPTWRGPTLCVVGCPLERGFVFDECGPPCPRTCFNQHIPLGELAAHCVRPCVPGCQCPAGLVEHEAHCIPPEACPQVLLTGDQPLGARPSPSREPQETP

SEQ ID NO: 18438 - protein, 1483 aa, Homo sapiens
MPSEQKQLFCDEKQTTLKKDYDVKNEIVDRSAPKPKISGSIHYALKNVKIDLPKINIPNEVLLKHEVDKYRKLFQSKQQTARKSISIKTVSCVEECTLLHKSERAEEEGVKMSAKILNFSCLKCRDNTRYSPNDLQKHFQMWHHGELPSYPCEMCNFSANDFQVFKQHRRTHRSTLVKCDICNNESVYTLLNLTKHFTSTHCVNGNFQCEKCKFSTQDVGTFVQHIHRHNEIHYKCGKCHHVCFTKGELQKHLHIHSGTFPFTCQYCSYGATRREHLVRHVITLHKEHLYAKEKLEKDKYEKRMAKTSAGLKLILKRYKIGASRKTFWKRKKINSGSDRSIEKNTQVLKKMNKTQTKSEDQSHVVQEHLSEEKDERLHCENNDKAPESESEKPTPLSTGQGNRAEEGPNASSGFMKTAVLGPTLKNVMMKNNKLAVSPNYNATFMGFKMMDGKQHIVLKLVPIKQNVCSPGSQSGAAKDGTANLQPQTLDTNGFLTGVTTELNDTVYMKAATPFSCSSSILSGKASSEKEMTLISQRNNMLQTMDYEKSVSSLSATSELVTASVNLTTKFETRDNVDFWGNHLTQSHPEVLGTTIKSPDKVNCVAKPNAYNSGDMHNYCINYGNCELPVESSNQGSLPFHNYSKVNNSNKRRRFSGTAVYENPQRESSSSKTVVQQPISESFLSLVRQESSKPDSLLASISLLNDKDGTLKAKSEIEEQYVLEKGQNIDGQNLYSNENQNLECATEKSKWEDFSNVDSPMMPRITSVFSLQSQQASEFLPPEVNQLLQDVLKIKPDVKQDSSNTPNKGLPLHCDQSFQKHEREGKIVESSKDFKVQGIFPVPPGSVGINVPTNDLNLKFGKEKQVSSIPQDVRDSEKMPRISGFGTLLKTQSDAIITQQLVKDKLRATTQNLGSFYMQSPLLNSEQKKTIIVQTSKGFLIPLNITNKPGLPVIPGNALPLVNSQGIPASLFVNKKPGMVLTLNNGKLEGVSAVKTEGAPARGTVTKEPCKTPILKVEPNNNCLTPGLCSSIGSCLSMKSSSENTLPLKGPYILKPTSSVKAVLIPNMLSEQQSTKLNISDSVKQQNEIFPKPPLYTFLPDGKQAVFLKCVMPNKTELLKPKLVQNSTYQNIQPKKPEGTPQRILLKIFNPVLNVTAANNLSVSNSASSLQKDNVPSNQIIGGEQKEPESRDALPFLLDDLMPANEIVITSTATCPESSEEPICVSDCSESRVLRCKTNCRIERNFNRKKTSKKIFSKTKTHGSKDSETAFVSRNRNCKRKCRDSYQEPPRRKATLHRKCKEKAKPEDVRETFGFSRPRLSKDSIRTLRLFPFSSKQLVKCPRRNQPVVVLNHPDADAPEVVSVMKTIAKFNGHVLKVSLSKRTINALLKPVCYNPPKTTYDDFSKRHKTFKPVSSVKERFVLKLTLKKTSKNNYQIVKTTSENILKAKFNCWFCGRVFDNQDTWAGHGQRHLMEATRDWNMLE

SEQ ID NO: 18439 - protein, 148 aa, Homo sapiens
MASLKCSTVVCVICLEKPKYRCPACRVPYCSVVCFRKHKEQCNPETRPVEKKIRSALPTKTVKPVENKDDDDSIADFLNSDEEEDRVSLQNLKNLDGLSSCHPGWSAAAQSRLTATSPSQIQAILMPQPPEQLGLQAPATTPNQFLYF

SEQ ID NO: 18440 - protein, 159 aa, Homo sapiens
MAGPGWTLLLLLLLLLLLGSMAGYGPQKKLNLSHKGIGEPCRRHEECQSNCCTINSLAPHTLCTPKTIFLQCLPWRKPNGYRCSHDSECQSSCCVRNNSPQELCTPQSVFLQCVPWRKPNGDFCSSHQECHSQCCIQLREYSPFRCIPRTGILAQCLPL

SEQ ID NO: 18441 - protein, 603 aa, Homo sapiens
MLLAVLLLLPLPSSWFAHGHPLYTRLPPSALQVLSAQGTQALQAAQRSAQWAINRVAMEIQHRSHECRGSGRPRPQALLQDPPEPGPCGERRPSTANVTRAHGRIVGGSAAPPGAWPWLVRLQLGGQPLCGGVLVAASWVLTAAHCFVGAPNELLWTVTLAEGSRGEQAEEVPVNRILPHPKFDPRTFHNDLALVQLWTPVSPGGSARPVCLPQEPQEPPAGTACAIAGWGALFEDGPEAEAVREARVPLLSTDTCRRALGPGLRPSTMLCAGYLAGGVDSCQGDSGGPLTCSEPGPRPREVLFGVTSWGDGCGEPGKPGVYTRVAVFKDWLQEQMSASSSREPSCRELLAWDPPQELQADAARLCAFYARLCPGSQGACARLAHQQCLQRRRRCELRSLAHTLLGLLRNAQELLGPRPGLRRLAPALALPAPALRESPLHPARELRLHSGSRAAGTRFPKRRPEPRGEANGCPGLEPLRQKLAALQGAHAWILQVPSEHLAMNFHEVLADLGSKTLTGLFRAWVRAGLGGRHVAFSGLVGLEPATLARSLPRLLVQALQAFRVAALAEGEPEGPWMDVGQGPGLERKGHHPLNPQVPPARQP

SEQ ID NO: 18442 - protein, 199 aa, Homo sapiens
MNPRKKVDLKLIIVGAIGVGKTSLLHQYVHKTFYEEYQTTLGASILSKIIILGDTTLKLQIWDTGGQERFRSMVSTFYKGSDGCILAFDVTDLESFEALDIWRGDVLAKIVPMEQSYPMVLLGNKIDLADRKVPQEVAQGWCREKDIPYFEVSAKNDINVVQAFEMLASRALSRYQSILENHLTESIKLSPDQSRSRCC

SEQ ID NO: 18443 - protein, 103 aa, Homo sapiens
MKLCVTVLSLLVLVAAFCSLALSAPMGSDPPTACCFSYTARKLPRNFVVDYYETSSLCSQPAVVYRESASSAAPGRIPSTRAAPHGPWSGRGRCLPQARDKAR

SEQ ID NO: 18444 - protein, 311 aa, Homo sapiens
MAVDIQPACLGLYCGKTLLFKNGSTEIYGECGVCPRGQRTNAQKYCQPCTESPELYDWLYLGFMAMLPLVLHWFFIEWYSGKKSSSALFQHITALFECSMAAIITLLVSDPVGVLYIRSCRVLMLSDWYTMLYNPSPDYVTTVHCTHEAVYPLYTIVFIYYAFCLVLMMLLRPLLVKKIACGLGKSDRFKSIYAALYFFPILTVLQAVGGGLLYYAFPYIILVLSLVTLAVYMSASEIENCYDLLVRKKRLIVLFSHWLLHAYGIISISRVDKLEQDLPLLALVPTPALFYLFTAKFTEPSRILSEGANGH

SEQ ID NO: 18445 - protein, 321 aa, Homo sapiens
MPPFLLLTCLFITGTSVSPVALDPCSAYISLNEPWRNTDHQLDESQGPPLCDNHVNGEWYHFTGMAGDAMPTFCIPENHCGTHAPVWLNGSHPLEGDGIVQRQACASFNGNCCLWNTTVEVKACPGGYYVYRLTKPSVCFHVYCGHFYDICDEDCHGSCSDTSECTCAPGTVLGPDRQTCFDENECEQNNGGCSEICVNLKNSYRCECGVGRVLRSDGKTCEDVEGCHNNNGGCSHSCLGSEKGYQCECPRGLVLSEDNHTCQVPVLCKSNAIEVNIPRELVGGLELFLTNTSCRGVSNGTHVNILFSLKTCGTVVDLCFR

SEQ ID NO: 18446 - protein, 103 aa, Homo sapiens [sequence omitted]

SEQ ID NO: 18447 - protein, 1308 aa, Homo sapiens
MGSVTGAVLKTLLLLSTQNWNRVEAGNSYDCDDPLVSALPQASFSSSSELSSSHGPGFARLNRRDGAGGWSPLVSNKYQWLQIDLGERMEVTAVATQGGYGSSNWVTSYLLMFSDSGWNWKQYRQEDSIWGFSGNANADSVVYYRLQPSIKARFLRFIPLEWNPKGRIGMRIEVFGCAYRSEVVDLDGKSSLLYRFDQKSLSPIKDIISLKFKTMQSDGILLHREGPNGDHITLQLRRARLFLLINSGEAKLPSTSTLVNLTLGSLLDDQHWHSVLIQRLGKQVNFTVDEHRHHFHARGEFNLMNLDYEISFGGIPAPGKSVSFPHRNFHGCLENLYYNGVDIIDLAKQQKPQIIAMGNVSFSCSQPQSMPVTFLSSRSYLALPDFSGEEEVSATFQFRTWNKAGLLLFSELQLISGGILLFLSDGKLKSNLYQPGKLPSDITAGVELNDGQWHSVSLSAKKNHLSVAVDGQMASAAPLLGPEQIYSGGTYYFGGCPDKSFGSKCKSPLGGFQGCMRLISISGKVVDLISVQQGSLGNFSDLQIDSCGISDRCLPNYCEHGGECSQSWSTFHCNCTNTGYRGATCHNSIYEQSCEAYKHRGNTSGFYYIDSDGSGPLEPFLLYCNMTETAWTIIQHNGSDLTRVRNTNPENPYAGFFEYVASMEQLQATINRAEHCEQEFTYYCKKSRLVNKQDGTPLSWWVGRTNETQTYWGGSSPDLQKCTCGLEGNCIDSQYYCNCDADRNEWTNDTGLLAYKEHLPVTKIVITDTGRLHSEAAYKLGPLLCQGDRSFWNSASFDTEASYLHFPTFHGELSADVSFFFKTTASSGVFLENLGIADFIRIELRSPTVVTFSFDVGNGPFEISVQSPTHFNDNQWHHVRVERNMKEASLQVDQLTPKTQPAPADGHVLLQLNSQLFVGGTATRQRGFLGCIRSLQLNGMTLDLEERAQVTPEVQPGCRGHCSSYGKLCRNGGKCRERPIGFFCDCTFSAYTGPFCSNEISAYFGSGSSVIYNFQENYLLSKNSSSHAASFHGDMKLSREMIKFSFRTTRTPSLLLFVSSFYKEYLSVIIAKNGSLQIRYKLNKYQEPDVVNFDFKNMADGQLHHIMINREEGVVFIEIDDNRRRQVHLSSGTEFSAVKSLVLGRILEHSDVDQDTALAGAQGFTGCLSAVQLSHVAPLKAALHPSHPDPVTVTGHVTESSCMAQPGTDATSRERTHSFADHSGTIDDREPLANAIKSDSAVIGGLIAVVIFILLCITAIAVRIYQQKRLYKRSEAKRSENVDSAEAVLKSELNIQNAVNENQKEYFF

SEQ ID NO: 18448 - protein, 200 aa, Homo sapiens
MRLGLCVVALVLSWTHLTISSRGIKGKRQRRISAEGSQACAKGCELCSEVNGCLKCSPKLFILLERNDIRQVGVCLPSCPPGYFDARNPDMNKCIKCKIEHCEACFSHNFCTKCKEGLYLHKGRCYPACPEGSSAANGTMECSSPGQKRRKGGQGRRENANRNLARKESKEAGAGSRRRKGQQQQQQQGTVGPLTSAGPA

SEQ ID NO: 18449 - protein, 144 aa, Homo sapiens
MALLLTTVIALTCLGGFASPGPVPPSTALRELIEELVNITQNQKAPLCNGSMVWSINLTAGMYCAALESLINVSGCSAIEKTQRMLSGFCPHKVSAGQFSSLHVRDTKIEVAQFVKDLLLHLKKLFREGQFNNFESIIICRDRT

SEQ ID NO: 18450 - protein, 331 aa, Homo sapiens
MAPRRARGCRTLGLPALLLLLLLRPPATRDARDRLAVLAGRSRISESFNHEVQTHEACVRLRTMENCPQCHHHRTSRQQAGITCPPPMSVEHADIWVKSYSLYSRERYICNSGFKRKAGTSSLTECVLNKATNVAHWTTPSLKCIRDPALVHQRPAPPSTVTTAGVTPQPESLSPSGKEPAASSPSSNNTAATTAAIVPGSQLMPSKSPSTGTTEISSHESSHGTPSQTTAKNWELTASASHQPPGVYPQGHSDTTVAISTSTVLLCGLSAVSLLACYLKSRWLAKRSLPGDAEAPNMSRGGRNAWEQLSRAPATSLLRTPVESALSASRP

SEQ ID NO: 18451 - protein, 102 aa, Homo sapiens
MADKVRRQRPRRRVCWALVAVLLADLLALSDTLAVMSVDLGSESMKVAIVKPGVPMEIVLNKESRRKTPVIVTLKENERFFGDSAASMAIKNPKATLRYFQH

SEQ ID NO: 18452 - protein, 35 aa, Homo sapiens
MLGALVWMLVAGFLLALPPSWAAGAPRAGRRPARP

SEQ ID NO: 18453 - protein, 231 aa, Homo sapiens
MGGSGSRLSKELLAEYQDLTFLTKQEILLSVYVVLAPHLVDNEQQARSGNEHTGRPIAENTDSSPLSTRAHRRFCELLPQEQRSVESSLRAQVPFEQILSLPELKANPFKERICRVFSTSPAKDSLSFEDFLDLLSVFSDTATPDIKSHYAFRIFDFDDDGTLNREDLSRLVNCLTGEGEDTRLSASEMKQLIDNILEESDIDRDGTINLSEFQHVISRSPDFASSFKIVL

SEQ ID NO: 18454 - protein, 396 aa, Homo sapiens
MPWISEGRATRPCLRVPSARRGDEGLHQRDEASQKMSKQQPTQFINPETPGYVGFANLPNQVHRKSVKKGFEFTLMVVGESGLGKSTLINSLFLTDLYPERVIPGAAEKIERTVQIEASTVEIEERGVKLRLTVVDTPGYGDAINCRDCFKTIISYIDEQFERYLHDESGLNRRHIIDNRVHCCFYFISPFGHGLKPLDVAFMKAIHNKVNIVPVIAKADTLTLKERERLKKRILDEIEEHNIKIYHLPDAESDEDEDFKEQTRLLKASIPFSVVGSNQLIEAKGKKVRGRLYPWGVVEVENPEHNDFLKLRTMLITHMQDLQEVTQDLHYENFRSERLKRGGRKVENEDMNKDQILLEKEAELRRMQEMIARMQAQMQMQMQGGDGDGGALGHHV

SEQ ID NO: 18455 - protein, 213 aa, Homo sapiens
MADHMMAMNHGRFPDGTNGLHHHPAHRMGMGQFPSPHHHQQQQPQHAFNALMGEHIHYGAGNMNATSGIRHAMGPGTVNGGHPPSALAPAARFNNSQFMGPPVASQGGSLPASMQLQKLNNQYFNHHPYPHNHYMPDLHPAAGHQMNGTNQHFRDCNPNVIDTDFIDEEVLMSLVIEMGLDRIKELPELWLGQNEFDFMTDFVCKQQPSRVSC

SEQ ID NO: 18456 - protein, 670 aa, Homo sapiens [sequence omitted]

SEQ ID NO: 18457 - protein, 117 aa, Homo sapiens
MKHLWFFLLLVAAPRWVLSQVQLQESGPGLVKPSETLSLTCVVSGGSISSSNWWSWVRQPPGKGLEWIGEIYHSGSPNYNPSLKSRVTISVDKSKNQFSLKLSSVTAADTAVYYCAR

SEQ ID NO: 18458 - protein, 230 aa, Homo sapiens
MDPLGDTLRRLREAFHAGRTRPAEFRAAQLQGLGRFLQENKQLLHDALAQDLHKSAFESEVSEVAISQGEVTLALRNLRAWMKDERVPKNLATQLDSAFIRKEPFGLVLIIAPWNYPLNLTLVPLVGALAAGNCVVLKPSEISKNVEKILAEVLPQYVDQSCFAVVLGGPQETGQLLEHRFDYIFFTGSPRVGKIVMTAAAKHPSKQRLPPPSWVFPLPASASSLSRSQP

SEQ ID NO: 18459 - protein, 89 aa, Homo sapiens
MKGLAAALLVLVCTMALCSCAQVGTNKELCCLVYTSWQIPQKFIVDYSETSPQCPKPGVILLTKRGRQICADPNKKWVQKYISDLKLNA

SEQ ID NO: 18460 - protein, 832 aa, Homo sapiens
MGAARSPPSAVPGPLLGLLLLLLGVLAPGGASLRLLDHRALVCSQPGLNCTVKNSTCLDDSWIHPRNLTPSSPKDLQIQLHFAHTQQGDLFPVAHIEWTLQTDASILYLEGAELSVLQLNTNERLCVRFEFLSKLRHHHRRWRFTFSHFVVDPDQEYEVTVHHLPKPIPDGDPNHQSKNFLVPDCEHARMKVTTPCMSSGSLWDPNITVETLEAHQLRVSFTLWNESTHYQILLTSFPHMENHSCFEHMHHIPAPRPEEFHQRSNVTLTLRNLKGCCRHQVQIQPFFSSCLNDCLRHSATVSCPEMPDTPEPIPGPGSEKYSDDTKYTDGLPAADLIPPPLKPRKVWIIYSADHPLYVDVVLKFAQFLLTACGTEVALDLLEEQAISEAGVMTWVGRQKQEMVESNSKIIVLCSRGTRAKWQALLGRGAPVRLRCDHGKPVGDLFTAAMNMILPDFKRPACFGTYVVCYFSEVSCDGDVPDLFGAAPRYPLMDRFEEVYFRIQDLEMFQPGRMHRVGELSGDNYLRSPGGRQLRAALDRFRDWQVRCPDWFECENLYSADDQDAPSLDEEVFEEPLLPPGTGIVKRAPLVREPGSQACLAIDPLVGEEGGAAVAKLEPHLQPRGQPAPQPLHTLVLAAEEGALVAAVEPGPLADGAAVRLALAGEGEACPLLGSPGAGRNSVLFLPVDPEDSPLGSSTPMASPDLLPEDVREHLEGLMLSLFEQSLSCQAQGGCSRPAMVLTDPHTPYEEEQRQSVQSDQGYISRSSPQPPEGLTEMEEEEEEEQDPGKPALPLSPEDLESLRSLQRQLLFRQLQKNSGWDTMGSESEGPSA

SEQ ID NO: 18461 - protein, 396 aa, Homo sapiens
MAGYEYVSPEQLAGFDKYKYSAVDTNPLSLYVMHPFWNTIVKVFPTWLAPNLITFSGFLLVVFNFLLMAYFDPDFYASAPGHKHVPDWVWIVVGILNFVAYTLDGVDGKQARRTNSSTPLGELFDHGLDSWSCVYFVVTVYSIFGRGSTGVSVFVLYLLLWVVLFSFILSHWEKYNTGILFLPWGYDISQVTISFVYIVTAVVGVEAWYEPFLFNFLYRDLFTAMIIGCALCVTLPMSLLNFFRSYKNNTLKLNSVYEAMVPLFSPCLLFILSTAWILWSPSDILELHPRVFYFMVGTAFANSTCQLIVCQMSSTRCPTLNWLLVPLFLVVLVVNLGVASYVESILLYTLTTAFTLAHIHYGVRVVKQLSSHFQIYPFSLRKPNSDLGMEEKNIGL

SEQ ID NO: 18462 - protein, 1649 aa, Homo sapiens
MESVEKDWGWGLWRNLRCLGHAHQGKCCTEGGISSTTKTSSENGSCCFEKAARKDHVCRFIGCGRNDRFNYVVMQLQGRNLADLRRSQSRGTFTISTTLRLGRQILESIESIHSVGFLHRDIKPSNFAMGRFPSTCRKCYMLDFGLARQFTNSCGDVRPPRAVAGFRGTVRYASINAHRNREMGRHDDLWSLFYMLVEFVVGQLPWRKIKDKEQVGSIKERYDHRLMLKHLPPEFSIFLDHISSLDYFTKPDYQMSIRVTRKSYKVSTSGPQAFNSLSYTSGPGACISSSSFSRMGSSSFRGGLGAGYGGASGGITTITVNQSLLSPLNLEVDPNIQAVRTQEEKQIKTLNNKFFSFIDKVRFLEQQNKMLETKWSLVQQQKMARSNMDNMFESYINNLKWQLETLGQEKLKLEAELGNMHGLVEDFRNKYEVEISKCTEMENEFVLIKEYVDEAYMNKMELESSLKELTAKISFLRQLYEEEIGSCSPRSRIHLWCCSWTTAASWTWTASSLRSRPEGFPGGCHADTEQRGELAIKDANAKLSELEAALQLASQDMARQLREYQELMNVKLALDIKIATYRKLLEGEESWLESGMQNMSIHMKTTSSYAGGQSLAYGGLTSPGLSYGLGSSFGSGMGSSSFSHTSSSRAVVMKKIETRDGKLVSESSNVLPNLRITATLLTSVFDNSIKTFGVIESDPFDWEKTGNDGSLTTTTTSTTPQLHTRLTPAAIGIANATPIPGDLLRENTDEVFPDEQLSDGENGIPVGVSPDKLPGSLGHPRPQEKDVWEEMDANKNKIKLGICKAATEEENSHGQANGLLNAPSLGSPIRVRSEITQPDRDIPLVRKLRSIHSFELEKRLTLEPKPDTDKFLETCLEKMQKDTSAGKESILPALLHKPCVPAVSRTDHIWHYDEEYLPDASKPASANTPEQADGGGSNGFIAVNLSSCKQEIDSKEWVIVDKEQDLQDFRTNEAVGHKTTGSPSDEEPEVLQVLEASPQDEKLQLGPWAENDHLKKETSGVVLALSAEGPPTAASEQYTDRLELQPGAASQFIAATPTSLMEAQAEGPLTAITIPRPSVASTQSTSGSFHCGQQPEKKDLQPMEPTVELYSPRENFSGLVVTEGEPPSGGSRTDLGLQIDHIGHDMLPNIRESNKSQDLGPKELPDHNRLVVREFENLPGETEEKSILLESDNEDEKLSRGQHCIEISSLPGDLVIVEKDHSATTEPLDVTKTQTFSVVPNQDKNNEIMKLLTVGTSEISSRDIDPHVEGQIGQVAEMQKNKISKDDDIMSEDLPGHQGDLSTFLHQEGKREKITPRNGELFHCVSENEHGAPTRKDMVRSSFVTRHSRIPVLAQEIDSTLESSSPVSAKEKLLQKKAYQPDLVKLLVEKRQFKSFLGDLSSASDKLLEEKLATVPAPFCEEEVLTPFSRLTVDSHLSRSAEDSFLSPIISQSRKSKIPRPVSWVNTDQVNSSTSSQFFPRPPPGKPPTRPGVEARLRRYKVLGSSNSDSDLFSRLAQILQNGSQKPRSTTQCKSPGSPHNPKTPPKSPVVPRRSPSASPRSSSLPRTSSSSPSRAGRPHHDQRSSSPHLGRSKSPPSHSGSSSSRRSCQQEHCKPSKNGLKGSGSLHHHSASTKTPQGKSKPASKLSR

SEQ ID NO: 18463 - protein, 160 aa, Homo sapiens
MARGAALALLLFGLLGVLVAAPDGGFDLSDALPDNENKKPTAIPKKPSAGDDFDLGDAVVDGENDDPRPPNPPKPMPNPNPNHPSSSGSFSDADLADGVSGGEGKGGSDGGGSHRKEGEEADAPGVIPGIVGAVVVAVAGAISSFIAYQKKKLCFKENDG

SEQ ID NO: 18464 - protein, 504 aa, Homo sapiens
MSEKQMKEAFVSNLNGTTVLEITQGLCFPAFCILCRGFLIIFSQYLCSFSPTWKTRFLTDFVVLIVPMVATLTIWASFILLELLGVIIFGAGLLYQIYRRRTCYARLPFLKILEKFLNISLESEYNPAISCFRVITSAFTAIAILAVDFPLFPRRFAKTELYGTGAMDFGVGGFVFGSAMVCLEVRRRKYMEGSKLHYFTNSLYSVWPLVFLGIGRLAIIKSIGYQEHLTEYGVHWNFFFTIIVVKLITPLLLIIFPLNKSWIIALGITVLYQLALDFTSLKRLILYGTDGSGTRVGLLNANREGIISTLGYVAIHMAGVQTGLYMHKNRSHIKDLIKVACFLLLAAISLFISLYVVQVNVEAVSRRMANLAFCIWIVASSLILLSSLLLGDIILSFAKFLIKGALVPCSWKLIQSPVTNKKHSESLVPEAERMEPSLCLITALNRKQLIFFLLSNITTGLINLMVDTLHSSTLWALFVVNLYMFSNCLIVYVLYLQDKTVQFW

SEQ ID NO: 18465 - protein, 419 aa, Homo sapiens
MHLLGFFSVACSLLAAALLPGPREAPAAAAAFESGLDLSDAEPDAGEATAYASKDLEEQLRSVSSVDELMTVLYPEYWKMYKCQLRKGGWQHNREQANLNSRTEETIKFAAAHYNTEILKSIDNEWRKTQCMPREVCIDVGKEFGVATNTFFKPPCVSVYRCGGCCNSEGLQCMNTSTSYLSKTLFEITVPLSQGPKPVTISFANHTSCRCMSKLDVYRQVHSIIRRSLPATLPQCQAANKTCPTNYMWNNHICRCLAQEDFMFSSDAGDDSTDGFHDICGPNKELDEETCQCVCRAGLRPASCGPHKELDRNSCQCVCKNKLFPSQCGANREFDENTCQCVCKRTCPRNQPLNPGKCACECTESPQKCLLKGKKFHHQTCSCYRRPCTNRQKACEPGFSYSEEVCRCVPSYWKRPQMS

SEQ ID NO: 18466 - protein, 184 aa, Homo sapiens
MKALGAVLLALLLFGRPGRGQTQQEEEEEDEDHGPDDYDEEDEDEVEEEETNRLPGGRSRVLLRCYTCKSLPRDERCNLTQNCSHGQTCTTLIAHGNTESGLLTTHSTWCTDSCQPITKTVEGTQVTMTCCQSSLCNVPPWQSSRVQDPTGKGAGGPRGSSETVGAALLLNLLAGLGAMGARRP

SEQ ID NO: 18467 - protein, 407 aa, Homo sapiens
MNMIWRNSISCLRLGKVPHRYQSGYHPVAPLGSRILTDPAKVFEHNMWDHMQWSKEEEAAARKKVKENSAVRVLLEEQVKYEREASKYWDTFYKIHKNKFFKDRNWLLREFPEILPVDQKPEEKARESSWDHVKTSATNRFSRMHCPTVPDEKNHYEKSSGSSEGQSKTESDFSNLDSEKHKKGPMETGLFPGSNATFRILEVGCGAGNSVFPILNTLENSPESFLYCCDFASGAVELVKSHSSYRATQCFAFVHDVCDDGLPYPFPDGILDVILLVFVLSSIHPDRMQGVVNRLSKLLKPGGMLLFRDYGRYDKTQLRFKKGHCLSENFYVRGDGTRAYFFTKGEVHSMFCKASLDEKQNLVDRRLQVNRKKQVKMHRVWIQGKFQKPLHQTQNSSNMVSTLLSQD

SEQ ID NO: 18468 - protein, 61 aa, Homo sapiens
MAAGLARLLLLLGLSAGGPAPAGAAKMKVVEEPNAFGVNNPFLPQASRLQAKRDPSPVSGE

SEQ ID NO: 18469 - protein, 1545 aa, Homo sapiens
MMPAQYALTSSLVLLVLLSTARAGPFSSRSNVTLPAPRPPPQPGGHTVGAGVGSPSSQLYEHTVEGGEKQVVFTHRINLPPSTGCGCPPGTEPPVLASEVQALRVRLEILEELVKGLKEQCTGGCCPASAQAGTGQTDVRTLCSLHGVFDLSRCTCSCEPGWGGPTCSDPTDAEIPPSSPPSASGSCPDDCNDQGRCVRGRCVCFPGYTGPSCGWPSCPGDCQGRGRCVQGVCVCRAGFSGPDCSQRSCPRGCSQRGRCEGGRCVCDPGYTGDDCGMRSCPRGCSQRGRCENGRCVCNPGYTGEDCGVRSCPRGCSQRGRCKDGRCVCDPGYTGEDCGTRSCPWDCGEGGRCVDGRCVCWPGYTGEDCSTRTCPRDCRGRGRCEDGECICDTGYSGDDCGVRSCPGDCNQRGRCEDGRCVCWPGYTGTDCGSRACPRDCRGRGRCENGVCVCNAGYSGEDCGVRSCPGDCRGRGRCESGRCMCWPGYTGRDCGTRACPGDCRGRGRCVDGRCVCNPGFTGEDCGSRRCPGDCRGHGLCEDGVCVCDAGYSGEDCSTRSCPGGCRGRGQCLDGRCVCEDGYSGEDCGVRQCPNDCSQHGVCQDGVCICWEGYVSEDCSIRTCPSNCHGRGRCEEGRCLCDPGYTGPTCATRMCPADCRGRGRCVQGVCLCHVGYGGEDCGQEEPPASACPGGCGPRELCRAGQCVCVEGFRGPDCAIQTCPGDCRGRGECHDGSCVCKDGYAGEDCGEARVPSSASAYDQRGLAPGQEYQVTVRALRGTSWGLPASKTITTMIDGPQDLRVVAVTPTTLELGWLRPQAEVDRFVVSYVSAGNQRVRLEVPPEADGTLLTDLMPGVEYVVTVTAERGRAVSYPASVRANTEEREEESPPRPSLSQPPRRPWGNLTAELSRFRGTVQDLERHLRAHGYPLRANQTYTSVARHIHEYLQRQVLGSSADGALLVSLDGLRGQFERVVLRWRPQPPAEGPGGELTVPGTTRTVSLPDLRPGTTYHVEVHGVRAGQTSKSYAFITTTGPSTTQGAQAPLLQQRPQELGELRVLGRDETGRLRVVWTAQPDTFAYFQLRMRVPEGPGAHEEVLPGDVRQALVPPPPPGTPYELSLHGVPPGGKPSDPIIYQGIMDKDEEKPGKSSGPPRLGELTVTDRTSDSLLLRWTVPEGEFDSFVIQYKDRDGQPQVVPVEGPQRSAVITSLDPGRKYKFVLYGFVGKKRHGPLVAEAKILPQSDPSPGTPPHLGNLWVTDPTPDSLHLSWTVPEGQFDTFMVQYRDRDGRPQVVPVEGPERSFVVSSLDPDHKYRFTLFGIANKKRYGPLTADGTTAPERKEEPPRPEFLEQPLLGELTVTGVTPDSLRLSWTVAQGPFDSFMVQYKDAQGQPQAVPVAGDENEVTVPGLDPDRKYKMNLYGLRGRQRVGPESVVAKTAPQEDVDETPSPTELGTEAPESPEEPLLGELTVTGSSPDSLSLFWTVPQGSFDSFTVQYKDRDGRPRAVRVGGKESEVTVGGLEPGHKYKMHLYGLHEGQRVGPVSAVGVT

SEQ ID NO: 18470 - protein, 343 aa, Homo sapiens
MKMEEAVGKVEELIESEAPPKASEQETAKEEDGSVELESQVQKDGVADSTVISSMPCLLMELRRDSSESQLASTESDKPTTGRVYESDSSNHCMLSPSSSGHLADSDTLSSAEENEPSQAETAVEGDPSGVSGATVGRKSRRSRSESETSTMAAKKNRQSSDKQNGRVAKVKGHRSQKHKERIRLLRQKREAAARKKYNLLQDSSTSDSDLTCDSSTSSSDDDEEVSGSSKTITAEIPGHLDPGFLASDKTSAGNAPLNEEINIASSDSEVEIVGVQEHARCVHPRGGVIQSVSSWKHGSGTQYVSTRQTQSWTAVTPQQTWASPAEVVDLTLDEDSRRKYLL

SEQ ID NO: 18471 - protein, 115 aa, Homo sapiens
MGTRLLCWVAFCLLVEELIEAGVVQSPRYKIIEKKQPVAFWCNPISGHNTLYWYLQNLGQGPELLIRYENEEAVDDSQLPKDRFSAERLKGVDSTLKIQPAELGDSAVYLCASSL

SEQ ID NO: 18472 - protein, 64 aa, Homo sapiens
MKLCVTVLSLLVLVAAFCSLALSAPMGSDPPTACCFSYTARKLPRNFVVDYYETSSLCSQPAVV

SEQ ID NO: 18473 - protein, 1732 aa, Homo sapiens
MFFKGGSWLWLYIRTSIILGSELNSPAPHGQNNCYQLNRFQCSFEEAQHYCHVQRGFLAHIWNKEVQDLIRDYLEEGKKWWIGQNVMPLKKHQDNKYPADVAANGPPKPLSCTYLSRNFIRISSKGDKCLLKYYFICQTGDFLDGDAHYERNGNNSHLYQRHKKTKRGVAIARDKMPPGPGHLPTTCHYPLPAHLSKTLCHPISQFPSVLSSITSQVTSAASEPSSQPLPVITQLTMPVSVTHAGQSLAETTSSPKEEGHPNTFTSYLQVSLQKASGQVIDEIAGNFSRAVHGLQALNKLQEACEFLQKLTALTPRFSKPAQVNLINSLIYLSEELLRIPFQNNNSLGFKVPPTVCPFHSLNNVTKAGEGSWLESKRHTEPVEDILEMSLVEFGNIGEAFLEQNQSPESSVTLTSANATLLLSRQNISTLPLSSYTLGHPAPVRLGFPSALALKELLNKHPGVNVQITGLAFNPFKDLDNRNIVGSIGSVLLSANRKLLQVHDLMEDIEIMLWRNVSLETHPTSLNMSTHQLTITVNVTSLEKSLIVSIDPDSPLLMTLYLGFQYQPNCTHFHLNITLPKDKVWQKDEEYTWVLNPEHLQHGIGTYYITAVLSERQEGAQQTPSLVSVITAVTQCYYWEIHNQTWSSAGCQVGPQSTILRTQCLCNHLTFFASDFFVVPRTVNVEDTIKLFLRVTNNPVGVSLLASLLGFYVITVVWARKKDQADMQKVKVTVLADNDPSAQFHYLIQVYTGYRRSAATTAKVVITLYGSEGRSEPHHLCDPQKTVFERGGLDVFLLTTWTSLGNLHSLRLWHDNSGVSPSWYVSQVIVCDMAVKRKWHFLCNCWLAVDLGDCELDRVFIPVSKRELFSFRHLFSSMIVEKFTQDYLWLSIATRHPWNQFTRVQRLSCCMTLLLCNMVINVMFWKINSTTAKRDEQMRPFAVAWSELLVSIHTAVILFPINLVIGRLFPLIEPQETLPLFPPIQASCLSDASVEPLSATMVVEELKETVRFLLRRNTYLLSKCEQPPWSSWDITKLVKLLSSLVSSHLEGQGCHQQGERHWARVVPENHHHFCCYLHRVLQRLKSHLGTLGLTQGHQSCDFLDAASQLQKLQELLETHILPTEQEPSREVTSFAILSSEEGKKPISNGLSKWLTSVCWLLLGFTSLASAFFTALYSLELSKDQATSWMISIILSVLQNIFISQPVKVVFFTFLYSLMMSRMPRLNKENEQQTKRILALLAKCSSSVPGSRDKNNPVYVAPAINSPTKHPERTLKKKKLFKLTGDILVQILFLTLLMTAIYSAKNSNRFYLHQAIWKTFSHQFSEIKLLQDFYPWANHILLPSLYGDYRGKNAVLEPSHCKCGVQLIFQIPRTKTYEKVDEGQLAFCDNGHTCGRPKSLFPGLHLRRFSYICSPRPMVLIPTDELHERLTSKNENGFSYIMRGAFFTSLRLESFTSLQMSKKGCVWSIISQVIYYLLVCYYAFIQGCQLKQQKWRFFTGKRNILDTSIILISFILLGLDMKSISLHKKNMARYRDDQDRFISFYEAVKVNSAATHLVGFPVLLATVQLWNLLRHSPRLRVISRTLSRAWDEVVGFLLIILILLTGYAIAFNLLFGCSISDYRTFFSSAVTVVGLLMGISHQEEVFALDPVLGTFLILTSVILMVLVVINLFVSAILMAFGKERKSLKKEAALIDTLLQKLSNLLGISWPQKTSSEQAATTAVGSDTEVLDELP

SEQ ID NO: 18474 - protein, 77 aa, Homo sapiens
MITGVFSMRLWTPVGVLTSLAYCLHQRRVALAELQEADGQCPVDRSLLKLKMVQVVFRHGARSPLKPLPLEEQYSFH

SEQ ID NO: 18475 - protein, 390 aa, Homo sapiens
MDFGLALLLAGLLGLLLGQSLQVKPLQVEPPEPVVAVALGASRQLTCRLACADRGASVQWRGLDTSLGAVQSDTGRSVLTVRNASLSAAGTRVCVGSCGGRTFQHTVQLLVYAFPDQLTVSPAALVPGDPEVACTAHKVTPVDPNALSFSLLVGGQELEGAQALGPEVQEEEEEPQGDEDVLFRVTERWRLPPLGTPVPPALYCQATMRLPGLELSHRQAIPALHALSNPEAPAPTSPEPPDTTSPESPDTTSPESPDTTSQEPPDTTSPEPPDKTSPEPAPQQGSTHTPRSPGSTRTRRPEISQAGPTQGEVIPTGSSKPAGDQLPAALWTSSAVLGLLLLALPTYHLWKRCRHLAEDDTHPPASLRLLPQVSAWAGLRGTGQVGISPS

SEQ ID NO: 18476 - protein, 1471 aa, Homo sapiens
MDNALFLAAVSNLDIESKLSVYYRAPWHQQRNIFLPATRPPCVEELHRHARQSLQALRREHRSRSDRREQRAAAPLSIAAPPLPAYPPAHSQRRREFKDRHFLTFNSTRSPSPTECCHMTPWSRKSHPPEDEDTDVMLGQRPKNPIHNIPSTLDKQTNWSKALPLPTPEEKMKQDAQVISSCIIPINVTGVGFDREASIRCSLVHSQSVLQRRRKLRRRKTISGIPRRVQQEIDSDESPVARERNVIVHTNPDPSNTVNRISGTRDSECQTEDILIAAPSRRRIRAQRGQSIAASLSHSAGNISALADKGDTMFTPAVSSRTRSRSLPREGNRGGDAEPKVGAKPSAYEEGESFVGDHERTPNDFSEAPSSPSAQDHQPTLGLACSQHLHSPQHKLSERGRSRLSRMAADSGSCDISSNSDTFGSPIHCISTAGVLLSSHMDQKDDHQSSSGNWSGSSSTCPSQTSETIPPAASPPLTGSSHCDSELSLNTAPHANEDASVFVTEQYNDHLDKVRGHRANSFTSTVADLLDDPNNSNTSDSEWNYLHHHHDASCRQDFSPERPKADSLGCPSFTSMATYDSFLEKSPSDKADTSSHFSVDTEGYYTSMHFDCGLKGNKSYVCHYAALGPENGQGVGASPGLPDCAWQDYLDHKRQGRPSISFRKPKAKPTPPKRSSSLRKSDGNADISEKKEPKISSGQHLPHSSREMKLPLDFANTPSRMENANLPTKQEPSWINQSEQGIKEPQLDASDIPPFKDEVAESTHYADLWLLNDLKTNDPYRSLSNSSTATGTTVIECIKSPESSESQTSQSESRATTPSLPSVDNEFKLASPEKLAGLASPSSGYSSQSETPTSSFPTAFFSGPLSPGGSKRKPKVPERKSSLQQPSLKDGTISLSKDLELPIIPPTHLDLSALHNVLNKPFHHRHPLHVFTHNKQNTVGETLRSNPPPSLAITPTILKSVNLRSINKSEEVKQKEENNTDLPYLEESTLTTAALSPSKIRPHTANKSVSRQYSTEDTILSFLDSSAVEMGPDKLHLEKNSTFDVKNRCDPETITSAGSSLLDSNVTKDQVRTETEPIPENTPTKNCAFPTEGFQRVSAARPNDLDGKIIQYGPGPDETLEQVQKAPSAGLEEVAQPESVDVITSQSDSPTRATDVSNQFKHQFVMSRHHDKVPGTISYESEITSVNSFPEKCSKQENIASGISAKSASDNSKAEETQGNVDEASLKESSPSDDSIISPLSEDSQAEAEGVFVSPNKPRTTEDLFAVIHRSKRKVLGRKDSGDMSVRSKSRAPLSSSSSSASSITSPSSNVTTPNSQRSPGLIYRNAKKSNTSNEEFKLLLLKKGSRSDSSYRMSATEILKSPILPKPPGELTAESPQSTDDAHQGSQGAEALSPLSPCSPRVNAEGFSSKSFATSASARVGRSRAPPAASSSRYSVRCRLYNTPMQAISEGETENSDGSPHDDRSSQSST

SEQ ID NO: 18477 - protein, 884 aa, Homo sapiens
MLQTKDLIWTLFFLGTAVSLQVDIVPSQGEISVGESKFFLCQVAGDAKDKDISWFSPNGEKLTPNQQRISVVWNDDSSSTLTIYNANIDDAGIYKCVVTGEDGSESEATVNVKIFQKLMFKNAPTPQEFREGEDAVIVCDVVSSLPPTIIWKHKGRDVILKKDVRFIVLSNNYLQIRGIKKTDEGTYRCEGRILARGEINFKDIQVIVNVPPTIQARQNIVNATANLGQSVTLVCDAEGFPEPTMSWTKDGEQIEQEEDDEKYIFSDDSSQLTIKKVDKNDEAEYICIAENKAGEQDATIHLKVFAKPKITYVENQTAMELEEQVTLTCEASGDPIPSITWRTSTRNISSEEKASWTRPEKQEVHAPWNWQVGRQKGQAGSAGFPGSHETLDGHMVVRSHARVSSLTLKSIQYTDAGEYICTASNTIGQDSQSMYLEVQYAPKLQGPVAVYTWEGNQVNITCEVFAYPSATISWFRDGQLLPSSNYSNIKIYNTPSASYLEVTPDSENDFGNYNCTAVNRIGQESLEFILVQADTPSSPSIDQVEPYSSTAQVQFDEPEATGGVPILKYKAEWRAVGEEVWHSKWYDAKEASMEGIVTIVGLKPETTYAVRLAALNGKGLGEISAASEFKTQPVQGEPSAPKLEGQMGEDGNSIKVNLIKQDDGGSPIRHYLVRYRALSSEWKPEIRLPSGSDHVMLKSLDWNAEYEVYVVAENQQGKSKAAHFVFRTSAQPTAIPANGSPTSGLSTGAIVGILIVIFVLLLVVVDITCYFLNKCGLFMCIAVNLCGKAGPGAKGKDMEEGKAAFSKDESKEPIVEVRTEEERTPNHDGGKHTEPNETTPLTEPEKGPVEAKPECQETETKPAPAEVKTVPNDATQTKENESKA

SEQ ID NO: 18478 - protein, 213 aa, Homo sapiens
MVLLLVILIPVLVSSAGTSAHYEMLGTCRMVCDPYGGTKAPSTAATPDRGLMQSLPTFIQGPPGAPGLNAAGAISAATYSTVPKIAFYAGLKRQHEGYEVLKFDDVVTNLGNHYDPTTGKFTCSIPGIYFFTYHVLMRGGDGTSMWADLCKNNQVRASAIAQDADQNYDYASNSVVLHLEPGDEVYIKLDGGKAHGGNNNKYSTFSGFIIYAD

SEQ ID NO: 18479 - protein, 999 aa, Homo sapiens
MADKVRRQRPRRRVCWALVAVLLADLLALSDTLAVMSVDLGSESMKVAIVKPGVPMEIVLNKESRRKTPVIVTLKENERFFGDSAASMAIKNPKATLRYFQHLLGKQADNPHVALYQARFPEHELTFDPQRQTVHFQISSQLQFSPEEVLGMVLNYSRSLAEDFAEQPIKDAVITVPVFFNQAERRAVLQAARMAGLKVLQLINDNTATALSYGVFRRKDINTTAQNIMFYDMGSGSTVCTIVTYQMVKTKEAGMQPQLQIRGVGFDRTLGGLEMELRLRERLAGLFNEQRKGQRAKDVRENPRAMAKLLREANRLKTVLSANADHMAQIEGLMDDVDFKAKVTRVEFEELCADLFERVPGPVQQALQSAEMSLDEIEQVILVGGATRVPRVQEVLLKAVGKEELGKNINADEAAAMGAVYQAAALSKAFKVKPFVVRDAVVYPILVEFTREVEEEPGIHSLKHNKRVLFSRMGPYPQRKVITFNRYSHDFNFHINYGDLGFLGPEDLRVFGSQNLTTVKLKGVGDSFKKYPDYESKGIKAHFNLDESGVLSLDRVESVFETLVEDSAEEESTLTKLGNTISSLFGGGTTPDAKENGTDTVQEEEESPAEGSKDEPGEQVELKEEAEAPVEDGSQPPPPEPKGDATPEGEKATEKENGDKSEAQKPSEKAEAGPEGVAPAPEGEKKQKPARKRRMVEEIGVELVVLDLPDLPEDKLAQSVQKLQDLTLRDLEKQEREKAANSLEAFIFETQDKLYQPEYQEVSTEEQREEISGKLSAASTWLEDEGVGATTVMLKEKLAELRKLCQGLFFRVEERKKWPERLSALDNLLNHSSMFLKGARLIPEMDQIFTEVEMTTLEKVINETWAWKNATLAEQAKLPATEKPVLLSKDIEAKMMALDREVQYLLNKAKFTKPRPRPKDKNGTRAEPPLNASASDQGEKVIPPAGQTEDAEPISEPEKVETGSEPGDTEPLELGGPGAEPEQKEQSTGQKRPLKNDEL

SEQ ID NO: 18480 - protein, 148 aa, Homo sapiens
MTWRHHVRLLFTVSLALQIINLGNSYQREKHNGGREEVTKVATQKHRQSPLNWTSSHFGEVTGSAEGWGPEEPLPYSWAFGEDPKDFLASHAHGPSAGGAPSLLLLLPCALLHRLLRPDAPAHPRSLVPSVLQRERRPCGRPGLGHRL

SEQ ID NO: 18481 - protein, 271 aa, Homo sapiens [sequence omitted]

SEQ ID NO: 18482 - protein, 144 aa, Homo sapiens
MSLLLPPLALLLLLAALVAPATAATAYRPDWNRLSGLTRARVETCGGQLNRLKEVKAFVTQDIPFYHNLVMKHLPGADPELVLLGRRYEELERIPLSEMTREEINALVQELGFYRKAAPDAQVPPEYVWAPAKPPEETSDHADL

SEQ ID NO: 18483 - protein, 80 aa, Homo sapiens
MKFLAVLVLLGVSIFLVSAQNPTTAAPADTYPATGPADDEAPDAETTPTTATTAASTTARKDIPVLPKWVGDLPNGRVCP

SEQ ID NO: 18484 - protein, 228 aa, Homo sapiens
MNIKGSPWKAGSLLLLLVSNLLLCQSVAPLPICPGGAARCQVTLRDLFDRAVVLSHYIHNLSSEMFSEFDKRYTHGRGFITKAINSCHTSSLATPEDKEQAQQMNQKDFLSLIVSILRSWNEPLYHLVTEVRGMQEAPEAILSKAVEIEEQTKRLLEGMELIVSQVHPETKENEIYPVWSGLPSLQMADEESRLSAYYNLLHCLRRDSHKIDNYLKLLKCRIIHNNNC

SEQ ID NO: 18485 - protein, 112 aa, Homo sapiens
MSLVLNDLLICCRQLEHDRATERKKEVEKFKRLIRDPETIKHLDRHSDSKQGKYLNWDAVFRFLQKYIQKETECLRIAKPNVSASTQASRQKKMQEISSLVKYFIKCANRSK

SEQ ID NO: 18486 - protein, 470 aa, Homo sapiens
MTRRYNINIYAPTLLVFKEHINRPADVIQARGMKKQIIDDFITRNKYLLAARLTSQKLFHELCPVKRSHRQRKYCVVLLTAETTKLSKPFEAFLSFALANTQDTVRFVHVYSNRQQEFADTLLPDSEAFQGKSAVSILERRNTAGRVVYKTLEDPWIGSESDKFILLGYLDQLRKDPALLSSEAVLPDLTDELAPVFLLRWFYSASDYISDCWDSIFHNNWREMMPLLSLIFSALFILFGTVIVQAFSDSNDERESSPPEKEEAQEKTGKTEPSFTKENSSKIPKKGFVEVTELTDVTYTSNLVRLRPGHMNVVLILSNSTKTSLLQKFALEVYTFTGSSCLHFSFLSLDKHREWLEYLLEFAQDAAPIPNQYDKHFMERDYTGYVLALNGHKKYFCLFKPQKTVEEEEAIGSCSDVDSSLYLGESRGKPSCGLGSRPIKGKLSKLSLWMERLLEGSLQRFYIPSWPELD

SEQ ID NO: 18487 - protein, 238 aa, Homo sapiens
MRPAALRGALLGCLCLALLCLGGADKRLRDNHEWKKLIMVQHWPETVCEKIQNDCRDPPDYWTIHGLWPDKSEGCNRSWPFNLEEIKKNWMEITDSSLPSPSMGPAPPRWMRSTPRRSTLAEAWNSTGSWTSTGGCALPPAALPSGDLCCRPSLTAGSRGVGVDLTALQQLLHVHYSATGIIPEECSEPTKPFQIILHHDHTEWVQSIGMPIWTISSSESAIGKTRTQPACAVLSHDS

SEQ ID NO: 18488 - protein, 677 aa, Homo sapiens
MADKVRRQRPRRRVCWALVAVLLADLLALSDTLAVMSVDLGSESMKVAIVKPGVPMEIVLNKESRRKTPVIVTLKENERFFGDSAASMAIKNPKATLRYFQHLLGKQADNPHVALYQARFPEHELTFDPQRQTVHFQISSQLQFSPEEVLGMVLNYSRSLAEDFAEQPIKDAVITVPVFFNQAERRAVLQAARMAGLKVLQLINDNTATALSYGVFRRKDINTTAQNIMFYDMGSGSTVCTIVTYQMVKTKEAGMQPQLQIRGVGFDRTLGGLEMELRLRERLAGLFNEQRKGQRAKDVRENPRAMAKLLREANRLKTVLSANADHMAQIEGLMDDVDFKAKVTRVEFEELCADLFERVPGPVQQALQSAEMSLDEIEQVILVGGATRVPRVQEVLLKAVGKEELGKNINADEAAAMGAVYQAAALSKAFKVKPFVVRDAVVYPILVEFTREVEEEPGIHSLKHNKRVLFSRMGPYPQRKVITFNRYSHDFNFHINYGDLGFLGPEDLRVFGSQNLTTVKLKGVGDSFKKYPDYESKGIKAHFNLDESGVLSLDRVESVFETLVEDSAEEESTLTKLGNTISSLFGGGTTPDAKENGTDTVQEEEESPAEGSKDEPGEQVELKEEAEAPVEDGSQPPPPEPKGDATPEGEKATEKENGDKSEAQASVCRASVTRFGF

SEQ ID NO: 18489 - protein, 468 aa, Homo sapiens
MDSLASLVLCGVSLLLSGTVEGAMDLILINSLPLVSDAETSLTCIASGWRPHEPITIGRDFEALMNQHQDPLEVTQDVTREWAKKVVWKREKASKINGAYFCEGRVRGEAIRIRTMKMRQQASFLPATLTMTVDKGDNVNISFKKVLIKEEDAVIYKNGSFIHSVPRHEVPDILEVHLPHAQPQDAGVYSARYIGGNLFTSAFTRLIVRRCEAQKWGPECNHLCTACMNNGVCHEDTGECICPPGFMGRTCEKACELHTFGRTCKERCSGQEGCKSYVFCLPDPYGCSCATGWKGLQCNEGIQRMTPKIVDLPDHIEVNSGKFNPICKASGWPLPTNEEMTLVKPDGTVLHPKDFNHTDHFSVAIFTIHRILPPDSGVWVCSVNTVAGMVEKPFNISVKVLPKPLNAPNVIDTGHNFAVINISSEPYFGDGPIKSKKLLYKPVNHYEAWQHIQVSMEKQRLTKANSDK

SEQ ID NO: 18490 - protein, 425 aa, Homo sapiens
MAAVSPTTRCQESVTFEDVAVVFTDEEWSRLVPIQRDLYKEVMLENYNSIVSLGLPVPQPDVIFQLKRGDKPWMVDLHGSEEREWPESVSLDWETKPEIHDASDKKSEGSLRECLGRQSPLCPKFEVHTPNGRMGTEKQSPSGETRKKSLSRDKGLRRRSALSREILTKERHQECSDCGKTFFDHSSLTRHQRTHTGEKPYDCRECGKAFSHRSSLSRHLMSHTGESPYECSVCSKAFFDRSSLTVHQRIHTGEKPFQCNECGKAFFDRSSLTRHQRIHTGESPYECHQCGKAFSQKSILTRHQLIHTGRKPYECNECGKAFYGVSSLNRHQKAHAGDPRYQCNECGKAFFDRSSLTQHQKIHTGDKPYECSECGKAFSQRCRLTRHQRVHTGEKPFECTVCGKVFSSKSSVIQHQRRYAKQGID

SEQ ID NO: 18491 - protein, 81 aa, Homo sapiens
MAAAVAAALARLLAAFLLLAAQVACEYGMVHVVSQAGGPEGKDYCILYNPQWAHLPHDLSKAMPGRGGAAVGTHLVLLSDL

SEQ ID NO: 18492 - protein, 1024 aa, Homo sapiens
MARHGPPWSRLDAQQERDVRELVRGVAGLQDEADPNFQLALNFAWSNFRFHRFLDVNSHKIEKTIEGIYEKFVIHSDLSKAASWKRLTEEFLNAPLPSIKEIKTDAHYSILSLLLCLSDSPSNSSYVETPRNKEVEKKDDFDWGKYLMEDEEMDIGPYMDTPNWSEESEEENDQQPLSREDSGIQVDRTPLEEQDQNRKLDPCISWKDEPDDRSWLEHHVVHQYWTARPSQFPHSLHLHSNLAAVWDQHLYSSDPLYVPDDRVLVTETQVIRETLWLLSGVKKLFIFQLIDGKVTVRNNIIVTHLTHSCLRSVLEQIAAYGQVVFRLQEFIDEVMGHSSESMLPGSGSVPKKSTEAPFRTYQAFMWALYKYFISFKEELAEIEKCIINNDTTITLAIVVDKLAPRLSQLKVLHKVFSTGVAEVPPDTRNVVRASHLLNTLYKAILEYDNVGEASEQTVSLLFSLWVETVRPYLQTVDEWIVHGHLWDGAREFIIQRNKNVPVNHRDFWYATYTLYSVSEKTENEEKMSDNASASSGSDQGPSSRQHTMVSFLKPVLKQIIMAGKSMQLLKNLQCAESTTCQAGARDAERKSLYTLFLESVQSRLRHGEDSTPQVLTEQQATKENLMKMQSIAESHLELDDVHDPLLAINFARMYLEQSDFHEKFAGGDVCVDRSSESVTCQTFELTLRSCLYPHIDKQYLDCCGNLMQTLKKDYRLVEYLQAMRNFFLMEGGDTMYDFYTSIFDKIREKETWQNVSFLNVQLQEAVGQRYPEDSSRLSISFENVDTAKKKLPVHILDGLTLSYKVPWPVDIVISLECQKIYNQVFLLLLQIKWAKYSLDVLLFGELVSTAEKPRLKEGLIHEQDTVAQFGPQKEPVRQQIHRMFLLRVKLMHFVNSLHNYIMTRILHSTGLEFQHQVEEAKDLDQLIKIHYRYLSTIHDRCLLREKVSFVKEAIMKVLNLALMFADGWQAGLGTWRMESIEKMESDFKNCHMFLVTILNKAVCRGSFPHLESLALSLMAGMEQS

SEQ ID NO: 18493 - protein, 272 aa, Homo sapiens
MVAWRSAFLVCLAFSLATLVQRGSGDFDDFNLEDAVKETSSVKQPWDHTTTTTTNRPGTTRAPAKPPGPTEGSGLDLADALDDQDDGRRKPGIGGRERWNHVTTTTKRPVTTRAPANTLGNDFDLADALDDRNDRDDGRRKPIAGGGGFSDKDLEDIVGGGEYKPDKGKGDGRYGSNDDPGSGMVAEPGTIAGVASALAMALIGAVSSYISYQQKKFCFSIQHAAAGQEGLNADYVKGENLEAVVCEEPQVKYSTLHTQSAEPPPPPEPARI

SEQ ID NO: 18494 - protein, 506 aa, Homo sapiens
MDDYMVLRMIGEGSFGRALLVQHESSNQMFAMKEIRLPKSFSNTQNSRKEAVLLAKMKHPNIVAFKESFEAEGHLYIVMEYCDGGDLMQKIKQQKGKLFPEDMILNWFTQMCLGVNHIHKKRVLHRDIKSKNIFLTQNGKVKLGDFGSARLLSNPMAFACTYVGTPYYVPPEIWENLPYNNKSDIWSLGCILYELCTLKHPFQANSWKNLILKVCQGCISPLPSHYSYELQFLVKQMFKRNPSHRPSATTLLSRGIVARLVQKCLPPEIIMEYGEEVLEEIKNSKHNTPRKKTNPSRIRIALGNEASTVQEEEQDRKGSHTDLESINENLVESALRRVNREEKGNKSVHLRKASSPNLHRRQWEKNVPNTALTALENASILTSSLTAEDDRGGSVIKYSKNTTRKQWLKETPDTLLNILKNADLSLAFQTYTIYRPGSEGFLKGPLSEETEASDSVDGGHDSVILDPERLEPGLDEEDTDFEEEDDNPDWVSELKKRAGWQGLCDR

SEQ ID NO: 18495 - protein, 188 aa, Homo sapiens
MSRQANRGTESKKMSSELFTLTYGALVTQLCKDYENDEDVNKQLDKILFSNFLPRGFNIGVRLIEDFLARSNVGRCHDFRETADVIAKVAFKMYLGITPSITNWSPAGDEFSLILENNPLVDFVELPDNHSSLIYSNLLCGVLRGALEMVQMAVEAKFVQDTLKGDGVTEIRMRFIRRIEDNLPAGEE

SEQ ID NO: 18496 - protein, 1262 aa, Homo sapiens
MTPGTQSPFFLLLLLTVLTVVTGSGHASSTPGGEKETSATQRSSVPSSTEKNAVSMTSSVLSSHSPGSGSSTTQGQDVTLAPATEPASGSAATWGQDVTSVPVTRPALGSTTPPAHDVTSAPDNKPAPGSTAPPAHGVTSAPDTRPAPGSTAPQAHGVTSAPDTRPAPGSTAPPAHGVTSAPDTRPAPGSTAPPAHGVTSAPDTRSAPGSTAPAAHGVTSAPDTRSVPGSTAPQAHGVTSAPDTRPAPGSTAPPAHGVTSAPDTRPVPGSTAPPAHGVTSAPDTRPAPGSTAPPAHGVTSAPDTRPAPGSTAPQAHGVTSAPDTRPAPGSTAPPAHGVTSAPDTRPAPGSTAPPAHGVTSAPDTRPAPGSTAPAAHGVTSAPDTRPAPGSTAPQAHGVTSAPDTRPAPGSTAPPAHGVTSAPDTRPAPGSTAPPAHGVTSAPDTRPAPGSTAPPAHGVTSAPDTRPAPGSTAPAAHGVTSAPDTRPAPGSTAPQAHGVTSAPDTRPAPGSTAPPAHGVTSAPDTRPAPGSTAPPAHGVTSAPDTRPAPGSTAPPTHGVTSAPDTSPAPGSTAPPAHGVTSAPDTRPAPGYTAPAAHGVTSAPDTRPAPGSTAPQAHGVTSAPDTRPAPGSTAPPAHGVTSAPDTRPAPGSTAPPAHGVTSAPDTRPAPGSTAPPAHGVTSAPESRPAPGSTARAAHGVTSAPESRPAPGSTAPPAHGVTSAPDTRPAPGSTAPPAHGVTSAPDTRPAPGSTAPPAHGVTSAPDTRPAPGSTAPPAHGVTSAPDTRPAPGSTAPPAHGVTSAPDTRPSPPGSTAPPAHGVTSAPDTRPAPGSTAPPVHGVTSAPDTRPAPGSTAPPAHGVTSAPDTRPAPGSTAPPAHGVTSAPDTRPAPGSTAPPAHGVTSAPDTRRAPGSTPAPGSTAPPAHGVTSAPDTRPAPGSTAPPAHGVTSAPDNRPALGSTAPPVHNVTSASGSASGSASTLVHNGTSARATTTPASKSTPFSIPSHHSDTPTTLASHSTKTDASSTHHSTVPPLTSSNHSTSPQLSTGVSFFFLSFHISNLQFNSSLEDPSTDYYQELQRDISEMFLQIYKQGGFLGLSNIKFRPGSVVVQLTLAFREGTINVHDVETQFNQYKTEAASRYNLTISDVSVSDVPFPFSAQSGAGVPGWGIALLVLVCVLVALAIVYLIALAVCQCRRKNYGQLDIFPARDTYHPMSEYPTYHTHGRYVPPSSTDRSPYEKVSAGNGGSSLSYTNPAVAATSANL

SEQ ID NO: 18497 - protein, 135 aa, Homo sapiens
MTPGTQSPFFLLLLLTVLTATTAPKPATVVTGSGHASSTPGGEKETSATQRSSVPSSTEKNAALHQAQLLLWCTTAPLPGLPQPQPARALHSQFPATTLILLPPLPAIAPRLMPVALTIARSQHRLLPRAAERHF

SEQ ID NO: 18498 - protein, 813 aa, Homo sapiens
MASPPRGWGCGELLLPFMLLGTLCEPGSGQIRYSMPEELDKGSFVGNIAKDLGLEPQELAERGVRIVSRGRTQLFALNPRSGSLVTAGRIDREELCAQSPLCVVNFNILVENKMKIYGVEVEIIDINDNFPRFRDEELKVKVNENAAAGTRLVLPFARDADVGVNSLRSYQLSSNLHFSLDVVSGTDGQKYPELVLEQPLDREKETVHDLLLTALDGGDPVLSGTTHIRVTVLDANDNAPLFTPSEYSVSVPENIPVGTRLLMLTATDPDEGINGKLTYSFRNEEEKISETFQLDSNLGEISTLQSLDYEESRFYLMEVVAQDGGALVASAKVVVTVQDVNDNAPEVILTSLTSSISEDCLPGTVIALFSVHDGDSGENGEIACSIPRNLPFKLEKSVDNYYHLLTTRDLDREETSDYNITLTVMDHGTPPLSTESHIPLKVADVNDNPPNFPQASYSTSVTENNPRGVSIFSVTAHDPDSGDNARVTYSLAEDTFQGAPLSSYVSINSDTGVLYALRSFDYEQLRDLQLWVTASDSGNPPLSSNVSLSLFVLDQNDNTPEILYPALPTDGSTGVELAPRSAEPGYLVTKVVAVDKDSGQNAWLSYRLLKASEPGLFAVGLHTGEVRTARALLDRDALKQSLVVAVEDHGQPPLSATFTVTVAVADRIPDILADLGSIKTPIDPEDLDLTLYLVVAVAAVSCVFLAFVIVLLVLRLRRWHKSRLLQAEGSRLAGVPASHFVGVDGVRAFLQTYSHEVSLTADSRKSHLIFPQPNYADTLLSEESCEKSEPLLMSDKVDANKEERRVQVSFLFR

SEQ ID NO: 18499 - protein, 464 aa, Homo sapiens
MALVALVAGARLGRRLSGPGLGRGHWTAAGRSRSRREAAEAEAEVPVVQYVGERAARADRVFVWGFSFSGALGVPSFVVPSSGPGPRAGARPRRRIQPVPYRLELDQKISSAACGYGFTLLSSKTADVTKVWGMGLNKDSQLGFHRSRKDKTRGYEYVLEPSPVSLPLDRPQETRVLQVSCGRAHSLVLTDREGVFSMGNNSYGQCGRKVVENEIYSESHRVHRMQDFDGQVVQVACGQDHSLFLTDKGEVYSCGWGADGQTGLGHYNITSSPTKLGGDLAGVNVIQVATYGDCCLAVSADGGLFGWGNSEYLQLASVTDSTQVNVPRCLHFSGVGKVRQAACGGTGCAVLNGEGHVFVWGYGILGKGPNLVESAVPEMIPPTLFGLTEFNPEIQVSRIRCGLSHFAALTNKGELFVWGKNIRGCLGIGRLEDQYFPWRVTMPGEPVDVACGVDHMVTLAKSFI

SEQ ID NO: 18500 - protein, 174 aa, Homo sapiens
MADEAPRKGSFSALVGRTNGLTKPAALAAAPAKPGGAGGSKKLVIKNFRDRPRLPDNYTQDTWRKLHEAVRAVQSSTSIRYNLEELYQAVENLCSHKVSPMLYKQLRQACEDHVQAQILPFREDSLDSVLFLKKINTCWQDHCRQMIMIRSIFLFLDRTYVLQNSTLPSICQNH

SEQ ID NO: 18501 - protein, 754 aa, Homo sapiens
MAAQVGAVRVVRAVAAQEEPDKEGKEKPHAGVSPRGVKRQRRSSSGGSQEKRGRPSQEPPLAPPHRRRRSRQHPGPLPPTNAAPTVPGPVEPLLLPPPPPPSLAPAGPAVAAPLPAPSTSALFTFSPLTVSAAGPKHKGHKERHKHHHHRGPDGDPSSCGTDLKHKDKQENGERTGGVPLIKAPKRETPDENGKTQRADDFVLKKIKKKKKKKHREDMRGRRLKMYNKEVQTVCAGLTRISKEILTQGQINSTSGLNKESFRYLKDEQLCRLNLGMQEYRVPQGVQTPFMTHQEHSIRRNFLKTGTKFSNFIHEEHQSNGGALVLHAYMDELSFLSPMEMERFSEEFLALTFSENEKNAAYYALAIVHGAAAYLPDFLDYFAFNFPNTPVKMEILGKKDIETTTISNFHTQVNRTYCCGTYRAGPMRQISLVGAVDEEVGDYFPEFLDMLEESPFLKMTLPWGTLSSLRLQCRSQSDDGPIMWVRPGEQMIPTADMPKSPFKRRRSMNEIKNLQYLPRTSEPREVLFEDRTRAHADHVGQGFDWQSTAAVGVLKAVQFGEWSDQPRITKDVICFHAEDFTDVVQRLQLDLHEPPVSQCVQWVDEAKLNQMRREGIRYARIQLCDNDIYFIPRNVIHQFKTVSAVCSLAWHIRLKQYHPVVEATQNTESNSNMDCGLTGKRELEVDSQCVRIKTESEEACTEIQLLTTASSSFPPASELNLQQDQKTQPIPVLKVESRLDSDQQHNLQEHSTTSV

SEQ ID NO: 18502 - protein, 69 aa, Homo sapiens
METLQSETKTRVLPSWLTAQVATKNVAPMKAPKRMRMAAVPVAAARCDSSGQKTPANLTPCDKDCVLHE

SEQ ID NO: 18503 - protein, 302 aa, Homo sapiens
MVWKRLGALVMFPLQMIYLVVKAAVGLVLPAKLRDLSRENVLITGGGRGIGRQLAREFAERGARKIVLWGRTEKCLKETTEEIRQMGTECHYFICDVGNREEVYQTAKAVREKVGDITILVNNAAVVHGKSLMDSDDDALLKSQHINTLGQFWTTKAFLPRMLELQNGHIVCLNSVLALSAIPGAIDYCTSKASAFAFMESLTLGLLDCPGVSATTVLPFHTSTEMFQGMRVRFPNLFPPLKPETVARRTVEAVQLNQALLLLPWTMHALVILKSILPQAALEEIHKFSGTYTCMNTFKGRT

SEQ ID NO: 18504 - protein, 190 aa, Homo sapiens
MMASPFALLMALVVLSCKSSCSLGCDLPETHSLDNRRTLMLLAQMSRISPSSCLMDRHDFGFPQEEFDGNQFQKAPAISVLHELIQQIFNLFTTKDSSAAWDEDLLDKFCTELYQQLNDLEACVMQEERVGETPLMNADSILAVKKYFRRITLYLTEKKYSPCAWEVVRAEIMRSLSLSTNLQERLRRKE

SEQ ID NO: 18505 - protein, 1142 aa, Homo sapiens
MRLTGPWKLWLWMSIFLLPASTSVTVRDKTEESCPILRIEGHQLTYDNINKLEVSGFDLGDSFSLRRAFCESDKTCFKLGSALLIRDTIKIFPKGLPEEYSVAAMFRVRRNAKKERWFLWQVLNQQNIPQISIVVDGGKKVVEFMFQATEGDVLNYIFRNRELRPLFDRQWHKLGISIQSQVISLYMDCNLIARRQTDEKDTVDFHGRTVIATRASDGKPVDIELHQLKIYCSANLIAQETCCEISDTKCPEQDGFGNIASSWVTAHASKMSSYLPAKQELKDQCQCIPNKGEAGLPGAPGSPGQKGHKGEPGENGLHGAPGFPGQKGEQGFEGSKGETGEKGEQGEKGDPALAGLNGENGLKGDLGPHGPPGPKGEKGDTGPPGPPALPGSLGIQGPQGPPGKEGQRGRRGKTGPPGKPGPPGPPGPPGIQGIHQTLGGYYNKDNKGNDEHEAGGLKGDKGETGLPGFPGSVGPKGQKGEPGEPFTKGEKGDRGEPGVIGSQGVKGEPGDPGPPGLIGSPGLKGQQGSAGSMGPRGPPGDVGLPGEHGIPGKQGIKGEKGDPGGIIGPPGLPGPKGEAGPPGKSLPGEPGLDGNPGAPGPRGPKGERGLPGVHGSPGDIGPQGIGIPGRTGAQGPAGEPGIQGPRGLPGLPGTPGTPGNDGVPGRDGKPGLPGPPGDPIALPLLGDIGALLKNFCGNCQASVPGLKSNKGEEGGAGEPGKYDSMARKGDIGPRGPPGIPGREGPKGSKGERGYPGIPGEKGDEGLQGIPGIPGAPGPTGPPGLMGRTGHPGPTGAKGEKGSDGPPGKPGPPGPPGIPFNERNGMSSLYKIKGGVNVPSYPGPPGPPGPKGDPGPVGEPGAMGLPGLEGFPGVKGDRGPAGPPGIAGMSGKPGAPGPPGVPGEPGERGPVGDIGFPGPEGPSGKPGINGKDGIPGAQGIMGKPGDRGPKGERGDQGIPGDRGSQGERGKPGLTGMKGAIGPMGPPGNKGSMGSPGHQGPPGSPGIPGIPADAVSFEEIKKYINQEVLRIFEERMAVFLSQLKLPAAMLAAQAYGRPGPPGKDGLPGPPGDPGPQGYRGQKGERGEPGIGLPGSPGLPGTSALGLPGSPGAPGPQGPPGPSGRCNPEDCLYPVSHAHQRTGGN

SEQ ID NO: 18506 - protein, 1288 aa, Homo sapiens
MGSPEGRFHFAIDRGGTFTDVFAQCPGGHVRVLKLLSEDPANYADAPTEGIRRILEQEAGMLLPRDQPLDSSHIASIRMGTTVATNALLERKGERVALLVTRGFRDLLHIGTQARGDLFDLAVPMPEVLYEEVLEVDERVVLHRGEAGTGTPVKGRTGDLLEVQQPVDLGALRGKLEGLLSRGIRSLAVVLMHSYTWAQHEQQVGVLARELGFTHVSLSSEAMPMVRIVPRGHTACADAYLTPAIQRYVQGFCRGFQGQLKDVQVLFMRSDGGLAPMDTFSGSSAVLSGPAGGVVGYSATTYQQEGGQPVIGFDMGGTSTDVSRYAGEFEHVFEASTAGVTLQAPQLDINTVAAGGGSRLFFRSGLFVVGPESAGAHPGPACYRKGGPVTVTDANLVLGRLLPASFPCIFGPGENQPLSPEASRKALEAVATEVNSFLTNGPCPASPLSLEEVAMGFVRVANEAMCRPIRALTQARGHDPSAHVLACFGGAGGQHACAIARALGMDTVHIHRHSGLLSALGLALADVVHEAQEPCSLLYAPETFVQLDQRLSRLEEQCVDALQAQGFPRSQISTESFLHLRYQGTDCALMVSAHQHPATARSPRAGDFGAAFVERYMREFGFVIPERPVVVDDVRVRGTGRSGLRLEDAPKAQTGPPRVDKMTQCYFEGGYQETPVYLLAELGYGHKLHGPCLIIDSNSTILVEPGCQAEVTKTGDICISVGAEVPGTVGPQLDPIQLSIFSHRFMSIAEQMGRILQRTAISTNIKERLDFSCALFGPDGGLVSNAPHIPVHLGAMQETVQFQIQHLGADLHPGDVLLSNHPSAGGSHLPDLTVITPVFWPGQTRPVFYVASRGHHADIGGITPGSMPPHSTMLQQEGAVFLSFKLVQGGVFQEEAVTEALRAPGKVPNCSGTRNLHDNLSDLRAQVAANQKGIQLVGELIGQYGLDVVQAYMGHIQANAELAVRDMLRAFGTSRQARGLPLEVSSEDHMDDGSPIRLRVQISLSQGSAVFDFSGTGPEVFGNLNAPRAVTLSALIYCLRCLVGRDIPLNQGCLAPVRVVIPRGSILDPSPEAAVVGGNVLTSQRVVDVILGAFGACAASQGCMNNVTLGNAHMGYYETVAGGAGAGPSWHGRSGVHSHMTNTRITDPEILESRYPVILRRFELRRGSGGRGRFRGGDGVTRELLFREEALLSVLTERRAFRPYGLHGGEPGARGLNLLIRKNGRTVNLGGKTSVTVYPGDVFCLHTPGGGGYGDPEDPAPPPGSPPQALAFPEHGSVYEYRRAQEAV

SEQ ID NO: 18507 - protein, 396 aa, Homo sapiens
MKWVTFISLLFLFSSAYSRGVFRRDAHKSEVAHRFKDLGEENFKALVLIAFAQYLQQCPFEDHVKLVNEVTEFAKTCVADESAENCDKSLHTLFGDKLCTVATLRETYGEMADCCAKQEPERNECFLQHKDDNPNLPRLVRPEVDVMCTAFHDNEETFLKKYTYETTLEKCCAAADPHECYAKVFDEFKPLVEEPQNLIKQNCELFEQLGEYKFQNALLVRYTKKVPQVSTPTLVEVSRNLGKVGSKCCKHPEAKRMPCAEDYLSVVLNQLCVLHEKTPVSDRVTKCCTESLVNRRPCFSALEVDETYVPKEFNAETFTFHADICTLSEKERQIKKQTALVELVKHKPKATKEQLKAVMDDFAAFVEKCCKADDKETCFAEEGKKLVAASQAALGL

SEQ ID NO: 18508 - protein, 584 aa, Homo sapiens
MVGLSGPVQYRTEKHSTMPDSPVDVKTQSRLTPPTMPPPPTTQGAPRTSSFTPTTLTNGTSHSPTALNGAPSPPNGFSNGPSSSSSSSLANQQLPPACGARQLSKLKRFLTTLQQFGNDISPEIGERVRTLVLGLVNSTLTIEEFHSKLQEATNFPLRPFVIPFLKANLPLLQRELLHCARLAKQNPAQYLAQHEQLLLDASTTSPVDSSELLLDVNENGKRRTPDRTKENGFDREPLHSEHPSKRPCTISPGQRYSPNNGLSYQPNGLPHPTPPPPQHYRLDDMAIAHHYRDSYRHPSHRDLRDRNRPMGLHGTRQEEMIDHRLTDREWAEEWKHLDHLLNCIMDMVEKTRRSLTVLRRCQEADREELNYWIRRYSDAEDLKKGGGSSSSHSRQQSPVNPDPVALDAHREFLHRPASGYVPEEIWKKAEEAVNEVKRQAMTELQKAVSEAERKAHDMITTERAKMERTVAEAKRQAAEDALAVINQQEDSSESCWNCGRKASETCSGCNTARYCGSFCQHKDWEKHHHICGQTLQAQQQGDTPAVSSSVTPNSGAGSPMDTPPAATPRSTTPGTPSTIETTPR

SEQ ID NO: 18509 - protein, 41 aa, Homo sapiens
FLVAFSWMLVEGLLLWRKVVAVSMHPGPGMRLYHATGWGPR

SEQ ID NO: 18510 - protein, 896 aa, Homo sapiens
MIVLLLFALLWMVEGVFSQLHYTVQEEQEHGTFVGNIAEDLGLDITKLSARGFQTVPNSRTPYLDLNLETGVLYVNEKIDREQICKQSPSCVLHLEVFLENPLELFQVEIEVLDINDNPPSFPEPDLTVEISESATPGTRFPLESAFDPDVGTNSLRDYEITPNSYFSLDVQTQGDGNRFAELVLEKPLDREQQAVHRYVLTAVDGGGGGGVGEGGGGGGGAGLPPQQQRTGTALLTIRVLDSNDNVPAFDQPVYTVSLPENSPPGTLVIQLNATDPDEGQNGEVVYSFSSHISPRARELFGLSPRTGRLEVSGELDYEESPVYQVYVQAKDLGPNAVPAHCKVLVRVLDANDNAPEISFSTVKEAVSEGAAPGTVVALFSVTDRDSEENGQVQCELLGDVPFRLKSSFKNYYTIVTEAPLDREAGDSYTLTVVARDRGEPALSTSKSIQVQVSDVNDNAPRFSQPVYDVYVTENNVPGAYIYAVSATDRDEGANAQLAYSILECQIQGMSVFTYVSINSENGYLYALRSFDYEQLKDFSFQVEARDAGSPQALAGNATVNILIVDQNDNAPAIVAPLPGRNGTPAREVLPRSAEPGYLLTRVAAVDADDGENARLTYSIVRGNEMNLFRMDWRTGELRTARRVPAKRDPQRPYELVIEVRDHGQPPLSSTATLVVQLVDGAVEPQGGGGSGGGGSGEHQRPSRSGGGETSLDLTLILIIALGSVSFIFLLAMIVLAVRCQKEKKLNIYTCLASDCCLCCCCCGGGGSTCCGRQARARKKKLSKSDIMLVQSSNVPSNPAQVPIEESGGFGSHHHNQNYCYQVCLTPESAKTDLMFLKPCSPSRSTDTEHNPCGAIVTGYTDQQPDIISNGSILSNEVRLKRKDHHLSSPPSESLL

SEQ ID NO: 18511 - protein, 191 aa, Homo sapiens
MTWRHHVRLLFTVSLALQIINLGNSYQREKHNGGREEVTKVATQKHRQSPLNWTSSHFGEVTGSAEGWGPEEPLPYSRAFGEVNAAPWSTEPGPSAPATSAGASSGPCTASPSRRLTAVTRKTSWPPTLTGRAPGARPACYSCCPAHSCTASCARMRPRTLGPWSLPSSSGSGAPAEGRDLGIAFNFLCCK

SEQ ID NO: 18512 - protein, 114 aa, Homo sapiens
MRDRTHELRQGDDSSDEEDKERVALVVHPGTARLGSPDEEFFHKVRTIRQTIVKLGNKVQELEKQQVTILATPLPEESMKQELQNLRDEIKQLGREIRLQLKGELLGPQTDPSL

SEQ ID NO: 18513 - protein, 258 aa, Homo sapiens
MRQSLLFLTSVVPFVLAPRPPDDPGFGPHQRLEKLDSLLSDYDILSLSNIQQHSVRKRDLQTSTHVETLLTFSALKRHFKLYLTSSTERFSQNFKVVVVDGKNESEYTVKWQDFFTGHVVGEPDSRVLAHIRDDDVIIRINTDGAEYNIEPLWRFVNDTKDKRMLVYKSEDIKNVSRLQSPKVCGYLKVDNEELLPKGLVDREPPEELVHRVKRRADPDPMKNTCKLLVVADHRFYRYMGRGEESTTTNYLIHTDRAN

SEQ ID NO: 18514 - protein, 93 aa, Homo sapiens
MQVSTAALAVLLCTMALCNQVLSAPLAADTPTACCFSYTSRQIPQNFIADYFETSSQCSKPSVIFLTKRGRQVCADPSEEWVQKYVSDLELSA

SEQ ID NO: 18515 - protein, 222 aa, Homo sapiens
MEPTAPSLTEEDLTEVKKDALENLRVYLCEKIIAERHFDHLRAKKILSREDTEEISCRTSSRKRAGKLLDYLQENPKGLDTLVESIRREKTQNFLIQKITDEVLKLRNIKLEHLKDGATNNLSRSNSDESNFSEKLRASTVMYHPEGESSTTPFFSTNSSLNLPVLEVGRTENTIFSSTTLPRPGDPGAPPLPPDLQLEEEGTCANSSEMFLPLRSRTVSRQ

SEQ ID NO: 18516 - protein, 52 aa, Homo sapiens
MKLCVTVLSLLMLVAAFCSPALSAPNSKPKEASKSVLIPVNPGSRSTCMTWN

SEQ ID NO: 18517 - protein, 136 aa, Homo sapiens
MGLTSQLLPPLFFLLACAGNFVHGHKCDITLQEIIKTLNSLTEQKTLCTELTVTDIFAASKQHACLPTSRHTGTICRPPSARVPSTSTRLQSPERTQLRRKPSAGLRLCSGSSTATMRRTLAAWVRLHSSSTGTSS

SEQ ID NO: 18518 - protein, 245 aa, Homo sapiens
MQAAWLLGALVVPQLLGFGHGARGAEREWEGGWGGAQEEEREREALMLKHLQEALGLPAGRGDENPAGTVEGKEDWEMEEDQGEEEEEEATPTPSSGPSPSPTPEDIVTYILGRLAGLDAGLHQLHVRLHALDTRVVELTQGLRQLRNAAGDTRDAVQALQEAQGRAEREHGRLEGCLKGLRLGHKCFLLSRDFEAQPSASPHPLSPDQPNGGTLENCVAQASDDGSWWDHDCQRRLYYVCEFPF

SEQ ID NO: 18519 - protein, 75 aa, Homo sapiens; identical to SEQ ID NO: 14466

SEQ ID NO: 18520 - protein, 631 aa, Homo sapiens
MGSHESLGPYFLVFLLLLLLPPPLFRAGSLRYHGPDWRIFHRLALGSRRAHHHHGPGWRQHWRQGQAGHRCQGSFDLYFILDKSGSVNNNWIDLYMWVEETVARFQSPNIRMCFITYSTDGQTVLPLTSDKNRIKNGLDQLQKIVPDGHTFMQAGFRKAIQQIESFNSGNKVPSMIIAMTDGELVAHAFQDTLREAQKARKLGANVYTLGVADYNLDQITAIADSPGHVFAVENGFKALRSTIDALTSKVCLDVTSVEPSSECVGEPYHVVIHGNGFQNLKKRDEVICRFIFNESTIIDEKPTSIDNNSMNCPGPKLEKPGEEYSIEVSLNKGKTFFKSNVSITSTTCGIFRNWLYFVPLLLLVPLLLCCVWRLCRKQTVKEPPPVQKPEKEPEQEKPPSPPPPPPPPPPPLPPPPPAPVNTCPTVIICCCGCQGVGGMRRIEGNLDTFCDLSHASCHQVPWMCCQSRDQGRYLSLALAQSQYAQAPCCPRICFPHSQECLSLPQAPCSPRMCLRHSRECLALKQARCSPNICLRHSQHSRECLARKQAPCSPRICLRHSPEYFSQAQTLCNPKSCLQPSRECLPLTCSSRCRLPPARCLRPPSRMLPLLSPLLRHTAEPPLSLPPSEPNF

SEQ ID NO: 18521 - protein, 763 aa, Homo sapiens
MESPVFAFPLLLKLETHIEKLFLYSFSWDFECSQCGHQYQNRHMKSLVTFTNVIPEWHPLNAAHFGPCNNCNSKSQIRKMVLEKVSPIFMLHFVEGLPQNDLQHYAFHFEGCLYQITSVIQYRANNHFITWILDADGSWLECDDLKGPCSERHKKFEVPASEIHIVIWERKISQVTDKEAACLPLKKTNDQHALSNEKPVSLTSCSVGDAASAETASVTHPKDISVAPRTLSQDTAVTHGDHLLSGPKGLVDNILPLTLEETIQKTASVSQLNSEAFLLENKPVAENTGILKTNTLLSQESLMASSVSAPCNEKLIQDQFVDISFPSQVVNTNMQSVQLNTEDTVNTKSVNNTDATGLIQGVKSVEIEKDAQLKQFLTPKTEQLKPERVTSQVSNLKKKETTADSQTTTSKSLQNQSLKENQKKPFVGSWVKGLISRGASFMPLCVSAHNRNTITDLQPSVKGVNNFGGFKTKGINQKASHVSKKARKSASKPPPISKPPAGPPSSNGTAAHPHAHAASEVLEKSGSTSCGAQLNHSSYGNGISSANHEDLVEGQIHKLRLKLRKKLKAEKKKLAALMSSPQSRTVRSENLEQVPQDGSPNDCESIEDLLNELPYPIDIASESACTTVPGVSLYSSQTHEEILAELLSPTPVSTELSENGEGDFRYLGMGDSHIPPPVPSEFNDVSQNTHLRQDHNYCSPTKKNPCEVQPDSLTNNACVRTLNLESPMKTDIFDEFFSSSALNALANDTLDLPHFDEYLFENY

SEQ ID NO: 18522 - protein, 647 aa, Homo sapiens
MGPWSRSLSALLLLLQVSSWLCQEPEPCHPGFDAESYTFTVPRRHLERGRVLGRVNFEDCTGRQRTAYFSLDTRFKVGTDGVITVKRPLRFHNPQIHFLVYAWDSTYRKFSTKVTLNTVGHHHRPPPHQASVSGIQAELLTFPNSSPGLRRQKRDWVIPPISCPENEKGPFPKNLVQIKSNKDKEGKVFYSITGQGADTPPVGVFIIERETGWLKVTEPLDRERIATYTLFSHAVSSNGNAVEDPMEILITVTDQNDNKPEFTQEVFKGSVMEGALPGTSVMEVTATDADDDVNTYNAAIAYTILSQDPELPDKNMFTINRNTGVISVVTTGLDRESFPTYTLVVQAADLQGEGLSTTATAVITVTDTNDNPPIFNPTTYKGQVPENEANVVITTLKVTDADAPNTPAWEAVYTILNDDGGQFVVTTNPVNNDGILKTAKGLDFEAKQQYILHVAVTNVVPFEVSLTTSTATVTVDVLDVNEAPIFVPPEKRVEVSEDFGVGQEITSYTAQEPDTFMEQKITYRIWRDTANWLEINPDTGAISTRAELDREDFEHVKNSTYTALIIATDNGSPVATGTGTLLLILSDVNDNAPIPEPRTIFFCERNPKPQVINIIDADLPPNLASQSIGITDMSHCTCPAPQLPAIF

SEQ ID NO: 18523 - protein, 143 aa, Homo sapiens
MRPSVWAAVAAGLWVLCTVIAEGPPALPALALPLAGAPDAGGCQGAEGPLRGRGAELGAAQLLLPPQEGSSAAIASLHPQAHGEPQRFANLSCLAEKPIQTGVGSSGCPEIRARVCGWEGHGQMQRGASSFAFSICLMSHLQL

SEQ ID NO: 18524 - protein, 754 aa, Homo sapiens
MGRAGAAAVIPGLALLWAVGLGSAAPSPPRLRLSFQELQAWHGLQTFSLERTCCYQALLVDEERGRLFVGAENHVASLNLDNISKRAKKLAWPAPVEWREECNWAGKDIGTECMNFVKLLHAYNRTHLLACGTGAFHPTCAFVEVGHRAEEPVLRLDPGRIEDGKGKSPYDPRHRAASVLVGEELYSGVAADLMGRDFTIFRSLGQRPSLRTEPHDSRWLNEPKFVKVFWIPESENPDDDKIYFFFRETAVEAAPALGRLSVSRVGQICRNDVGGQRSLVNKWTTFLKARLVCSVPGVEGDTHFDQLRPFPAEDVFLLSSRDHRTPLLYAVFSTSSSIFQGSAVCVYSMNDVRRAFLGPFAHKEGPMHQWVSYQGRVPYPRPGMCPSKTFGTFSSTKDFPDDVIQFARNHPLMYNSVLPTGGRPLFLQVGANYTFTQIAADRVAAADGHYDVLFIGTDVGTVLKVISVPKGSRPSAEGLLLEELHVFEDSAAVTSMQISSKRHQLYVASRSAVAQIALHRCAAHGRVCTECCLARDPYCAWDGVACTRFQPSAKRRFRRQDVRNGDPSTLCSGDSSRPALLEHKVFGVEGSSAFLECEPRSLQARVEWTFQRAGVTAHTQVLAEERTERTARGLLLRRLRRRDSGVYLCAAVEQGFTQPLRRLSLHVLSATQAERLARAEEAAPAAPPGPKLWYRDFLQLVEPGGGGSANSLRMCRPQPALQSLPLESRRKGRNRRTHAPEPRAERGPRSATHW

SEQ ID NO: 18525 - protein, 383 aa, Homo sapiens
MVPGYLLVQYFRRKNYLETGRGLCFPLVKACVFGNEPKASDEVPLAPRTEAAETTPMWQALKLLFCATGLQVSYLTWGVLQERVMTRSYGATATSPGERFTDSQFLVLMNRVLALIVAGLSCVLCKQPRHGAPMYRYSFASLSNVLSSWCQYEALKFVSFPTQVLAKASKVIPVMLMGKLVSRRSYEHWEYLTATLISIGVSMFLLSSGPEPRSSPATTLSGLILLAGYIAFDSFTSNWQDALFAYKMSSVQMMFGVNFFSCLFTVGSLLEQGALLEGTRFMGRHSEFAAHALLLSICSACGQLFIFYTIGQFGAAVFTIIMTLRQAFAILLSCLLYGHTVTVVGGLGVAVVFAALLLRVYARGRLKQRGKKAVPVESPVQKV

SEQ ID NO: 18526 - protein, 1269 aa, Homo sapiens
MSGPTDETAGDLPVKDTGLNLFGMGGLQETSTTRTMKSRQAVSRVSREELEDRFLRLHDENILLKQHARKQEDKIKRMATKLIRLVNDKKRYERVGGGPKRLGRDVEMEEMIEQLQEKVHELEKQNETLKNRLISAKQQLQTQGYRQTPYNNVQSRINTGRRKANENAGLQECPRKGIKFQDADVAETPHPMFTKYGNSLLEEARGEIRNLENVIQSQRGQIEELEHLAEILKTQLRRKENEIELSLLQLREQQATDQRSNIRDNVEMIKLHKQLVEKSNALSAMEGKFIQLQEKQRTLRISHDALMANGDELNMQLKEQRLKCCSLEKQLHSMKFSERRIEELQDRINDLEKERELLKENYDKLYDSAFSAAHEEQWKLKEQQLKVQIAQLETALKSDLTDKTEILDRLKTERDQNEKLVQENRELQLQYLEQKQQLDELKKRIKLYNQENDINADELSEALLLIKAQKEQKNGDLSFLVKVDSEINKDLERSMRELQATHAETVQELEKTRNMLIMQHKINKDYQMEVEAVTRKMENLQQDYELKVEQYVHLLDIRAARIHKLEAQLKDIAYGTKQYKFKPEIMPDDSVDEFDETIHLERGENLFEIHINKVTFSSEVLQASGDKEPVTFCTYAFYDFELQTTPVVRGLHPEYNFTSQYLVHVNDLFLQYIQKNTITLEVHQAYSTEYETIAACQLKFHEILEKSGRIFCTASLIGTKGDIPNFGTVEYWFRLRVPMDQAIRLYRERAKALGYITSNFKGPEHMQSLSQQAPKTAQLSSTDSTDGNLNELHITIRCCNHLQSRASHLQPHPYVVYKFFDFADHDTAIIPSSNDPQFDDHMYFPVPMNMDLDRYLKSESLSFYVFDDSDTQENIYIGKVNVPLISLAHDRCISGIFELTDHQKHPAGTIHVILKWKFAYLPPSGSITTEDLGNFIRSEEPEVVQRLPPASSVSTLVLAPRPKPRQRLTPVDKKVSFVDIMPHQSDETSPPPEDRKEISPEVEHIPEIEINMLTVPHVPKVSQEGSVDEVKENTEKMQQGKDDVSLLSEGQLAEQSLASSEDETEITEDLEPEVEEDMSASDSDDCIIPGPISKNIKQPSEKIRIEIIALSLNDSQVTMDDTIQRLFVECRFYSLPAEETPVSLPKPKSGQWVYYNYSNVIYVDKENNKAKRDILKAILQKQEMPNRSLRFTVVSDPPEDEQDLECEDIGVAHVDLADMFQEGRDLIEQNIDVFDARADGEGIGKLRVTVEALHALQSVYKQYRDDLEA

SEQ ID NO: 18527 - protein, 220 aa, Homo sapiens
MQTPRPAMRMEAGEAAPPAGAGGRAAGGWGKWVRLNVGGTVFLTTRQTLCREQKSFLSRLCQGEELQSDRDETGAYLIDRDPTYFGPILNFLRHGKLVLDKDMAEEGVLEEAEFYNIGPLIRIIKDRMEEKDYTVTQVPPKHVYRVLQCQEEELTQMVSTMSDGWRFEQLVNIGSSYNYGSEDQAEFLCVVSKELHSTPNGLSSESSRKTKLLQARGTRM

SEQ ID NO: 18528 - protein, 459 aa, Homo sapiens
MEGSASPPEKPRARPAAAVLCRGPVEPLVFLANFALVLQGPLTTQYLWHRFSADLGYNGTRQRGGCSNRSADPTMQEVETLTSHWTLYMNVGGFLVGLFSSTLLGAWSDSVGRRPLLVLASLGLLLQALVSVFVVQLQLHVGYFVLGRILCALLGDFGGLLAASFASVADVSSSRSRTFRMALLEASIGVAGMLASLLGGHWLRAQGYANPFWLALALLIAMTLYAAFCFGETLKEPKSTRLFTFRHHRSIVQLYVAPAPEKSRKHLALYSLAIFVVITVHFGAQDILTLYELSTPLCWDSKLIGYGSAAQHLPYLTSLLALKLLQYCLADAWVAEIGLAFNILGMVVFAFATITPLMFTGYGLLFLSLVITPVIRAKLSKLVRETEQGALFSAVACVNSLAMLTASGIFNSLYPATLNFMKGFPFLLGAGLLLIPAVLIGMLEKADPHLEFQQFPQSP

SEQ ID NO: 18529 - protein, 210 aa, Homo sapiens
MQRPEAWPRPHPGEGAAAAQAGGPAPPARAGEPSGLRLQEPSLYTIKAVFILDNDGRRLLAKYYDDTFPSMKEQMVFEKNVFNKTSRTESEIAFFGGMTIVYKNSIDLFLYVVGSSYENELMLMSVLTCLFESLNHMLRKNVEKRWLLENMDGAFLVLDEIVDGGVILESDPQQVIQKVNFRADDGGLTEQSVAQVLQSAKEQIKWSLLK

SEQ ID NO: 18530 - protein, 133 aa, Homo sapiens
MKCVFVTVGTTSFDDLIACVSAPDSLQKIESLGYNRLILQIGRGTVVPEPFSTESFTLDVYRYKDSLKEDIQKADLVISHAGAGSCLETLEKGKPLVVVINEKLMNNHQLELAKQLHKEGHLFYCTCSSSLRH

SEQ ID NO: 18531 - protein, 323 aa, Homo sapiens
MASEGLAGALASVLAGQGSSVHSCDSAPAGEPPAPVRLRKNVCYVVLAVFLSEQDEVLLIQEAKRECRGSWYLPAGRMEPGETIVEALQREVKEEAGLHCEPETLLSVEERGPSWVRFVFLARPTGGILKTSKEADAESLQAAWYPRTSLPTPLRAHDILHLVELAAQYRQQARHPLILPQELPCDLVCQRLVATFTSAQTVWVLVGTVGMPHLPVTACGLDPMEQRGGMKMAVLRLLQECLTLHHLVVEIKGLLGLQHLGRDHSDGICLNVLVTVAFRSPGIQDEPPKVRGENFSWWKVMEEDLQSQLLQRLQGSSVVPVNR

SEQ ID NO: 18532 - protein, 335 aa, Homo sapiens
MAARWRFWCVSVTMVVALLIVCDVPSASAQRKKEMVLSEKVSQLMEWTNKRPVIRMNGDKFRRLVKAPPRNYSVIVMFTALQLHRQCVVCKQADEEFQILANSWRYSSAFTNRIFFAMVDFDEGSDVFQMLNMNSAPTFINFPAKGKPKRGDTYELQVRGFSAEQIARWIADRTDVNIRVIRPPNYAGPLMLGLLLAVIGGLVYLRRSNMEFLFNKTGWAFAALCFVLAMTSGQMWNHIRGPPYAHKNPHTGHVNYIHGSSQAQFVAETHIVLLFNGGVTLGMVLLCEAATSDMDIGKRKIMCVAGIGLVVLFFSWMLSIFRSKYHGYPYSFLMS

SEQ ID NO: 18533 - protein, 343 aa, Homo sapiens
MWSHLNRLLFWSIFSSVTCRKAVLDCEAMKTNEFPSPCLDSKTKVVMKGQNVSMFCSHKNKSLQITYSLFRRKTHLGTQDGKGEPAIFNLSITEAHESGPYKCKAQVTSCSKYSRDFSFTIVDPVTSPVLNIMVIQTETDRHITLHCLSVNGSLPINYTFFENHVAISPAISKYDREPAEFNLTKKNPGEEEEYRCEAKNRLPNYATYSHPVTMPSTGGDSCPFCLKLLLPGLLLLLVVIILILAFWVLPKYKTRKAMRNNVPRDRGDTAMEVGIYANILEKQAKEESVPEVGSRPCVSTAQDEAKHSQELQYATPVFQEVAPREQEACDSYKSGYVYSELNF

SEQ ID NO: 18534 - protein, 368 aa, Homo sapiens
MTTSGALFPSLVPGSRGASNKYLVEFRAGKMSLKGTTVTPDKRKGLVYIQQTDDSLIHFCWKDRTSGNVEDEPKTDQDEEHCRKVNEYLNNPPMPGALGASGSSGHELSALGGEGGLQSLLGNMSHSQLMQLIGPAGLGGLGGLGALTGPGLASLLGSSGPPGSSSSSSSRSQSAAVTPSSTTSSTRATPAPSAPAAASATSPSPAPSSGNGASTAASPTQPIQLSDLQSILATMNVPAGPAGGQQVDLASVLTPEIMAPILANADVQERLLPYLPSGESLPQTADEIQNTLTSPQFQQALGMFSAALASGQLGPLMCQFGLPAEAVEAANKGDVEAFAKAMQNNAKPEQKEGDTKDKKDEEEDMSLD

SEQ ID NO: 18535 - protein, 32 aa, Homo sapiens
LGLTYLSLLLIPAAGASSCPRTPLPAMAPLPQ

SEQ ID NO: 18536 - protein, 761 aa, Homo sapiens
MLQTKDLIWTLFFLGTAVSLQVDIVPSQGEISVGESKFFLCQVAGDAKDKDISWFSPNGEKLTPNQQRISVVWNDDSSSTLTIYNANIDDAGIYKCVVTGEDGSESEATVNVKIFQKLMFKNAPTPQEFREGEDAVIVCDVVSSLPPTIIWKHKGRDVILKKDVRFIVLSNNYLQIRGIKKTDEGTYRCEGRILARGEINFKDIQVIVNVPPTIQARQNIVNATANLGQSVTLVCDAEGFPEPTMSWTKDGEQIEQEEDDEKYIFSDDSSQLTIKKVDKNDEAEYICIAENKAGEQDATIHLKVFAKPKITYVENQTAMELEEQVTLTCEASGDPIPSITWRTSTRNISSEEKTLDGHMVVRSHARVSSLTLKSIQYTDAGEYICTASNTIGQDSQSMYLEVQYAPKLQGPVAVYTWEGNQVNITCEVFAYPSATISWFRDGQLLPSSNYSNIKIYNTPSASYLEVTPDSENDFGNYNCTAVNRIGQESLEFILVQADTPSSPSIDQVEPYSSTAQVQFDEPEATGGVPILKYKAEWRAVGEEVWHSKWYDAKEASMEGIVTIVGLKPETTYAVRLAALNGKGLGEISAASEFKTQPVHSPPPPASASSSTPVPLSPPDTTWPLPALATTEPAKGEPSAPKLEGQMGEDGNSIKVNLIKQDDGGSPIRHYLVRYRALSSEWKPEIRLPSGSDHVMLKSLDWNAEYEVYVVAENQQGKSKAAHFVFRTSAQPTAIPATLGGNSASYTFVSLLFSAVTLLLLC

SEQ ID NO: 18537 - protein, 858 aa, Homo sapiens [sequence omitted]

SEQ ID NO: 18538 - protein, 3121 aa, Homo sapiens
MPGAAGVLLLLLLSGGLGGVQAQRPQQQRQSQAHQQRGLFPAVLNLASNALITTNATCGEKGPEMYCKLVEHVPGQPVRNPQCRICNQNSSNPNQRHPITNAIDGKNTWWQSPSIKNGIEYHYVTITLDLQQVFQIAYVIVKAANSPRPGNWILERSLDDVEYKPWQYHAVTDTECLTLYNIYPRTGPPSYAKDDEVICTSFYSKIHPLENGEIHISLINGRPSADDPSPELLEFTSARYIRLRFQRIRTLNADLMMFAHKDPREIDPIVTRRYYYSVKDISVGGMCICYGHARACPLDPATNKSRCECEHNTCGDSCDQCCPGFHQKPWRAGTFLTKTECEACNCHGKAEECYYDENVARRNLSLNIRGKYIGGGVCINCTQNTAGINCETCTDGFFRPKGVSPNYPRPCQPCHCDPIGSLNEVCVKDEKHARRGLAPGSCHCKTGFGGVSCDRCARGYTGYPDCKACNCSGLGSKNEDPCFGPCICKENVEGGDCSRCKSGFFNLQEDNWKGCDECFCSGVSNRCQSSYWTYGKIQDMSGWYLTDLPGRIRVAPQQDDLDSPQQISISNAEARQALPHSYYWSAPAPYLGNKLPAVGGQLTFTISYDLEEEEEDTERVLQLMIILEGNDLSISTAQDEVYLHPSEEHTNVLLLKEESFTIHGTHFPVRRKEFMTVLANLKRVLLQITYSFGMDAIFRLSSVNLESAVSYPTDGSIAAAVEVCQCPPGYTGSSCESCWPRHRRVNGTIFGGICEPCQCFGHAESCDDVTGECLNCKDHTGGPYCDKCLPGFYGEPTKGTSEDCQPCACPLNIPSNNFSPTCHLDRSLGLICDGCPVGYTGPRCERCAEGYFGQPSVPGGSCQPCQCNDNLDFSIPGSCDSLSGSCLICKPGTTGRYCELCADGYFGDAVDAKNCQPCRCNAGGSFSEVCHSQTGQCECRANVQGQRCDKCKAGTFGLQSARGCVPCNCNSFGSKSFDCEESGQCWCQPGVTGKKCDRCAHGYFNFQEGGCTACECSHLGNNCDPKTGRCICPPNTIGEKCSKCAPNTWGHSITTGCKACNCSTVGSLDFQCNVNTGQCNCHPKFSGAKCTECSRGHWNYPRCNLCDCFLPGTDATTCDSETKKCSCSDQTGQCTCKVNVEGIHCDRCRPGKFGLDAKNPLGCSSCYCFGTTTQCSEAKGLIRTWVTLKAEQTILPLVDEALQHTTTKGIVFQHPEIVAHMDLMREDLHLEPFYWKLPEQFEGKKLMAYGGKLKYAIYFEAREETGFSTYNPQVIIRGGTPTHARIIVRHMAAPLIGQLTRHEIEMTEKEWKYYGDDPRVHRTVTREDFLDILYDIHYILIKATYGNFMRQSRISEISMEVAEQGRGTTMTPPADLIEKCDCPLGYSGLSCEACLPGFYRLRSQPGGRTPGPTLGTCVPCQCNGHSSLCDPETSICQNCQHHTAGDFCERCALGYYGIVKGLPNDCQQCACPLISSSNNFSPSCVAEGLDDYRCTACPRGYEGQYCERCAPGYTGSPGNPGGSCQECECDPYGSLPVPCDPVTGFCTCRPGATGRKCDGCKHWHAREGWECVFCGDECTGLLLGDLARLEQMVMSINLTGPLPAPYKMLYGLENMTQELKHLLSPQRAPERLIQLAEGNLNTLVTEMNELLTRATKVTADGEQTGQDAERTNTRAKSLGEFIKELARDAEAVNEKAIKLNETLGTRDEAFERNLEGLQKEIDQMIKELRRKNLETQKEIAEDELVAAEALLKKVKKLFGESRGENEEMEKDLREKLADYKNKVDDAWDLLREATDKIREANRLFAVNQKNMTALEKKKEAVESGKRQIENTLKEGNDILDEANRLADEINSIIDYVEDIQTKLPPMSEELNDKIDDLSQEIKDRKLAEKVSQAESHAAQLNDSSAVLDGILDEAKNISFNATAAFKAYSNIKDYIDEAEKVAKEAKDLAHEATKLATGPRGLLKEDAKGCLQKSFRILNEAKKLANDVKENEDHLNGLKTRIENADARNGDLLRTLNDTLGKLSAIPNDTAAKLQAVKDKARQANDTAKDVLAQITELHQNLDGLKKNYNKLADSVAKTNAVVKDPSKNTVADADATVKNLEQEADRLIDKLKPIKELEDNLKKNISEIKELINQARKQANSIKVSVSSGGDCIRTYKPEIKKGSYNNIVVNVKTAVADNLLFYLGSAKFIDFLAIEMRKGKVSFLWDVGSGVGRVEYPDLTIDDSYWYRIVASRTGRNGTISVRALDGPKASIVPSTHHSTSPPGYTILDVDANAMLFVGGLTGKLKKADAVRVITFTGCMGETYFDNKPIGLWNFREKEGDCKGCTVSPQVEDSEGTIQFDGEGYALVSRPIRWYPNISTVMFKFRTFSSSALLMYLATRDLRDFMSVELTDGHIKVSYDLGSGMASVVSNQNHNDGKWKSFTLSRIQKQANISIVDIDTNQEENIATSSSGNNFGLDLKADDKIYFGGLPTLRNLSMKARPEVNLKKYSGCLKDIEISRTPYNILSSPDYVGVTKGCSLENVYTVSFPKPGFVELSPVPIDVGTEINLSFSTKNESGIILLGSGGTPAPPRRKRRQTGQAYYAILLNRGRLEVHLSTGARTMRKIVIRPEPNLFHDGREHSVHVERTRGIFTVQVDENRRYMQNLTVEQPIEVKKLFVGGAPPEFQPSPLRNIPPFEGCIWNLVINSVPMDFARPVSFKNADIGRCAHQKLREDEDGAAPAEIVIQPEPVPTPAFPTPTPVLTHGPCAAESEPALLIGSKQFGLSRNSHIAIAFDDTKVKNRLTIELEVRTEAESGLLFYMARINHADFATVQLRNGLPYFSYDLGSGDTHTMIPTKINDGQWHKIKIMRSKQEGILYVDGASNRTISPKKADILDVVGMLYVGGLPINYTTRRIGPVTYSIDGCVRNLHMAEAPADLEQPTSSFHVGTCFANAQRGTYFDGTGFAKAVGGFKVGLDLLVEFEFRTTTTTGVLLGISSQKMDGMGIEMIDEKLMFHVDNGAGRFTAVYDAGVPGHLCDGQWHKVTANKIKHRIELTVDGNQVEAQSPNPASTSADTNDPVFVGGFPDDLKQFGLTTSIPFRGCIRSLKLTKGTGKPLEVNFAKALELRGVQPVSCPAN

SEQ ID NO: 18539 - protein, 472 aa, Homo sapiens
MGGTQVKCLTSPSPIHSAKSESIITQSEEKADFVIIPAEGIENRTEGTDSPLSRDWRPGSPGTYLETSWEEQLLEQQEYLEKEMEEAKKMISGLQALLLNGSLPEDEQERPLALCEPGVNPEEQLIIIQSRLDQSMEENQDLKKELLKCKQEARNLQGIKDALQQRLTQQDTSVLQLKQELLRANMDKDELHNQNVDLQRKLDERNRLLGEYKKELGQKDRLLQQHQAKLEEALRKLSDVSYHQVDLERELEHKDVLLAHCMKREADEATNYNSHNSQSNGFLLPTAGKGATSVSNRGTSDLQLVRDALRSLRNSFSGHDPQHHTIDSLEQGISSLMERLHVMETQKKQERKVRVKSPRTQVGSEYRESWPPNSKLPHSQSSPTVSSTCTKVLYFTDRSLTPFMVNIPKRLEEVTLKDFKAAIDREGNHRYHFKALDPEFGTVKEEIFHDDDAIPGWEGKIVAWVEEDHGEN

SEQ ID NO: 18540 - protein, 319 aa, Homo sapiens
MAAAVAAALARLLAAFLLLAAQVACEYGMVHVVSQAGGPEGKDYCILYNPQWAHLPHDLSKASFLQLRNWTASLLCSAADLPARGFSNQIPLVARGNCTFYEKVRLAQGSGARGLLIVSRERLVPPGGNKTQYDEIGIPVALLSYKDMLDIFTRFGRTVRAALYAPKEPVLDYNMVIIFIMAVGTVAIGGYWAGSRDVKKRYMKHKRDDGPEKQEDEAVDVTPVMTCVFVVMCCSMLVLLYYFYDLLVYVVIGIFCLASATGLYSCLAPCVRRLPFGKCRIPNNSLPYFHKRPQARMLLLALFCVAVSVVWGVFRNEDQ

SEQ ID NO: 18541 - protein, 468 aa, Homo sapiens
MLPPWTLGLLLLATVRGKEVCYGQLGCFSDEKPWAGTLQRPVKLLPWSPEDIDTRFLLYTNENPNNFQLITGTEPDTIEASNFQLDRKTRFIIHGFLDKAEDSWPSDMCKKMFEVEKVNCICVDWRHGSRAMYTQAVQNIRVVGAETAFLIQALSTQLGYSLEDVHVIGHSLGAHTAAEAGRRLGGRVGRITGLDPAGPCFQDEPEEVRLDPSDAVFVDVIHTDSSPIVPSLGFGMSQKVGHLDFFPNGGKEMPGCKKNVLSTITDIDGIWEGIGGFVSCNHLRSFEYYSSSVLNPDGFLGYPCASYDEFQESKCFPCPAEGCPKMGHYADQFKGKTSAVEQTFFLNTGESGNFTSRYKISVTLSGKEKVNGYIRIALYGSNENSKQYEIFKGSLKPDASHTCAIDVDFNVGKIQKVKFLWNKRGINLSEPKLGASQITVQSGEDGTEYNFCSSDTVEENVLQSLYPC

SEQ ID NO: 18542 - protein, 377 aa, Homo sapiens
MKALRLSASALFCLLLINGLGAAPPGRPEAQPPPLSSEHKEPVAGDAVPGPKDGSAPEVRGARNSEPQDEGELFQGVDPRALAAVLLQALDRPASPPAPSGSQQGPEEEAAEALLTETVRSQTHSLPAPESPEPAAPPRPQTPENGPEASDPSEELEALASLLQELRDFSPSSAKRQQETAAAETETRTHTLTRVNLESPGPERVWRASWGEFQARVPERAPLPPPAPSQFQARMPDSGPLPETHKFGEGVSSPKTHLGEALAPLSKAYQGVAAPFPKARRPESALLGGSEAGERLLQQGLAQVEAGRRQAEATRQAAAQEERLADLASDLLLQFAAGRGPAARPCPLALPLSPGCVGTCQTPLPGPEPELPELTRG

SEQ ID NO: 18543 - protein, 136 aa, Homo sapiens; identical to SEQ ID NO: 7651

SEQ ID NO: 18544 - protein, 178 aa, Homo sapiens
MPKAKGKTRRQKFGYSVNRKRLNRNARRKAAPRIECSHIRHAWDHAKSVRQNLAEMGLAVDPNRAVPLRKRKVKAMEVDIEERPKELVRKPYVLNDLEAEASLPEKKGNTLSRDLIDYVRYMVENHGEDYKAMARDEKNYYQDTPKQIRSKINVYKRFYPAEWQDFLDSLQKRKMEVE

SEQ ID NO: 18545 - protein, 509 aa, Homo sapiens
MSGSSGPAPTPAVTKARRGDLTLQHGGGGRLGPRVGALTAAGGPCRKQLPPPPLSSLLGQGPGPGVQLDIASQSLDQEILLKVKTEIEEELKSLDKEISEAFTSTGFDRHTSPVFSPANPESSMEDCLAHLGEKVSQELKEPLHKALQMLLSQPVTYQAFRECTLETTVHASGWNKILVPLVLLRQMLLELTRRGQEPLSALLQFGVTYLEDYSAEYIIQQGGWGTVFSLESEEEEYPGITAEDSNDIYILPSDNSGQVSPPESPTVTTSWQSESLPVSLSASQSWHTESLPVSLGPESWQQIAMDPEEVKSLDSNGAGEKSENNSSNSDIVHVEKEEVPEGMEEAAVASVVLPARELQEALPEAPAPLLPHITATSLLGTREPDTEVITVEKSSPATSLFVELDEEEVKAATTEPTEVEEVVPALEPTETLLSEKEINAREESLVEELSPASEKKPVPPSEGKSRLSPAGEMKPMPLSEGKSILLFGGAAAVAILAVAIGVALALRKK

SEQ ID NO: 18546 - protein, 148 aa, Homo sapiens
MTWRHHVRLLFTVSLALQIINLGNSYQREKHNGGREEVTKVATQKHRQSPLNWTSSHFGEVTGSAEGWGPEEPLPYSRAFGEDPKDFLASHAHGPSAGGAPSLLLLLPCALLHRLLRPDAPAHPRSLVPSVLQRERRPCGRPGLGHRL

SEQ ID NO: 18547 - protein, 240 aa, Homo sapiens
MYALFLLASLLGAALAGPVLGLKECTRGSAVWCQNVKTASDCGAVKHCLQTVWNKPTVKSLPCDICKDVVTAAGDMLKDNATEEEILVYLEVSPELVCSMLHLCSGTRLPALTVHVTQPKDGGFCEVCKKLVGYLDRNLEKNSTKQEILAALEKGCSFLPDPYQKQCDQFVAEYEPVLIEILVEVMDPSFVCLKIGACPSAHKPLLGTEKCIWGPSYWCQNTETAAQCNAVEHCKRHVWN

SEQ ID NO: 18548 - protein, 828 aa, Homo sapiens
MAAPTKCQLRGRLVLLCSLLGMLWEARASQIRYSVPEETEKGYIVGNISKDLALEPRELAERRVRIVSRGRTQLFSLNPRSGTLVTAGRIDREELCAQSPRCLVNFKVLVEDRVKLYGIEIEVTDINDSAPKFQAESLEVKINEIAVPGARYPLPEAIDPDVGVNSLQSYQLSPNHHFSLNVQTGDNGAINPELVLERALDREEATAHHLVLTASDGGEPRRSSTVRIHVTVLDTNDNAPVFAQRIYRVKVLENVPPGTWLLTATASDLDEGINGKVAYKFWKINEKQSLLFQLNENTGEISTAKSLDYEECSFYEMEIQAEDGGGLKGWTKVLISVEDVNDNRPEVTITSLFSPVREDAPQGTVILLFNAHDRDSGKNGQVVCSIQENLSFTLENSEEDYYRLLTAQILDREKASEYNITVTATDRGTPPLSTEIHITLQVTDINDNPPAFSQASYSVYLPENNARGTSIFSVIAYDPDSNENSRVIYSLAEDTIQGSPLSTYVSINSDTGVLYALCSFDYEQFRDLQMQVTASDSGSPPLSSNVSLRLFVLDQNDNAPEILYPALPTDGSTGVELAPRSAEPGYLVTKVVAVDRDSGQNAWLSYRLFKASEPGLFSVGLHTGEVRTARALLDRDALKQSLVVAVQDHGQPPLSATVTLTVAIADSIPDILADLGSLQIPADLEASDLTLYLVVAVAVVSCVFLTFVITLLALRLRHWHSSHLLRATSDGLAGVPTSHFVGVDGVRAFLQTYSQEFSLTADSRKSHLIFPQPNYADTLISQQSCEKNEPLCVSVDSKFPIEDTPLVPVSSFFFFLSFLFLFFVLFCF

SEQ ID NO: 18549 - protein, 1275 aa, Homo sapiens
MAGVGAAALSLLLHLGALALAAGAEGGAVPREPPGQQTTAHSSVLAGNSQEQWHPLREWLGRLEAAVMELREQNKDLQTRVRQLESCECHPASPQCWGLGRAWPEGARWEPDACTACVCQDGAAHCGPQAHLPHCRGCSQNGQTYGNGETFSPDACTTCRCLTGAVQCQGPSCSELNCLESCTPPGECCPICRPGCDYEGQLYEEGVTFLSSSNPCLQCTCLRSRVRCMALKCPPSPCPEPVLRPGHCCPTCQGCTEGGSHWEHGQEWTTPGDPCRICRCLEGHIQCRQRECASLCPYPARPLPGTCCPVCDGCFLNGREHRSGEPVGSGDPCSHCRCANGSVQCEPLPCPPVPCRHPGKIPGQCCPVCDGCEYQGHQYQSQETFRLQERGLCVRCSCQAGEVSCEEQECPVTPCALPASGRQLCPACELDGEEFAEGVQWEPDGRPCTACVCQDGVPKCGAVLCPPAPCQHPTQPPGACCPSCDSCTYHSQVYANGQNFTDADSPCHACHCQDGTVTCSLVDCPPTTCARPQSGPGQCCPRCPDCILEEEVFVDGESFSHPRDPCQECRCQEGHAHCQPRPCPRAPCAHPLPGTCCPNDCSGCAFGGKEYPSGADFPHPSDPCRLCRCLSGNVQCLARRCVPLPCPEPVLLPGECCPQCPAAPAPAGCPRPGAAHARHQEYFSPPGDPCRRCLCLDGSVSCQRLPCPPAPCAHPRQGPCCPSCDGCLYQGKEFASGERFPSPTAACHLCLCWEGSVSCEPKACAPALCPFPARGDCCPDCDGCEYLGESYLSNQEFPDPREPCNLCTCLGGFVTCGRRPCEPPGCSHPLIPSGHCCPTCQGCRYHGVTTASGETLPDPLDPTCSLCTCQEGSMRCQKKPCPPALCPHPSPGPCFCPVCHSCLSQGREHQDGEEFEGPAGSCEWCRCQAGQVSCVRLQCPPLPCKLQVTERGSCCPRCRGCLAHGEEHPEGSRWVPPDSACSSCVCHEGVVTCARIQCISSCAQPRQGPHDCCPQCSDCEHEGRKYEPGESFQPGADPCEVCICEPQPEGPPSLRCHRRQCPSLVGCPPSQLLPPGPQHCCPTCAEALSNCSEGLLGSELAPPDPCYTCQCQDLTWLCIHQACPELSCPLSERHTPPGSCCPVCRAPTQSCVHQGREVASGERWTVDTCTSCSCMAGTVRCQSQRCSPLSCGPDKAPALSPGSCCPRCLPRPASCMAFGDPHYRTFDGRLLHFQGSCSYVLAKDCHSGDFRWMGTRWPCPSCRSRCCMWSCEDTL

SEQ ID NO: 18550 - protein, 152 aa, Homo sapiens
MQHRGFLLLTLLALLALTSAVAKKKEEGALQCSVPGDHPRHQALHPQDQSKGQSQEREGKGLDAKPGCQGAPGVTWGLAHALPLPGPRCDPPVPSVCSLALINHALPCPSHSPAPPLSAQSGEGQGILGSLSLPQSNVSPRARFCSSPQFHY

SEQ ID NO: 18551 - protein, 242 aa, Homo sapiens
MDHHQPGTGRYQVLLNEEDNSESSAIEQPPTSNPAPQIVQAASSAPALETDSSPPPYSSITVEVPTTSDTEVYGEFYPVPPPYSVATSLPTYDEAEKAKAAAMAAAAAETSQRIQEEECPPRDDFSDADQLRVGNDGIFMLAFFMAFIFNWLGFCLSFCITNTIAGRYGAICGFGLSLIKWILIVRFSDYFTGYFNGQYWLWWIFLVLGLLLFFRGFVNYLKVRNMSESMAAAHRTRYFFLL

SEQ ID NO: 18552 - protein, 620 aa, Homo sapiens
MATKEKLQCLKDFHKDILKPSPGKSPGTRPEDEAEGKPPQREKWSSKIDFVLSVAGGFVGLGNVWRFPYLCYKNGGGAFLIPYFIFLFGSGLPVFFLEIIIGQYTSEGGITCWEKICPLFSGIGYASVVIVSLLNVYYIVILAWATYYLFQSFQKELPWAHCNHSWNTPHCMEDTMRKNKSVWITISSTNFTSPVIEFWERNVLSLSPGIDHPGSLKWDLALCLLLVWLVCFFCIWKGVRSTGKVVYFTATFPFAMLLVLLVRGLTLPGAGAGIKFYLYPDITRLEDPQVWIDAGTQIFFSYAICLGAMTSLGSYNKYKYNSYRDCMLLGCLNSGTSFVSGFAIFSILGFMAQEQGVDIADVAESGPGLAFIAYPKAVTMMPLPTFWSILFFIMLLLLGLDSQFVEVEGQITSLVDLYPSFLRKGYRREIFIAFVCSISYLLGLTMVTEGGMYVFQLFDYYAASGVCLLWVAFFECFVIAWIYGGDNLYDGIEDMIGYRPGPWMKYSWAVITPVLCVGCFIFSLVKYVPLTYNKTYVYPNWAIGLGWSLALSSMLCVPLVIVIRLCQTEGPFLVRVKYLLTPREPNRWAVEREGATPYNSRTVMNGALVKPTHIIVETMM

SEQ ID NO: 18553 - protein, 1122 aa, Homo sapiens
MSLQEMFRFPMGLLLGSVLLVASAPATLEPPGCSNKEQQVTVSHTYKIDVPKSALVQVDADPQPLSDDGASLLALGEAREEQNIIFRHNIRLQTPQKDCELAGSVQDLLARVKKLEEEMVEMKEQCSAQRCCQGVTDLSRHCSGHGTFSLETCSCHCEEGREGPACERLACPGACSGHGRCVDGRCLCHEPYVGADCGYPACPENCSGHGECVRGVCQCHEDFMSEDCSEKRCPGDCSGHGFCDTGECYCEEGFTGLDCAQVVTPQGLQLLKNTEDSLLVSWEPSSQVDHYLLSYYPLGKELSGKQIQVPKEQHSYEILGLLPGTKYIVTLRNVKNEVSSSPQHLLATTDLAVLGTAWVTDETENSLDVEWENPSTEVDYYKLRYGPMTGQEVAEVTVPKSSDPKSRYDITGLHPGTEYKITVVPMRGELEGKPILLNGRTEIDSPTNVVTDRVTEDTATVSWDPVQAVIDKYVVRYTSADGDTKEMAVHKDESSTVLTGLKPGEAYKVYVWAERGNQGSKKADTNALTDIDSPQNLVTDRVTENMATVSWDPVRATIDRYVVRYTSAKDGETREVPVGKEQSSTVLTGLRPGVEYTVHVWAQKGAQESKKADTKAQTDIDSPQNLVTDWVTENTATVSWDPVQATIDRYVVHYTSANGETREVPVGKEQSSTVLTGLRPGMEYTVHVWAQKGNQESKKADTKAQTEIDGPKNLVTDWVTENMATVSWDPVQATIDKYMVRYTSADGETREVPVGKEHSSTVLTGLRPGMEYMVHVWAQKGAQESKKADTKAQTELDPPRNLRPSAVTQSGGILTWTPPSAQIHGYILTYQFPDGTVKEMQLGREDQRFALQGLEQGATYPVSLVAFKGGRRSRNVSTTLSTVGARFPHPSDCSQVQQNSNAASGLYTIYLHGDASRPLQVYCDMETDGGGWIVFQRRNTGQLDFFKRWRSYVEGFGDPMKEFWLGLDKLHNLTTGTPARYEVRVDLQTANESAYAIYDFFQVASSKERYKLTVGKYRGTAGDALTYHNGWKFTTFDRDNDIALSNCALTHHGGWWYKNCHLANPNGRYGETKHSEGVNWEPWKGHEFSIPYVELKIRPHGYSREPVLGRKKRTLRGRLRTF

SEQ ID NO: 18554 - protein, 406 aa, Homo sapiens
MDFGLALLLAGLLGLLLGQSLQVKPLQVEPPEPVVAVALGASRQLTCRLACADRGASVQWRGLDTSLGAVQSDTGRSVLTVRNASLSAAGTRVCVGSCGGRTFQHTVQLLVYAFPDQLTVSPAALVPGDPEVACTAHKVTPVDPNALSFSLLVGGQELEGAQALGPEVQEEEEEPQGDEDVLFRVTERWRLPPLGTPVPPALYCQATMRLPGLELSHRQAIPALHALSNPEAPAAESPQAPSLSTPASSHPTSPEPPDTTSPESPDTTSPESPDTTSQEPPDTTSPEPPDKTSPEPAPQQGSTHTPRSPGSTRTRRPEISQAGPTQGEVIPTGSSKPAGDQLPAALWTSSAVLGLLLLALPTYHLWKRCRHLAEDDTHPPASLRLLPQVSAWAGLRGTGQVGISPS

SEQ ID NO: 18555 - protein, 726 aa, Homo sapiens
MEPGDAARPGSGRATGAPPPRLLLLPLLLGWGLRVAAAASASSSGAAAEDSSAMEELATEKEAEESHRQDSVSLLTFILLLTLTILTIWLFKHRRVRFLHETGLAMIYGLIVGVILRYGTPATSGRDKSLSCTQEDRAFSTLLVNVSGKFFEYTLKGEISPGKINSVEQNDMLRKVTFDPEVFFNILLPPIIFHAGYSLKKRHFFRNLGSILAYAFLGTAVSCFIIGNLMYGVVKLMKIMGQLSDKFYYTDCLFFGAIISATDPVTVLAIFNELHADVDLYALLFGESVLNDAVAIVLSSSIVAYQPAGLNTHAFDAAAFFKSVGIFLGIFSGSFTMGAVTGVVTALVTKFTKLHCFPLLETALFFLMSWSTFLLAEACGFTGVVAVLFCGITQAHYTYNNLSVESRSRTKQLFEVLHFLAENFIFSYMGLALFTFQKHVFSPIFIIGAFVAIFLGRAAHIYPLSFFLNLGRRHKIGWNFQHMMMFSGLRGAMAFALAIRDTASYARQMMFTTTLLIVFFTVWIIGGGTTPMLSWLNIRVGVEEPSEEDQNEHHWQYFRVGVDPDQDPPPNNDSFQVLQGDGPDSARGNRTKQESAWIFRLWYSFDHNYLKPILTHSGPPLTTTLPAWCGLLARCLTSPQVYDNQEPLREEDSDFILTEGDLTLTYGDSTVTANGSSSSHTASTSLEGSRRTKSSSEEVLERDLGMGDQKVSSRGTRLVFPLEDNA

SEQ ID NO: 18556 - protein, 837 aa, Homo sapiens
MANRLQRGDRSRLLLLLCIFLGTLRGFRARQIRYSVPEETEKGSFVGNISKDLGLEPRELAKRGVRIVSRGKTQLFAVNPRSGSLITAGRIDREELCETVSSCFLNMELLVEDTLKIYGVEVEIIDINDNAPSFQEDEVEIKVSEHAIPGARFALPNARDPDVGVNSLQSYQLSPNNYFSLQLRGRTDGAKNPELVLEGSLDREKEAAHLLLLTALDGGDPIRKGAVPIRVVVLDVNDHIPMFTQSVYRVSVPENISSGTRVLMVNATDPDEGINGEVMYSFRNMESKASEIFQLDSQTGEVQVRGSLDFEKYRFYEMEIQGQDGGGLFTTTTMLITVVDVNDNAPEITITSSINSILENSPPGTVIALLNVQDQDSGENGQVSCFIPNHLPFKLEKTYGNYYKLITSRVLDRELVQSYNITLTATDQGSPPLSAETHVWLNVADDNDNPPVFPHSSYSAYIPENNPRGASIFSVTALDPDSKQNALVTYSLTDDTVQGVPLSSYVSINSNTGVLYALQSFDYEQFRDLELRVIARDSGDPPLSSNVSLSLFVLDQNDNAPEILYPALPTDGSTGVELAPRSAEPGYLVTKVVAVDKDSGQNAWLSYRLLKASEPGLFAVGEHTGEVRTARALLDRDALKQSLVVAVQDHGQPPLSATVTLTVAVADSIPEVLADLGSLESLANSETSDLSLYLVVAVAAVSCIFLVFVIVLLALRLWRWHKSRLLQASEGGLAGMPTSHFVGVDGVQAFLQTYSHEVSLIADSQKSHLIFPQPNYGDTLISQESCEKSEPLLIAEDSAIILGKCDPTSNQVRFISLPPNCWCLGTSLLRRCFLSLL

SEQ ID NO: 18557 - protein, 325 aa, Homo sapiens
MVATNTPHSTLSVNWSLLLSPEPDGGLMVLPKDSIQFSSALVFTRLLEFDSTNVSDTAAKPLGRPYPPYSLADFSWNNITDSLDPATLSATFQGHPMNDPTRTFANGSLAFRVQAFSRSSRPAQPPRLLHTADTCQLEVALIGASPRGNRSLFGLEVATLGQGPDCPSMQEQHSIDDEYAPAVFQLDQLLWGSLPSGFAQWRPVAYSQKPGGRESALPCQASPLHPALAYSLPQSPIVRAFFGSQNNFCAFNLTFGASTGPGYWDQHYLSWSMLLGVGFPPVDGLSPLVLGIMAVALGAPGLMLLGGGLVLLLHHKKYSEYQSIN

SEQ ID NO: 18558 - protein, 585 aa, Homo sapiens
MGPADSWGHHWMGILLSASLCTVWSPPAAAQLTLNANPLDATQSEDVVLPVFGTPRTPQIHGRSRELAKPSIAVSPGTAIEQKDMVTFYCTTKDVNITIHWVSNNLSIVFHERMQLSKDGKILTILIVQREDSGTYQCEARDALLSQRSDPIFLDVKYGPDPVEIKLESGVASGEVVEVMEGSSMTFLAETKSHPPCAYTWFLLDSILSHTTRTFTIHAVSREHEGLYRCLVSNSATHLSSLGTLKVRVLETLTMPQVVPSSLNLVENARSVDLTCQTVNQSVNVQWFLSGQPLLPSEHLQLSADNRTLIIHGLQRNDTGPYACEVWNWGSRARSEPLELTINYGPDQVHITRESASEMISTIEAELNSSLTLQCWAESKPGAEYRWTLEHSTGEHLGEQLIIRALTWEHDGIYNCTASNSLTGLARSTSVLVKVVGPQSSSLSSGAIAGIVIGILAVIAVASELGYFLCIRNARRPSRKTTEDPSHETSQPIPKEEHPTEPSSESLSPEYRNISQLQGRIRVELMQPPDLPEETYETKLPSASRRGNSFSPWKPPPKPLMPPLRLVSTVPKNMESIYEVLGMQQ

SEQ ID NO: 18559 - protein, 274 aa, Homo sapiens
MAAAEPSPRRVGFVGAGRMAGAIAQGLIRAGKVEAQHILASAPTDRNLCHFQALGCRTTHSNQEVLQSCLLVIFATKPHVLPAVLAEVAPVVTTEHILVSVAAGVSLSTLEELLPPNTRVLRVLPNLPCVVQEGAIVMARGRHVGSSETKLLQHLLEACGRCEEVPEAYVDIHTGLSGSGVAFVCAFSEALAEGAVKMGMPSSLAHRIAAQTLLGTAKMLLHEGQHPAQLRSDVCTPGGTTIYGLHALEQGGLRAATMSAVEAATCRAKELSRK

SEQ ID NO: 18560 - protein, 346 aa, Homo sapiens
MAPRRARGCRTLGLPALLLLLLLRPPATRDARDRLAVLAGRSRISESFNHEVQTHEACVRLRTMENCPQCHHHRTSRQQAGITCPPPMSVEHADIWVKSYSLYSRERYICNSGFKRKAGTSSLTECVLNKATNVAHWTTPSLKCIRDPALVHQRPAPPSTVTTAGVTPQPESLSPSGKEPAASSPSSNNTAATTAAIVPGSQLMPSKSPSTGTTEISSHESSHGTPSQTTAKNWELTASASHQPPGVYPQGHSDTTVAISTSTVLLCGLSAVSLLACYLKSSSHSRELTLLTLKWPKELLLLRRDISPALVEGAGQMPRASAPRQLQTGQPRMTSVLPRLCLSFGS

SEQ ID NO: 18561 - protein, 617 aa, Homo sapiens
MAGLTAAAPRPGVLLLLLSILHPSRPGGVPGAIPGGVPGGVFYPALGPGGKPLKPVPGGLAGAGLGAGLGAFPAVTFPGALVPGGVADAAAAYKAAKAGAGLGGVPGVGGLGVSAGAVVPQPGAGVKPGKVPGVGLPGVYPGGVLPGVGPFGGPQPGVPLGYPIKAPKLPGGYGLPYTTGKLPYGYGPGGVAGAAGKAGYPTGTGVGPQAAAAAAAKAAAKFGAGAAGVLPGVGGAGVPGVPGAIPGIGGIAGVGTPAAAAAAAAAAKAAKYGAAAGLVPGGPGFGPGVVGVPGAGVPGVGVPGAGIPVVPGAGIPGAAVPGVVSPEAAAKAAAKAAKYGARPGVGVGGIPTYGVGAGGFPGFGVGVGAEAQAAAAAKAAKYGLVPGVGVAPGVGVAPGVGVAPGVGLAPGVGVAPGVGVAPGVGVAPGIGPGGVAAAAKSAAKVAAKAQLRAAAGLGAGIPGLGVGVGVPGLGVGAGVPGLGVGAGVPGFGAVPGALAAAKAAKYGAAVPGVLGGLGALGGVGIPGGVVGAGPAAAAAAAKAAAKAAQFGLVGAAGLGGLGVGGLGVPGVGGLGGIPPAAAAKAAKYGVAARPGFGLSPIFPGGACLGKACGRKRK

SEQ ID NO: 18562 - protein, 117 aa, Homo sapiens
MDMRVPAQLLGLLLLWLPGARCAIQLTQSPSSLSASVGDRVTITCRASQGISSALAWYQQKPGKAPKLLIYDASSLESGVPSRFSGSGSGTDFTLTISSLQPEDFATYYCQQFNSYP

SEQ ID NO: 18563 - protein, 103 aa, Homo sapiens [sequence omitted]

SEQ ID NO: 18564 - protein, 853 aa, Homo sapiens
MLPRSPPLPRGNLWWREEFGSFRAGVESSWEPPRDFGGGSSLAAGMAGTVVLDDVELREAQRDYLDFLDDEEDQGIYQSKVRELISDNQYRLIVNVNDLRRKNEKRANRLLNNAFEELVAFQRALKDFVASIDATYAKQYEEFYVGLEGSFGSKHVSPRTLTSCFLSCVVCVEGIVTKCSLVRPKVVRSVHYCPATKKTIERRYSDLTTLVAFPSSSVYPTKDEENNPLETEYGLSVYKDHQTITIQEMPEKAPAGQLPRSVDVILDDDLVDKAKPGDRVQVVGTYRCLPGKKGGYTSGTFRTVLIACNVKQMSKDAQPSFSAEDIAKIKKFSKTRSKDIFDQLAKSLAPSIHGHDYVKKAILCLLLGGVERDLENGSHIRGDINILLIGDPSVAKSQLLRYVLCTAPRAIPTTGRGSSGVGLTAAVTTDQETGERRLEAGAMVLADRGVVCIDEFDKMSDMDRTAIHEVMEQGRVTIAKAGIHARLNARCSVLAAANPVYGRYDQYKTPMENIGLQDSLLSRFDLLFIMLDQMDPEQDREISDHVLRMHRYRAPGEQDGDAMPLGSAVDILATDDPNFSQEDQQDTQIYEKHDNLLHGTKKKKEKMVSAAFMKKYIHVAKIIKPVLTQESATYIAEEYSRLRSQDSMSSDTARTSPVTARTLETLIRLATAHAKARMSKTVDLQDAEEAVELVQYAYFKKVLEKEKKRKKRSEDESETEDEEEKSQEDQEQKRKRRKTRQPDAKDGDSYDPYDFSDTEEEMPQVHTPKTADSQETKESQKVELSESRLKAFKVALLDVFREAHAQSIGMNRLTESINRDSEEPFSSVEIQAALSKMQDDNQVMVSEGIIFLI

SEQ ID NO: 18565 - protein, 115 aa, Homo sapiens
MGSWTLCCVSLCILVAKHTDAGVIQSPRHEVTEMGQEVTLRCKPISGHDYLFWYRQTMMRGLELLIYFNNNVPIDDSGMPEDRFSAKMPNASFSTLKIQPSEPRDSAVYFCASSL

SEQ ID NO: 18566 - protein, 338 aa, Homo sapiens
MSDFDSNPFADPDLNNPFKDPSVTQVTRNVPPGLDEYNPFSDSRTPPPGGVKMPNVPNTQPAIMKPTEEHPAYTQIAKEHALAQAELLKRQEELERKAAELDRREREMQNLSQHGRKNNWPPLPSNFPVGPCFYQDFSVDIPVEFQKTVKLMYYLWMFHAVTLFLNIFGCLAWFCVDSARAVDFGLSILWFLLFTPCSFVCWYRPLYGAFRSDSSFRFFVFFFVYICQFAVHVLQAAGFHNWGNCGWISSLTGLNQNIPVGIMMIIIAALFTASAVISLVMFKKVHGLYRTTGASFEKAQQEFATGVMSNKTVQTAAANAASTAASSAAQNAFKGNQI

SEQ ID NO: 18567 - protein, 93 aa, Homo sapiens
MKISVAAIPFFLLITIALGTKTESSSRGPYHPSECCFTYTTYKIPRQRIMDYYETNSQCSKPGIVFITKRGHSVCTNPSDKWVQDYIKDMKEN

SEQ ID NO: 18568 - protein, 210 aa, Homo sapiens
MADPDPRYPRSSIEDDFNYGSSVASATVHIRMAFLRKVYSILSLQVLLTTVTSTVFLYFESVRTFVHESPALILLFALGSLGLIFALILNRHKYPLNLYLLFGFTLLEALTVAVVVTFYDVYIILQAFILTTTVFFGLTVYTLQSKKDFSKFGAGLFALLWILPVRILEVFFYSEIMELVLAAAGALLFCGFIIYDTHSLMHKLSPKSTY

SEQ ID NO: 18569 - protein, 172 aa, Homo sapiens
MDMAWQMMQLLLLALVTAAGSAQPRSARARTDLLNVCMNAKHHKTQPSPEDELYGQVGAPQGPSPGSVPLDDLPGAEEPEYGGDGCGGERLSPVSSPPSAVPGRRMPAARPAPARSCTRTPPACTTLTGITVVRWNPPASATLSRTAVSMSAHPTWGPGSGRSTRAGAKSAF

SEQ ID NO: 18570 - protein, 262 aa, Homo sapiens
MPLHVKWPFPAVPPLTWTLASSVVMGLVGTYSCFWTKYMNHLTVHNREVLYELIEKRGPATPLITVSNHQSCMDDPHLWGILKLRHIWNLKLMRWTPAAADICFTKELHSHFFSLGKCVPVCRGDGVYQKGMDFILEKLNHGDWVHIFPEGKVNMSSEFLRFKWGIGRLIAECHLNPIILPLWHVGMNDVLPNSPPYFPRFGQKITVLIGKPFSALPVLERLRAENKSAVEMRKALTDFIQEEFQHLKTQAEQLHNHLQPGR

SEQ ID NO: 18571 - protein, 510 aa, Homo sapiens
MVARVGLLLRALQLLLWGHLDAQPAERGGQELRKEAEAFLEKYGYLNEQVPKAPTSTRFSDAIRAFQWVSQLPVSGVLDRATLRQMTRPRCGVTDTNSYAAWAERISDLFARHRTKMRRKKRFAKQGNKWYKQHLSYRLVNWPEHLPEPAVRGAVRAAFQLWSNVSALEFWEAPATGPADIRLTFFQGDHNDGLGNAFDGPGGALAHAFLPRRGEAHFDQDERWSLSRRRGRNLFVVLAHEIGHTLGLTHSPAPRALMAPYYKRLGRDALLSWDDVLAVQSLYGKPLGGSVAVQLPGKLFTDFETWDSYSPQGRRPETQGPKYCHSSFDAITVGSHFWEVAADGNVSEPRPLQERWVGLPPNIEAAAVSLNDGDFYFFKGGRCWRFRGPKPVWGLPQLCRAGGLPRHPDAALFFPPLRRLILFKGARYYVLARGGLQVEPYYPRSLQDWGGIPEEVSGALPRPDGSIIFFRDDRYWRLDQAKLQATTSGRWATELPWMGCWHANSGSALF

SEQ ID NO: 18572 - protein, 4204 aa, Homo sapiens
MGALWSWWILWAGATLLWGLTQEASVDLKNTGREEFLTAFLQNYQLAYSKAYPRLLISSLSESPASVSILSQADNTSKKVTVRPGESVMVNISAKAEMIGSKIFQHAVVIHSDYAISVQALNAKPDTAELTLLRPIQALGTEYFVLTPPGTSARNVKEFAVVAGAAGASVSVTLKGSVTFNGKFYPAGDVLRVTLQPYNVAQLQSSVDLSGSKVTASSPVAVLSGHSCAQKHTTCNHVVEQLLPTSAWGTHYVVPTLASQSRYDLAFVVASQATKLTYNHGGITGSRGLQAGDVVEFEVRPSWPLYLSANVGIQVLLFGTGAIRNEVTYDPYLVLIPDVAAYCPAYVVKSVPGCEGVALVVAQTKAISGLTIDGHAVGAKLTWEAVPGSEFSYAEVELGTADMIHTAEATTNLGLLTFGLAKAIGYATAADCGRTVLSPVEPSCEGMQCAAGQRCQVVGGKAGCVAESTAVCRAQGDPHYTTFDGRRYDMMGTCSYTMVELCSEDDTLPAFSVEAKNEHRGSRRVSYVGLVTVRAYSHSVSLTRGEVGFVLVDNQRSRLPVSLSEGRLRVYQSGPRAVVELVFGLVVTYDWDCQLALSLPARFQDQVCGLCGNYNGDPADDFLTPDGALAPDAVEFASSWKLDDGDYLCEDGCQNNCPACTPGQAQHYEGDRLCGMLTKLDGPFAVCHDTLDPRPFLEQCVYDLCVVGGERLSLCRGLSAYAQACLELGISVGDWRSPANCPLSCPANSRYELCGPACPTSCNGAAAPSNCSGRPCVEGCVCLPGFVASGGACVPASSCGCTFQGLQLAPGQEVWADELCQRRCTCNGATHQVTCRDKQSCPAGERCSVQNGLLGCYPDRFGTCQGSGDPHYVSFDGRRFDFMGTCTYLLVGSCGQNAALPAFRVLVENEHRGSQTVSYTRAVRVEARGVKVAVRREYPGQVLVDDVLQYLPFQAADGQVQVFRQGRDAVVRTDFGLTVTYDWNARVTAKVPSSYAEALCGLCGNFNGDPADDLALRGGGQAANALAFGNSWQEETRPGCGATEPGDCPKLDSLVAQQLQSKNECGILADPKGPFRECHSKLDPQGAVRDCVYDRCLLPGQSGPLCDALATYAAACQAAGATVHPWRSEELCPLSCPPHSHYEACSYGCPLSCGDLPVPEGCESACREGCVCDAGFVLSGDTCVPVGQCGCLHDDRYYPLGQTFYPGPGCDSLCRCREGGEVSCEPSSCGPHETCRPSGGSLGCVAVGSTTCQASGDPHYTTFDGHRFDFMGTCVYVLAQTCGTRPGLHRFAVLQENVAWGNGRVSVTRVITVQVANFTLRLEQRQWKVTVNGVDMKLPVVLANGQIRASQHGSDVVIETDFGLRVAYDLVYYVRVTVPGNYYQLMCGLCGNYNGDPKDDFQKPNGSQAGNANEFGNSWEEVVSDSPCLPPPTCPPGSEGCIPSEECPPELEKKYQKEEFCGLLSSPTGPLSSCHKLVDPQGPLKDCIFDLCLGGGNLSILCSNIHAYVSACQVAGGHVEPWRNETFCPMECPQNSHYELCADTCSLGCSALSAPLQCPDGCAEGCQCDSGFLYNGQACVPIQQCGCYHNGAYYEPEQTVLIDNCRQQCTCHAGKVVVCQEHSCKPGQVCQPSGGILSCVTKDPCHGVTCRPQETCKEQGGQGVCLPNYEATCWLWGDPHYHSFDGRKFDFQGTCNYVLATTGCPGVSTQGLTPFTVTTKNQNRGNPAVSYVRVVTVAALGTNISIHKDEIGKVRVNGVLTALPVSVADGRISVTQGASKALLVADFGLQVSYDWNWRVDVTLPSSYHGAVCGLCGNMDRNPNNDQVFPNGTLAPSIPIWGGSWRAPGWDPLCWDECRGSCPTCPEDRLEQYEGPGFCGPLAPGTGGPFTTCHAHVPPESFFKGCVLDVCMGGGDRDILCKALASYVAACQAAGVVIEDWRAQVGCEITCPENSHYEVCGPPCPASCPSPAPLTTPAVCEGPCVEGCQCDAGFVLSADRCVPLNNGCGCWANGTYHEAGSEFWADGTCSQWCRCGPGGGSLVCTPASCGLGEVCGLLPSGQHGCQPVSTAECQAWGDPHYVTLDGHRFDFQGTCEYLLSAPCHGPPLGAENFTVTVANEHRGSQAVSYTRSVTLQIYNHSLTLSARWPRKLQVDGVFVTLPFQLDSLLHAHLSGADVVVTTTSGLSLAFDGDSFVRLRVPAAYAGSLCGLCGNYNQDPADDLKAVGGKPAGWQVGGAQGCGECVSKPCPSPCTPEQQESFGGPDACGVISATDGPLAPCHGLVPPAQYFQGCLLDACQVQGHPGGLCPAVATYVAACQAAGAQLREWRRPDFCPFQCPAHSHYELCGDSCPGSCPSLSAPEGCESACREGCVCDAGFVLSGDTCVPVGQCGCLHDDRYYPLGQTFYPGPGCDSLCRCREGGEVSCEPSSCGPHETCRPSGGSLGCVAVGSTTCQASGDPHYTTFDGHRFDFMGTCVYVLAQTCGTRPGLHRFAVLQENVAWGNGRVSVTRVITVQVANFTLRLEQRQWKVTVNGVDMKLPVVLANGQIRASQHGSDVVIETDFGLRVAYDLVYYVRVTVPGNYYQLMCGLCGNYNGDPKDDFQKPNGSQAGNANEFGNSWEEVVPDSPCLPPPTCPPGSAGCIPSDKCPPELEKKYQKEEFCGLLSSPTGPLSSCHKLVDPQGPLKDCIFDLCLGGGNLSILCSNIHAYVSACQAAGGHVEPWRNETFCPMECPQNSHYELCADTCSLGCSALSAPLQCPDGCAEGCQCDSGFLYNGQACVPIQQCGCYHNGVYYEPEQTVLIDNCRQQCTCHVGKVVVCQEHSCKPGQVCQPSGGILSCVTKDPCHGVTCRPQETCKEQGGQGVCLPNYEATCWLWGDPHYHSFDGRKFDFQGTCNYVLATTGCPGVSTQGLTPFTVTTKNQNRGNPAVSYVRVVTVAALGTNISIHKDEIGKVRVNGVLTALPVSVADGRISVAQGASKALLVADFGLQVSYDWNWRVDVTLPSSYHGAVCGLCGNMDRNPNNDQVFPNGTLAPSIPIWGGSWRAPGWDPLCWDECRGSCPTCPEDRLEQYEGPGFCGPLSSGTGGPFTTCHAHVPPESFFKGCVLDVCMGGGDRDILCKALASYVAACQAAGVVIEDWRAQVGCEITCPENSHYEVCGPPCPASCPSPAPLTTPAVCEGPCVEGCQCDAGFVLSADRCVPLNNGCGCWANGTYHEAGSEFWADGTCSQWCRCGPGGGSLVCTPASCGLGEVCGLLPSGQHGCQPVSTAECQAWGDPHYVTLDGHRFDFQGTCEYLLSAPCHGPPLGAENFTVTVANEHRGSQAVSYTRSVTLQIYNHSLTLSARWPRKLQVDGVFVALPFQLDSLLHAHLSGADVVVTTTSGLSLAFDGDSFVRLRVPAAYAASLCGLCGNYNQDPADDLKAVGGKPAGWQVGGAQGCGECVSKPCPSPCTPEQQESFGGPDACGVISATDGPLAPCHGLVPPAQYFQGCLLDACQVQGHPGGLCPAVATYVAACQAAGAQLGEWRRPDFCPLQCPAHSHYELCGDSCPVSCPSLSAPEGCESACREGCVCDAGFVLSGDTCVPVGQCGCLHDGRYYPLGEVFYPGPECERRCECGPGGHVTCQEGAACGPHEECRLEDGVQACHATGCGRCLANGGIHYITLDGRVYDLHGSCSYVLAQVCHPKPGDEDFSIVLEKNAAGDLQRLLVTVAGQVVSLAQGQQVTVDGEAVALPVAVGRVRVTAEGRNMVLQTTKGLRLLFDGDAHLLMSIPSPFRGRLCGLCGNFNGNWSDDFVLPNGSAASSVETFGAAWRAPGSSKGCGEGCGPQGCPVCLAEETAPYESNEACGQLRNPQGPFATCQAVLSPSEYFRQCVYDLCAQKGDKAFLCRSLAAYTAACQAAGVAVKPWRTDSFCPLHCPAHSHYSICTRTCQGSCAALSGLTGCTTRCFEGCECDDRFLLSQGVCIPVQDCGCTHNGRYLPVNSSLLTSDCSERCSCSSSSGLTCQAAGCPPGRVCEVKAEARNCWATRGLCVLSVGANLTTFDGARGATTSPGVYELSSRCPGLQNTIPWYRVVAEVQICHGKTEAVGQVHIFFQDGMVTLTPNKGVWVNGLRVDLPAEKLASVSVSRTPDGSLLVRQKAGVQVWLGANGKVAVIVSNDHAGKLCGACGNFDGDQTNDWHDSQEKPAMEKWRAQDFSPCYG

SEQ ID NO: 18573 - protein, 903 aa, Homo sapiens
MGPWSRSLSALLLLLQVSSWLCQEPEPCHPGFDAESYTFTVPRRHLERGRVLGRVNFEDCTGRQRTAYFSLDTRFKVGTDGVITVKRPLRFHNPQIHFLVYAWDSTYRKFSTKVTLNTVGHHHRPPPHQASVSGIQAELLTFPNSSPGLRRQKRDWVIPPISCPENEKGPFPKNLVQIKSNKDKEGKVFYSITGQGADTPPVGVFIIERETGWLKVTEPLDRERIATYTLFSHAVSSNGNAVEDPMEILITVTDQNDNKPEFTQEVFKGSVMEGALPGTSVMEVTATDADDDVNTYNAAIAYTILSQDPELPDKNMFTINRNTGVISVVTTGLDRESFPTYTLVVQAADLQGEGLSTTATAVITVTDTNDNPPIFNPTTYKGQVPENEANVVITTLKVTDADAPNTPAWEAVYTILNDDGGQFVVTTNPVNNDGILKTAKVWYLARCRNWHPHSCSYPCPLGLDFEAKQQYILHVAVTNVVPFEVSLTTSTATVTVDVLDVNEAPIFVPPEKRVEVSEDFGVGQEITSYTAQEPDTFMEQKITYRIWRDTANWLEINPDTGAISTRAELDREDFEHVKNSTYTALIIATDNGSPVATGTGTLLLILSDVNDNAPIPEPRTIFFCERNPKPQVINIIDADLPPNTSPFTAELTHGASANWTIQYNDPTQESIILKPKMALEVGDYKINLKLMDNQNKDQVTTLEVSVCDCEGAAGVCRKAQPVEAGLQIPAILGILGGILALLILILLLLLFLRRRAVVKEPLLPPEDDTRDNVYYYDEEGGGEEDQDFDLSQLHRGLDARPEVTRNDVAPTLMSVPRYLPRPANPDEIGNFIDENLKAADTDPTAPPYDSLLVFDYEGSGSEAASLSSLNSSESDKDQDYDYLNEWGNRFKKLADMYGGGEDD

SEQ ID NO: 18574 - protein, 726 aa, Homo sapiens
MLQTKDLIWTLFFLGTAVSLQVDIVPSQGEISVGESKFFLCQVAGDAKDKDISWFSPNGEKLTPNQQRISVVWNDDSSSTLTIYNANIDDAGIYKCVVTGEDGSESEATVNVKIFQKLMFKNAPTPQEFREGEDAVIVCDVVSSLPPTIIWKHKGRDVILKKDVRFIVLSNNYLQIRGIKKTDEGTYRCEGRILARGEINFKDIQVIVNVPPTIQARQNIVNATANLGQSVTLVCDAEGFPEPTMSWTKDGEQIEQEEDDEKYIFSDDSSQLTIKKVDKNDEAEYICIAENKAGEQDATIHLKVFAKPKITYVENQTAMELEEQVTLTCEASGDPIPSITWRTSTRNISSEEKTLDGHMVVRSHARVSSLTLKSIQYTDAGEYICTASNTIGQDSQSMYLEVQYAPKLQGPVAVYTWEGNQVNITCEVFAYPSATISWFRDGQLLPSSNYSNIKIYNTPSASYLEVTPDSENDFGNYNCTAVNRIGQESLEFILVQADTPSSPSIDQVEPYSSTAQVQFDEPEATGGVPILKYKAEWRAVGEEVWHSKWYDAKEASMEGIVTIVGLKPETTYAVRLAALNGKGLGEISAASEFKTQPVQGEPSAPKLEGQMGEDGNSIKVNLIKQDDGGSPIRHYLVRYRALSSEWKPEIRLPSGSDHVMLKSLDWNAEYEVYVVAENQQGKSKAAHFVFRTSAQPTAIPATLGGNSASYTFVSLLFSAVTLLLLC

SEQ ID NO: 18575 - protein, 177 aa, Homo sapiens
MAAGSRTSLLLAFGLLCLSWLQEGSAFPTIPLSRLFDNAMLRARRLYQLAYDTYQEFNLELLRISLLLIQSWLEPVQLLRSVFANSLVYGASDSNVYRHLKDLEEGIQTLMWRLEDGSPRTGQIFNQSYSKFDTKSHNDDALLKNYGLLYCFRKDMDKVETFLRIVQCRSVEGSCGF

SEQ ID NO: 18576 - protein, 123 aa, Homo sapiens
MVAMAAGPSGCLVPAFGLRLLLATVLQAVSAFGAEFSSEACRELGFSSNLLCSSCDLLGQFNLLQLDPDCRGCCQEEAQFETKKLYAGAILEVCGKLGRFPQVQVCPWFRPCIKAFGRQWEHC

SEQ ID NO: 18577 - protein, 245 aa, Homo sapiens
MDMAWQMMQLLLLALVTAAGSAQPRSARARTDLLNVCMNAKHHKTQPSPEDELYGQCSPWKKNACCTASTSQELHKDTSRLYNFNWDHCGKMEPTCKRHFIQDSCLYECSPNLGPWIRQVNQSWRKERILNVPLCKEDCERWWEDCRTSYTCKSNWHKGWNWTSGINECPAGALCSTFESYFPTPAALCEGLWSHSFKVSNYSRGSGRCIQMWFDSAQGNPNEEVAKFYAAAMNAGAPSRGIIDS

SEQ ID NO: 18578 - protein, 220 aa, Homo sapiens
MKTLFLGVTLGLAAALSFTLEEEDITGTWYVKAMVVDKDFPEDRRPRKVSPVKVTALGGGNLEATFTFMREDRCIQKKILMRKTEEPGKFSAYGGRKLIYLQELPGTDDYVFYCKDQRRGGLRYMGKLVASAPCRAVPLSPPWLTWPPHLQVGILIPTWRPWKNLRNWCSTRDSRRRTFSCPCRREAAFSNTRVTPGSAPPEPTLPPDTEPGPPGPTLQP

SEQ ID NO: 18579 - protein, 941 aa, Homo sapiens
MAAYLQWRRFVFFDKELVKEPLSNDGAAPGATPASGSAASKFLCLPPGITVCDSGRGSLVFGDMEGQIWFLPRSLQLTGFQAYKLRVTHLYQLKQHNILASVGEDEEGINPLVKIWNLEKRDGGNPLCTRIFPAIPGTEPTVVSCLTVHENLNFMAIGFTDGSVTLNKGDITRDRHSKTQILHKGNYPVTGLAFRQAGKTTHLFVVTTENVQSYIVSGKDYPRVELDTHGCGLRCSALSDPSQDLQFIVAGDECVYLYQPDERGPCFAFEGHKLIAHWFRGYLIIVSRDRKVSPKSEFTSRDSQSSDKQILNIYDLCNKFIAYSTVFEDVVDVLAEWGSLYVLTRDGRVHALQEKDTQTKLEMLFKKNLFEMAINLAKSQHLDSDGLAQIFMQYGDHLYSKGNHDGAVQQYIRTIGKLEPSYVIRKFLDAQRIHNLTAYLQTLHRQSLANADHTTLLLNCYTKLKDSSKLEEFIKKKSESEVHFDVETAIKVLRQAGYYSHALYLAENHAHHEWYLKIQLEDIKNYQEALRYIGKLPFEQAESNMKRYGKILMHHIPEQTTQLLKGLCTDYRPSLEGRSDREAPGCRANSEEFIPIFANNPRELKAFLEHMSEVQPDSPQGIYDTLLELRLQNWAHEKDPQVKEKLHAEAISLLKSGRFCDVFDKALVLCQMHDFQDGVLYLYEQGKLFQQIMHYHMQHEQYRQVISVCERHGEQDPSLWEQALSYFARKEEDCKEYVAAVLKHIENKNLMPPLLVVQTLAHNSTATLSVIRDYLVQKLQKQSQQIAQDELRVRRYREETTRIRQEIQELKASPKIFQKTKCSICNSALELPSVHFLCGHSFHQHCFESYSESDADCPTCLPENRKVMDMIRAQEQKRDLHDQFQHQLKCSNDSFSVIADYFGRGVFNKLTLLTDPPTARLTSSLEAGLQRDLLMHSRRGT

SEQ ID NO: 18580 - protein, 745 aa, Homo sapiens
MASVAWAVLKVLLLLPTQTWSPVGAGNPPDCDSPLASALPRSSFSSSSELSSSHGPGFSRLNRRDGAGGWTPLVSNKYQWLQIDLGERMEVTAVATQGGYGSSDWVTSYLLMFSDGGRNWKQYRREESIWGFPGNTNADSVVHYRLQPPFEARFLRFLPLAWNPRGRIGMRIEVYGCAYKSEVVYFDGQSALLYTLDKKPLKPIRDVISLKFKAMQSNGILLHREGQHGNHITLELIKGKLVFFLNSGNAKLPSTIAPVTLTLGSLLDDQHWHSVLIELLDTQVNFTVDKHTHHFQAKGDSSNLDLNFEISFGGILSPGRSRAFTRKSFHGCLENLYYNGVDVTELAKKHKPQILMMGNVSFSCPQPQTVPVTFLSSRSYLALPGNSGEDKVSVTFQFRTWNRAGHLLFGELQRGSGSFVLFLKDGKLKLSLFQAGQSPRNVTAGAGLNDGQWHSVSFSAKWSHMNVVVDDDTAVQPLVAVLIDSGDTYYFGGCLGNSSGSGCKSPLGGFQGCLRLITIGDKAVDPILVQQGALGSFRDLQIDSCGITDRCLPSYCEHGGECSQSWDTFSCDCLGTGYTGETCHSSLYEQSCEAHKHRGNPSGLYYIDADGSGPLGPFLVYCNMTDSAWTVVRHGGPDAVTLRGAPSGHPLSAVSFAYAAGAGQLRAAVNLAERCEQRLALRCGTARRPDSRDGTPLSWWVGRTNETHTSWGGSLPDAQKCTCGLEGNCIDSQYYCNCDAGQNEW

SEQ ID NO: 18581 - protein, 295 aa, Homo sapiens
MQRGAALCLRLWLCLGLLDGLVSGYSMTPPTLNITEESHVIDTGDSLSISCRGQHPLEWAWPGAQEAPATGDKDSEDTGVVRDCEGTDARPYCKVLLLHEVHANDTGSYVCYYKYIKARIEGTTAASSYVFVRDFEQPFINKPDTLLVNRKDAMWVPCLVSIPGLNVTLRSQSSVLWPDGQEVVWDDRRGMLVSTPLLHDALYLQCETTWGDQDFLSNPFLVHITGNELYDIQLLPRKSLELLVGEKLVLNCTVWAEFNSGVTFDWDYPGKQKIPSSASSGSKDPSWRPRQETSW

SEQ ID NO: 18582 - protein, 343 aa, Homo sapiens [sequence omitted]

SEQ ID NO: 18583 - protein, 588 aa, Homo sapiens
MEPPDAPAQARGAPRLLLLAVLLAAHPDAQAEVRLSVPPLVEVMRGKSVILDCTPTGTHDHYMLEWFLTDRSGARPRLASAEMQGSELQVTMHDTRGRSPPYQLDSQGRLVLAEAQVGDERDYVCVVRAGAAGTAEATARLNVFAKPEATEVSPNKGTLSVMEDSAQEIATCNSRNGNPAPKITWYRNGQRLEVPVEMNPEGYMTSRTVREASGLLSLTSTLYLRLRKDDRDASFHCAAHYSLPEGRHGRLDSPTFHLTLHYPTEHVQFWVGSPSTPAGWVREGDTVQLLCRGDGSPSPEYTLFRLQDEQEEVLNVNLEGNLTLEGVTRGQSGTYGCRVEDYDAADDVQLSKTLELRVAYLDPLELSEGKVLSLPLNSSAVVNCSVHGLPTPALRWTKDSTPLGDGPMLSLSSITFDSNGTYVCEASLPTVPVLSRTQNFTLLVQGSPELKTAEIEPKADGSWREGDEVTLICSARGHPDPKLSWSQLGGSPAEPIPGRQGWVSSSLTLKVTSALSRDGISCEASNPHGNKRHVFHFGTVSPQTSQAGVAVMAVAVSVGLLLLVVAVFYCVRRKGGPCCRQRREKGAP

SEQ ID NO: 18584 - protein, 850 aa, Homo sapiens
MAAQRNRSKESKDCSGLVLLCLFFGIPWEAGARQISYSIPEELEKGSFVGNISKDLGLAPRELAERGVRIVSRGRTQLFSLNPRSGSLITAGRIDREELCAQSARCVVSFNILVEDRVKLFGIEIEVTDINDNAPKFQAENLDVKINENVAAGMRFPLPEAIDPDVGVNSLQSYQLSPNKHFSLRVQSRANGVKYPELVLEHSLDREEEAIHHLVLTASDGGDPLRSGTVLVSVTVFDANDNAPVFTLPEYRVSVPENLPVGTQLLTVTATDRDEGANGEVTYSFRKLPDTQLLKFQLNKYTGEIKISENLDYEETGFYEIEIQAEDGGAYLATAKVLITVEDVNDNSPELTITSLFSPVTEDSPLGTVVALLNVHDLDSEQNGQVTCSILAYLPFKLEKSIDSYYRLVIHRALDREQVSSYNITVTATDGGSPPLSTEAHFMLQVADINDNPPTFSQVSYFTYIPENNARGASIFSVTALDPDSKENAQIIYSLAEDTIQGVPLSSYISINSDTGVLYALRSFDYEQFHELQMQVTASDSGDPPLSSNVSLSLFVLDQNDNAPEILYPALPTDGSTGVELAPRSAEPGYLVTKVVAVDRDSGQNAWLSYRLLKASEPGLFAVGEHTGEVRTARALLDRDALKQSLVVAVQDHGQPPLSATVTLTVAVADSIPQVLADLGSFESPANSETSDLTLYLVVAVAAVSCVFLAFVIVLLAHRLRRWHKSRLLQASGGGLTGVSGSHFVGVDGVRAFLQTYSHEVSLTADSRKSHLIFPQPNYADTLISQESCEKNDPLSLLDDSKFPIEDTPLVPVSFIFIFTFVKKKKIGFYFEVCGMMVESVNAKTLMSRI

SEQ ID NO: 18585 - protein, 376 aa, Homo sapiens
MVVVAAAPNPADGTPKVLLLSGQPASAAGAPAGQALPLMVPAQRGASPEAASGGLPQARKRQRLTHLSPEEKALRRKLKNRVAAQTARDRKKARMSELEQQVVDLEEENQKLLLENQLLREKTHGLVVENQELRQRLGMDALVAEEEAEAKGNEVRPVAGSAESAAGAGPVVTPPEHLPMDSGGIDSSDSESDILLGILDNLDPVMFFKCPSPEPASLEELPEVYPEGPSSLPASLSLSVGTSSAKLEAINELIRFDHIYTKPLVLEIPSETESQANVVVKIEEAPLSPSENDHPEFIVSVKEEPVEDDLVPELGISNLLSSSHCPKPSSCLLDAYSDCGYGGSLSPFSDMSSLLGVNHSWEDTFANELFPQLISV

SEQ ID NO: 18586 - protein, 693 aa, Homo sapiens
MGIELLCLFFLFLGRNDHVQGGAQTLQVHVRQTEDYPVDLYYLMDLSASMDDDLNTIKELGSRLSKEMSKLTSNFRLGFGSFVEKPVSPFVKTTPEEIANPCSSIPYFCLPTFGFKHILPLTNDAERFNEIVKNQKISANIDTPEGGFDAIMQAAVCKEKIGWRNDSLHLLVFVSDADSHFGMDSKLAGIVIPNDGLCHLDSKNEYSMSTVLEYPTIGQLIDKLVQNNVLLIFAVTQEQVHLYENYAKLIPGATVGLLQKDSGNILQLIISAYEELRSEVELEVLGDTEGLNLSFTAICNNGTLFQHQKKCSHMKVGDTASFSVTVNIPHCERRSRHIIIKPVGLGDALELLVSPECNCDCQKEVEVNSSKCHHGNGSFQCGVCACHPGHMGPRCECGEDMLSTDSCKEAPDHPSCSGRGDCYCGQCICHLSPYGNIYGPYCQCDNFSCVRHKGLLCGGNGDCDCGECVCRSGWTGEYCNCTTSTDSCVSEDGVLCSGRGDCVCGKCVCTNPGASGPTCERCPTCGDPCNSKRSCIECHLSAAGQAREECVDKCKLAGATISEEEDFSKDGSVSCSLQGENECLITFLITTDNEGKTIIHSINEKDCPKPPNIPMIMLGVSLAILLIGVVLLCIWKLLVSFHDRKEVAKFEAERSKAKWQTGTNPLYRGSTSTFKNVTYKHREKQKVDLSTDC

SEQ ID NO: 18587 - protein, 397 aa, Homo sapiens
MARAGARGLLGGRRPPGLRLALALRLALLLARPPSGRAGAPEAQGPAAPGTTAPEGGDRCRGYYDVMGQWDPPFNCSSGAYSFCCGTCGYRFCCHDGPRRLDQSRCSNYDTPAWVQTGRPPARARDTAAPRDPGRERSHTAVYAVCGVAALLVLAGIGARLGLERAHSPRARRTVTRALTELLKQPGPQEPLPPTLGPPLGGCVQVQMGDGLPRGSPHNSADKKRLNNAPRGSAAPGPPRGPRLQGGGSLTLQPDYAKYATFKAAALKAAEAAPRDFCQRFPALEPSPRQPPARAPRPSPDLPAPLDACPWAPPVYAPPAAPGPYAAWTSSRPARPAPLSHPTARAFQVPRRPGHAARRQFSVKMPETFNPQLPGLYGSAGRGSRYLRTNSKTEVTV

SEQ ID NO: 18588 - protein, 72 aa, Homo sapiens
MFRQFYLWTCLASGIILGSLFEICLGQYDDGTILVDNMLIKGTAGGPDPTIELSLKDNVDYWVLMDPVKQML

SEQ ID NO: 18589 - protein, 863 aa, Homo sapiens
MVPEAWRSGLVSTGRVVGVLLLLGALNKASTVIHYEIPEEREKGFAVGNVVANLGLDLGSLSARRFRVVSGASRRFFEVNRETGEMFVNDRLDREELCGTLPSCTVTLELVVENPLELFSVEVVIQDINDNNPAFPTQEMKLEISEAVAPGTRFPLESAHDPDVGSNSLQTYELSRNEYFALRVQTREDSTKYAELVLERALDREREPSLQLVLTALDGGTPALSASLPIHIKVLDANDNAPVFNQSLYRARVLEDAPSGTRVVQVLATDLDEGPNGEIIYSFGSHNRAGVRQLFALDLVTGMLTIKGRLDFEDTKLHEIYIQAKDKGANPEGAHCKVLVEVVDVNDNAPEITVTSVYSPVPEDAPLGTVIALLSVTDLDAGENGLVTCEVPPGLPFSLTSSLKNYFTLKTSADLDRETVPEYNLSITARDAGTPSLSALTIVRVQVSDINDNPPQSSQSSYDVYIEENNLPGAPILNLSVWDPDAPQNARLSFFLLEQGAETGLVGRYFTINRDNGIVSSLVPLDYEDRREFELTAHISDGGTPVLATNISVNIFVTDRNDNAPQVLYPRPGGSSVEMLPRGTSAGHLVSRVVGWDADAGHNAWLSYSLLGSPNQSLFAIGLHTGQISTARPVQDTDSPRQTLTVLIKDNGEPSLSTTATLTVSVTEDSPEARAEFPSGSAPREQKKNLTFYLLLSLILVSVGFVVTVFGVIIFKVYKWKQSRDLYRAPVSSLYRTPGPSLHADAVRGGLMSPHLYHQVYLTTDSRRSDPLLKKPGAASPLASRQNTLRSCDPVFYRQVLGAESAPPGQVRFSKSCLTLLVLFYSYIILRKEWSCFFSDEDVFLVMHSHFQLALPRSKLVPL

SEQ ID NO: 18590 - protein, 798 aa, Homo sapiens
MEFSWGSGQESRRLLLLLLLLAAWEAGNGQLHYSVSEEAKHGTFVGRIAQDLGLELAELVPRLFRVASKGRGGLLEVNLQNGILFVNSRIDREELCRRSAECSIHLEVIVDRPLQVFHVDVEVRDINDNPPVFPATQKNLSIAESRPLDSRFPLEGASDADIGENALLTYRLSPNEYFSLEKPPDDELVKGLGLILRKSLDREEAPEIFLVLTATDGGKPELTGTVQLLITVLDANDNAPAFDRTIYKVRLLENVPNGTLVIKLNASDLDEGLNGDIVYSFSNDISPNVKSKFHIDPITGQIIVKGYIDFEESKSYEIIVEGIDKGQLPLSGHCRVIVEVEDNNDNVPDLEFKSLSLPIREDAPLGTVIALISVSDKDMGVNGLVTCSLTSHVPFKLVSTFKNYYSLVLDSALDRESVSAYELVVTARDGGSPSLWATASVSVEVADVNDNAPAFAQPEYTVFVKENNPPGCHIFTVSAWDADAQENALVSYSLVERRVGERALSSYVSVHAESGKVYALQPLDHEELELLQFQVTARDAGVPPLGSNVTLQVFVLDENDNAPALLAPRAGGTGGAVSELVPWSVGVGHVVAKVRAVDADSGYNAWLSYELQPGTGGARIPFRVGLYTGEISTTRALDETDAPRHRLLVLVKDHGEPALTATATVLVSLVESGQAPKASSRALVGAVGPDAALVDVNVYLIIAICAVSSLLVLTLLLYTALRCSALPTEGACAPGKPTLVCSSAVGSWSYSQQRRPRVCSGEGPPKTDLMAFSPSLPDSRDREDQLQTTEESFAKVSV

SEQ ID NO: 18591 - protein, 475 aa, Homo sapiens
MTPGTQSPFFLLLLLTVLTVVTGSGHASSTPGGEKETSATQRSSVPSSTEKNAVSMTSSVLSSHSPGSGSSTTQGQDVTLAPATEPASGSAATWGQDVTSVPVTRPALGSTTPPAHDVTSAPDNKPAPGSTAPPAHGVTSAPDTRPAPGSTAPPAHGVTSAPDNRPALGSTAPPVHNVTSASGSASGSASTLVHNGTSARATTTPASKSTPFSIPSHHSDTPTTLASHSTKTDASSTHHSTVPPLTSSNHSTSPQLSTGVSFFFLSFHISNLQFNSSLEDPSTDYYQELQRDISEMFLQIYKQGGFLGLSNIKFRPGSVVVQLTLAFREGTINVHDVETQFNQYKTEAASRYNLTISDVSVSDVPFPFSAQSGAGVPGWGIALLVLVCVLVALAIVYLIALAVCQCRRKNYGQLDIFPARDTYHPMSEYPTYHTHGRYVPPSSTDRSPYEKVSAGNGGSSLSYTNPAVAATSANL

SEQ ID NO: 18592 - protein, 77 aa, Homo sapiens
MAGVLKKTTGLVGLAVCNTPHEEPDVKKLEDQLQGGQLEEVILQAEHELNLARKMREWKLWEPLVEEPPADQWKWPI

SEQ ID NO: 18593 - protein, 359 aa, Homo sapiens
MGLWALLPGWVSATLLLALAALPAALAANSSGRWWGIVNVASSTNLLTDSKSLQLVLEPSLQLLSRKQRRLIRQNPGILHSVSGGLQSAVRECKWQFRNRRWNCPTAPGPHLFGKIVNRGCRETAFIFAITSAGVTHSVARSCSEGSIESCTCDYRRRGPGGPDWHWGGCSDNIDFGRLFGREFVDSGEKGRDLRFLMNLHNNEAGRTTVFSEMRQECKCHGMSGSCTVRTCWMRLPTLRAVGDVLRDRFDGASRVLYGNRGSNRASRAELLRLEPDLVYFEKSPNFCTYSGRLGTAGTAGRACNSSSPALDGCELLCCGRGHRTRTQRVTERCNCTFHWCCHVSCRNCTHTRVLHECL

SEQ ID NO: 18594 - protein, 1122 aa, Homo sapiens
MSLQEMFRFPMGLLLGSVLLVASAPATLEPPGCSNKEQQVTVSHTYKIDVPKSALVQVDADPQPLSDDGASLLALGEAREEQNIIFRHNIRLQTPQKDCELAGSVQDLLARVKKLEEEMVEMKEQCSAQRCCQGVTDLSRHCSGHGTFSLETCSCHCEEGREGPACERLACPGACSGHGRCVDGRCLCHEPYVGADCGYPACPENCSGHGECVRGVCQCHEDFMSEDCSEKRCPGDCSGHGFCDTGECYCEEGFTGLDCAQVVTPQGLQLLKNTEDSLLVSWEPSSQVDHYLLSYYPLGKELSGKQIQVPKEQHSYEILGLLPGTKYIVTLRNVKNEVSSSPQHLLATTDLAVLGTAWVTDETENSLDVEWENPSTEVDYYKLRYGPMTGQEVAEVTVPKSSDPKSRYDITGLHPGTEYKITVVPMRGELEGKPILLNGRTEIDSPTNVVTDRVTEDTATVSWDPVQAVIDKYVVRYTSADGDTKEMAVHKDESSTVLTGLKPGEAYKVYVWAERGNQGSKKADTNALTEIDSPANLVTDRVTENTATISWDPVQATIDRYVVRYTSAKDGETREVPVGKEQSSTVLTGLRPGVEYTVHVWAQKGAQESKKADTKAQTDIDSPQNLVTDWVTENTATVSWDPVQATIDRYVVHYTSANGETREVPVGKEQSSTVLTGLRPGMEYTVHVWAQKGNQESKKADTKAQTEIDGPKNLVTDWVTENMATVSWDPVQATIDKYMVRYTSADGETREVPVGKEHSSTVLTGLRPGMEYMVHVWAQKGAQESKKADTKAQTELDPPRNLRPSAVTQSGGILTWTPPSAQIHGYILTYQFPDGTVKEMQLGREDQRFALQGLEQGATYPVSLVAFKGGRRSRNVSTTLSTVGARFPHPSDCSQVQQNSNAASGLYTIYLHGDASRPLQVYCDMETDGGGWIVFQRRNTGQLDFFKRWRSYVEGFGDPMKEFWLGLDKLHNLTTGTPARYEVRVDLQTANESAYAIYDFFQVASSKERYKLTVGKYRGTAGDALTYHNGWKFTTFDRDNDIALSNCALTHHGGWWYKNCHLANPNGRYGETKHSEGVNWEPWKGHEFSIPYVELKIRPHGYSREPVLGRKKRTLRGRLRTF

SEQ ID NO: 18595 - protein, 248 aa, Homo sapiens
MWSHLNRLLFWSIFSSVTCRKAVLDCEAMKTNEFPSPCLDSKTKVVMKGQNVSMFCSHKNKSLQITYSLFRRKTHLGTQDGKGEPAIFNLSITEAHESGPYKCKAQVTSCSKYSRDFSFTIVGGDSCPFCLKLLLPGLLLLLVVIILILAFWVLPKYKTRKAMRNNVPRDRGDTAMEVGIYANILEKQAKEESVPEVGSRPCVSTAQDEAKHSQELQYATPVFQEVAPREQEACDSYKSGYVYSELNF

SEQ ID NO: 18596 - protein, 47 aa, Homo sapiens
MKLCVTVLSLLVLVAAFCSLALSAPKASKSALTPVSPGSRSTCMTWN

SEQ ID NO: 18597 - protein, 542 aa, Homo sapiens [sequence omitted]

SEQ ID NO: 18598 - protein, 137 aa, Homo sapiens
MKVSVAALSCLMLVTALGSQARVTKDAETEFMMSKLPLENPVLLDMLWRRKIGPQMTLSHAAGFHATSADCCISYTPRSIPCSLLESYFETNSECSKPGVIFLTKKGRRFCANPSDKQVQVCMRMLKLDTRIKTRKN

SEQ ID NO: 18599 - protein, 1838 aa, Homo sapiens
MDVHTRWKARSALRPGAPLLPPLLLLLLWAPPPSRAAQPADLLKVLDFHNLPDGITKTTGFCATRRSSKGPDVAYRVTKDAQLSAPTKQLYPASAFPEDFSILTTVKAKKGSQAFLVSIYNEQGIQQIGLELGRSPVFLYEDHTGKPGPEDYPLFRGINLSDGKWHRIALSVHKKNVTLILDCKKKTTKFLDRSDHPMIDINGIIVFGTRILDEEVFEGDIQQLLFVSDHRAAYDYCEHYSPDCDTAVPDTPQSQDPNPDEYYTEGDGEGETYYYEYPYYEDPEDLGKEPTPSKKPVEAAKETTEVPEELTPTPTEAAPMPETSEGAGKEEDVGIGDYDYVPSEDYYTPSPYDDLTYGEGEENPDQPTDPGAGAEIPTSTADTSNSSNPAPPPGEGADDLEGEFTEETIRNLDENYYDPYYDPTSSPSEIGPGMPANQDTIYEGIGGPRGEKGQKGEPAIIEPGMLIEGPPGPEGPAGLPGPPGTMGPTGQVGDPGERGPPGRPGLPGADGLPGPPGTMLMLPFRFGGGGDAGSKGPMVSAQESQAQAILQQARLALRGPAGPMGLTGRPGPVGPPGSGGLKGEPGDVGPQGPRGVQGPPGPAGKPGRRGRAGSDGARGMPGQTGPKGDRGFDGLAGLPGEKGHRGDPGPSGPPGPPGDDGERGDDGEVGPRGLPGEPGPRGLLGPKGPPGPPGPPGVTGMDGQPGPKGNVGPQGEPGPPGQQGNPGAQGLPGPQGAIGPPGEKGPLGKPGLPGMPGADGPPGHPGKEGPPGEKGGQGPPGPQGPIGYPGPRGVKGADGIRGLKGTKGEKGEDGFPGFKGDMGIKGDRGEIGPPGPRGEDGPEGPKGRGGPNGDPGPLGPPGEKGKLGVPGLPGYPGRQGPKGSIGFPGFPGANGEKGGRGTPGKPGPRGQRGPTGPRGERGPRGITGKPGPKGNSGGDGPAGPPGERGPNGPQGPTGFPGPKGPPGPPGKDGLPGHPGQRGETGFQGKTGPPGPPGVVGPQGPTGETGPMGERGHPGPPGPPGEQGLPGLAGKEGTKGDPGPAGLPGKDGPPGLRGFPGDRGLPGPVGALGLKGNEGPPGPPGPAGSPGERGPAGAAGPIGIPGRPGPQGPPGPAGEKGAPGEKGPQGPAGRDGLQGPVGLPGPAGPVGPPGEDGDKGEIGEPGQKGSKGDKGEQGPPGPTGPQGPIGQPGPSGADGEPGPRGQQGLFGQKGDEGPRGFPGPPGPVGLQGLPGPPGEKGETGDVGQMGPPGPPGPRGPSGAPGADGPQGPPGGIGNPGAVGEKGEPGEAGEPGLPGEGGPPGPKGERGEKGESGPSGAAGPPGPKGPPGDDGPKGSPGPVGFPGDPGPPGEPGPAGQDGPPGDKGDDGEPGQTGSPGPTGEPGPSGPPGKRGPPGPAGPEGRQGEKGAKGEAGLEGPPGKTGPIGPQGAPGKPGPDGLRGIPGPVGEQGLPGSPGPDGPPGPMGPPGLPGLKGDSGPKGEKGHPGLIGLIGPPGEQGEKGDRGLPGPQGSSGPKGEQGITGPSGPIGPPGPPGLPGPPGPKGAKGSSGPTGPKGEAGHPGPPGPPGPPGEVIQPLPIQASRTRRNIDASQLLDDGNGENYVDYADGMEEIFGSLNSLKLEIEQMKRPLGTQQNPARTCKDLQLCHPDFPDGEYWVDPNQGCSRDSFKVYCNFTAGGSTCVFPDKKSEGSKMARWPKEQPSTWYSQYKRGSLLSYVDAEGNPVGVVQMTFLRLLSASAHQNVTYHCYQSVAWQDAATGSYDKALRFLGSNDEEMSYDNNPYIRALVDGCATKKGYQKTVLEIDTPKVEQVPIVDIMFNDFGEASQKFGFEVGPACFMG

SEQ ID NO: 18600 - protein, 237 aa, Homo sapiens
MNPLLILTFVAAALAAPFDDDDKIVGGYNCEENSVPYQVSLNSGYHFCGGSLINEQWVVSAGHCYKSRIQVRLGEHNINAAKIIRHPQYDRKTLNNDIMLIKLSSRAVINARVSTISLPTAPPATGTKCLISGWGNTASSGADYPDELQCLDAPVLSQAKCEASYPGKITSNMFCVGFLEGGKDSCQGDSGGPVVCNGQLQGVVSWGDGCAQKNKPGVYTKVYNYVKWIKNTIAANS

SEQ ID NO: 18601 - protein, 380 aa, Homo sapiens
MSAIMDVLAEANGTFALNLLKTLGKDNSKNVFFSPMSMSCALAMVYMGAKGNTAAQMAQILSFNKSGGGGDIHQGFQSLLTEVNKTGTQYLLRMANRLFGEKSCDFLSSFRDSCQKFYQAEMEELDFISAVEKSRKHINTWVAEKTEGKIAELLSPGSVDPLTRLVLVNAVYFRGNWDEQFDKENTEERLFKVSKNEEKPVQMMFKQSTFKKTYIGEIFTQILVLPYVGKELNMIIMLPDETTDLRTVEKELTYEKFVEWTRLDMMDEEEVEVSLPRFKLEESYDMESVLRNLGMTDAFELGKADFSGMSQTDLSLSKVVHKSFVEVNEEGTEAAAATAAIMMMRCARFVPRFCADHPFLFFIQHSKTNGILFCGRFSSP

SEQ ID NO: 18602 - protein, 113 aa, Homo sapiens
MKVSVAALSCLMLVAVLGSQAQFTNDAETELMMSKLPLENPVVLNSFHFAADCCTSYISQSIPCSLMKSYFETSSECSKPGVIFLTKKGRQVCAKPSGPGVQDCMKKLKPYSI

SEQ ID NO: 18603 - protein, 792 aa, Homo sapiens
MVIIGPRGPGSQRLLLSLLLLAAWEVGSGQLHYSVYEEAKHGTFVGRIAQDLGLELAELVPRLFRVASKRHGDLLEVNLQNGILFVNSRIDREKLCGRSAECSIHLEVIVDRPLQVFHVDVEVKDINDNPPVFREREQKVPVSESAPLDSHFPLEGASDADIGVNSLLTYALSLNENFELKIKTKKDKSILPELVLRKLLDREQTPKLNLLLMVIDGGKPELTGSVQIQITVLDVNDNGPAFDKPSYKVVLSENVQNDTRVIQLNASDPDEGLNGEISYGIKMILPVSEKCMFSINPDTGEIRIYGELDFEENNAYEIQVNAIDKGIPSMAGHSMVLVEVLDVNDNVPEVMVTSLSLPVQEDAQVGTVIALISVSDRDSGANGQVICSLTPHVPFKLVSTYKNYYSLVLDSALDRESVSAYELVVTARDGGSPSLWATARVSVEVADVNDNAPAFAQPEYTVFVKENNPPGCHIFTVSAWDADAQKNALVSYSLVERRVGEHALSSYVSVHAESGKVYALQPLDHEELELLQFQVSARDAGVPPLGSNVTLQVFVLDENDNAPALLATPAGSAGGAVSELVPRSVGAGHVVAKVRAVDADSGYNAWLSYELQPAAVGAHIPFHVGLYTGEISTTRILDEADAPRHRLLVLVKDHGEPALTSTATVLVSLVENGQAPKTSSRASVGAVDPEAALVDINVYLIIAICAVSSLLVLTLLLYTALRCSAPPTVSRCAPGKPTLVCSSAVGSWSYSQQRRQRVCSAESPPKTDLMAFSPSLQLSREDCLNPPSEVSY

SEQ ID NO: 18604 - protein, 820 aa, Homo sapiens
MIPARLHRDYKGLVLLGILLGTLWETGCTQIRYSVPEELEKGSRVGDISRDLGLEPRELAERGVRIIPRGRTQLFALNPRSGSLVTAGRIDREELCMGAIKCQLNLDILMEDKVKIYGVEVEVRDINDNAPYFRESELEIKISENAATEMRFPLPHAWDPDIGKNSLQSYELSPNTHFSLIVQNGADGSKYPELVLKRALDREEKAAHHLVLTASDGGDPVRTGTARIRVMVLDANDNAPAFAQPEYRASVPENLALGTQLLVVNATDPDEGVNAEVRYSFRYVDDKAAQVFKLDCNSGTISTIGELDHEESGFYQMEVQAMDNAGYSARAKVLITVLDVNDNAPEVVLTSLASSVPENSPRGTLIALLNVNDQDSEENGQVICFIQGNLPFKLEKSYGNYYSLVTDIVLDREQVPSYNITVTATDRGTPPLSTETHISLNVADTNDNPPVFPQASYSAYIPENNPRGVSLVSVTAHDPDCEENAQITYSLAENTIQGASLSSYVSINSDTGVLYALSSFDYEQFRDLQVKVMARDNGHPPLSSNVSLSLFVLDQNDNAPEILYPALPTDGSTGVELAPRSAEPGYLVTKVVAVDRDSGQNAWLSYRLLKASEPGLFSVGLHTGEVRTARALLDRDALKQSLVVAVQDHGQPPLSATVTLTVAVADSIPQVLADLGSLESPANSETSDLTLYLVVAVAAVSCVFLAFVILLLALRLRRWHKSRLLQASGGGLTGAPASHFVGVDGVQAFLQTYSHEVSLTTDSRKSHLIFPQPNYADMLVSQESFEKSEPLLLSGDSVFSKDSHGLIEVSLYQIFFLFFF

SEQ ID NO: 18605 - protein, 112 aa, Homo sapiens
MSIMSYNGGAVMAMKGKNCVAIAADRRFGIQAQMVTTDFQKIFPMGDRLYIGLAGLATDVQTVAQRLKFRLNLYELKEGRQIKPYTLMSMVANLLYEKRIRITCLKPSPKPC

SEQ ID NO: 18606 - protein, 585 aa, Homo sapiens
MALLSEGLDEVPAACLSPCGPPNPTELFSESRRLALEELVAGGPEAFAAFLRRERLARFLNPDEVHAILRAAERPGEEGAAAAAAAEDSFGSSHDCSSGTYFPEQSDLEPPLLELGWPAFYQGAYRGATRVETHFQPRGAGEGGPYGCKDALRQQLRSAREVIAVVMDVFTDIDIFRDLQEICRKQGVAVYILLDQALLSQFLDMCMDLKVHPEQEKLMTVRTITGNIYYARSGTKIIGKVHEKFTLIDGIRVATGSYSFTWTDGKLNSSNLVILSGQVVEHFDLEFRILYAQSKPISPKLLSHFQSSNKFDHLTNRKPQSKELTLGNLLRMRLARLSSTPRKADLDPEMPAEGKAERKPHDCESSTVSEEDYFSSHRDELQSRKAIDAATQTEPGEEMPGLSVSEVGTQTSITTACAGTQTAVITRIASSQTTIWSRSTTTQTDMDENILFPRGTQSTEGSPVSKMSVSRSSSLKSSSSVSSQGSVASSTGSPASIRTTDFHNPGYPKYLGTPHLELYLSDSLRNLNKERQFHFAGIRSRLNHMLAMLSRRTLFTENHLGLHSGNFSRVNLLAVRDVALYPSYQ

SEQ ID NO: 18607 - protein, 445 aa, Homo sapiens
MRPPGFRNFLLLASSLLFAGLSAVPQSFSPSLRSWPGAACRLSRAESERRCRAPGQPPGAALCHGRGRCDCGVCICHVTEPGMFFGPLCECHEWVCETYDGSTCAGTCHCGRCKCDNSDGSGLVYGKFCECDDRECIDDETEEICGGHGKCYCGNCYCKAGWHGDKCEFQCDITPWESKRRCTSPDGKICSNRGTCVCGECTCHDVDPTGDWGDIHGDTCECDERDCRAVYDRYSDDFCSGHGQCNCGRCDCKAGWYGKKCEHPQSCTLSAEESIRKCQGSSDLPCSGRGKCECGKCTCYPPGDRRVYGKTCECDDRRCEDLDGVVCGGHGTCSCGRCVCERGWFGKLCQHPRKCNMTEEQSKNLCESADGILCSGKGSCHCGKCICSAEEWYISGEFCDCDDRDCDKHDGLICTGNGICSCGNCECWDGWNGNACEIWLGSEYP

SEQ ID NO: 18608 - protein, 103 aa, Homo sapiens [sequence omitted]

SEQ ID NO: 18609 - protein, 859 aa, Homo sapiens
MKLKDTKSRPKQSSCGKFQTKGIKVVGKWKEVKIDPNMFADGQMDDLVCFEELTDYQLVSPAKNPSSLFSKEAPKRKAQAVSEEEEEEEGKSSSPKKKIKLKKSKNVATEGTSTQKEFEVKDPELEAQGDDMVCDDPEAGEMTSENLVQTAPKKKKNKGKKGLEPSQSTAAKVPKKAKTWIPEVHDQKADVSAWKDLFVPRPVLRALSFLGFSAPTPIQALTLAPAIRDKLDILGAAETGSGKTLAFAIPMIHAVLQWQKRNAAPPPSNTEAPPGETRTEAGAETRSPGKAEAESDALPDDTVIESEALPSDIAAEARAKTGGTVSDQALLFGDDDAGEGPSSLIREKPVPKQNENEEENLDKEQTGNLKQELDDKSATCKAYPKRPLLGLVLTPTRELAVQVKQHIDAVARFTGIKTAILVGGMSTQKQQRMLNRRPEIVVATPGRLWELIKEKHYHLRNLRQLRCLVVDEADRMVEKGHFAELSQLLEMLNDSQYNPKRQTLVFSATLTLVHQAPARILHKKHTKKMDKTAKLDLLMQKIGMRGKPKVIDLTRNEATVETLTETKIHCETDEKDFYLYYFLMQYPGRSLVFANSISCIKRLSGLLKVLDIMPLTLHACMHQKQRLRNLEQFARLEDCVLLATDVAARGLDIPKVQHVIHYQVPRTSEIYVHRSGRTARATNEGLSLMLIGPEDVINFKKIYKTLKKDEDIPLFPVQTKYMDVVKERIRLARQIEKSEYRNFQACLHNSWIEQAAAALEIELEEDMYKGGKADQQEERRRQKQMKVLKKELRHLLSQPLFTESQKTKYPTQSGKPPLLVSAPSKSESALSCLSKQKKKKTKKPKEPQPEQPQPSTSAN

SEQ ID NO: 18610 - protein, 811 aa, Homo sapiens
MKASSGRCGLVRWLQVLLPFLLSLFPGALPVQIRYSIPEELAKNSVVGNLAKDLGLSVRDLPARKLRVSAEKEYFTVNPESGDLLVSDRIDREQICGKQPLCVLDFDTVAENPLNIFYIAVIVQDINDNTPLFKQTKINLKIGESTKPGTTFPLDPALDSDVGPNSLQRYHLNDNEYFDLAEKQTPDGRKYPELILKHSLDREEHSLHQLVLTAVDGGDPPQSGTTQIRIKVTDANDNPPVFSQDVYRVTLREDVPPGFFVLQVTATDRDEGINAEITYSFHNVDEQVKHFFNLNEKTGEITTKDDLDFEIASSYTLSIEAKDPGDLAAHCSIQVEILDDNDCAPEVIVTSVSTPLPEDSPPGTVIALIKTRDRDSGENGEVYCQVLGNAKFILKSSSKNYYKLVTDGALDREEIPEYNLTITATDGGKPPLSSSIIVTLHISDVNDNAPVFQQTSYMVHVAENNPPGASIAQISASDPDLGPSGQVSYSIVASDLKPREILSYVSVSAQSGVVFAQRAFDHEQLRAFELTLQARDQGSPALSANVSLRVLVGDLNDNAPRVLYPALGPDGSALFDMVPRAAEPGYLVTKVVAVDADSGHNAWLSYHVLQASEPGLFSLGLRTGEVRTARALGDRDAARQRLLVAVRDGGQPPLSATATLHLIFADSLQEVLPDLSDRREPSDPQAKLQFYLVVALALISVLFFLAVILAISLRLRLSSRSDAWDCFQPGLSSKPGPGVLPNYSEGTLPYSYNLCVASQSAKTEFNFLNITPELVPAQDLVCDNASWEQNTNHGAAGVPFASDTILKVSFN

SEQ ID NO: 18611 - protein, 280 aa, Homo sapiens
MAALAPLPPLPAQFKSIQHHLRTAQEHDKRDPVVAYYCRLYAMQTGMKIDSKTPECRKFLSKLMDQLEALKKQLGDNEAITQEIVGCAHLENYALKMFLYADNEDRAGRFHKNMIKSFYTASLLIDVITVFGELTDENVKHRKYARWKATYIHNCLKNGETPQAGPVGIEEDNDIEENEDAGAASLPTQPTQPSSSSTYDPSNMPSGNYTGIQIPPGAHAPANTPAEVPHSTGDVRLTPEDFARAQKYCKYAGSALQYEDVSTAVQNLQKALKLLTTGRE

SEQ ID NO: 18612 - protein, 273 aa, Homo sapiens
MDYAAQKYVGTHDFRNLCKMDVANGVINFQRTILSAQVQLVGQSPGEGRWQEPFQLCQFEVTGQAFLYHQVRCMMAILFLIGQGMEKPEIIDELLNIEKNPQKPQYSMAVEFPLVLYDCKFENVKWIYDQEAQEFNITHLQQLWANHAVKTHMLYSMLQGLDTVPVPCGIGPKMDGMTEWGNVKPSVIKQTSAFVEGVKMRTYKPLMDRPKCQGLESRIQHFVRRGRIEHPHLFHEEETKAKRDCNDTLEEENTNLETPTKRVCVDTEIKSII

SEQ ID NO: 18613 - protein, 68 aa, Homo sapiens
MGGGDLNLKKSWHPQTLRNVEKVWKAEQKHEAERKKIEELQRELREERAREEMQRYAEDVGAVKSSWK

SEQ ID NO: 18614 - protein, 1448 aa, Homo sapiens
MPALRPALLWALLALWLCWAAPAHALQCRDGYEPCVNKGMCVTYHSGTGYCKCPEGFLGEYCQHRDPCEKNRCQNGGTCVAQAMLGKATCRCASGFTGEDCQYSTPHPCFVSRPCLNGGTCHMLSRDTYECTCQVGFTGKECQWTDACLSHLCANGSTCTTVANQFSCKCLTGFTGQKCETDVNECDIPGHCQHGGTCLNLPGSYQCQCLQGFTGQYCDRLYVPCAHSPCVNGGTCRQTGDFTFECNCLPVPDSTSSATNVSMVVSAGHWSSEKAEMNILEINETLRPQLPENKQQLRNLKEKCFLTQLAGFLANRQKKYKYEECKDLIKFMLRNERQFKEEKLAEQLKQAEELRQYKVLVHSQERELTQLKEKLREGRDASRSLNEHLQALLTPDEPDKSQGQDLQEQLAEGCRLAQHLVQKLSPENDEDEDEDVQVEEDEKVLESSAPREVQKTEESKVPEDSLEECAITCSNSHGPCDSNQPHKNIKITFEEDEVNSTLVVDRESSHDECQDALNILPVPGPTSSATNVSMVVSAGPLSGEKAAINILEINEKLRPQLAEKKQQFRNLKEKCFLTQLAGFLANQQNKYKYEECKDLIKSMLRNERQFKEEKLAEQLKQAEELRQYKVLVHAQERELTQLREKLREGRDASRSLNEHLQALLTPDEPDKSQGQDLQEQLAEGCRLAQHLVQKLSPENDNDDDEDVQVEVAEKVQKSSAPREMQKAEEKEVPEDSLEECAITCSNSHGPYDCNQPHRKTKITFEEDKVDSTLIGSSSHVEWEDAVHIIPENESDDEEEEEKGPVSPRNLQESEEEEVPQESWDEGYSTLSIPPEMLASYKSYSSTFHSLEEQQVCMAVDIGRHRWDQVKKEDHEATGPRLSRELLDEKGPEVLQDSLDRCYSTPSGCLELTDSCQPYRSAFYVLEQQRVGLAVDMDEIEKYQEVEEDQDPSCPRLSRELLDEKEPEVLQDSLGRCYSTPSGYLELPDLGQPYSSAVYSLEEQYLGLALDVDRIKKDQEEEEDQGPPCPRLSRELLEVVEPEVLQDSLDRCYSTPSSCLEQPDSCQPYGSSFYALEEKHVGFSLDVGEIEKKGKGKKRRGRRSKKERRRGRKEGEEDQNPPCPRLSRELLDEKGPEVLQDSLDRCYSTPSGCLELTDSCQPYRSAFYILEQQRVGLAVDMDEIEKYQEVEEDQDPSCPRLSRELLDEKEPEVLQDSLGRCYSTPSGYLELPDLGQPYSSAVYSLEEQYLGLALDVDRIKKDQEEEEDQGPPCPRLSRELLEVVEPEVLQDSLDRCYSTPSSCLEQPDSCQPYGSSFYALEEKHVGFSLDVGEIEKKGKGKKRRGRRSKKERRRGRKEGEEDQNPPCPRLNSMLMEVEEPEVLQDSLDICYSTPSMYFELPDSFQHYRSVFYSFEEEHISFALYVDNRFFTLTVTSLHLVFQMGVIFPQ

SEQ ID NO: 18615 - protein, 92 aa, Homo sapiens
MRNWLVLLCPCVLGAALHLWLRLRSPPPACASGAGPADQLALFPQWKSTHYDVVVGVLSARNNHELRNVIRSTWMRHLLQHPTLSQRFESGN

SEQ ID NO: 18616 - protein, 353 aa, Homo sapiens
MALLSTVRGATWGRLVTRHFSHAARHGERPGGEELSRLLLDDLVPTSRLELLFGMTPCLLALQAARRSVARLLLQAGKAGLQGKRAELLRMAEARDIPVLRPRRQKLDTMCRYQVHQGVCMEVSPLRPRPWREAGEASPGDDPQQLWLVLDGIQDPRNFGAVLRSAHFLGVDKVITSRRNSCPLTPVVSKSSAGAMEVMDVFSTDDLTGFLQTKAQQGWLVAGTVGCPSTEDPQSSEIPIMSCLEFLWERPTLLVLGNEGSGLSQEVQASCQLLLTILPRRQLPPGLESLNVSVAAGILLHSICSQRKGFPTEGERRQLLQDPQEPSARSEGLSMAQHPGLSSGPEKERQNEG

SEQ ID NO: 18617 - protein, 987 aa, Homo sapiens
MVCSPVTVRIAPPDRRFSRSAIPEQIISSTLSSPSSNAPDPCAKETVLSALKEKKKKRTVEEEDQIFLDGQENKRRRHDSSGSGHSAFEPLVASGVPASFVPKPGSLKRGLNSQSSDDHLNKRSRSSSMSSLTGAYTSGIPSSSRNAITSSYSSTRGISQLWKRNGPSSSPFSSPASSRSQTPERPAKKIREEELCHHSSSSTPLAADKESQGEKAADTTPRKKQNSNSQSTPGSSGQRKRKVQLLPSRRGEQLTLPPPPQLGYSITAEDLDLEKKASLQWFNQALEDKSDAASNSVTETPPTTQPSFTFTLPAAATASPPTSLLAPSTNPLLESLKKMQTPPSLPPCPESAGAATTEALSPPKTPSLLPPLGLSQSGPPGLLPSPSFDSKPPTTLLGLIPAPSMVPATDTKAPPTLQAETATKPQATSAPSPAPKQSFLFGTQNTSPSSPAAPAASSASPMFKPIFTAPPKSEKEGLTPPGPSVSATAPSSSSLPTTTSTTAPTFQPVFSSMGPPASVPLPAPFFKQTTTPATAPTTTAPLFTGLASATSAVAPITSASPSTDSASKPAFGFGINSVSSSSVSTTTSTATAASQPFLFGAPQASAASFTPAMGSIFQFGKPPALPTTTTVTTFSQSLPTAVPTATSSSAADFSGFGSTLATSAPATSSQPTLTFSNTSTPTFNIPFGSSAKSPLPSYPGANPQPAFGAAEGQPPGAAKPALTPSFGSSFTFGNSAAPAPATAPTPAPASTIKIVPAHVPTPIQPTFGGATHSAFGLKATASAFGAPASSQPAFGGSTAVFSFGAATSSGFGATTQTASSGSSSSVFGSTTPSPFTFGGSAAPAGSGSFGINVATPGSSATTGAFSFGAGQSGSTATSTPFTGGLGQNALGTTGQSTPFAFNVGSTTESKPVFGGTATPTFGQNTPAPGVGTSGSSLSFGASSAPAQGFVGVGPFGSAAPSFSIGAGSKTPGARQRLQARRQHTRKK

SEQ ID NO: 18618 - protein, 126 aa, Homo sapiens
MPEPAKSAPAPKKGSKKAVTKAQKKDGRKRKRSRKESYSVYVYKVLKQVHPDTGISSKAMGIMNSFVNDIFERIAGEASRLPHYNKRSTITSREIQTAVRLLLPGELAKHAVSEGTKAVTKYTSAK

SEQ ID NO: 18619 - protein, 721 aa, Homo sapiens
MGDAESCLLRQQTREVRKKPLINYRFLRAAANAEPRGPQAQRTSCAKRECGAFTQRVRERAGRQPPAGGTRHSRAERGRRRSHPRSRTRTTALLRSSQTKEMATKEKLQCLKDFHKDILKPSPGKSPGTRPEDEAEGKPPQREKWSSKIDFVLSVAGGFVGLGNVWRFPYLCYKNGGGAFLIPYFIFLFGSGLPVFFLEIIIGQYTSEGGITCWEKICPLFSGIGYASVVIVSLLNVYYIVILAWATYYLFQSFQKELPWAHCNHSWNTPHCMEDTMRKNKSVWITISSTNFTSPVIEFWERNVLSLSPGIDHPGSLKWDLALCLLLVWLVCFFCIWKGVRSTGKVVYFTATFPFAMLLVLLVRGLTLPGAGAGIKFYLYPDITRLEDPQVWIDAGTQIFFSYAICLGAMTSLGSYNKYKYNSYRDCMLLGCLNSGTSFVSGFAIFSILGFMAQEQGVDIADVAESGPGLAFIAYPKAVTMMPLPTFWSILFFIMLLLLGLDSQFVEVEGQITSLVDLYPSFLRKGYRREIFIAFVCSISYLLGLTMVTEGGMYVFQLFDYYAASGVCLLWVAFFECFVIAWIYGGDNLYDGIEDMIGYRPGPWMKYSWAVITPVLCVGCFIFSLVKYVPLTYNKTYVYPNWAIGLGWSLALSSMLCVPLVIVIRLCQTEGPFLVRVKYLLTPREPNRWAVEREGATPYNSRTVMNGALVKPTHIIVETMM

SEQ ID NO: 18620 - protein, 404 aa, Homo sapiens
MKMEEAVGKVEELIESEAPPKASEQETAKEEDGSVELESQVQKDGVADSTVISSMPCLLMELRRDSSESQLASTESDKPTTGRVYESDSSNHCMLSPSSSGHLADSDTLSSAEENEPSQAETAVEGDPSGVSGATVGRKSRRSRSESETSTMAAKKNRQSSDKQNGRVAKVKGHRSQKHKERIRLLRQKREAAARKKYNLLQDSSTSDSDLTCDSSTSSSDDDEEVSGSSKTITAEIPDGPPVVAHYDMSDTNSDPEVVNVDNLLAAAVVQEHSNSVGGQDTGATWRTSGLLEELNAEAGHLDPGFLASDKTSAGNAPLNEEINIASSDSEVEIVGVQEHARCVHPRGGVIQSVSSWKHGSGTQYVSTRQTQSWTAVTPQQTWASPAEVVDLTLDEDSRRKYLL

SEQ ID NO: 18621 - protein, 200 aa, Homo sapiens
MKLDMTGDCMPVLVLMAAVLTVTGAVPVARLRGALPDARGCHIAQFKSLSPQELQAFKRAKDALEESLLLKDCKCRSRLFPRTWDLRQLQVRERPVALEAELALTLKVLEATADTDPALGDVLDQPLHTLHHILSQLRACIQPQPTAGPRTRGRLHHWLHRLQEAPKKESPGCLEASVTFNLFRLLTRDLNCVASGDLCV

SEQ ID NO: 18622 - protein, 233 aa, Homo sapiens
MASRGVVGIFFLSAVPLVCLELRRGIPDIVYLKEEEEKNEKRQKLVRKKQQEAQGEKASRYIENVLKPHQEMKLRKLEERFYQMTGEAWKLSSGHKLGGDEGTSQTSFETSNREAAKSQNLPKPLTEFPSPAEQPTCKEIPDLPEEPSQTAEEVVTVALRCPSGNVLRRRFLKSYSSQVLFDWMTRIGYHISLYSLSTSFPRRPLAVEGGQSLEDIGITVDTVLILEEKEQTN

SEQ ID NO: 18623 - protein, 165 aa, Homo sapiens
MLMPKKNRIAIYELLFKEGVMVAKKDVHMPKHPELADKNVPNLHVMKAMQSLKSRGYVKEQFAWRHFYWYLTNEGIQYLRDYLHLPPEIVPATLRRSRPETGRPRPKGLEGERPARLTRGEADRDTYRRSAVPPGADKKAEAGAGSATEFQFRGGFGRGRGQPPQ

SEQ ID NO: 18624 - protein, 226 aa, Homo sapiens
MWFQWSEQRDYIDTTWNCGYLLASSFVFLNLLGQLTGCVLVLSRNFVQYACFGLFGIIALQTIAYSILWDLKFLMRNLALGGGLLLLLAESRSEGKSMFAGVPTMRESSPKQYMQLGGRVLLVLMFMTLLHFDASFFSIVQNIVGTALMILVAIGFKTKLAALTLVVWLFAINVYFNAFWTIPVYKPMHDFLKYDFFQTMSVIGGLLLVVALGPGGVSMDEKKKEW

SEQ ID NO: 18625 - protein, 415 aa, Homo sapiens
MIQNLMREVKMDTIFLWSLLLLFFGSQASRCSAQKNTEFAVDLYQEVSLSHKDNIIFSPLGITLVLEMVQLGAKGKAQQQIRQTLKQQETSAGEEFFVLKSFFSAISEKKQEFTFNLANALYLQEGFTVKEQYLHGNKEFFQSAIKLVDFQDAKACAEMISTWVERKTDGKIKDMFSGEEFGPLTRLVLVNAIYFKGDWKQKFRKEDTQLINFTKKNGSTVKIPMMKALLRTKYGYFSESSLNYQVLELSYKGDEFSLIIILPAEGMDIEEVEKLITAQQILKWLSEMQEEEVEISLPRFKVEQKVDFKDVLYSLNITEIFSGGCDLSGITDSSEVYVSQVTQKVFFEINEDGSEAATSTGIHIPVIMSLAQSQFIANHPFLFIMKHNPTESILFMGRVTNPDTQEIKGRDLDSL

SEQ ID NO: 18626 - protein, 479 aa, Homo sapiens
MATALVSAHSLAPLNLKKEGLRVVREDHYSTWEQGFKLQGNSKGLGQEPLCKQFRQLRYEETTGPREALSRLRELCQQWLQPETHTKEQILELLVLEQFLIILPKELQARVQEHHPESREDVVVVLEDLQLDLGETGQQVDPDQPKKQKILVEEMAPLKGVQEQQVRHECEVTKPEKEKGEETRIENGKLIVVTDSCGRVESSGKISEPMEAHNEGSNLERHQAKPKEKIEYKCSEREQRFIQHLDLIEHASTHTGKKLCESDVCQSSSLTGHKKVLSREKGHQCHECGKAFQRSSHLVRHQKIHLGEKPYQCNECGKVFSQNAGLLEHLRIHTGEKPYLCIHCGKNFRRSSHLNRHQRIHSQEEPCECKECGKTFSQALLLTHHQRIHSHSKSHQCNECGKAFSLTSDLIRHHRIHTGEKPFKCNICQKAFRLNSHLAQHVRIHNEEKPYQCSECGEAFRQRSGLFQHQRYHHKDKLA

SEQ ID NO: 18627 - protein, 702 aa, Homo sapiens
MRLPDLRPWTSLLLVDAALLWLLQGPLGTLLPQGLPGLWLEGTLRLGGLWGLLKLRGLLGFVGTLLLPLCLATPLTVSLRALVAGASRAPPARVASAPWSWLLVGYGAAGLSWSLWAVLSPPGAQEKEQDQVNNKVLMWRLLKLSRPDLPLLVAAFFFLVLAVLGETLIPHYSGRVIDILGGDFDPHAFASAIFFMCLFSFGSSLSAGCRGGCFTYTMSRINLRIREQLFSSLLRQDLGFFQETKTGELNSRLSSDTTLMSNWLPLNANVLLRSLVKVVGLYGFMLSISPRLTLLSLLHMPFTIAAEKVYNTRHQEVLREIQDAVARAGQVVREAVGGLQTVRSFGAEEHEVCRYKEALEQCRQLYWRRDLERALYLLVRRVLHLGVQMLMLSCGLQQMQDGELTQGSLLSFMIYQESVGSYVQTLVYIYGDMLSNVGAAEKVFSYMDRQPNLPSPGTLAPTTLQGVVKFQDVSFAYPNRPDRPVLKGLTFTLRPGEVTALVGPNGSGKSTVAALLQNLYQPTGGQVLLDEKPISQYEHCYLHSQVVSVGQEPVLFSGSVRNNIAYGLQSCEDDKVMAAAQAAHADDFIQEMEHGIYTDVGEKGSQLAAGQKQRLAIARALVRDPRVLILDEATSALDVQCEQALQDWNSRGDRTVLVIAHRLQTVQRAHQILVLQEGKLQKLAQLEGQDLYSRLVQQRLMD

SEQ ID NO: 18628 - protein, 61 aa, Homo sapiens
MAGPGWTLLLLLLLLLLLGSMAGYGPQKKLNLSHKPRAPSTDLPEPRQSGFVPETSQETQV

SEQ ID NO: 18629 - protein, 683 aa, Homo sapiens
MFSLSSTVQPQVTVPLSHLINAFHTPKNTSVSLSGVSVSQNQHRDVVPEHEAPSSEPSLNLRDLGLSELKIGQIDQLVENLLPGFCKGKNISSHWHTSHVSAQSFFENKYVFIQSRGFKTLKSRTRRLQSTSERLAETQNIAPSFVKGFLLRDRGSDVESLDKLMKTKNIPEAHQDAFKTGFAEGFLKAQALTQKTNDSLRRTRLILFVLLLFGIYGLLKNPFLSVRFRTTTGLDSAVDPVQMKNVTFEHVKGVEEAKQELQEVVEFLKNPQKFTILGGKLPKGILLVGPPGTGKTLLARAVAGEADVPFYYASGSEFDEMFVGVGASRIRNLFREAKANAPCVIFIDELDSVGGKRIESPMHPYSRQTINQLLAEMDGFKPNEGVIIIGATNFPEALDNALIRPGRFDMQVTVPRPDVKGRTEILKWYLNKIKFDQSVDPEIIARGTVGFSGAELENLVNQAALKAAVDGKEMVTMKELEFSKDKILMGPERRSVEIDNKNKTITAYHESGHAIIAYYTKDAMPINKATIMPRGPTLGHVSLLPENDRWNETRAQLLAQMDVSMGGRVAEELIFGTDHITTGASSDFDNATKIAKRMVTKFGMSEKLGVMTYSDTGKLSPETQSAIEQEIRILLRDSYERAKHILKTHAKEHKNLAEALLTYETLDAKEIQIVLEGKKLEVR

SEQ ID NO: 18630 - protein, 221 aa, Homo sapiens
MLKSNGERRSRNALPAVYARKMAASQQQASAASSAAGVSGPSSAGGPGPQQQPQPPAQLVGPAQSGLLQQQQQDFDPVQRYKMLIPQLKESLQTLMKVAAQNLIQNTNIDNGQKSSDGPIQRFDKCLEEFYALCDQLELCLRLAHECLSQSCDSAKHSPTLVPTATKPDAVQPDSLPYPQYLAVIKAQISCAKDIHTALLDCANKVTGKTPAPPAGPGGTL

SEQ ID NO: 18631 - protein, 117 aa, Homo sapiens
MDWNWRILFLVVIAAGAQSQVQLVQSGAEVKKPGASVKVSCKASGYTITSYCMHWVHQVHAQGLEWMGLVCPSDGSTSYAQKFQARVTITRDTSMSTAYMELSSLRSEDTAMYYCVR

SEQ ID NO: 18632 - protein, 3118 aa, Homo sapiens
MPGAAGVLLLLLLSGGLGGVQAQRPQQQRQSQAHQQRGLFPAVLNLASNALITTNATCGEKGPEMYCKLVEHVPGQPVRNPQCRICNQNSSNPNQRHPITNAIDGKNTWWQSPSIKNGIEYHYVTITLDLQQVFQIAYVIVKAANSPRPGNWILERSLDDVEYKPWQYHAVTDTECLTLYNIYPRTGPPSYAKDDEVICTSFYSKIHPLENGEIHISLINGRPSADDPSPELLEFTSARYIRLRFQRIRTLNADLMMFAHKDPREIDPIVTRRYYYSVKDISVGGMCICYGHARACPLDPATNKSRCECEHNTCGDSCDQCCPGFHQKPWRAGTFLTKTECEACNCHGKAEECYYDENVARRNLSLNIRGKYIGGGVCINCTQNTAGINCETCTDGFFRPKGVSPNYPRPCQPCHCDPIGSLNEVCVKDEKHARRGLAPGSCHCKTGFGGVSCDRCARGYTGYPDCKACNCSGLGSKNEDPCFGPCICKENVEGGDCSRCKSGFFNLQEDNWKGCDECFCSGVSNRCQSSYWTYGKIQDMSGWYLTDLPGRIRVAPQQDDLDSPQQISISNAEARQALPHSYYWSAPAPYLGNKLPAVGGQLTFTISYDLEEEEEDTERVLQLMIILEGNDLSISTAQDEVYLHPSEEHTNVLLLKEESFTIHGTHFPVRRKEFMTVLANLKRVLLQITYSFGMDAIFRLSSVNLESAVSYPTDGSIAAAVEVCQCPPGYTGSSCESCWPRHRRVNGTIFGGICEPCQCFGHAESCDDVTGECLNCKDHTGGPYCDKCLPGFYGEPTKGTSEDCQPCACPLNIPSNNFSPTCHLDRSLGLICDGCPVGYTGPRCERCAEGYFGQPSVPGGSCQPCQCNDNLDFSIPGSCDSLSGSCLICKPGTTGRYCELCADGYFGDAVDAKNCQPCRCNAGGSFSEVCHSQTGQCECRANVQGQRCDKCKAGTFGLQSARGCVPCNCNSFGSKSFDCEESGQCWCQPGVTGKKCDRCAHGYFNFQEGGCTACECSHLGNNCDPKTGRCICPPNTIGEKCSKCAPNTWGHSITTGCKACNCSTVGSLDFQCNVNTGQCNCHPKFSGAKCTECSRGHWNYPRCNLCDCFLPGTDATTCDSETKKCSCSDQTGQCTCKVNVEGIHCDRCRPGKFGLDAKNPLGCSSCYCFGTTTQCSEAKGLIRTWVTLKAEQTILPLVDEALQHTTTKGIVFQHPEIVAHMDLMREDLHLEPFYWKLPEQFEGKKLMAYGGKLKYAIYFEAREETGFSTYNPQVIIRGGTPTHARIIVRHMAAPLIGQLTRHEIEMTEKEWKYYGDDPRVHRTVTREDFLDILYDIHYILIKATYGNFMRQSRISEISMEVAEQGRGTTMTPPADLIEKCDCPLGYSGLSCEACLPGFYRLRSQPGGRTPGPTLGTCVPCQCNGHSSLCDPETSICQNCQHHTAGDFCERCALGYYGIVKGLPNDCQQCACPLISSSNNFSPSCVAEGLDDYRCTACPRGYEGQYCERCAPGYTGSPGNPGGSCQECECDPYGSLPVPCDPVTGFCTCRPGATGRKCDGCKHWHAREGWECVFCGDECTGLLLGDLARLEQMVMSINLTGPLPAPYKMLYGLENMTQELKHLLSPQRAPERLIQLAEGNLNTLVTEMNELLTRATKVTADGEQTGQDAERTNTRAKSLGEFIKELARDAEAVNEKAIKLNETLGTRDEAFERNLEGLQKEIDQMIKELRRKNLETQKEIAEDELVAAEALLKKVKKLFGESRGENEEMEKDLREKLADYKNKVDDAWDLLREATDKIREANRLFAVNQKNMTALEKKKEAVESGKRQIENTLKEGNDILDEANRLADEINSIIDYVEDIQTKLPPMSEELNDKIDDLSQEIKDRKLAEKVSQAESHAAQLNDSSAVLDGILDEAKNISFNATAAFKAYSNIKDYIDEAEKVAKEAKDLAHEATKLATGPRGLLKEDAKGCLQKSFRILNEAKKLANDVKENEDHLNGLKTRIENADARNGDLLRTLNDTLGKLSAIPNDTAAKLQAVKDKARQANDTAKDVLAQITELHQNLDGLKKNYNKLADSVAKTNAVVKDPSKNNAVADADATVKNLEQEADRLIDKLKPIKELEDNLKKNISEIKELINQARKQANSIKVSVSSGGDCIRTYKPEIKKGSYNNIVVNVKTAVADNLLFYLGSAKFIDFLAIEMRKGKVSFLWDVGSGVGRVEYPDLTIDDSYWYRIVASRTGRNGTISVRALDGPKASIVPSTHHSTSPPGYTILDVDANAMLFVGGLTGKLKKADAVRVITFTGCMGETYFDNKPIGLWNFREKEGDCKGCTVSPQVEDSEGTIQFDGEGYALVSRPIRWYPNISTVMFKFRTFSSSALLMYLATRDLRDFMSVELTDGHIKVSYDLGSGMASVVSNQNHNDGKWKSFTLSRIQKQANISIVDIDTNQEENIATSSSGNNFGLDLKADDKIYFGGLPTLRNLRPEVNLKKYSGCLKDIEISRTPYNILSSPDYVGVTKGCSLENVYTVSFPKPGFVELSPVPIDVGTEINLSFSTKNESGIILLGSGGTPAPPRRKRRQTGQAYYAILLNRGRLEVHLSTGARTMRKIVIRPEPNLFHDGREHSVHVERTRGIFTVQVDENRRYMQNLTVEQPIEVKKLFVGGAPPEFQPSPLRNIPPFEGCIWNLVINSVPMDFARPVSFKNADIGRCAHQKLREDEDGAAPAEIVIQPEPVPTPAFPTPTPVLTHGPCAAESEPALLIGSKQFGLSRNSHIAIAFDDTKVKNRLTIELEVRTEAESGLLFYMARINHADFATVQLRNGLPYFSYDLGSGDTHTMIPTKINDGQWHKIKIMRSKQEGILYVDGASNRTISPKKADILDVVGMLYVGGLPINYTTRRIGPVTYSIDGCVRNLHMAEAPADLEQPTSSFHVGTCFANAQRGTYFDGTGFAKAVGGFKVGLDLLVEFEFRTTTTTGVLLGISSQKMDGMGIEMIDEKLMFHVDNGAGRFTAVYDAGVPGHLCDGQWHKVTANKIKHRIELTVDGNQVEAQSPNPASTSADTNDPVFVGGFPDDLKQFGLTTSIPFRGCIRSLKLTKGTGKPLEVNFAKALELRGVQPVSCPAN

SEQ ID NO: 18633 - protein, 100 aa, Homo sapiens
MAKNKLRGPKSRNVFHIASQKNFKAKNKAKPVTTNLKKINIMNEEKVNRVNKAFVNVQKELAHFAKSISLEPLQKELIPQQRHESKPVNVDEATRLMALL

SEQ ID NO: 18634 - protein, 271 aa, Homo sapiens
MITGVFSMRLWTPVGVLTSLAYCLHQRRVALAELQEADGQCPVDRSLLKLKMVQVVFRHGARSPLKPLPLEEQVEWNPQLLEVPPQTQFDYTVTNLAGGPKPYSPYDSQYHETTLKGGMFAGQLTKVGMQQMFALGERLRKNYVEDIPFLSPTFNPQEVFIRSTNIFRNLESTRCLLAGLFQCQKEGPIIIHTDEADSEVLYPNYQSCWSLRQRTRGRRQTASLQPGISEDLKKVKDRMGIDSSDKVDFFILLDNVAAEQEKMGSCRFHGS

SEQ ID NO: 18635 - protein, 59 aa, Homo sapiens
MVLLRVLILLLSWAAGMGAPARWRIPKSSPPPRPAAQTRGKLCCLQLGSCIVLYPARRS

SEQ ID NO: 18636 - protein, 84 aa, Homo sapiens
MTPLLTLILVVLMGLPLAQALDCHVCAYNGDNCFNPMRCPAMVAYCMTTRTYYTPTRMKVSKSCVPRCFETVYDGYSKHASTTS

SEQ ID NO: 18637 - protein, 107 aa, Homo sapiens
MTNCLSFRNGRGLALLCALLGTLCETGSGQIRYSVSEELDKGSFVGNIANDLGLEPRELAERGVRIVSRGRTQLFSLNPQSGSLVTAERIDREELCAQIPLCLRNWK

SEQ ID NO: 18638 - protein, 491 aa, Homo sapiens
MGPADSWGHHWMGILLSASLCTVWSPPAAAQLTLNANPLDATQSEDVVLPVFGTPRTPQIHGRSRELAKPSIAVSPGTAIEQKDMVTFYCTTKDVNITIHWVSNNLSIVFHERMQLSKDGKILTILIVQREDSGTYQCEARDALLSQRSDPIFLDVKYGPDPVEIKLESGVASGEVVEVMEGSSMTFLAETKSHPPCAYTWFLLDSILSHTTRTFTIHAVSREHEGLYRCLVSNSATHLSSLGTLKVRVLETLTMPQVVPSSLNLVENARSVDLTCQTVNQSVNVQWFLSGQPLLPSEHLQLSADNRTLIIHGLQRNDTGPYACEVWNWGSRARSEPLELTINCPQSSSLSSGAIAGIVIGILAVIAVASELGYFLCIRNARRPSRKTTEDPSHETSQPIPKEEHPTEPSSESLSPEYRNISQLQGRIRVELTKLPSASRRGNSFSPWKPPPKPLMPPLRLVSTVPKNMESIYEELVNPEPNTYIQINPSV

SEQ ID NO: 18639 - protein, 487 aa, Homo sapiens
MFSCFCFSLQDNSFSSTTVTECDEDPVSLHEDQTDCSSLRDENNKENYPDAGALVEEHAPPSWEPQQQNVEATVLVDSVLRPSMGNFKSRKPKSIFKAESGRSHGESQETEHVVSSQSECQVRAGTPAHESPQNNAFKCQETVRLQPRIDQRTAISPKDAFETRQDLNEEEAAQVHGVKDPAPASTQSVLADGTDSADPSPVHKDGQNEADSAPEDLHSVGTSRLLYHITDGDNPLLSPRCSIFSQSQRFNLDPESAPSPPSTQQFMMPRSSSRCSCGDGKEPQTITQLTKHIQSLKRKIRKFEEKFEQEKKYRVTKQDKNLIKPLYDRYRIIKQILSTPSLIPTIQEEEDSDEDRPQGSQQPSLADPASHLPVGDHLTYSNETEPVRALLPDEKKEVKPPALSMSNLHEATMPVLLDHLRETRADKKRLRKALREFEEQFFKQTGRSPQKEDRIPMADEYYEYKHIKAKLRLLEVLISKQDVAKTI

SEQ ID NO: 18640 - protein, 178 aa, Homo sapiens
MDMAWQMMQLLLLALVTAAGSAQPRSARARTDLLNVCMNAKHHKTQPSPEDELYGQCSPWKKNACCTASTSQELHKDTSRLYNFNWDHCGKMEPTCKRHFIQDSCLYECSPNLGPWIRQVNQSWRKERILNVPLCKEDCERWWEDCRTSYTCKSNWHKGWNWTSGINECPAGALCSTF

SEQ ID NO: 18641 - protein, 203 aa, Homo sapiens
MGDEKDSWKVKTLDEILQEKKRRKEQEEKAEIKRLKNSDDRDSKRDSLEEGELRDHRMEITIRNSPYRREDSMEDRGEEDDSLAIKPPQQMSRKEKAHHRKDEKRKEKRRHRSHSAEGGKHARVKEKEREHERRKRHREEQDKARREWERQKRREMAREHSRRESKRRENGRKGPAVRLTGHQRQREEDQLGRVLVSGIRLRF

SEQ ID NO: 18642 - protein, 221 aa, Homo sapiens
MAAAGARPVELGFAESAPAWRLRSEQFPSKVGGRPAWLGAAGLPGPQALACELCGRPLSFLLQVYAPLPGRPDAFHRCIFLFCCREQPCCAGLRVFRNQLPRKNDFYSYEPPSENPPPETGESVCLQLKSGAHLCRVCGCLGPKTCSRCHKAYYCSKEHQTLDWRLGHKQACAQPDHLDHIIPDHNFLFPEFEIVIETEDEIMPEVVEKEDYSEIIGSMGI

SEQ ID NO: 18643 - protein, 1491 aa, Homo sapiens
MNGVAFCLVGIPPRPEPRPPQLPLGPRDGCSPRRPFPWQGPRTLLLYKSPQDGFGFTLRHFIVYPPESAVHCSLKEEENGGRGGGPSPRYRLEPMDTIFVKNVKEDGPAHRAGLRTGDRLVKVNGESVIGKTYSQVIALIQNSDDTLELSIMPKDEDILQLAYSQDAYLKGNEPYSGEARSIPEPPPICYPRKTYAPPARASTRATMVPEPTSALPSDPRSPAAWSDPGLRVPPAARAHLDNSSLGMSQPRPSPGAFPHLSSEPRTPRAFPEPGSRVPPSRLECQQALSHWLSNQVPRRAGERRCPAMAPRARSASQDRLEEVAAPRPWPCSTSQDALSQLGQEGWHRARSDDYLSRATRSAEALGPGALVSPRFERCGWASQRSSARTPACPTRDLPGPQAPPPSGLQGLDDLGYIGYRSYSPSFQRRTGLLHALSFRDSPFGGLPTFNLAQSPASFPPEASEPPRVVRPEPSTRALEPPAEDRGDEVVLRQKPPTGRKVQLTPARQMNLGFGDESPEPEASGRGERLGRKVAPLATTEDSLASIPFIDEPTSPSIDLQAKHVPASAVVSSAMNSAPVLGTSPSSPTFTFTLGRHYSQDCSSIKAGRRSSYLLAITTERSKSCDDGLNTFRDEGRVLRRLPNRIPSLRMLRSFFTDGSLDSWGTSEDADAPSKRHSTSDLSDATFSDIRREGWLYYKQILTKKGKKAGSGLRQWKRVYAALRARSLSLSKERREPGPAAAGAAAAGAGEDEAAPVCIGSCLVDISYSETKRRHVFRLTTADFCEYLFQAEDRDDMLGWIRAIRENSRAEGEDPGCANQALISKKLNDYRKVSHSSGPKADSSPKGSRGLGGLKSEFLKQSAARGLRTQDLPAGSKDDSAAAPKTPWGINIIKKNKKAAPRAFGVRLEECQPATENQRVPLIVAACCRIVEARGLESTGIYRVPGNNAVVSSLQEQLNRGPGDINLQDERWQDLNVISSLLKSFFRKLPEPLFTDDKYNDFIEANRIEDARERMRTLRKLIRDLPGHYYETLKFLVGHLKTIADHSEKNKMEPRNLALVFGPTLVRTSEDNMTDMVTHMPDRYKIVETLIQHSDWFFSDEEDKGERTPVGDKEPQAVPNIEYLLPNIGRTVPPGDPGSDSTTCSSAKSKGSWAPKKEPYAREMLAISFISAVNRKRKKRREARGLGSSTDDDSEQEAHKPGAGATAPGTQERPQGPLPGAVAPEAPGRLSPPAAPEERPAADTRSIVSGYSTLSTMDRSVCSGASGRRAGAGDEADDERSELSHVETDTEGAAGAGPGGRLTRRPSFSSHHLMPCDTLARRRLARGRPDGEGAGRGGPRAPEPPGSASSSSQESLRPPAAALASRPSRMEALRLRLRGTADDMLAVRLRRPLSPETRRRRSSWRRHTVVVQSPLTDLNFNEWKELGGGGPPEPAGARAHSDNKDSGLSSLESTKARAPSSAASQPPAPGDTGSLQSQPPRRSAASRLHQCL

SEQ ID NO: 18644 - protein, 824 aa, Homo sapiens
MARQKKMGQSVLRAVFFLVLGLLGHSHGGFPNTISIGGLFMRNTVQEHSAFRFAVQLYNTNQNTTEKPFHLNYHVDHLDSSNSFSVTNAFCSQFSRGVYAIFGFYDQMSMNTLTSFCGALHTSFVTPSFPTDADVQFVIQMRPALKGAILSLLGHYKWEKFVYLYDTERGFSILQAIMEAAVQNNWQVTARSVGNIKDVQEFRRIIEEMDRRQEKRYLIDCEVERINTILEQVVILGKHSRGYHYMLANLGFTDILLERVMHGGANITGFQIVNNENPMVQQFIQRWVRLDEREFPEAKNAPLKYTSALTHDAILVIAEAFRYLRRQRVDVSRRGSAGDCLANPAVPWSQGIDIERALKMVQVQGMTGNIQFDTYGRRTNYTIDVYEMKVSGSRKAGYWNEYERFVPFSDQQISNDSASSENRTIVVTTILESPYVMYKKNHEQLEGNERYEGYCVDLAYEIAKHVRIKYKLSIVGDGKYGARDPETKIWNGMVGELVYGRADIAVAPLTITLVREEVIDFSKPFMSLGISIMIKKPQKSKPGVFSFLDPLAYEIWMCIVFAYIGVSVVLFLVSRFSPYEWHLEDNNEEPRDPQSPPDPPNEFGIFNSLWFSLGAFMQQGCDISPRSLSGRIVGGVWWFFTLIIISSYTANLAAFLTVERMVSPIESAEDLAKQTEIAYGTLDSGSTKEFFRRSKIAVYEKMWSYMKSAEPSVFTKTTADGVARVRKSKGKFAFLLESTMNEYIEQRKPCDTMKVGGNLDSKGYGVATPKGSALRNAVNLAVLKLNEQGLLDKLKNKWWYDKGECGSGGGDSKNACKPCSIETQ

SEQ ID NO: 18645 - protein, 195 aa, Homo sapiens
MLLLINVILTLWVSCANGQVKPCDFPDIKHGGLFHENMRRPYFPVAVGKYYSYYCDEHFETPSGSYWDYIHCTQNGWSPAVPCLRKCYFPYLENGYNQNYGRKFVQGNSTEVACHPGYGLPKAQTTVTCTEKGWSPTPRCIRVRTCSKSDIEIENGFISESSSIYILNKEIQYKCKPGYATADGNSSDMVFCISY

SEQ ID NO: 18646 - protein, 719 aa, Homo sapiens
MYLETRRAIFVFWIFLQVQGTKVCQEAVWEAYRIFLDRIPDTGEYQDWVSICQQETFCLFDIGKNFSNSQEHLDLLQQRIKQRSFPDRKDEISAEKTLGEPGETIVISTDVANVSLGPFPLTPDDTLLNEILDNTLNDTKMPTTERETEFAVLEEQRVELSVSLVNQKFKAELADSQSPYYQELAGKSQLQMQKIFKKLPGFKKIHVLGFRPKKEKDGSSSTEMQLTAIFKRHSAEAKSPASDLLSFDSNKIESEEVYHGTMEEDKQPEIYLTATDLKRLISKALEEEQSLDVGTIQFTDEIAGSLPAFGPDTQSELPTSFAVITEDATLSPELPPVEPQLETVDGAEHGLPDTSWSPPAMASTSLSEAPPFFMASSIFSLTDQGTTDTMATDQTMLVPGLTIPTSDYSAISQLALGISHPPASSDDSRSSAGGEDMVRHLDEMDLSDTPAPSEVPELSEYVSVPDHFLEDTTPVSALQYITTSSMTIAPKGRELVVFFSLRVANMAFSNDLFNKSSLEYRALEQQFTQLLVPYLRSNLTGFKQLEILNFRNGSVIVNSKMKFAKSVPYNLTKAVHGVLEDFRSAAAQQLHLEIDSYSLNIEPADQADPCKFLACGEFAQCVKNERTEEAECRCKPGYDSQGSLDGLEPGLCGPGTKECEVLQGKGAPCRLPDHSENQAYKTSVKKFQNQQNNKVISKRNSELLTVEYEEFNHQDWEGN

SEQ ID NO: 18647 - protein, 923 aa, Homo sapiens
MGTPRAQHPPPPQLLFLILLSCPWIQGLPLKEEEILPEPGSETPTVASEALAELLHGALLRRGPEMGYLPGSDRDPTLATPPAGQTLAVPSLPRATEPGTGPLTTAVTPNGVRGAGPTAPELLTPPPGTTAPPPPSPASPGPPLGPEGGEEETTTTIITTTTVTTTVTSPVLCNNNISEGEGYVESPDLGSPVSRTLGLLDCTYSIHVYPGYGIEIQVQTLNLSQEEELLVLAGGGSPGLAPRLLANSSMLGEGQVLRSPTNRLLLHFQSPRVPRGGGFRIHYQAYLLSCGFPPRPAHGDVSVTDLHPGGTATFHCDSGYQLQGEETLICLNGTRPSWNGETPSCMASCGGTIHNATLGRIVSPEPGGAVGPNLTCRWVIEAAEGRRLHLHFERVSLDEDNDRLMVRSGGSPLSPVIYDSDMDDVPERGLISDAQSLYVELLSETPANPLLLSLRFEAFEEDRCFAPFLAHGNVTTTDPEYRPGALATFSCLPGYALEPPGPPNAIECVDPTEPHWNDTEPACKAMCGGELSEPAGVVLSPDWPQSYSPGQDCVWGVHVQEEKRILLQVEILNVREGDMLTLFDGDGPSARVLAQLRGPQPRRRLLSSGPDLTLQFQAPPGPPNPGLGQGFVLHFKEVPRNDTCPELPPPEWGWRTASHGDLIRGTVLTYQCEPGYELLGSDILTCQWDLSWSAAPPACQKIMTCADPGEIANGHRTASDAGFPVGSHVQYRCLPGYSLEGAAMLTCYSRDTGTPKWSDRVPKCALKYEPCLNPGVPENGYQTLYKHHYQAGESLRFFCYEGFELIGEVTITCVPGHPSQWTSQPPLCKVAYEELLDNRKLEVTQTTDPSRQLEGGNLALAILLPLGLVIVLGSGVYIYYTKLQGKSLFGFSGSHSYSPITVESDFSNPLYEAGDTREYEVSI

SEQ ID NO: 18648 - protein, 596 aa, Homo sapiens
MGPADSWGHHWMGILLSASLCTVWSPPAAAQLTLNANPLDATQSEDVVLPVFGTPRTPQIHGRSRELAKPSIAVSPGTAIEQKDMVTFYCTTKDVNITIHWVSNNLSIVFHERMQLSKDGKILTILIVQREDSGTYQCEARDALLSQRSDPIFLDVKYGPDPVEIKLESGVASGEVVEVMEGSSMTFLAETKSHPPCAYTWFLLDSILSHTTRTFTIHAVSREHEGLYRCLVSNSATHLSSLGTLKVRVLETLTMPQVVPSSLNLVENARSVDLTCQTVNQSVNVQWFLSGQPLLPSEHLQLSADNRTLIIHGLQRNDTGPYACEVWNWGSRARSEPLELTINYGPDQVHITRESASEMISTIEAELNSSLTLQCWAESKPGAEYRWTLEHSTGEHLGEQLIIRALTWEHDGIYNCTASNSLTGLARSTSVLVKVVGPQSSSLSSGAIAGIVIGILAVIAVASELGYFLCIRNARRPSRKTTEDPSHETSQPIPKEEHPTEPSSESLSPEYRNISQLQGRIRVELMQPPDLPEETYETKLPSASRRGNSFSPWKPPPKPLMPPLRLVSTVPKNMESIYEELVNPEPNTYIQINPSV

SEQ ID NO: 18649 - protein, 519 aa, Homo sapiens
MDAVLEPFPADRLFPGSSFLDLGDLNESDFLNNAHFPEHLDHFTENMEDFSNDLFSSFFDDPVLDEKSPLLDMELDSPTPGIQAEHSYSLSGDSAPQSPLVPIKMEDTTQDAEHGAWALGHKLCSIMVKQEQSPELPVDPLAAPSAMAAAAAMATTPLLGLSPLSRLPIPHQAPGEMTQLPVIKAEPLEVNQFLKVTPEDLVQMPPTPPSSHGSDSDGSQSPRSLPPSSPVRPMARSSTAISTSPLLTAPHKLQGTSGPLLLTEEEKRTLIAEGYPIPTKLPLTKAEEKALKRVRRKIKNKISAQESRRKKKEYVECLEKKVETFTSENNELWKKVETLENANRTLLQQLQKLQTLVTNKISRPYKMAATQTGTCLMVAALCFVLVLGSLVPCLPEFSSGSQTVKEDPLAADGVYTASQMPSRSLLFYDDGAGLWEDGRSTLLPMEPPDGWEINPGGPAEQRPRDHLQHDHLDSTHETTKYLSEAWPKDGGNGTSPDFSHSKEWFHDRDLGPNTTIKLS

SEQ ID NO: 18650 - protein, 749 aa, Homo sapiens
MGRAGAAAVIPGLALLWAVGLGSAAPSPPRLRLSFQELQAWHGLQTFSLERTCCYQALLVDEERGRLFVGAENHVASLNLDNISKRAKKLAWPAPVEWREECNWAGKDIGTECMNFVKLLHAYNRTHLLACGTGAFHPTCAFVEVGHRAEEPVLRLDPGRIEDGKGKSPYDPRHRAASVLVGEELYSGVAADLMGRDFTIFRSLGQRPSLRTEPHDSRWLNEPKFVKVFWIPESENPDDDKIYFFFRETAVEAAPALGRLSVSRVGQICRNDVGGQRSLVNKWTTFLKARLVCSVPGVEGDTHFDQLQDVFLLSSRDHRTPLLYAVFSTSSSIFQGSAVCVYSMNDVRRAFLGPFAHKEGPMHQWVSYQGRVPYPRPGMCPSKTFGTFSSTKDFPDDVIQFARNHPLMYNSVLPTGGRPLFLQVGANYTFTQIAADRVAAADGHYDVLFIGTDVGTVLKVISVPKGSRPSAEGLLLEELHVFEDSAAVTSMQISSKRHQLYVASRSAVAQIALHRCAAHGRVCTECCLARDPYCAWDGVACTRFQPSAKRRFRRQDVRNGDPSTLCSGDSSRPALLEHKVFGVEGSSAFLECEPRSLQARVEWTFQRAGVTAHTQVLAEERTERTARGLLLRRLRRRDSGVYLCAAVEQGFTQPLRRLSLHVLSATQAERLARAEEAAPAAPPGPKLWYRDFLQLVEPGGGGSANSLRMCRPQPALQSLPLESRRKGRNRRTHAPEPRAERGPRSATHW

SEQ ID NO: 18651 - protein, 1370 aa, Homo sapiens
MGGKNKKHKAPAAAVVRAAVSASRAKSAEAGIAGEAQSKKPVSRPATAAAAAAGSREPRVKQGPKIYSFNSTNDSSGPANLDKSILKVVINNKLEQRIIGVINEHKKQNNDKGMISGRLTAKKLQDLYMALQAFSFKTKDIEDAMTNTLLYGGDLHSALDWLCLNLSDDALPEGFSQEFEEQQPKSRPKFQSPQIQATISPPLQPKTKTYEEDPKSKPKKEEKNMEVNMKEWILRYAEQQNEEEKNENSKSLEEEEKFDPNERYLHLAAKLLDAKEQAATFKLEKNKQGQKEAQEKIRKFQREMETLEDHPVFNPAMKISHQQNERKKPPVATEGESALNFNLFEKSAAATEEEKGKKKEPHDVRNFDYTARSWTGKSPKQFLIDWVRKNLPKSPNPSFEKVPVGRYWKCRVRVIKSEDDVLVVCPTILTEDGMQAQHLGATLALYRLVKGQSVHQLLPPTYRDVWLEWSDAEKKREELNKMETNKPRDLFIAKLLNKLKQQQQQQQQHSENKRENSEDPEESWENLVSDEDFSALSLESANVEDLEPVRNLFRKLQSTPKYQKLLKERQQLPVFKHRDSIVETLKRHRVVVVAGETGSGKSTQVPHFLLEDLLLNEWEASKCNIVCTQPRRISAVSLANRVCDELGCENGPGGRNSLCGYQIRMESRACESTRLLYCTTGVLLRKLQEDGLLSNVSHVIVDEVHERSVQSDFLLIILKEILQKRSDLHLILMSATVDSEKFSTYFTHCPILRISGRSYPVEVFHLEDIIEETGFVLEKDSEYCQKFLEEEEEVTINVTSKAGGIKKYQEYIPVQTGAHADLNPFYQKYSSRTQHAILYMNPHKINLDLILELLAYLDKSPQFRNIEGAVLIFLPGLAHIQQLYDLLSNDRRFYSERYKVIALHSILSTQDQAAAFTLPPPGVRKIVLATNIAETGITIPDVVFVIDTGRTKENKYHESSQMSSLVETFVSKASALQRQGRAGRVRDGFCFRMYTRERFEGFMDYSVPEILRVPLEELCLHIMKCNLGSPEDFLSKALDPPQLQVISNAMNLLRKIGACELNEPKLTPLGQHLAALPVNVKIGKMLIFGAIFGCLDPVATLAAVMTEKSPFTTPIGRKDEADLAKSALAMADSDHLTIYNAYLGWKKARQEGGYRSEITYCRRNFLNRTSLLTLEDVKQELIKLVKAAGFSSSTTSTSWEGNRASQTLSFQEIALLKAVLVAGLYDNVGKIIYTKSVDVTEKLACIVETAQGKAQVHPSSVNRDLQTHGWLLYQEKIRYARVYLRETTLITPFPVLLFGGDIEVQHRERLLSIDGWIYFQAPVKIAVIFKQLRVLIDSVLRKKLENPKMSLENDKILQIITELIKTENNN

SEQ ID NO: 18652 - protein, 64 aa, Homo sapiens; identical to SEQ ID NO: 18472

SEQ ID NO: 18653 - protein, 121 aa, Homo sapiens
MAPRGRKRKAEAAVVAVAEKREKLANGGEGMEEATVVIEHCTSRVYGRNAAALSQALRLEAPELPVKVNPTKPRRGSFEVTLLRPDGSSAELWTGIKKGPPRKLKFPEPQEVVEELKKYLS

SEQ ID NO: 18654 - protein, 58 aa, Homo sapiens; identical to SEQ ID NO: 11653

SEQ ID NO: 18655 - protein, 278 aa, Homo sapiens; identical to SEQ ID NO: 9817

SEQ ID NO: 18656 - protein, 222 aa, Homo sapiens
MDSAGQDINLNSPNKGLLSDSMTDVPVDTGVAARTPAVEGLTEAEEEELRAELTKVEEEIVTLRQVLAAKERHCGELKRRLGLSTLGELKQNLSRSWHDVQVSSAYVKTSEKLGEWNEKVTQSDLYKKTQETLSQAGQKTSAALSTVGSAISRKLGDMSLRLWVTERTAVTTSLPQRGVVTSPCRIPHLSKPVVASPAAEHTQPSLSITAAALFSGAASQGG

SEQ ID NO: 18657 - protein, 1381 aa, Homo sapiens
MGRHVATSCHVAWLLVLISGCWGQVNRLPFFTNHFFDTYLLISEDTPVGSSVTQLLAQDMDNDPLVFGVSGEEASRFFAVEPDTGVVWLRQPLDRETKSEFTVEFSVSDHQGVITRKVNIQVGDVNDNAPTFHNQPYSVRIPENTPVGTPIFIVNATDPDLGAGGSVLYSFQPPSQFFAIDSARGIVTVIRELDYETTQAYQLTVNATDQDKTRPLSTLANLAIIITDVQDMDPIFINLPYSTNIYEHSPPGTTVRIITAIDQDKGRPRGIGYTIVSGNTNSIFALDYISGVLTLNGLLDRENPLYSHGFILTVKGTELNDDRTPSDATVTTTFNILVIDINDNAPEFNSSEYSVAITELAQVGFALPLFIQVVDKDENLGLNSMFEVYLVGNNSHHFIISPTSVQGKADIRIRVAIPLDYETVDRYDFDLFANESVPDHVGYAKVKITLINENDNRPIFSQPLYNISLYENVTVGTSVLTVLATDNDAGTFGEVSYFFSDDPDRFSLDKDTGLIMLIARLDYELIQRFTLTIIARDGGGEETTGRVRINVLDVNDNVPTFQKDAYVGALRENEPSVTQLVRLRATDEDSPPNNQITYSIVSASAFGSYFDISLYEGYGVISVSRPLDYEQISNGLIYLTVMAMDAGNPPLNSTVPVTIEVFDENDNPPTFSKPAYFVSVVENIMAGATVLFLNATDLDRSREYGQESIIYSLEGSTQFRINARSGEITTTSLLDRETKSEYILIVRAVDGGVGHNQKTGIATVNITLLDINDNHPTWKDAPYYINLVEMTPPDSDVTTVVAVDPDLGENGTLVYSIQPPNKFYSLNSTTGKIRTTHAMLDRENPDPHEAELMRKIVVSVTDCGRPPLKATSSATVFVNLLDLNDNDPTFQNLPFVAEVLEGIPAGVSIYQVVAIDLDEGLNGLVSYRMPVGMPRMDFLINSSSGVVVTTTELDRERIAEYQLRVVASDAGTPTKSSTSTLTIHVLDVNDETPTFFPAVYNVSVSEDVPREFRVVWLNCTDNDVGLNAELSYFITGGNVDGKFSVGYRDAVVRTVVGLDRETTAAYMLILEAIDNGPVGKRHTGTATVFVTVLDVNDNRPIFLQSSYEASVPEDIPEGHSILQLKATDADEGEFGRVWYRILHGNHGNNFRIHVSNGLLMRGPRPLDRERNSSHVLIVEAYNHDLGPMRSSVRVIVYVEDINDEAPVFTQQQYSRLGLRETAGIGTSVIVVQATDRDSGDGGLVNYRILSGAEGKFEIDESTGLIITVNYLDYETKTSYMMNVSATDQAPPFNQGFCSVYITLLNELDEAVQFSNASYEAAILENLALGTEIVRVQAYSIDNLNQITYRFNAYTSTQAKALFKIDAITVRGWGQGAPFLPI

SEQ ID NO: 18658 - protein, 114 aa, Homo sapiens
MSRQANRGTESKKMVAFKMYLGITPSITNWSPAGDEFSLILENNPLVDFVELPDNHSSLIYSNLLCGVLRGALEMVQMAVEAKFVQDTLKGDGVTEIRMRFIRRIEDNLPAGEE

SEQ ID NO: 18659 - protein, 345 aa, Homo sapiens; identical to SEQ ID NO: 5876

SEQ ID NO: 18660 - protein, 191 aa, Homo sapiens
MELKNLEYRPVKVRGCFDHSKELYMMPRTMVDPVREAREGGLISSSTQSGAYVVTPFHCTDLGVTILVNRGFVPRKKVNPETRQKGQIEGEVDLIGMVRLTETRQPFVPENNPERNHWHYRDLEAMARITGAEPIFIDANFQSTVPGGPIGGQTRVTLRNEHLQYIVTWYGLSAATSYLWFKKFLRGTPGV

SEQ ID NO: 18661 - protein, 175 aa, Homo sapiens
MLLILLSVALLAFSSAQDLNEDGGDSEQFLDEERQGPPLGGQQSQPSAGDGNQDDGPQQGPPQQGGQQQQGPPPPQGKPQGPPQQGGQQQQGPPPPQGKPQGPPQQGGHPPPPQGRPQGPPQQGGHPRPPRGRPQGPPQQGGHQQGPPPPPPGKPQGPPPQGGRPQGPPQGQSPQ

SEQ ID NO: 18662 - protein, 439 aa, Homo sapiens
MKLALLLPWACCCLCGSALATGFLYPFSAAALQQHGYPEPGAGSPGSGYASRRHWCHHTVTRTVSCQVQNGSETVVQRVYQSCRWPGPCANLVRTLIRPTYRVSYRTVTVLEWRCCPGFTGSNCDEECMNCTRLSDMSERLTTLEAKVLLLEAAERPSSPDNDLPAPESTPPTWNEDFLPDAIPLAHPVPRQRRPTGPAGPPGQTGPPGPAGPPGSKGDRGQTGEKGPAGPPGLLGPPGPRGLPGEMGRPGPPGPPGPAGNPGPSPNSPQGALYSLQPPTDKDNGDSRLASAIVDTVLAGVPGPRGPPGPPGPPGPRGPPGPPGTPGSQGLAGERGTVGPSGEPGVKGEEGEKAATAEGEGVQQLREALKILAERVLILEHMIGIHDPLASPEGGSGQDAALRANLKMKRGGAQPDGVLAALLGPDPGQKSVDQASSRK

SEQ ID NO: 18663 - protein, 537 aa, Homo sapiens [sequence omitted]

SEQ ID NO: 18664 - protein, 678 aa, Homo sapiens
MEPGGDHRSRSSGGRGGPGPAVASARGRRLPPAGSSGSAEPEEDEGGQDLQLEGGALGSWGSAPLPSSRARGPASSGRKYSDHCEARASRPGKSRIPGRDHRRYYHDHWRLEYLMDFNPARHGMVCMVCGSSLATLKLSTIKRHIRQKHPYSLHWSPREKEVISNSWDAHLGLGACGEAEGLGVQGAEEEEEEEEEEEEEGAGVPACPPKGPGKAPAGGGCRRQRRGGPVAPRARRLRLSASRRAGGSRGLGARRLERRLKESLQNWFRAECLMDYDPRGNRLVCMACGRALPSLHLDDIRAHVLEVHPGSLGLSGPQRSALLQAWGGQPEALSELTQSPPGDDLAPQDLTGKSRDSASAAGAPSSQDLSPPDVKEEAGWVPERPGPAEEEEELEEGEGERAGVPGRSPRGRAHRRHPQERWRLEYLMELDGGRRGLVCGVCGGALASLKMSTIERHIRRRHPGSTRLGGPVQALIAREWSEKAAHLLALGPPRPESPQGPIPPGTAAASDEGGGDEEEEPEEEEEEWGDVPLSPGAPLERPAEEEEDEEDGQEPGGLALPPPPPPPPPPPPRSREQRRNYQPRWRGEYLMDYDGSRRGLVCMVCGGALATLKVSTIKRHILQVHPFSMDFTPEERQTILEAYEEAALRCYGHEGFGPPAPAPRDGGADLKSGAVCRA

SEQ ID NO: 18665 - protein, 1112 aa, Homo sapiens
MPGSVGPVGPRGPQGLQGQQGGAGPTGPPGEPGDPGPMGPIGSRGPEGPPGKPGEDGEPGRNGNPGEVGFAGSPGARGFPGAPGLPGLKGHRGHKGLEGPKGEVGAPGSKGEAGPTGPMGDPGTVGPPGPVGERGAPGNRGFPGSDGLPGPKGAQGERGPVGSSGPKGSQGDPGRPGEPGLPGARGLTGNPGVQGPEGKLGPLGAPGEDGRPGPPGSIGIRGQPGSMGLPGPKGSSGDPGKPGEAGNAGVPGQRGAPGKDGEVGPSGPVGPPGLAGERGEQGPPGPTGFQGLPGPPGPPGEGGKPGDQGVPGDPGAVGPLGPRGERGNPGERGEPGITGLPGEKGMAGGHGPDGPKGSPGPSGTPGDTGPPGLQGMPGERGIAGTPGPKGDRGGIGEKGAEGTAGNDGARGLPGPLGPPGPAGPTGEKGEPGPRGLVGPPGSRGNPGSRGENGPTGAVGFAGPQGPDGQPGVKGEPGEPGQKGDAGSPGPQGLAGSPGPHGPNGVPGLKGGRGTQGPPGATGFPGSAGRVGPPGPAGAPGPAGPLGEPGKEGPPGLRGDPGSHGRVGDRGPAGPPGGPGDKGDPGEDGQPGPDGPPGPAGTTGQRGIVGMPGQRGERGMPGLPGPAGTPGKVGPTGATGDKGPPGPVGPPGSNGPVGEPGPEGPAGNDGTPGRDGAVGERGDRGDPGPAGLPGSQGAPGTPGPVGAPGDAGQRGDPGSRGPIGPPGRAGKRGLPGPQGPRGDKGDHGDRGDRGQKGHRGFTGLQGLPGPPGPNGEQGSAGIPGPFGPRGPPGPVGPSGKEGNPGPLGPIGPPGVRGSVGEAGPEGPPGEPGPPGPPGPPGHLTAALGDIMGHYDESMPDPLPEFTEDQAAPDDKNKTDPGVHATLKSLSSQIETMRSPDGSKKHPARTCDDLKLCHSAKQSGEYWIDPNQGSVEDAIKVYCNMETGETCISANPSSVPRKTWWASKSPDNKPVWYGLDMNRGSQFAYGDHQSPNTAITQMTFLRLLSKEASQNITYICKNSVGYMDDQAKNLKKAVVLKGANDLDIKAEGNIRFRYIVLQDTCSKRNGNVGKTVFEYRTQNVARLPIIDLAPVDVGGTDQEFGVEIGPVCFV

SEQ ID NO: 18666 - protein, 147 aa, Homo sapiens
MADKVRRQRPRRRVCWALVAVLLADLLALSDTLAVMSVDLGSESMKVAIVKPGVPMEIVLNKESRRKTPVIVTLKENERFFGDSAASMAIKNPKATLRYFQHLLGKQADNPHVALYQARFPEHELTFDPQRQTVHFQISSQLQFSPL

SEQ ID NO: 18667 - protein, 364 aa, Homo sapiens
MLQTKDLIWTLFFLGTAVSLQVDIVPSQGEISVGESKFFLCQVAGDAKDKDISWFSPNGEKLTPNQQRISVVWNDDSSSTLTIYNANIDDAGIYKCVVTGEDGSESEATVNVKIFQKLMFKNAPTPQEFREGEDAVIVCDVVSSLPPTIIWKHKGRDVILKKDVRFIVLSNNYLQIRGIKKTDEGTYRCEGRILARGEINFKDIQVIVNVPPTIQARQNIVNATANLGQSVTLVCDAEGFPEPTMSWTKDGEQIEQEEDDEKYIFSDDSSQLTIKKVDKNDEAEYICIAENKAGEQDATIHLKVFAKPKITYVENQTAMELEEQVTLTCEASGDPIPSITWRTSTRNISSEEKASWTRPEKQEV

SEQ ID NO: 18668 - protein, 425 aa, Homo sapiens
MPYVDRQNRICGFLDIEEHENSGKFLRRYFILDTQANCLLWYMDNPQNLAMGAGAVGALQLTYISKVSIATPKQKPKTPFCFVINALSQRYFLQANDQKDMKDWVEALNQASKITVPKGGGLPMTTEVLKSLAAPPALEKKPQVAYKTEIIGGVVVHTPISQNGGDGQEGSEPGSHTILRRSQSYIPTSGCRASTGPPLIKSGYCVKQGNVRKSWKRRFFALDDFTICYFKCEQDREPLRTIFLKDVLKTHECLVKSGDLLMRDNLFEIITSSRTFYVQADSPEDMHSWIKEIGAAVQALKCHPRETSFSRSISLTRPGSSSLSSGPNSILCRGRPPLEEKKALCKAPSVASSWQPWTPVPQAGEKLLPPGDTSEDSLFTPRPGEGSAPGVLPSSRIRHRSEPQHPKEKPFMFNLDDENIRTSDV

SEQ ID NO: 18669 - protein, 645 aa, Homo sapiens
MQEAELRDGEAAAAAASYRVLSRLLGYGEAAPEPGPPPPPPGHGPPPPPFLARPGPRGSRPPQLMVFRNVGRPPEEEDVEAAPEPGPSELLCPRHRCALDPKALPPGLALERTWGPAAGLEAQLAALGLGQPAGPGVKTVGGGCCPCPCPPQPPPPQPQPPAAAPQAGEDPTETSDALLVLEGLESEAESLETNSCSEEELSSPGRGGGGGGRLLLQPPGPELPPVPFPLQDLVPLGRLSRGEQQQQQQQQPPPPPPPPGPLRPLAGPSRKGSFKIRLSRLFRTKSCNGGSGGGDGTGKRPSGELAASAASLTDMGGSAGRELDAGRKPKLTRTQSAFSPVSFSPLFTGETVSLVDVDISQRGLTSPHPPTPPPPPRRSLSLLDDISGTLPTSVLVAPMGSSLQSFPLPPPPPPHAPDAFPRIAPIRAAESLHSQPPQHLQCPLYRPDSSSFAASLRELEKCGWYWGPMNWEDAEMKLKGKPDGSFLVRDSSDPRYILSLSFRSQGITHHTRMEHYRGTFSLWCHPKFEDRCQSVVEFIKRAIMHSKNGKFLYFLRSRVPGLPPTPVQLLYPVSRFSNVKSLQHLCRFRIRQLVRIDHIPDLPLPKPLISYIRKFYYYDPQEEVYLSLKEAQLISKQKQEVEPST

SEQ ID NO: 18670 - protein, 147 aa, Homo sapiens
MDYYRKYAAIFLVTLSVFLHVLHSAPDVQETGFHHVAQAALKLLSSSNPPTKASQSARITDCPECTLQENPFFSQPGAPILQCMGCCFSRAYPTPLRSKKTMLVQKNVTSESTCCVAKSYNRVTVMGGFKVENHTACHCSTCYYHKS

SEQ ID NO: 18671 - protein, 4363 aa, Homo sapiens
MLEGLVAWVLNTYLGKYVNNLNTDQLSVALLKGAVELENLPLKKDALKELELPFEVKAGFIGKVTLQIPFYRPHVDPWVISISSLHLIGAPEKIQDFNDEKEKLLERERKKALLQALEEKWKNDRQQKGESYWYSVTASVVTRIVENIELKIQDVHLRFEDGVTNPSHPFAFGICIKNVSMQNAVNEPVQKLMRKKQLDVAEFSIYWDVDCTLLGDLPQMELQEAMARSMESRSHHYVLEPVFASALLKRNCSKKPLRSRHSPRIDCDIQLETIPLKLSQLQYRQIMEFLKELERKERQVKFRRWKPKVAISKNCREWWYFALNANLYEIREQRKRCTWDFMLHRARDAVSYTDKYFNKLKGGLLSTDDKEEMCRIEEEQSFEELKILRELVHDRFHKQEELAESLREPQFDSPGACPGAPEPGGGSGMLQYLQSWFPGWGGWYGQQTPEGNVVEGLSAEQQEQWIPEEILGTEEFFDPTADASCMNTYTKRDHVFAKLNLQLQRGTVTLLHKEQGTPQMNESAFMQLEFSDVKLLAESLPRRNSSLLSVRLGGLFLRDLATEGTMFPLLVFPNPQKEVGRVSQSFGLQTTSADRSDHYPAADPDGPVFEMLYERNPAHSHFERRLNVSTRPLNIIYNPQAIKKVADFFYKGKVHTSGFGYQSELELRVAEAARRQYNKLKMQTKAEIRQTLDRLLVGDFIEESKRWTVRLDISAPQVIFPDDFKFKNPVLVVVDLGRMLLTNTQDNSRRKSRDGSASEETQFSDDEYKTPLATPPNTPPPESSSSNGEKTPPFSGVEFSEEQLQAHLMSTKMYERYSLSFMDLQIMVGRVKDNWKHVQDIDVGPTHVVEKFNVHLQLERRLIYTSDPKYPGAVLSGNLPDLKIHINEDKISALKNCFALLTTPEMKTSDTQIKEKIFPQEEQRGSLQDSVMNLTQSIVLLEQHTREVLVESQLLLAEFKVNCMQLGVESNGRYISVLKVFGTNAHFVKRPYDAEVSLTVHGLLLVDTMQTYGADFDLLMASHKNLSFDIPTGSLRDSRAQSPVSGPNVAHLTDGATLNDRSATSVSLDKILTKEQESLIKLEYQFVSSECPSMNLDSTLQVISLQVNNLDIILNPETIVELIGFLQKSFPKEKDDLSPQPLMTDFERSFREQGTYQSTYEQNTEVAVEIHRLNLLLLRTVGMANREKYGRKIATASIGGTKVNVSMGSTFDMNGSLGCLQLMDLTQDNVKNQYVVSIGNSVGYENIISDIGYFESVFVRMEDAALTEALSFTFVERSKQECFLNLKMASLHYNHSAKFLKELTLSMDELEENFRGMLKSAATKVTTVLATKTAEYSEMVSLFETPRKTREPFILEENEIYGFDLASSHLDTVKLILNINIESPVVSIPRKPGSPELLVGHLGQIFIQNFVAGDDESRSDRLQVEIKDIKLYSLNCTQLAGREAVGSEGSRMFCPPSGSGSANSQEEAHFTRHDFFESLHRGQAFHILNNTTIQFKLEKIPIERESELTFSLSPDDLGTSSIMKIEGKFVNPVQVVLAKHVYEQVLQTLDNLVYSEDLNKYPASATSSPCPDSPLPPLSTCGESSVERKENGLFSHSSLSNTSQKSLSVKEVKSFTQIQATFCISELQVQLSGDLTLGAQGLVSLKFQDFEVEFSKDHPQTLSIQIALHSLLMEDLLEKNPDSKYKNLMVSRGAPKPSSLAQKEYLSQSCPSVSNVEYPDMPRSLPSHMEEAPNVFQLYQRPTSASRKKQKEVQDKDYPLTPPPSPTVDEPKILVGKSKFDDSLVHINIFLVDKKHPEFSSSYNRVNRSIDVDFNCLDVLITLQTWVVILDFFGIGSTADNHAMRLPPEGILHNVKLEPHASMESGLQDPVNTKLDLKVHSLSLVLNKTTSELAKANVSKLVAHLEMIEGDLALQGSIGSLSLSDLTCHGEFYRERFTTSGEEALIFQTFKYGRPDPLLRREHDIRVSLRMASVQYVHTQRFQAEVVAFIQHFTQLQDVLGRQRAAIEGQTVRDQAQRCSRVLLDIEAGAPVLLIPESSRSNNLIVANLGKLKVKNKFLFAGFPGTFSLQDKESVPSASPTGIPKHSLRKTTSTEEPRGTHSQGQFTMPLAGMSLGSLKSEFVPSTSTKQQGPQPTLSVGQESSSPEDHVCLLDCVVVDLQDMDIFAAERHPREYSKAPEDSSGDLIFPSYFVRQTGGSLLTEPCRLKLQVERNLDKEISHTVPDISIHGNLSSVHCSLDLYKYKLIRGLLENNLGEPIEEFMRPYDLQDPRIHTVLSGEVYTCMCFLIDMVNVSLELKDPKRKEGAGSLARFDFKKCKLLYESFSNQTKSINLVSHSMMAFDTRYAGQKTSPGMTNVFSCIFQPAKNSSTTQGSIQIELHFRSTKDSSCFTVVLNNLRVFLIFDWLLLVHDFLHTPSDIKKQNHVTPSRHRNSSSESAIVPKTVKSGVVTKRSSLPVSNERHLEVKVNVTGTEFVVIEDVSCFDTNAIILKGTTVLTYKPRFVDRPFSGSLFGIEVFSCRLGNEHDTALSIVDPVQIQMELVGNSSYQNSSGLMDAFNSEDFPPVLEIQLQALDIRLSYNDVQLFLAIAKSIPEQANAAVPDSVALESDSVGTYLPGASRVGEEIREGTRHTLDPVLELQLARLQELGFSMDDCRKALLACQGQLKKAASWLFKNAEPLKSLSLASTSRDSPGAVAAPLISGVEIKAESVCICFIDDCMDCDVPLAELTFSRLNFLQRVRTSPEGYAHFTLSGDYYNRALSGWEPFIEPWPCSVSWQQQAASRLHPPRLKLEAKAKPRLDINITSVLIDQYVSTKESWMADYCKDDKDIESAKSEDWMGSSVDPPCFGQTEVKTPKRRQPFVPFALRNHTGCTLWFATLTTTPTRAALSHSGSPGVVPEGNGTFLDDTHNVSEWREVLTGEEIPFEFEARGKLRHRHTHDLRIHQLQVRVNGWEQVSPVSVDKVGTFFRYAAPDKNSSSSTIGSPSSRTNIIHPQVYFSSLPPVRVVFAVTMEGSARKVITVRSALIVRNRLETPMELRLDSPSAPDKPVVLPAIMPGDSFAVPLHLTSWRLQARPKGLGVFFCKAPIHWTNVVKTAEISSSKRECHSMDTEKSRFFRFCVAIKKENYPDYMPSNIFSDSAKQIFRQPGHTIYLLPTVVICNLLPCELDFYVKGMPINGTLKPGKEAALHTADTSQNIELGVSLENFPLCKELLIPPGTQNYMVRMRLYDVNRRQLNLTIRIVCRAEGSLKIFISAPYWLINKTGLPLIFRQDNAKTDAAGQFEEHELARSLSPLLFCYADKEQPNLCTMRIGRGIHPEGMPGWCQGFSLDGGSGVRALKVIQQGNRPGLIYNIGIDVKKGRGRYIDTCMVIFAPRYLLDNKSSHKLAFAQREFARGQGTANPEGYISTLPGSSVVFHWPRNDYDQLLCVRLMDVPNCIWSGGFEVNKNNSFHINMRDTLGKCFFLRVEITLRGATYRISFSDTDQLPPPFRIDNFSKVPVVFTQHGVAEPRLRTEVKPMTSLDYAWDEPTLPPFITLTVKGAGSSEINCNMNDFQDNRQLYYENFIYIAATYTFSGLQEGTGRPVASNKAITCAELVLDVSPKTQRVILKKKEPGKRSQLWRMTGTGMLAHEGSSVPHNPNKPSAARSTEGSAILDIAGLAAVTDNRYEPLMLRKPDRRRSTTQTWSFREGKLTCGLHGLVVQAKGGLSGLFDGAEVVLGPDTSMELLGPVPPEQQFINQKMRPGSGMLSIRVIPDGPTRALQITDFCHRKSSRSYEVDELPVTEQELQKLKNPDTEQELEVLVRLEGGIGLSLINKVPEELVFASLTGINVHYTQLATSHMLELSIQDVQVDNQLIGTTQPFMLYVTPLSNENEVIETGPAVQVNAVKFPSKSALTNIYKHLMITAQRFTVQIEEKLLLKLLSFFGYDQAESEVEKYDENLHEKTAEQGGTPIRYYFENLKISIPQIKLSVFTSNKLPLDLKALKSTLGFPLIRFEDAVINLDPFTRVHPYETKEFIINDILKHFQEELLSQAARILGSVDFLGNPMGLLNDVSEGVTGLIKYGNVGGLIRNVTHGVSNSAAKFAGTLSDGLGKTMDNRHQSEREYIRYHAATSGEHLVAGIHGLAHGIIGGLTSVITSTVEGVKTEGGVSGFISGLGKGLVGTVTKPVAGALDFASETAQAVRDTATLSGPRTQAQRVRKPRCCTGPQGLLPRYSESQAEGQEQLFKLTDNIQDEFFIAVENIDSYCVLISSKAVYFLKSGDYVDREAIFLEVKYDDLYHCLVSKDHGKVYVQVTKKAVSTSSGVSIPGPSHQKPMVHVKSEVLAVKLSQEINYAKSLYYEQQLMLRLSENREQLELDS

SEQ ID NO: 18672 - protein, 345 aa, Homo sapiens
MQVVPLELARGHQVALSSISYVGCSLSVLCLVATLVTFAVLSSVSTIRNQRYHIHANLSFAVLVAQVLLLISFRLEPGTTPCQVMAVLLHYFFLSAFAWMLVEGLHLYSMVIKVFGSEDSKHRYYYGMGWGFPLLICIISLSFAMDSYGTSNNCWLSLASGAIWAFVAPALFVIVVNIGILIAVTRVISQISADNYKIHGDPSAFKLTAKAVAVLLPILGTSWVFGVLAVNGCAVVFQYMFATLNSLQGLFIFLFHCLLNSEARWAKEGRAESLSRMVAGQKGCMITKPSDPLIATPSDPLQGLRWIPVAGRQCSHGSPPAHPPACPPRICLFASLSHSPRDIHC

SEQ ID NO: 18673 - protein, 737 aa, Homo sapiens
MPASAARPRPGPGQPTASPFPLLLLAVLSGPVSGRVPRSVPRTSLPISEADSCLTRFAVPHTYNYSVLLVDPASHTLYVGARDTIFALSLPFSGERPRRIDWMVPEAHRQNCRKKGKKEDVSRFQQVERLESGRGKCPFEPAQRSAAVMAGGVLYAATVKNYLGTEPIITRAVGRAEDWIRTDTLPSWLNAPAFVAAVALSPAEWGDEDGDDEIYFFFTETSRAFDSYERIKVPRVARVCAGDLGGRKTLQQRWTTFLKADLLCPGPEHGRASSVLQDVAVLRPELGAGTPIFYGIFSSQWEGATISAVCAFRPQDIRTVLNGPFRELKHDCNRGLPVVDNDVPQPRPGECITNNMKLRHFGSSLSLPDRVLTFIRDHPLMDRPVFPADGHPLLVTTDTAYLRVVAHRVTSLSGKEYDVLYLGTEDGHLHRAVRIGAQLSVLEDLALFPEPQPVENMKLYHSWLLVGSRTEVTQVNTTNCGRLQSCSECILAQDPVCAWSFRLDECVAHAGEHRGLVQDIESADVSSLCPKEPGERPVVFEVPVATAAHVVLPCSPSSAWASCVWHQPSGVTALTPRRDGLEVVVTPGAMGAYACECQEGGAAHVVAAYSLVWGSQRDAPSRAHTVGAGLAGFFLGILAASLTLILIGRRQQRRRQRELLARDKVGLDLGAPPSGTTSYSQDPPSPSPEDERLPLALAKRGSGFGGFSPPFLLDPCPSPAHIRLTGAPLATCDETSI

SEQ ID NO: 18674 - protein, 966 aa, Homo sapiens
MASVAWAVLKVLLLLPTQTWSPVGAGNPPDCDSPLASALPRSSFSSSSELSSSHGPGFSRLNRRDGAGGWTPLVSNKYQWLQIDLGERMEVTAVATQGGYGSSDWVTSYLLMFSDGGRNWKQYRREESIWGFPGNTNADSVVHYRLQPPFEARFLRFLPLAWNPRGRIGMRIEVYGCAYKSEVVYFDGQSALLYTLDKKPLKPIRDVISLKFKAMQSNGILLHREGQHGNHITLELIKGKLVFFLNSGNAKLPSTIAPVTLTLGSLLDDQHWHSVLIELLDTQVNFTVDKHTHHFQAKGDSSNLDLNFEISFGGILSPGRSRAFTRKSFHGCLENLYYNGVDVTELAKKHKPQILMMGNVSFSCPQPQTVPVTFLSSRSYLALPGNSGEDKVSVTFQFRTWNRAGHLLFGELQRGSGSFVLFLKDGKLKLSLFQAGQSPRNVTAGAGLNDGQWHSVSFSAKWSHMNVVVDDDTAVQPLVAVLIDSGDTYYFGALYEQSCEAHKHRGNPSGLYYIDADGSGPLGPFLVYCNMTDSAWTVVRHGGPDAVTLRGAPSGHPLSAVSFAYAAGAGQLRAAVNLAERCEQRLALRCGTARRPDSRDGTPLSWWVGRTNETHTSWGGSLPDAQKCTCGLEGNCIDSQYYCNCDAGQNEWTSDTIVLSQKEHLPVTQIVMTDTGQPHSEADYTLGPLLCRGDKSFWNSASFNTETSYLHFPAFHGELTADVCFFFKTTVSSGVFMENLGITDFIRIELRAPTEVTFSFDVGNGPCEVTVQSPTPFNDNQWHHVRAERNVKGASLQVDQLPQKMQPAPADGHVRLQLNSQLFIGGTATRQRGFLGCIRSLQLNGVALDLEERATVTPGVEPGCAGHCSTYGHLCRNGGRCREKRRGVTCDCAFSAYDGPFCSNEISAYFATGSSMTYHFQEHYTLSENSSSLVSSLHRDVTLTREMITLSFRTTRTPSLLLKFAD

SEQ ID NO: 18675 - protein, 92 aa, Homo sapiens
MKLCVTVLSLLMLVAAFCSPALSAPMGSDPPTACCFSYTARKLPRNFVVDYYETSSLCSQPAVVFQTKRSKQVCADPSESWVQEYVYDLELN

SEQ ID NO: 18676 - protein, 488 aa, Homo sapiens
MGDRGSSRRRRTGSRPSSHGGGGPAAAEEEVRDAAAGPDVGAAGDAPAPAPNKDGDAGVGSGHWELRCHRLQDSLFSSDSGFSNYRGILNWCVVMLILSNARLFLENLIKYGILVDPIQVVSLFLKDPYSWPAPCLVIAANVFAVAAFQVEKRLAVGALTEQAGLLLHVANLATILCFPAAVVLLVESITPVGSLLALMAHTILFLKLFSYRDVNSWCRRARAKAASAGKKASSAAAPHTVSYPDNLTYRDLYYFLFAPTLCYELNFPRSPRIRKRFLLRRILEMLFFTQLQVGLIQQWMVPTIQNSMKPFKDMDYSRIIERLLKLAVPNHLIWLIFFYWLFHSCLNAVAELMQFGDREFYRDWWNSESVTYFWQNWNIPVHKWCIRHFYKPMLRRGSSKWMARTGVFLASAFFHEYLVSVPLRMFRLWAFTGMMAQIPLAWFVGRFFQGNYGNAAVWLSLIIGQPIAVLMYVHDYYVLNYEAPAAEA

SEQ ID NO: 18677 - protein, 136 aa, Homo sapiens; identical to SEQ ID NO: 7651

SEQ ID NO: 18678 - protein, 571 aa, Homo sapiens
MNPLFGPNLFLLQQEQQGLAGPLGDSLGGDHFAGGGDLPPAPLSPAGPAAYSPPGPGPAPPAAMALRNDLGSNINVLKTLNLRFRCFLAKVHELERRNRLLEKQLQQALEEGKQGRRGLGRRDQAVQTGFVSPIRPLGLQLGARPAAVCSPSARVLGSPARSPAGPLAPSAASLSSSSTSTSTTYSSSARFMPGTIWSFSHARRLGPGLEPTLVQGPGLSWVHPDGVGVQIDTITPEIRALYNVLAKVKRERDEYKRRWEEEYTVRIQLQDRVNELQEEAQEADACQEELALKVEQLKAELVVFKGLMSNNLSELDTKIQEKAMKVDMDICRRIDITAKLCDVAQQRNCEDMIQMFQKKLSLHLSPIKVPSMGGRKRERKAAVEEDTSLSESEGPRQPDGDEEESTALSINEEMQRMLNQLREYDFEDDCDSLTWEETEETLLLWEDFSGYAMAAAEAQGEQQEDSLEKVIKDTESLFKTREKEYQETIDQIELELATAKNDMNRHLHEYMEMCSMKRGLDVQMETCRRLITQSGDRKSPAFTAVPLSDPPPPPSEAEDSDRDVSSDSSMR

SEQ ID NO: 18679 - protein, 176 aa, Homo sapiens [sequence omitted]

SEQ ID NO: 18680 - protein, 1888 aa, Homo sapiens
MFRQFYLWTCLASGIILGSLFEICLGQYDDDCKLARGGPPATIVAIDEESRNGTILVDNMLIKGTAGGPDPTIELSLKDNVDYWVLMDPVKQMLFLNSTGRVLDRDPPMNIHSIVVQVQCINKKVGTIIYHEVRIVVRDRNDNSPTFKHESYYATVNELTPVGTTIFTGFSGDNGATDIDDGPNGQIEYVIQYNPDDPTSNDTFEIPLMLTGNIVLRKRLNYEDKTRYFVIIQANDRAQNLNERRTTTTTLTVDVLDGDDLGPMFLPCVLVPNTRDCRPLTYQAAIPELRTPEELNPIIVTPPIQAIDQDRNIQPPSDRPGILYSILVGTPEDYPRFFHMHPRTAELSLLEPVNRDFHQKFDLVIKAEQDNGHPLPAFAGLHIEILDENNQSPYFTMPSYQGYILESAPVGATISDSLNLTSPLRIVALDKDIEDTKDPELHLFLNDYTSVFTVTQTGITRYLTLLQPVDREEQQTYTFSITAFDGVQESEPVIVNIQVMDANDNTPTFPEISYDVYVYTDMRPGDSVIQLTAVDADEGSNGEITYEILVGAQGDFIINKTTGLITIAPGVEMIVGRTYALTVQAADNAPPAERSTGILTLGKALDRESTDRYILIITASDGRPDGTSTATVNIVVTDVNDNAPVFDPYLPRNLSVVEEEANAFVGQVKATDPDAGINGQVHYSLGNFNNLFRITSNGSIYTAVKLNREVRDYYELVVVATDGAVHPRHSTLTLAIKVLDIDDNSPVFTNSTYTVLVEENLPAGTTILQIEAKDVDLGANVSYRIRSPEVKHFFALHPFTGELSLLRSLDYEAFPDQEASITFLVEAFDIYGTMPPGIATVTVIVKDMNDYPPVFSKRIYKGMVAPDAVKGTPITTVYAEDADPPGLPASRVRYRVDDVQFPYPASIFEVEEDSGRVITRVNLNEEPTTIFKLVVVAFDDGEPVMSSSATVKILVLHPGEIPRFTQEEYRPPPVSELATKGTMVGVISAAAINQSIVYSIVSGNEEDTFGINNITGVIYVNGPLDYETRTSYVLRVQADSLEVVLANLRVPSKSNTAKVYIEIQDENNHPPVFQKKFYIGGVSEDARMFTSVLRVKATDKDTGNYSVMAYRLIIPPIKEGKEGFVVETYTGLIKTAMLFHNMRRSYFKFQVIATDDYGKGLSGKADVLVSVVNQLDMQVIVSNVPPTLVEKKIEDLTEILDRYVQEQIPGAKVVVESIGARRHGDAFSLEDYTKCDLTVYAIDPQTNRAIDRNELFKFLDGKLLDINKDFQPYYGEGGRILEIRTPEAVTSIKKRGESLGYTEGALLALAFIIILCCIPAILVVLVSYRQVFKGRQAECTKTARIQAALPAAKPAVPAPAPVAAPPPPPPPPPGAHLYEELGDSSILSSLFLLYHFQQSRGNNSVSEDRKHQQVVMPFSSNTIEAHKSAHVDGSLKSNKLKSARKFTFLSDEDDLSAHNPLYKENISQVSTNSDISQRTDFVDPFSPKIQAKSKSLRGPREKIQRLWSQSVSLPRRLMRKVPNRPEIIDLQQWQGTRQKAENENTGICTNKRGSSNPLLTTEEANLTEKEEIRQGETLMIEGTEQLKSLSSDSSFCFPRPHFSFSTLPTVSRTVELKSEPNVISSPAECSLELSPSRPCVLHSSLSRRETPICMLPIETERNIFENFAHPPNISPSACPLPPPPPISPPSPPPAPAPLAPPPDISPFSLFCPPPSPPSIPLPLPPPTFFPLSVSTSGPPTPPLLPPFPTPLPPPPPSIPCPPPPSASFLSTECVCITGVKCTTNLMPAEKIKSSMTQLSTTTVCKTDPQREPKGILRHVKNLAELEKSVANMYSQIEKNYLRTNVSELQTMCPSEVTNMEITSEQNKGSLNNIVEGTEKQSHSQSTSL

SEQ ID NO: 18681 - protein, 114 aa, Homo sapiens
MGPGLLHWMALCLLGTGHGDAMVIQNPRYQVTQFGKPVTLSCSQTLNHNVMYWYQQKSSQAPKLLFHYYDKDFNNEADTPDNFQSRRPNTSFCFLDIRSPGLGDAAMYLCATSR

SEQ ID NO: 18682 - protein, 198 aa, Homo sapiens
VSSLLVLTLLLYTALWWSATPTEGACAPGKPTLVCSRAVGSWSYSQQRRQRVCSEEGPPKTDLMAFSPSLPLGLNKEEEGERQEPGSNHPGQPRQPNPDWRYSASLRAGMHSSVHLEEAGILRAGPGGPDQQWPTVSSATPEPEAGEVSPPVGAGVNSNSWTFKYGPGNPKQSGPEPKKQTQVSFLLRRKGEASQPRQ
